United States Patent Application Publication US 2006/0150283 A1 - sequence listing, part 16

SEQ ID NO: 62540 - DNA, 1148 bp, Triticum aestivum
  misc_feature (1)..(1148): Ceres Seq. ID no. 12615238
atcgaaacctccaccaactctgacgcacgttgattgagcgagagccacttggatcaccatgaccgccacctcgcggccacagcatcccaacgggagcctagccccggcctccgacggcggcgagtccttcgccaagttcttcgagtgctggatcttggagcagtcccgtgacctggccgcgctccgcgccgcggccacggcgcggcccgacgacgctgacctccggcgcctcgtcgatcgtgtcctcggccactacgagcactactaccgcgccaagtccgcggccgcctccgccgatgtgctccccatgttcgcgccctcgtggatctccgccaccgagagcctctacctctggtgcggcggctggcgccccacttccgcgatccagctgctctactccaagtccggcctgcagctcgaggcccagctcccggccttcctcgacggcggcagcctcggggacggtgacctgggcggcctctccgcggagcagctccaggccgccgaccagctgcagcgccgcaccatccggagggaacgggagatcgaggaggccgccgccggcgcgcaggagtcgttggcgacgacgaagatggtggagctcgccggaaagggagggatggacgcggcggaggggatggagctggagatggatgccaaggcggaggcgatgaagcgcgtgctggagatggcggacgggctgaggctggagacgctgcgcggcgtggtggggctgctccggcctgcccaggccgtgcacttcctcgtggccgccgcggagctccacctcgccgtgcacaagttcggccggcgcaaggacggcgccgcggcggcggagtgagcctgcaggctactggtggcgcgcgcaagtggttgctctgctccgcgcaacgctcgtcgtctagctagctccgagctgccttcgttttgcctggtcaacgcgaggtgtcgcgataagctttgaccgtgatccccttctgtttggtcagcatgtgcgttctgccattgtgtgaaacctgtggtaacttgtacgaagtgggctagctacttgtgtatgtataatgcacaagctcatgccatggtggtttagctacttgtatgtatgtgtaatgcattattatggaaaatggaggcgtaaaggggtggcc

SEQ ID NO: 62541 - protein, 260 aa, Triticum aestivum; identical to SEQ ID NO: 52060
  peptide (1)..(260): Ceres Seq. ID no. 12615239

SEQ ID NO: 62542 - protein, 177 aa, Triticum aestivum; identical to SEQ ID NO: 52061
  peptide (1)..(177): Ceres Seq. ID no. 12615240

SEQ ID NO: 62543 - DNA, 1463 bp, Triticum aestivum
  misc_feature (1)..(1463): Ceres Seq. ID no. 14302314
ccgtctccccccacagaaagtgagaacgccaagagcgtcaagctgagggaaagatgagggagctggtctcctcctccacctcctcccccaccgcggccctcgtcgccgccggccacgcggcgctccggggatggtgggaggaggtcaacgagtcgccggcgtggcaggacggcgccttcttctccctcaccgccgcctacgccctcgtctccgccgtcgcgctgattcagctggtgaggatccagcgcagagtgcccgagttcggctggaccacgcagaaggtgttccacctcatgaacttcgtcgtcaatggggttcgtgccgttgtattcggattccatgcctatgtcttcctcctccaaacaaaagtttataagttggtgttactagacctccccggcttgttgttcttctcggcctacaccttacttgttcttttctgggcagaaatatatcatcaggctaggagtctccccaccgataagttaaggattatatacctagccgttaatagcatcgtatatgcaattcagatctgtatttgggtgtaccttggaataaacgacaatgcgttggttgagctggtgagcaaaatcttcatcgtatctgtctccgctgtggcccttcttggtttcgcagtatatggtggaaggttgtttgtcttgctgagacgtttccccattgaatcaaaggggcgaaaaaagaagctttatgaggttgggactgtgacgacaatctgctgcacctgtttcctgataagatgcatcgtggtggccgtatctgcatttgatgctgatgtttctttggaggttttagatcatccaatcctagatttcttctattatatgttgacagagatactgccttccgcgctggtccttttcatccttcggaagcttccacctaagcgagtatcggcgcaatatcaccctattaactagaggtttttgtgcttatgtatgatgttatgcttagaataatggatgaacttggaattgcccaaaattttacatgtctggtgcgagctgaatgctggtgtttgagctgtgtgttttccaaaatcatcgaagtgttgtcgatggatcatgcaatgtgcagtccaggggccctataaaagtgaattttccgtcttctgcttgttctgtttctggtggaatttggttgagagccttgctctagtagaggagaaaatcctagtggattccctgatgtttatccgagtcgttttgtgattgcacttgccatgtttaccatcagagtgttgctggttatgccgactggagcttaatatttgtaaaatgttaccagtctcttgaattatgtgtgtattgtagagggcctcaaaagtcatatttgtaagtgtaactggtttggagtagatgatgtcctgcgcgttgccaaatttcatttcaagaatgtgagaaatacttggcatgattgcaatagtatttgtaatcgtactg

SEQ ID NO: 62544 - protein, 295 aa, Triticum aestivum
  peptide (1)..(295): Ceres Seq. ID no. 14302315
MRELVSSSTSSPTAALVAAGHAALRGWWEEVNESPAWQDGAFFSLTAAYALVSAVALIQLVRIQRRVPEFGWTTQKVFHLMNFVVNGVRAVVFGFHAYVFLLQTKVYKLVLLDLPGLLFFSAYTLLVLFWAEIYHQARSLPTDKLRIIYLAVNSIVYAIQICIWVYLGINDNALVELVSKIFIVSVSAVALLGFAVYGGRLFVLLRRFPIESKGRKKKLYEVGTVTTICCTCFLIRCIVVAVSAFDADVSLEVLDHPILDFFYYMLTEILPSALVLFILRKLPPKRVSAQYHPIN

SEQ ID NO: 62545 - protein, 215 aa, Triticum aestivum
  peptide (1)..(215): Ceres Seq. ID no. 14302316
MNFVVNGVRAVVFGFHAYVFLLQTKVYKLVLLDLPGLLFFSAYTLLVLFWAEIYHQARSLPTDKLRIIYLAVNSIVYAIQICIWVYLGINDNALVELVSKIFIVSVSAVALLGFAVYGGRLFVLLRRFPIESKGRKKKLYEVGTVTTICCTCFLIRCIVVAVSAFDADVSLEVLDHPILDFFYYMLTEILPSALVLFILRKLPPKRVSAQYHPIN

SEQ ID NO: 62546 - DNA, 1344 bp, Triticum aestivum
  misc_feature (1)..(1344): Ceres Seq. ID no. 13654928
actaaaaaagacttggccttttctattccaagtctctcttcccccatctctgcttctcttcttctcctgcacagtccacactgttcatctcctcttcgatccccaaatcccaagctgaccaaccaagaccccgccccgcatggagtggacggccccgaagtccaccccgctctccccgccccacctcctctgggactggggcgacgccgccgcgccgggctcctccggcgaggcggcggggaggcgcgggaaggagaagcgggccaggggggagggggccggcggaggaggaggaggaggaggagggggcgtgaggtgccaggtggagggctgcggggtcgagctccgcgacgcgaaggagtaccaccggaagcaccgggtctgcgaggcccacaccaagtccccccgcgtcgtcgtcgccggccaggagcgccgcttctgccagcagtgcagccggttccatgggctgtcggagttcgaccagaagaagaggagctgccggaggcgactgtccgatcacaatgctcggcgccggaagccacagccggacgcattctcctttgcaccggcaaggctcccgtcgtcattgatgtttgatgatagacggcaaataagttttgtctggaataaagatccacttagtcatggaaggcctttcccatgttctccatgggacagcccatctgacttcaagctcccgcaagtgaaggaaataagagaagtatcaatcaatgggcaagttcattttgataaatctcatctacccaatgctgttccagcactgagtcatgacatacctgagctgctaccaatgaaaggtccggacgcatctgtaaccgcttcgaaattaggtggagcaccggatcttcagcgtgctctctctcttctgtcagctagttcttgtggattacctgatcctgtacagcaagcatcttgtctcgtccaattcactggtgctagccaaaacagccggggcccttcaccacatggaggtagccctccgtcggtgtcctgtgccgaaggacagcccatggcgccatcgcctcagtttgtccgtttcaccatggacggcgccagcagtggctatgaatccactttcttcggcgtaaaccggatgaattgatgcgcgagacacacaagcttctgtacgattttggatctacagccaggaagagcttatgcaagaactgctcctgtcaagaaaatctcactgttcatgttacctacatactcattggtcaccttgttatttttccattgtacaaccctgctgccatttgttggctcttttgaaaccattgttgatgaatctggacatgatttgtttcatgaagtgatgacttg

SEQ ID NO: 62547 - protein, 327 aa, Triticum aestivum
  peptide (1)..(327): Ceres Seq. ID no. 13654929
MEWTAPKSTPLSPPHLLWDWGDAAAPGSSGEAAGRRGKEKRARGEGAGGGGGGGGGGVRCQVEGCGVELRDAKEYHRKHRVCEAHTKSPRVVVAGQERRFCQQCSRFHGLSEFDQKKRSCRRRLSDHNARRRKPQPDAFSFAPARLPSSLMFDDRRQISFVWNKDPLSHGRPFPCSPWDSPSDFKLPQVKEIREVSINGQVHFDKSHLPNAVPALSHDIPELLPMKGPDASVTASKLGGAPDLQRALSLLSASSCGLPDPVQQASCLVQFTGASQNSRGPSPHGGSPPSVSCAEGQPMAPSPQFVRFTMDGASSGYESTFFGVNRMN

SEQ ID NO: 62548 - protein, 198 aa, Triticum aestivum
  peptide (1)..(198): Ceres Seq. ID no. 13654930
TKKDLAFSIPSLSSPISASLLLLHSPHCSSPLRSPNPKLTNQDPAPHGVDGPEVHPALPAPPPLGLGRRRRAGLLRRGGGEAREGEAGQGGGGRRRRRRRRRGREVPGGGLRGRAPRREGVPPEAPGLRGPHQVPPRRRRRPGAPLLPAVQPVPWAVGVRPEEEELPEATVRSQCSAPEATAGRILLCTGKAPVVIDV

SEQ ID NO: 62549 - protein, 177 aa, Triticum aestivum
  peptide (1)..(177): Ceres Seq. ID no. 13654931
MFDDRRQISFVWNKDPLSHGRPFPCSPWDSPSDFKLPQVKEIREVSINGQVHFDKSHLPNAVPALSHDIPELLPMKGPDASVTASKLGGAPDLQRALSLLSASSCGLPDPVQQASCLVQFTGASQNSRGPSPHGGSPPSVSCAEGQPMAPSPQFVRFTMDGASSGYESTFFGVNRMN

SEQ ID NO: 62550 - DNA, 1219 bp, Triticum aestivum
  misc_feature (1)..(1219): Ceres Seq. ID no. 15175441
aaggcagcagcccatagcccaagctcacgacacgcagcgacgcagcgctcagcagcggagcagccgccaccgggcaccgtcacaacagccgccgtccgccgcggtgccggccaccggccaccggcacgcgcatcagccgccacccacacagcagcgcggcgactcggcgagtcgtccaaagccgacccacgacggcacgaccctagcggcacacagcagcggcgagccagcgacccagatcccgcagcatcttcgcataactgcagttcggcggtgccgcttggggattctgttgcccggcgatgtcggcgacgccgctccccccaccgccgccggccgacggcccggcggcactcccgcccccgccggggacggacatgacggggatctgcttccgcgaccagctgtggctcaacacctacccgctggaccgcaacctcgtcttcgactacttcgccctctcccccttctacgacatcacctgcaacaacgagtccctccgctcgcgccaaatccaccccctcgacatgtcccagctcacgaagatgaccgggttggagtacgtgctgagcgaagtgatggagccgcacctgttcgtgatgcgcaagcagaagaggacgaactccgagaagtctgaccccctgctcgcctactacatcctcgacggttccatctaccaggcgccgctgcttggcagcgttttcgcctcccgcataagtagggctatgcatcacatatcaaaagcattttcaacggcatgctcaaaattggagaagattggtaatgcggaaacagaggctgatgcggcagcttctgaatcaaaggcccagaaggaaacaattgacttgaaggagttgaaacgagtggatcacatcctcatgtctttgcaacggaagctgcctcctgctcctccccctccaccctttccggatggttatgtcccatcagaacaagagaaagggccagatgatctgttggcctcggaggcattgcctcctgcaattgaccccatcattgatcaagggccagcaaaaagaccaagatttcaatgagattgtgccgttgatcaagtaaaattaccgccacactaatgttatgttgtattgcaaatcataagtagaaatttgtaattcctgagctgtgaaggtgcagaccgttttctgaatgtacacttcgactgatccttgatagctctgtaaggcccagtttgtggttttct

SEQ ID NO: 62551 - protein, 249 aa, Triticum aestivum
  peptide (1)..(249): Ceres Seq. ID no. 15175442
MSATPLPPPPPADGPAALPPPPGTDMTGICFRDQLWLNTYPLDRNLVFDYFALSPFYDITCNNESLRSRQIHPLDMSQLTKMTGLEYVLSEVMEPHLFVMRKQKRTNSEKSDPLLAYYILDGSIYQAPLLGSVFASRISRAMHHISKAFSTACSKLEKIGNAETEADAAASESKAQKETIDLKELKRVDHILMSLQRKLPPAPPPPPFPDGYVPSEQEKGPDDLLASEALPPAIDPIIDQGPAKRPRFQ

SEQ ID NO: 62552 - protein, 224 aa, Triticum aestivum
  peptide (1)..(224): Ceres Seq. ID no. 15175443
MTGICFRDQLWLNTYPLDRNLVFDYFALSPFYDITCNNESLRSRQIHPLDMSQLTKMTGLEYVLSEVMEPHLFVMRKQKRTNSEKSDPLLAYYILDGSIYQAPLLGSVFASRISRAMHHISKAFSTACSKLEKIGNAETEADAAASESKAQKETIDLKELKRVDHILMSLQRKLPPAPPPPPFPDGYVPSEQEKGPDDLLASEALPPAIDPIIDQGPAKRPRFQ

SEQ ID NO: 62553 - protein, 211 aa, Triticum aestivum
  peptide (1)..(211): Ceres Seq. ID no. 15175444
RQQPIAQAHDTQRRSAQQRSSRHRAPSQQPPSAAVPATGHRHAHQPPPTQQRGDSASRPKPTHDGTTLAAHSSGEPATQIPQHLRITAVRRCRLGILLPGDVGDAAPPTAAGRRPGGTPAPAGDGHDGDLLPRPAVAQHLPAGPQPRLRLLRPLPLLRHHLQQRVPPLAPNPPPRHVPAHEDDRVGVRAERSDGAAPVRDAQAEEDELREV

SEQ ID NO: 62554 - DNA, 956 bp, Triticum aestivum
  misc_feature (1)..(956): Ceres Seq. ID no. 13654885
cctaaccaaaaagtcactggctagcttattcacatctcttttcttgagacattctcttgatccacatatttacctacctctctagctagaaacaaagcttgctcggcaacaatggctgcaggtggagcttctcttattgctgctgctgttttctccgtgctgatcatgtcttccctgggggatctgatgcctttatgcagcgattgcgagacgctgtgccgtaccaactgcaccgcggaggctgaagccaattgcgccaattactgcaacgacacccaagcaacagcagggtactgcgaaggttgcatgggcgcctacttcgaccagcactgcaatcccgagtgtctcaaaaattgcagcaaccgctgcaagaagaaggtgcttccgaggcctttatgcagcgactgcgacacggtatgcagtaccaagtgcgctgaggagcttgaaaccacctgcagccaagactgcgaccccaggcgcagcggtcaggcggcctgccagcgtcagctcttcaagcggtgcaacgcagagggtacctgctgcagtagcgacggcacatgcacttgtgactgcgagaccgaagctcgaaagcagtgcgtgggcgtcagcgacaactccaataattgcgaagtttgcaagcgcagccagttcgaccaggactgtcatcccacctgtaacaccgattgcaatggcaactgcaagaagaagaaagggtgccgcgggcacgcatagggaaaacatgtaactgggggccctgcattgcgtaggaaataacatggctccttgtagtcgtgcgtagatttcgatttctgtaaacgccacgacctggttttgtgggatggcacaggaggagtatgggtggtggcgcatcacccccagcttttggccgaggatttatattctgtatttctatttatgttttctgaacaatgaatcacaatgtgaaattatggttg

SEQ ID NO: 62555 - protein, 206 aa, Triticum aestivum
  peptide (1)..(206): Ceres Seq. ID no. 13654886
MAAGGASLIAAAVFSVLIMSSLGDLMPLCSDCETLCRTNCTAEAEANCANYCNDTQATAGYCEGCMGAYFDQHCNPECLKNCSNRCKKKVLPRPLCSDCDTVCSTKCAEELETTCSQDCDPRRSGQAACQRQLFKRCNAEGTCCSSDGTCTCDCETEARKQCVGVSDNSNNCEVCKRSQFDQDCHPTCNTDCNGNCKKKKGCRGHA

SEQ ID NO: 62556 - protein, 188 aa, Triticum aestivum
  peptide (1)..(188): Ceres Seq. ID no. 13654887
MSSLGDLMPLCSDCETLCRTNCTAEAEANCANYCNDTQATAGYCEGCMGAYFDQHCNPECLKNCSNRCKKKVLPRPLCSDCDTVCSTKCAEELETTCSQDCDPRRSGQAACQRQLFKRCNAEGTCCSSDGTCTCDCETEARKQCVGVSDNSNNCEVCKRSQFDQDCHPTCNTDCNGNCKKKKGCRGHA

SEQ ID NO: 62557 - protein, 181 aa, Triticum aestivum
  peptide (1)..(181): Ceres Seq. ID no. 13654888
MPLCSDCETLCRTNCTAEAEANCANYCNDTQATAGYCEGCMGAYFDQHCNPECLKNCSNRCKKKVLPRPLCSDCDTVCSTKCAEELETTCSQDCDPRRSGQAACQRQLFKRCNAEGTCCSSDGTCTCDCETEARKQCVGVSDNSNNCEVCKRSQFDQDCHPTCNTDCNGNCKKKKGCRGHA

SEQ ID NO: 62558 - DNA, 987 bp, Triticum aestivum
  misc_feature (1)..(987): Ceres Seq. ID no. 15174990
atcctcttccactccgccgcaaccccttccttcctcaacacccgcaacatccttgctcgtcgtttcctccgcctctctctcctctcctcacgcgctctcccctcccctctgaagccgcgactcttctgaaccctaaaccgtagatccccgcgcagcaggagcgagatttactcccgcaagcatgagtcgccacccgagcactaagtgggcgcagaggctggacaaggtttacttgacgattgagctgcccgacgcaaaggatgtcaagctcaacctgaggcctgatggccatttcaacttctcagcaaaggcccctgctgatgacatgcagtatgagcttgaccttgagctctttgatgctgtcagtgttgaggagagccaagcggctgttgccccgagggctatatgctaccttgtcaagaaagctgagggcaagtggtggcctaggctgctcaagaaggaaggtaggccgcctgtgttcctgaaggttgactgggataaatggcaagatgaggatgatgaagatgccggatttggtgactttggtgatatggacttctcgaagctggacatgggaggtggtgatgacgatgatgatgagattgaggaggaggatgaagacaatgtggttgacagtgctaacaaaggtgatgtagatgctgagagagagccggggagcaagggaggggaagctccatcagctgctggtgaagaagcaaagccataagattggaggcgatggcatcggtcgttacaacttatgatgatcatgagatctgtttctagacgcgaggtagaattttggtgtgcccctgaagttgggtagtagaggtggtgttggtagcttttggcttggggctatctgtagtgttcaacgttattctgcaccttttgtttactagtaaattttatgtgctttgcacgtcacttaaatatataaaagcatgggaaaatacatttgaatatgtatttcctttcctagaatct

SEQ ID NO: 62559 - protein, 181 aa, Triticum aestivum
  peptide (1)..(181): Ceres Seq. ID no. 15174991
MSRHPSTKWAQRLDKVYLTIELPDAKDVKLNLRPDGHFNFSAKAPADDMQYELDLELFDAVSVEESQAAVAPRAICYLVKKAEGKWWPRLLKKEGRPPVFLKVDWDKWQDEDDEDAGFGDFGDMDFSKLDMGGGDDDDDEIEEEDEDNVVDSANKGDVDAEREPGSKGGEAPSAAGEEAKP

SEQ ID NO: 62560 - protein, 133 aa, Triticum aestivum
  peptide (1)..(133): Ceres Seq. ID no. 15174992
MQYELDLELFDAVSVEESQAAVAPRAICYLVKKAEGKWWPRLLKKEGRPPVFLKVDWDKWQDEDDEDAGFGDFGDMDFSKLDMGGGDDDDDEIEEEDEDNVVDSANKGDVDAEREPGSKGGEAPSAAGEEAKP

SEQ ID NO: 62561 - DNA, 1060 bp, Triticum aestivum
  misc_feature (1)..(1060): Ceres Seq. ID no. 12615329
agcagcaaggaatcgagatccaatcacctcccctcccctccactcctcccccgcggcaagagagatccagccagatccgtccagttccatggcgaccgccggcaacgccccccgctcccgcaagcgcgtcgaggccaccgtcctcaagcgcgcgcgcgacggaagcgccttcacccgctgcgaggcgtgcaacaaggacgtagccatcgtcctcatcgacctgcacagctgcagcctcgactccaagatacgcctcagcctcgagtcgcaggtggtggagaaggccgtcgagatccaggagaagaagaggaagacgccctccgctgccgccggaggcaaggggaagaagaagagcaaggcagacggagatggtgccaagaagccaaaggcaaagcgcccaccaactgccttcttcctcttcatgaaggacttcagggttgagttcaaggcctctcaccctgacgagaagggtgttgccgccgttggcaaggcagcaggggagaagtggaaatccatgaccgaagaggagaagaagccctacaatgaccaggccaaggagctcaaggcccagtttgccaatggcgagggcagcgcggagaacaatgtgggagatgaggagaaggcagatgcggatgcagaggaggtggaggatgcggagcaggaggtggataagccagaagatgccccagaggacgaagaggaggaagaggagaagaacgagctggatgatgacatctagacggagctgaagaagggtgctcgttttcccgttttgtaaatggcaggtgttctatctgtcctgggcaacctgaatctcggcctaaactctaggagcagcagtagtgaatgttgtggctggttgcagtctgtttatcattgttatggaatggaaggaaagcagggttgatgtggtggtcgatgaatgactgaatctttctgtcactgcattgcatctgcaatatgtttgaaactagaattttgttaagatccagaagacaatataatctgctccaatactaggatattgatgttgttctacacaaaataaagatggatcaag

SEQ ID NO: 62562 - protein, 245 aa, Triticum aestivum
  peptide (1)..(245): Ceres Seq. ID no. 12615330
AARNRDPITSPPLHSSPAAREIQPDPSSSMATAGNAPRSRKRVEATVLKRARDGSAFTRCEACNKDVAIVLIDLHSCSLDSKIRLSLESQVVEKAVEIQEKKRKTPSAAAGGKGKKKSKADGDGAKKPKAKRPPTAFFLFMKDFRVEFKASHPDEKGVAAVGKAAGEKWKSMTEEEKKPYNDQAKELKAQFANGEGSAENNVGDEEKADADAEEVEDAEQEVDKPEDAPEDEEEEEEKNELDDDI

SEQ ID NO: 62563 - protein, 216 aa, Triticum aestivum
  peptide (1)..(216): Ceres Seq. ID no. 12615331
MATAGNAPRSRKRVEATVLKRARDGSAFTRCEACNKDVAIVLIDLHSCSLDSKIRLSLESQVVEKAVEIQEKKRKTPSAAAGGKGKKKSKADGDGAKKPKAKRPPTAFFLFMKDFRVEFKASHPDEKGVAAVGKAAGEKWKSMTEEEKKPYNDQAKELKAQFANGEGSAENNVGDEEKADADAEEVEDAEQEVDKPEDAPEDEEEEEEKNELDDDI

SEQ ID NO: 62564 - protein, 146 aa, Triticum aestivum
  peptide (1)..(146): Ceres Seq. ID no. 12615332
SSKESRSNHLPSPPLLPRGKRDPARSVQFHGDRRQRPPLPQARRGHRPQARARRKRLHPLRGVQQGRSHRPHRPAQLQPRLQDTPQPRVAGGGEGRRDPGEEEEDALRCRRRQGEEEEQGRRRWCQEAKGKAPTNCLLPLHEGLQG

SEQ ID NO: 62565 - DNA, 1129 bp, Triticum aestivum
  misc_feature (1)..(1129): Ceres Seq. ID no. 13596643
atcaaccattcatctattcatgtccaagctagaagaggcaatccatcggtgtgcgctgtaaagatctggggtgttggggtttggccacagactcatccagatggccttcgcagtctcggacgagctactgggcacgttcgtgcccatcgcggtgtactggctctactcggggctgtacatcgtgctggacgcgctggggacggccgactgctaccgcctccaccccaaggaggacgaggagacgaggaacataccctccaagcgcaccgtcctcaagggcgtcctcctccaacaggccgtccaggtcgccgtctccctcatcgtcttcaagatcaccggcgatggaagccacgacacgagggagcagcctccggcaccggtgatagcgctgcagttcgtcgtggcgatgttcgccatggacacgtggcaatacttcgtgcacaggtatctccacaccaacaagttcctgtacaagcacgtccacgcgcagcaccacaccatcctggtgccctacgccttcggggcgctctacagccacccgcttgagggcctgctcatggacacggccagcggcgccgtcggcttcctcgcgtccgggatgaccccccggaccgccatcttcttcatctcgttcggcgccatcaagaccgtcgacgaccactgtggcctctggctgcccggcaacgtcttccacgctgtcttcgccaacaacagcgccttccacaacatccaccaccagctctacggcaacaagcacaacttctcgcagcccttcttcgtcgtgtgggacaagatcctcggaacgtacatgcccttcacgctccagagccgtgagggtggaggggtagaggcgcgcccggttaagcacgcccttgcggcgcacgagcagcacaagtccgattgagcagctggtttggtttcccctgatatatatgcatgttcacttggcaagatatatagaacttcactacagccgtacgtgctcatgttctcgcactaataatgtggtttctcactatttatatgttgtgctcccttatgaatattatatcttgtgctccctataaaaaaaaaaaaaaaaaagcttatcgatatgtttaaacacaataaagttggaacgggagggggg

SEQ ID NO: 62566 - protein, 267 aa, Triticum aestivum
  peptide (1)..(267): Ceres Seq. ID no. 13596644
MAFAVSDELLGTFVPIAVYWLYSGLYIVLDALGTADCYRLHPKEDEETRNIPSKRTVLKGVLLQQAVQVAVSLIVFKITGDGSHDTREQPPAPVIALQFVVAMFAMDTWQYFVHRYLHTNKFLYKHVHAQHHTILVPYAFGALYSHPLEGLLMDTASGAVGFLASGMTPRTAIFFISFGAIKTVDDHCGLWLPGNVFHAVFANNSAFHNIHHQLYGNKHNFSQPFFVVWDKILGTYMPFTLQSREGGGVEARPVKHALAAHEQHKSD

SEQ ID NO: 62567 - protein, 181 aa, Triticum aestivum
  peptide (1)..(181): Ceres Seq. ID no. 13596645
INHSSIHVQARRGNPSVCAVKIWGVGVWPQTHPDGLRSLGRATGHVRAHRGVLALLGAVHRAGRAGDGRLLPPPPQGGRGDEEHTLQAHRPQGRPPPTGRPGRRLPHRLQDHRRWKPRHEGAASGTGDSAAVRRGDVRHGHVAILRAQVSPHQQVPVQARPRAAPHHPGALRLRGALQPPA

SEQ ID NO: 62568 - protein, 165 aa, Triticum aestivum
  peptide (1)..(165): Ceres Seq. ID no. 13596646
MFAMDTWQYFVHRYLHTNKFLYKHVHAQHHTILVPYAFGALYSHPLEGLLMDTASGAVGFLASGMTPRTAIFFISFGAIKTVDDHCGLWLPGNVFHAVFANNSAFHNIHHQLYGNKHNFSQPFFVVWDKILGTYMPFTLQSREGGGVEARPVKHALAAHEQHKSD

SEQ ID NO: 62569 - DNA, 530 bp, Triticum aestivum
  misc_feature (1)..(530): Ceres Seq. ID no. 13583396
aaaaaatcaacctcccagcacgaaccaacccaatccctgctacatagtcagtcagtctttgcaaccatgaggccacaggtgctgctcgccgcgctggccgtcgtcctcctcctcgcagcagctctgcccttcgcccacagccaaggtgcgaccccaagcgcgtcgctgtgctgcaacaactgcggcacctgcactaggtccatcccgcccaggtgtacgtgcatggatgcgtcgcccagcggctgcaacccgtcctgcaagacctgcgacaagaccaccgtcgccggccgtgacagcttccagtgcaaggaccgcgtcgcaaacttctgccagcgcagctgcactaagcccgcgtgactcgacctgttgtcgccagaataatgccgattagcttgttcttttcctttgtttttgcagtatttaagagttccctctgcatcttgctctggtagatgcagagaagaaatgagagttggatgcatgctcgttgttccttcttgtgtctgaaataaagagcatattctttgccc

SEQ ID NO: 62570 - protein, 118 aa, Triticum aestivum
  peptide (1)..(118): Ceres Seq. ID no. 13583397
KKSTSQHEPTQSLLHSQSVFATMRPQVLLAALAVVLLLAAALPFAHSQGATPSASLCCNNCGTCTRSIPPRCTCMDASPSGCNPSCKTCDKTTVAGRDSFQCKDRVANFCQRSCTKPA

SEQ ID NO: 62571 - protein, 96 aa, Triticum aestivum
  peptide (1)..(96): Ceres Seq. ID no. 13583398
MRPQVLLAALAVVLLLAAALPFAHSQGATPSASLCCNNCGTCTRSIPPRCTCMDASPSGCNPSCKTCDKTTVAGRDSFQCKDRVANFCQRSCTKPA

SEQ ID NO: 62572 - DNA, 1406 bp, Triticum aestivum
  misc_feature (1)..(1406): Ceres Seq. ID no. 13596519
actcctcacttcactcgcctcccgcgtcgcccgccgatcgagtgcacccacccaccacagtgccctgtgcccgaggccattccgtacgcactggagatggcgcgcaggagcggagtcttgtcgcgcttggccgtcgtcgtcgtcgcggcctactgcctcgccgcggcgacgcccggtgctgccgactggatgaggggctcggccacgttctacggagggagcaacgccgccggcaccatgggcggcgcttgcgggtacggcaacctgtactcgacggggtacgggacggacacggcggcgctgagcacgtccctcttcaacgacggggcggcgtgcggggagtgctaccaggtgcagtgcgaccagggcagctccccgaactgcaagccgggggtgacggtcaccatcaccgccaccaacctctgcccgacggactactccaagcccaacgacaacggcggctggtgcaacccgccgcgcaagcacctggacatggcgcagcccgcgtgggagcgcatcggcgtctaccgcgccggcatcgtgcccatcctgttccagcgggtgtcctgctccaggagcggcggcgtgcggttcaccatcaacggcaacagctacttcgagctggtgctcatcaccaacgtcggcgggccggggtcggtcagggcggtgcagatcaaggggtcccgcaccgggtggaccaccatgtcccggaactggggcgcgaactggcagtccaacagctacctcaacgggcagtccatctccttcgccgtcaccgccaccaacggccagaaggtggtcttccaggacgtggcgcccagcaactgggggttcggccagaccttcaccaactccggccagttctactagcgattcccgcgcgccgccgtgcgtgcgtgcgcgccggcgccggagcggtcgcctttcctttccgtttacgccttttcgatttcgcatttgggaagttaagtaagatttgcctcattctcatggatgggaagtggtaggtagtaggtagctaggtgccgcgcgtagggcggtttgcatggctgaggtgcctgatcgatcaattacccgccgtgcctgccgccttgcttgcgatgaccggctgatgtgctagctgaaatggcgccccgatcctcgctgcaaggcgcggactgtttactgttgaccaccgatccattgatgattttaatttatatagaatgtgatggccaaaatggggtggacatcgaagtgtgtggtctgaagtaaacgattaattggatcactacgttattacatgtgcgtaaagtgtccttagtcggagaatcaatgtactccctcactctatgaataagtgtacttccaccctttttttactaaaagaaaaaaaaaaaaaaaaaagcttatcgataccgtcgacc

SEQ ID NO: 62573 - protein, 334 aa, Triticum aestivum
  peptide (1)..(334): Ceres Seq. ID no. 13596520
SSLHSPPASPADRVHPPTTVPCARGHSVRTGDGAQERSLVALGRRRRRGLLPRRGDARCCRLDEGLGHVLRREQRRRHHGRRLRVRQPVLDGVRDGHGGAEHVPLQRRGGVRGVLPGAVRPGQLPELQAGGDGHHHRHQPLPDGLLQAQRQRRLVQPAAQAPGHGAARVGAHRRLPRRHRAHPVPAGVLLQERRRAVHHQRQQLLRAGAHHQRRRAGVGQGGADQGVPHRVDHHVPELGRELAVQQLPQRAVHLLRRHRHQRPEGGLPGRGAQQLGVRPDLHQLRPVLLAIPARRRACVRAGAGAVAFPFRLRLFDFAFGKLSKICLILMDGKW

SEQ ID NO: 62574 - protein, 289 aa, Triticum aestivum
  peptide (1)..(289): Ceres Seq. ID no. 13596521
TPHFTRLPRRPPIECTHPPQCPVPEAIPYALEMARRSGVLSRLAVVVVAAYCLAAATPGAADWMRGSATFYGGSNAAGTMGGACGYGNLYSTGYGTDTAALSTSLFNDGAACGECYQVQCDQGSSPNCKPGVTVTITATNLCPTDYSKPNDNGGWCNPPRKHLDMAQPAWERIGVYRAGIVPILFQRVSCSRSGGVRFTINGNSYFELVLITNVGGPGSVRAVQIKGSRTGWTTMSRNWGANWQSNSYLNGQSISFAVTATNGQKVVFQDVAPSNWGFGQTFTNSGQFY

SEQ ID NO: 62575 - protein, 257 aa, Triticum aestivum
  peptide (1)..(257): Ceres Seq. ID no. 13596522
MARRSGVLSRLAVVVVAAYCLAAATPGAADWMRGSATFYGGSNAAGTMGGACGYGNLYSTGYGTDTAALSTSLFNDGAACGECYQVQCDQGSSPNCKPGVTVTITATNLCPTDYSKPNDNGGWCNPPRKHLDMAQPAWERIGVYRAGIVPILFQRVSCSRSGGVRFTINGNSYFELVLITNVGGPGSVRAVQIKGSRTGWTTMSRNWGANWQSNSYLNGQSISFAVTATNGQKVVFQDVAPSNWGFGQTFTNSGQFY

SEQ ID NO: 62576 - DNA, 736 bp, Triticum aestivum
  misc_feature (1)..(736): Ceres Seq. ID no. 13598417
aaaggacaagagcgcaaaaccccaccacggaccctcgccgtcgctgtctccgtctcccatctcgccggcgctagctagggcaccggtcgccctccccctccgacgatgtcgacgccctctgatccagcggcgtccgcccagcccccctccaccgcggccacctccagcagcggcctcaccttcaagctccaccccctcgtcatcgtgaacgtctccgaccactacacccgcgtcaaggcccaggcctccttccccgccgaggccccgtcgccgggcaaggcgcaggcctcctgctccgccgaaggctccccgccccccgcggagccgccgagagtcttcgggtgcgtgatcggggtgcagcgcggccggacggtcgagatcttcaacagcttcgagctcgtcctcgaccccgtcaccggcacgctcgagcgcgccttcctggagaagaagctcgagctctataagaaggtgttccctgagttctatgtgttgggctggtactctactgggagcgatgtgcaggatactgacatcctaatccacaaggctctgatggacattaatgaaagccctgtttatcttctcttggatcctgcaatcaaccactcccagaaggatctacctgtgacaatttatgagagtgagttgcatgttatcgatgggggcccccagctcatctttgtcaaatcaaattacacaattgagactgtagaagcagagaggatatctgtagatc

SEQ ID NO: 62577 - protein, 210 aa, Triticum aestivum
  peptide (1)..(210): Ceres Seq. ID no. 13598418
MSTPSDPAASAQPPSTAATSSSGLTFKLHPLVIVNVSDHYTRVKAQASFPAEAPSPGKAQASCSAEGSPPPAEPPRVFGCVIGVQRGRTVEIFNSFELVLDPVTGTLERAFLEKKLELYKKVFPEFYVLGWYSTGSDVQDTDILIHKALMDINESPVYLLLDPAINHSQKDLPVTIYESELHVIDGGPQLIFVKSNYTIETVEAERISVD

SEQ ID NO: 62578 - DNA, 1444 bp, Triticum aestivum
  misc_feature (1)..(1444): Ceres Seq. ID no. 13596523
acaacaccacaattcactcctcttgctccgctcctctcctctcccgccggcgaccatggcgaaggccgcaacagcagcagcagcggcgcctctccacagcggcctcccggacgagatcgccatctgggagatcctcgtccgcctgccccccaaatcgctcctccgctgtcgcgccgtctgccgcgcctggcgcagcgccacctccgcccgcgacttcctcctcgcccaccacgcccgccagcccgccctccccctcgcctgcggcctggaagacgacggtggcagctgctactacctggcggcccagcaccagcccgtcgcccggcttgccaaggccttctatctgtgcgcctcctgcgacggcctcctcctcctctccaagcgcaaccagctctccatctgcaacccggccactcgtcagtatgctcccctgccggcgagttctgccttcattccgttgggaatgtaccggcaccgccccacaggcgagtaccgaatactgctgtacaaggaaattggtcttccagcgaccgacgggcaagatgcctgccacatcttcgcattgggctctgtccagccgccgaggagcatcgggtcgctgcaggaggcggagcaactgaggttcagcggggtacctgtcccgttccgcggtaacctgcattggcacctgaataagcattggtacctacaaaagtattggtacttgcccgagaatcatgagagcagaagcaacattataattgtattcgacaccacagccgagaggtttcgtgagatgtgtgctccggttgttcctgaccaccataaactgtttgagatggatggcatgctcggcatgtccagctttaacaatacatggccaatcattgatgtctggatgatgcaggagcaggactatgaaagtgaggtctggaccttgaaataccgagttgaattgtccaatgcagatcttctccttgtgcagtttggtcagtttgtcgattattggaatgtggtggtcgcctcttgtgatggcgctgtgcttgtgctggtcaagtttggcaagtctatacttcagtttgatattgatggcaagttggtcagttttcatcacaaagacctcttagttactcaacatcggctcaagcaaactcttgttccacataccttctttccgagactagatggtcattccgtgaatgcttggcctttcatctgagtggtgttgagtgagttggtccttcttagaggccaacctgtctttatccttgaagcctgcaatatgtatgaatttgatccaccatgagccctagcttctttatcgatgtaatgcaaagttatgatcaagaacctcctactgtaatatgattgcatgaaattcatatttctttggatatggttttgggctgaagtggctaacggacaagctgatgctaaaattaccaactctttaggttagtgtttg

SEQ ID NO: 62579 - protein, 398 aa, Triticum aestivum
  peptide (1)..(398): Ceres Seq. ID no. 13596524
QHHNSLLLLRSSPLPPATMAKAATAAAAAPLHSGLPDEIAIWEILVRLPPKSLLRCRAVCRAWRSATSARDFLLAHHARQPALPLACGLEDDGGSCYYLAAQHQPVARLAKAFYLCASCDGLLLLSKRNQLSICNPATRQYAPLPASSAFIPLGMYRHRPTGEYRILLYKEIGLPATDGQDACHIFALGSVQPPRSIGSLQEAEQLRFSGVPVPFRGNLHWHLNKHWYLQKYWYLPENHESRSNIIIVFDTTAERFREMCAPVVPDHHKLFEMDGMLGMSSFNNTWPIIDVWMMQEQDYESEVWTLKYRVELSNADLLLVQFGQFVDYWNVVVASCDGAVLVLVKFGKSILQFDIDGKLVSFHHKDLLVTQHRLKQTLVPHTFFPRLDGHSVNAWPFI

SEQ ID NO: 62580 - protein, 380 aa, Triticum aestivum
  peptide (1)..(380): Ceres Seq. ID no. 13596525
MAKAATAAAAAPLHSGLPDEIAIWEILVRLPPKSLLRCRAVCRAWRSATSARDFLLAHHARQPALPLACGLEDDGGSCYYLAAQHQPVARLAKAFYLCASCDGLLLLSKRNQLSICNPATRQYAPLPASSAFIPLGMYRHRPTGEYRILLYKEIGLPATDGQDACHIFALGSVQPPRSIGSLQEAEQLRFSGVPVPFRGNLHWHLNKHWYLQKYWYLPENHESRSNIIIVFDTTAERFREMCAPVVPDHHKLFEMDGMLGMSSFNNTWPIIDVWMMQEQDYESEVWTLKYRVELSNADLLLVQFGQFVDYWNVVVASCDGAVLVLVKFGKSILQFDIDGKLVSFHHKDLLVTQHRLKQTLVPHTFFPRLDGHSVNAWPFI

SEQ ID NO: 62581 - protein, 244 aa, Triticum aestivum
  peptide (1)..(244): Ceres Seq. ID no. 13596526
MYRHRPTGEYRILLYKEIGLPATDGQDACHIFALGSVQPPRSIGSLQEAEQLRFSGVPVPFRGNLHWHLNKHWYLQKYWYLPENHESRSNIIIVFDTTAERFREMCAPVVPDHHKLFEMDGMLGMSSFNNTWPIIDVWMMQEQDYESEVWTLKYRVELSNADLLLVQFGQFVDYWNVVVASCDGAVLVLVKFGKSILQFDIDGKLVSFHHKDLLVTQHRLKQTLVPHTFFPRLDGHSVNAWPFI

SEQ ID NO: 62582 - DNA, 594 bp, Triticum aestivum
  misc_feature (1)..(594): Ceres Seq. ID no. 13596527
atcaacccatccatccaccgagcgatcggcactcccactctaagagctccgagccagccaacaatggcgtcctctccgctgctcgtggcgcttgtgatggtctcggcgtgcttcctggccgtgtccggccagaagttcaacgccatctacagcttcggcgactccatgtcggacaccggcaacctctgcgtcaacgggccccccgccggcctcaccctcacccagcccccctacggcgagaccttctttggccgtgccacctgccgctgctccgacggccgcctcgtcgtcgacttcctcgccgagaagttcgggctgccgctgctgaagccgtcgaagcagggcggcgcggacttcaagcagggcgccaacatggccatcatcggcgccaccgccatgggctccagcttcttccagtcgctcggcgtcggcgacaagatctggaacaacgggcccctcgacacccagatccagtggttccagaacctcctcccctccgtctgcggctcatcgtgcaagacgtacctgtccaagtccctgttcgtgctgggcgagctgggcgggaacgactacaacgcgcagctcttcggcggc

SEQ ID NO: 62583 - protein, 198 aa, Triticum aestivum
  peptide (1)..(198): Ceres Seq. ID no. 13596528
INPSIHRAIGTPTLRAPSQPTMASSPLLVALVMVSACFLAVSGQKFNAIYSFGDSMSDTGNLCVNGPPAGLTLTQPPYGETFFGRATCRCSDGRLVVDFLAEKFGLPLLKPSKQGGADFKQGANMAIIGATAMGSSFFQSLGVGDKIWNNGPLDTQIQWFQNLLPSVCGSSCKTYLSKSLFVLGELGGNDYNAQLFGG

SEQ ID NO: 62584 - protein, 197 aa, Triticum aestivum
  peptide (1)..(197): Ceres Seq. ID no. 13596529
QPIHPPSDRHSHSKSSEPANNGVLSAARGACDGLGVLPGRVRPEVQRHLQLRRLHVGHRQPLRQRAPRRPHPHPAPLRRDLLWPCHLPLLRRPPRRRLPRREVRAAAAEAVEAGRRGLQAGRQHGHHRRHRHGLQLLPVARRRRQDLEQRAPRHPDPVVPEPPPLRLRLIVQDVPVQVPVRAGRAGRERLQRAALRR

SEQ ID NO: 62585 - protein, 177 aa, Triticum aestivum
  peptide (1)..(177): Ceres Seq. ID no. 13596530
MASSPLLVALVMVSACFLAVSGQKFNAIYSFGDSMSDTGNLCVNGPPAGLTLTQPPYGETFFGRATCRCSDGRLVVDFLAEKFGLPLLKPSKQGGADFKQGANMAIIGATAMGSSFFQSLGVGDKIWNNGPLDTQIQWFQNLLPSVCGSSCKTYLSKSLFVLGELGGNDYNAQLFGG

SEQ ID NO: 62586 - DNA, 648 bp, Triticum aestivum
  misc_feature (1)..(648): Ceres Seq. ID no. 13662489
gtccacgtgtacacaaacgggactgtgtgtgatctcacagatataccacggtacacagaggttaggtttgtttgttccgagcccactgtactgatcagttcgataaaggagatatcttcctgcaagtatgttttaactgtccaaagcccaatgctctgcaagaacccgttgtttcagcaggaaaagcgcaccttcttcatccactgcaacgagtcgcttgcggaagcagaagctgaggccgccgaggacgacgactctctcccaaaagaagctcagatgtccatcgttccaaaccccgacgaattgcataactacgcagcttacgctacctgattgcccgccaatcacggtgccctcagctgatgaaagatgccgttattttggaagtacaacagcaagttggcaacatagtataactatcccctggcttgttctgtctgacgccaactagtggttacagggtactctttgagcagatatccattactgaaacagcttgagattaccttagaggaagattaagggcaaagagtgtcctgctgtactgtagtggtatataatttagtaaagggggtatttgagattcagtggcaggctttagacacatcaccaacaattttcctcttgaaatgttcataaaaacagtgc

SEQ ID NO: 62587 - protein, 110 aa, Triticum aestivum
  peptide (1)..(110): Ceres Seq. ID no. 13662490
VHVYTNGTVCDLTDIPRYTEVRFVCSEPTVLISSIKEISSCKYVLTVQSPMLCKNPLFQQEKRTFFIHCNESLAEAEAEAAEDDDSLPKEAQMSIVPNPDELHNYAAYAT

SEQ ID NO: 62588 - protein, 60 aa, Triticum aestivum
  peptide (1)..(60): Ceres Seq. ID no. 13662491
MLCKNPLFQQEKRTFFIHCNESLAEAEAEAAEDDDSLPKEAQMSIVPNPDELHNYAAYAT

SEQ ID NO: 62589 - DNA, 781 bp, Triticum aestivum
  misc_feature (1)..(781): Ceres Seq. ID no. 12584717
aacaactaagagtcgcatcttaatcttagataccttaatctcttagctccagcaatggcttcacatgcatccgcttttaggacaaacatcctactcgccgccgttttagccgtgttcgtcctgccatccttagcttgtcggaaggctcgagctccggccccggctccggctctgtctccggccccggctctgtctccggctctggctccggccccgggtccggcgcccatgatactgtgccaggattgtgactcgcggtgtcagtcggcttcgatgtgcgacgcctacgttgccgcggcgggatgcggaaatgcctgcagcggcgcgacaccggactgcgaaccctgcatgtccgagatccaccagtcctgcccggccgcctgcaacgagggctgcaccaggaactgcgttggccagtgcgactgcgccggctcatgcagccaagcctgcgccgaaggcgcccggcgtacatgtcagtacaagtgtgtctactcctactacgcggtcaaatcatgccacgaatgccaggacagtgcacgcacgcggtgcaccgatgcctgcaacaccgactgcaaggccaactgtgtcagcggctgatccataatcctagtaggcccaacttatgttgtactccaactatgtatatgaataagatatcagagtatgcagcggtatatggtcattgcgcacgtatgcctgctgtttttgtacatctatagatgtattactatctgtatacttccatggatggcatatggtcaatgcaggtgtacctgctgct

SEQ ID NO: 62590 - protein, 180 aa, Triticum aestivum
  peptide (1)..(180): Ceres Seq. ID no. 12584718
MASHASAFRTNILLAAVLAVFVLPSLACRKARAPAPAPALSPAPALSPALAPAPGPAPMILCQDCDSRCQSASMCDAYVAAAGCGNACSGATPDCEPCMSEIHQSCPAACNEGCTRNCVGQCDCAGSCSQACAEGARRTCQYKCVYSYYAVKSCHECQDSARTRCTDACNTDCKANCVSG

SEQ ID NO: 62591 - protein, 138 aa, Triticum aestivum
  peptide (1)..(138): Ceres Seq. ID no. 12584719
MRKCLQRRDTGLRTLHVRDPPVLPGRLQRGLHQELRWPVRLRRLMQPSLRRRRPAYMSVQVCLLLLRGQIMPRMPGQCTHAVHRCLQHRLQGQLCQRLIHNPSRPNLCCTPTMYMNKISEYAAVYGHCARMPAVFVHL

SEQ ID NO: 62592 - protein, 122 aa, Triticum aestivum
  peptide (1)..(122): Ceres Seq. ID no. 12584720
MILCQDCDSRCQSASMCDAYVAAAGCGNACSGATPDCEPCMSEIHQSCPAACNEGCTRNCVGQCDCAGSCSQACAEGARRTCQYKCVYSYYAVKSCHECQDSARTRCTDACNTDCKANCVSG

SEQ ID NO: 62593 - DNA, 1237 bp, Triticum aestivum
  misc_feature (1)..(1237): Ceres Seq. ID no. 12615444
acccctattccccatccctacgcccgcctcctcctcctcctccgcatcccattctcccccaaatcggccgagtaaaccctagctaaaccccgacctccgccgccggcgagcgagatgaacttcaagggcgcgcggatgccgagcgcgccggcgggcgcgggcgcgctggtcaagctcgggctgctcggcggcgccgcgctctacctcggcaacaagaccctctacaacgtcgagggaggccaccgggccatcgtcttcaaccgcctcgaggggatcaaggacaaggtctaccccgaggggactcacatcgtcatcccgtggttcgagaggcccatcatctacgacgtccgcgcgcgacccaacctcgtcgagagcacctccgggagccgggatctccagatggtgagaattggtcttcgtgttcttacacgacccatgccagagagactaccaactatgtacaggaccctgggggagaactacaatgagagagtgttgccttcgatcattcatgaaacactcaaagctgtggttgcccaatacaatgccagtcagctaatcacacagagagaggctgtgagcagggagatcaggaagattctgacagagagggcgaagaacttcaacatcgctctggatgatgtgtccattaccagtctaagctttggtaaagagttcactcatgccattgaagccaaacaggttgctgctcaggaagctgagcgtgccaagttcattgttgagaaggctgagcaagacaagaaaagtgcaattatcagggcacagggagaggcaaagagtgcagagctgattggcaatgccatcgccaacaaccctgctttcgtggcgctcaggcagattgaagccgccagggagatcgcccacaccattgcagcctccaacaacaaggtgttccttgactcgggtgacctgctgcttgggctccagtcgctcaagatgttgaacaacaacaacaagaaatgagaccgtctctgtcacgcatgttgtggttgccgccagtcttgtctacattggaagaagagtacttttgagaggaacgaacgcttagtttctagcattcccgacccgaaaacaagaaagacgcccttgctactgtgaattatttgtgcacttttcaagtgaacctgtcagctgctaccgctgtgcgtagcttataacgtctgggcggttatgtggtgattatattggccttttcatgttcatcttggcttgttcc

SEQ ID NO: 62594 - protein, 289 aa, Triticum aestivum
  peptide (1)..(289): Ceres Seq. ID no. 12615445
MNFKGARMPSAPAGAGALVKLGLLGGAALYLGNKTLYNVEGGHRAIVFNRLEGIKDKVYPEGTHIVIPWFERPIIYDVRARPNLVESTSGSRDLQMVRIGLRVLTRPMPERLPTMYRTLGENYNERVLPSIIHETLKAVVAQYNASQLITQREAVSREIRKILTERAKNFNIALDDVSITSLSFGKEFTHAIEAKQVAAQEAERAKFIVEKAEQDKKSAIIRAQGEAKSAELIGNAIANNPAFVALRQIEAAREIAHTIAASNNKVFLDSGDLLLGLQSLKMLNNNNKK

SEQ ID NO: 62595 - protein, 282 aa, Triticum aestivum
  peptide (1)..(282): Ceres Seq. ID no. 12615446
MPSAPAGAGALVKLGLLGGAALYLGNKTLYNVEGGHRAIVFNRLEGIKDKVYPEGTHIVIPWFERPIIYDVRARPNLVESTSGSRDLQMVRIGLRVLTRPMPERLPTMYRTLGENYNERVLPSIIHETLKAVVAQYNASQLITQREAVSREIRKILTERAKNFNIALDDVSITSLSFGKEFTHAIEAKQVAAQEAERAKFIVEKAEQDKKSAIIRAQGEAKSAELIGNAIANNPAFVALRQIEAAREIAHTIAASNNKVFLDSGDLLLGLQSLKMLNNNNKK

SEQ ID NO: 62596 - protein, 194 aa, Triticum aestivum
  peptide (1)..(194): Ceres Seq. ID no. 12615447
MVRIGLRVLTRPMPERLPTMYRTLGENYNERVLPSIIHETLKAVVAQYNASQLITQREAVSREIRKILTERAKNFNIALDDVSITSLSFGKEFTHAIEAKQVAAQEAERAKFIVEKAEQDKKSAIIRAQGEAKSAELIGNAIANNPAFVALRQIEAAREIAHTIAASNNKVFLDSGDLLLGLQSLKMLNNNNKK

SEQ ID NO: 62597 - DNA, 1296 bp, Triticum aestivum
  misc_feature (1)..(1296): Ceres Seq. ID no. 12624901
accagtcaccacaccacactcccccagatcggcttccgttgcgagacggaccgccccccgctttatttccgccaccaccgacgccgcgccggcgaaggagcccctcgccagatcggatccctccgccgcgacgcaacatggcggctctgctgatgcgcaggctcgccgggacctaccgcggccgcgcgccgctggccgccgccgccgttggcggggccgcgttcttctacgcctcgtcgaaccccaccgtcgcgcacatggaggagaagggggaggacgccgctgccaaagttgctcttaaccctgagaaatggttagaattcaagctccaggagaaggcaacagttagtcatgattcagagctattcagattttcgtttgacccatctactaagctgggcctggatgttgcctcatgtctcgtaacaagggcccccataggtcaggaagtggagggaaaaagaaaatacgttattcgcccgtacacacctatctctgacccagattctaaaggatatttcgacctattaatcaaggtttatcccgaagggaaaatgtctcagcattttgctaatttgaagccaggagatgttctcgaagtcaaagggcccattgaaaagctcagatatagcccaaatatgaaaagacaaattggcatggttgctggtggtactggcataacgccaatgctgcaagttgttagggccatcctgaaaaaccccgatgacaacactcaggtttccttgatctacgccaatgtgtcaccagatgatatcttgctgaaaaaggagttagatagacttgccagcagctatcctaatttcaaggtattttatacagtcgataaaccatcaagtgactggaggggtggtgctggctacatatcaaaggacatggttttgaaaggtttgccaggcccaggggaggattctcttattcttgtttgtggtcctcctggaatgatgaatcacatatctggagataaggcaaaggattattcacagggcgaggtcacgggccttctcaaagatttaggatacacggcagatatggtatacaaattttgagtcgatcacggaaacgtaggggaccctgacatgcccgctgcctgccatggcagtaaaataaaccgcagctgaacctttttttcttgtcgcgccacggcaattagtgccaaactcagaacagtatggtgcatcattttgtaagaatttcggttcggttccgttttgtcatctgtgcgcgctgcatggacacctgaataacctgacgccgcctggttggcggtgttgtttt

SEQ ID NO: 62598 - protein, 354 aa, Triticum aestivum
  peptide (1)..(354): Ceres Seq. ID no. 12624902
QSPHHTPPDRLPLRDGPPPALFPPPPTPRRRRSPSPDRIPPPRRNMAALLMRRLAGTYRGRAPLAAAAVGGAAFFYASSNPTVAHMEEKGEDAAAKVALNPEKWLEFKLQEKATVSHDSELFRFSFDPSTKLGLDVASCLVTRAPIGQEVEGKRKYVIRPYTPISDPDSKGYFDLLIKVYPEGKMSQHFANLKPGDVLEVKGPIEKLRYSPNMKRQIGMVAGGTGITPMLQVVRAILKNPDDNTQVSLIYANVSPDDILLKKELDRLASSYPNFKVFYTVDKPSSDWRGGAGYISKDMVLKGLPGPGEDSLILVCGPPGMMNHISGDKAKDYSQGEVTGLLKDLGYTADMVYKF

SEQ ID NO: 62599 - protein, 309 aa, Triticum aestivum
  peptide (1)..(309): Ceres Seq. ID no. 12624903
MAALLMRRLAGTYRGRAPLAAAAVGGAAFFYASSNPTVAHMEEKGEDAAAKVALNPEKWLEFKLQEKATVSHDSELFRFSFDPSTKLGLDVASCLVTRAPIGQEVEGKRKYVIRPYTPISDPDSKGYFDLLIKVYPEGKMSQHFANLKPGDVLEVKGPIEKLRYSPNMKRQIGMVAGGTGITPMLQVVRAILKNPDDNTQVSLIYANVSPDDILLKKELDRLASSYPNFKVFYTVDKPSSDWRGGAGYISKDMVLKGLPGPGEDSLILVCGPPGMMNHISGDKAKDYSQGEVTGLLKDLGYTADMVYKF

SEQ ID NO: 62600 - protein, 304 aa, Triticum aestivum
  peptide (1)..(304): Ceres Seq. ID no. 12624904
MRRLAGTYRGRAPLAAAAVGGAAFFYASSNPTVAHMEEKGEDAAAKVALNPEKWLEFKLQEKATVSHDSELFRFSFDPSTKLGLDVASCLVTRAPIGQEVEGKRKYVIRPYTPISDPDSKGYFDLLIKVYPEGKMSQHFANLKPGDVLEVKGPIEKLRYSPNMKRQIGMVAGGTGITPMLQVVRAILKNPDDNTQVSLIYANVSPDDILLKKELDRLASSYPNFKVFYTVDKPSSDWRGGAGYISKDMVLKGLPGPGEDSLILVCGPPGMMNHISGDKAKDYSQGEVTGLLKDLGYTADMVYKF

SEQ ID NO: 62601 - DNA, 1632 bp, Triticum aestivum
  misc_feature (1)..(1632): Ceres Seq. ID no. 14308041
atcgatccaagctgccatggccgcggttctcccgatctgcctgcttctcgtgcttctcctcgccatcccgctcatcctcttcaagtccaggcgcccggcgcctcatcgtggccccggtggcagggccgtgcggctcccgccagggccatgggcgctcccggtcatcggtcacctgcaccatctcgccggcgcccttccgcaccgtgctctgcgcgacctcgcgcggcgccacggcccgctcatgatgctccgcctcggcgagctcgacgccgtggtcgcgtcgtcccctgacgccgcgcgcgagatcatgaagacccacgacgcttccttcgcgtccaggcctctgacgtcgatgcagcagatggcgtacggcgacgccgagggcctcatcttcgcgccctacggcgacgcatggcggcagcttcgcaagatatgcactgtcgagatcttcagctcccgccgcgtccagtccttccgccccgcccgcgaggaggagctcggtcacctcctccgctccgtcgcggcggcttctgcctcgtcttcgccggtgaacctgagcgagcgcatatcggcgtacgtcgcggattctacggtgcgcgccatcgtcggcagccggttcaagcagagggacacgtacctggagatgctgcaagagggactcaaaatcgtgcccgggatgacccttcccgacattttcccctcctcgcgtctcgtgcggctccttagcagcgtccccggcaggatacagcgccatagccaagacatgaagctgttcatggacaccatcatccaagagcaccaggtgaacagcggccccgactgcgacggcgacaaagaagaagacttgctcgacgtgctcctgagactccaaaaggaaggggactcgcagtatccactcaccactgacaacatcaagaccgtcatgctggacatgtttggcgccggcagcgagacgtcggcgacgacgctgcagtgggcgatggcggagctgatacggaacccgcgggttatgcggaaggcgcaagacgaggtccggcagcaactcgccgggcacgacaaggtgagggaggccgacctggcagatctgcgataccttgggtttgtcatcaaggagacgctgaggatgcacccgccggcgccattgctgctgccgcgtaggtgcgggagcccgtgtcaggttctgggcctggacgtgccggagggggtcatggtgatcgtgaacgcgtgggcgatcggcatggacccggcgcactgggaggcacccgaggagttcgcaccggagcggttcgagcagaacgggagggacttcaagggggcggacttcgagttcgtgccgttcggcggcgggaggaggatatgccccggcatggctttcgggctggcgcacgtggagctcgcgctcgcggcgctgctgttccacttcgactgggagctgccaggcggggcggcggccgaggatctggacatgaccgaggagtttggcgtcacggcacggctccggtctgaccttgtcgtggtcgccgtggccacggagtaaacgcacttttggtgatgtgcatcctatatttgtttttttgaggtgacctatatttgttgatcctgtgcaagttgattagcccatcaccgtggcgt

SEQ ID NO: 62602 - protein, 511 aa, Triticum aestivum
  peptide (1)..(511): Ceres Seq. ID no. 14308042
SIQAAMAAVLPICLLLVLLLAIPLILFKSRRPAPHRGPGGRAVRLPPGPWALPVIGHLHHLAGALPHRALRDLARRHGPLMMLRLGELDAVVASSPDAAREIMKTHDASFASRPLTSMQQMAYGDAEGLIFAPYGDAWRQLRKICTVEIFSSRRVQSFRPAREEELGHLLRSVAAASASSSPVNLSERISAYVADSTVRAIVGSRFKQRDTYLEMLQEGLKIVPGMTLPDIFPSSRLVRLLSSVPGRIQRHSQDMKLFMDTIIQEHQVNSGPDCDGDKEEDLLDVLLRLQKEGDSQYPLTTDNIKTVMLDMFGAGSETSATTLQWAMAELIRNPRVMRKAQDEVRQQLAGHDKVREADLADLRYLGFVIKETLRMHPPAPLLLPRRCGSPCQVLGLDVPEGVMVIVNAWAIGMDPAHWEAPEEFAPERFEQNGRDFKGADFEFVPFGGGRRICPGMAFGLAHVELALAALLFHFDWELPGGAAAEDLDMTEEFGVTARLRSDLVVVAVATE

SEQ ID NO: 62603 - protein, 506 aa, Triticum aestivum
  peptide (1)..(506): Ceres Seq. ID no. 14308043
MAAVLPICLLLVLLLAIPLILFKSRRPAPHRGPGGRAVRLPPGPWALPVIGHLHHLAGALPHRALRDLARRHGPLMMLRLGELDAVVASSPDAAREIMKTHDASFASRPLTSMQQMAYGDAEGLIFAPYGDAWRQLRKICTVEIFSSRRVQSFRPAREEELGHLLRSVAAASASSSPVNLSERISAYVADSTVRAIVGSRFKQRDTYLEMLQEGLKIVPGMTLPDIFPSSRLVRLLSSVPGRIQRHSQDMKLFMDTIIQEHQVNSGPDCDGDKEEDLLDVLLRLQKEGDSQYPLTTDNIKTVMLDMFGAGSETSATTLQWAMAELIRNPRVMRKAQDEVRQQLAGHDKVREADLADLRYLGFVIKETLRMHPPAPLLLPRRCGSPCQVLGLDVPEGVMVIVNAWAIGMDPAHWEAPEEFAPERFEQNGRDFKGADFEFVPFGGGRRICPGMAFGLAHVELALAALLFHFDWELPGGAAAEDLDMTEEFGVTARLRSDLVVVAVATE

SEQ ID NO: 62604 - protein, 431 aa, Triticum aestivum
  peptide (1)..(431): Ceres Seq. ID no. 14308044
MMLRLGELDAVVASSPDAAREIMKTHDASFASRPLTSMQQMAYGDAEGLIFAPYGDAWRQLRKICTVEIFSSRRVQSFRPAREEELGHLLRSVAAASASSSPVNLSERISAYVADSTVRAIVGSRFKQRDTYLEMLQEGLKIVPGMTLPDIFPSSRLVRLLSSVPGRIQRHSQDMKLFMDTIIQEHQVNSGPDCDGDKEEDLLDVLLRLQKEGDSQYPLTTDNIKTVMLDMFGAGSETSATTLQWAMAELIRNPRVMRKAQDEVRQQLAGHDKVREADLADLRYLGFVIKETLRMHPPAPLLLPRRCGSPCQVLGLDVPEGVMVIVNAWAIGMDPAHWEAPEEFAPERFEQNGRDFKGADFEFVPFGGGRRICPGMAFGLAHVELALAALLFHFDWELPGGAAAEDLDMTEEFGVTARLRSDLVVVAVATE

SEQ ID NO: 62605 - DNA, 1104 bp, Triticum aestivum
  misc_feature (1)..(1104): Ceres Seq. ID no. 12615890
agaccagtgagcgcagcacacagatcagcactcaacaacaagccttgcgttgcaaaccatcgaccgaaggaaccgactgagctaagaggaggttcgccgagaagctagccgtgcgtagcaatggtgaagactgcggcagctgggagcactggcgatggcgccgtggcagcgaagcagcagcagcttggcggcaagatgaggacgtacaagggcgtgcggatgaggagctggggcgcgtgggtgtcggagatccgggcgcccgggcagaagacgcggatatggctcggctcccactccaccgccgaggccgccgcgcgcgcctacgacgccgcgctgctctgcctcaagggcgcctccgccgccgccgacctcaacttccccgtgcgcttccccttcgacctccccgccgccgccatgtcgcccaaagtccatccagcgcgtcgccgcagccgccgccgccggggccagcgctaatgtgttcgacttcgccgctgccgacgacagtgccagcgctaatgcccgtcgacttcgccggtgccgacgacagcgccagcgcggtcacccccgagtactgcagctcctccagcaatgcctcgccggtgagctctccggagacggcaagcagtggcggcgccgacctcgacggcgtagacctcctgggttacggttacagccagtgctcgctcgcggaaatcgaggccttcttccagtcgcccaagtgcatggagtacgccatgatggacccgtgcagcaccttcttcgctccggcgccgatagcaatggaggacgagtgcagctgggaggaaggaggcgacattgcgctctggagctactgaaccggagtccgggaagccggagaaccgaagaaactgacaaatcgttactcaagcgaaggccagaactggccatgcatggtgataactatccttaatttcatatatgtggtaaattaattcgattcattgtacacaacaacaataaggtagttgagcgttgtgggggggagctctcatggagctacatgttttaaggcagcttccatggagttaacctcccttcaattgcttgttacatccgtgtaaaaaagctgcttgcaatgcaagc

SEQ ID NO: 62606 - protein, 185 aa, Triticum aestivum
  peptide (1)..(185): Ceres Seq. ID no. 12615891
MARLPLHRRGRRARLRRRAALPQGRLRRRRPQLPRALPLRPPRRRHVAQSPSSASPQPPPPGPALMCSTSPLPTTVPALMPVDFAGADDSASAVTPEYCSSSSNASPVSSPETASSGGADLDGVDLLGYGYSQCSLAEIEAFFQSPKCMEYAMMDPCSTFFAPAPIAMEDECSWEEGGDIALWSY

SEQ ID NO: 62607 - protein, 120 aa, Triticum aestivum
  peptide (1)..(120): Ceres Seq. ID no. 12615892
MCSTSPLPTTVPALMPVDFAGADDSASAVTPEYCSSSSNASPVSSPETASSGGADLDGVDLLGYGYSQCSLAEIEAFFQSPKCMEYAMMDPCSTFFAPAPIAMEDECSWEEGGDIALWSY

SEQ ID NO: 62608 - protein, 117 aa, Triticum aestivum
  peptide (1)..(117): Ceres Seq. ID no. 12615893
MVKTAAAGSTGDGAVAAKQQQLGGKMRTYKGVRMRSWGAWVSEIRAPGQKTRIWLGSHSTAEAAARAYDAALLCLKGASAAADLNFPVRFPFDLPAAAMSPKVHPARRRSRRRRGQR

SEQ ID NO: 62609 - DNA, 1257 bp, Triticum aestivum
  misc_feature (1)..(1257): Ceres Seq. ID no. 12584727
gcgattaaacgttcgttggagacttggacgttcgctcagccccagccatggcagagaaggtatccacgttgatcattgaagccaacctcgaatgcgagaaatgctacaagaagattcagaaagtgctaggcaaactccaagagaaggagaagatcaggaccatcattttcgacacgaagaagaacacggtgactatctctggcccattcgacacggcgaagctgtccaagaagccgcgatgcaaggcctgcaaggcgatcaaggatatcaagatcgttgaagagaagaagcccgatgccaagaagccggaggagaagaagccagaggagaagaagcccgaggagaagaagccggccgccgatggctgcaagtgttgctgcaagaaaccggacgagaagaagccggatgagaagaagaagcccgacgagaagaagcccggaggaaaagaagaaacccgacgagaagaagccagatgataagaagcccggaggagaagcccaaatccaaggaggagaccaaaccggccgcgccggtcgacgactgtgacccttgcagttcacgcagatctgtaacctctgctacccggtggccgtgcagcgacccgaagccactggggggaggcgagcaccagtacccgcagccccagcagccgcagtggccgtgcgagccgccgcagatgcgggggtaccccngccccccaccaccctcagcacccgattcctcagcacccgccctcggcggcgccggcgaccccgaagaggcagccgtgcggaggctcggcgtactgcggaggagggtgcggctcgtgtggcggcggaggcggcggcgcgtacggggcgtggccgccggcgatgccgacgccgctgcagatgatgcagcccccgccgatgggctgcggcgggccggcgtcgtcgtgcagagggtgcaagggctgccggatcgtgcaggaggggaggttcatctacgaggagtacccgcccagtgcgtgcaccgtcatgtgattctcaggccagcgaccgttcgtgcatgcatgcatgcgctgttcgacctctctgcacgttgtttttcgtgttttagatgttccatatttgccctgtatgtttcgtgcacagtactgtatttgtttatgtctatccgcagcaaagaaggtgtagctgccacgtacattctcagtgtgaaaatatatgttctccgaacaattgatgtagctttgtatagataatttcaatttttggggcactaaaagttcgaaaatgc

SEQ ID NO: 62610 - protein, 249 aa, Triticum aestivum
  peptide (1)..(249): Ceres Seq. ID no. 12584728
  misc_feature (74)..(74): Xaa is any aa, unknown or other
MIRSPEEKPKSKEETKPAAPVDDCDPCSSRRSVTSATRWPCSDPKPLGGGEHQYPQPQQPQWPCEPPQMRGYPXPPPPSAPDSSAPALGGAGDPEEAAVRRLGVLRRRVRLVWRRRRRRVRGVAAGDADAAADDAAPADGLRRAGVVVQRVQGLPDRAGGEVHLRGVPAQCVHRHVILRPATVRACMHALFDLSARCFSCFRCSIFALYVSCTVLYLFMSIRSKEGVAATYILSVKIYVLRTIDVALYR

SEQ ID NO: 62611 - protein, 181 aa, Triticum aestivum
  peptide (1)..(181): Ceres Seq. ID no. 12584729
  misc_feature (6)..(6): Xaa is any aa, unknown or other
MRGYPXPPPPSAPDSSAPALGGAGDPEEAAVRRLGVLRRRVRLVWRRRRRRVRGVAAGDADAAADDAAPADGLRRAGVVVQRVQGLPDRAGGEVHLRGVPAQCVHRHVILRPATVRACMHALFDLSARCFSCFRCSIFALYVSCTVLYLFMSIRSKEGVAATYILSVKIYVLRTIDVALYR

SEQ ID NO: 62612 - protein, 142 aa, Triticum aestivum
  peptide (1)..(142): Ceres Seq. ID no. 12584730
MAEKVSTLIIEANLECEKCYKKIQKVLGKLQEKEKIRTIIFDTKKNTVTISGPFDTAKLSKKPRCKACKAIKDIKIVEEKKPDAKKPEEKKPEEKKPEEKKPAADGCKCCCKKPDEKKPDEKKKPDEKKPGGKEETRREEAR

SEQ ID NO: 62613 - DNA, 1060 bp, Triticum aestivum
  misc_feature (1)..(1060): Ceres Seq. ID no. 13654738
gcttttaccttttaggacagaggagtaagcaagtgcagtggcagtggttggccgcagacagcagcagctcgcctccttccttccttcctcctcactcccccctatatacccgccaccctacccgtcggagggtgcgcgcagcggtggagctcggtggattgtcggggcaaatggattccagttccagggccgccctcttctgcttcctggccgtcgcctcctccctcctgcaccccgccagatctgacggggaggacaaccagctcctcaaggggatcaacagctacagagcttcactcaaggtcccggcgctcaccgagaacagcaatgccgactgcctggccgagcagctagcgaagaagttcaagggccaggagtgcaccaacaccaccggagccaacactgtccccggcaccgagccgcagttccccgactacccccagttcctcgaccgctgccacctcaacgcgtcggtaaccgaggacgggcaggtgatgccggcatgcgtgcccggactcgtggccgacgttgtgctgaccaactacaccaagtcccagtacaaccggttcctcaacgacaccaagtactccggcgtcgggatcgccaacgagggggactgggtggtcgtcgtcctcagcaccagcaccgactccggcgactactcccctgctcccccgggctccaactgggctccttcggtccagccgttcagctggatgattgtttcgctggtagggttcgtaattttgctgatgaagtgagaagataaatgttgtgttgctcatctcgcgtgctacaccgctgcaaatgagcgtgttgatcttatgcccgtgtcagtcgtttctgtatctttcagattgtcatttctactcggtccagttgacaccacagtacagtagcatatgcatgccacgaggttcgggatcaaaactttttttcttcagtattctcctttgaccacaattggcaacggctttatggatattgtggtcaggtgatgtgcattattgaaccacatctttcatctttgaacatttagctaaagccagaacttcaactt

SEQ ID NO: 62614 - protein, 252 aa, Triticum aestivum
  peptide (1)..(252): Ceres Seq. ID no. 13654739
FYLLGQRSKQVQWQWLAADSSSSPPSFLPPHSPLYTRHPTRRRVRAAVELGGLSGQMDSSSRAALFCFLAVASSLLHPARSDGEDNQLLKGINSYRASLKVPALTENSNADCLAEQLAKKFKGQECTNTTGANTVPGTEPQFPDYPQFLDRCHLNASVTEDGQVMPACVPGLVADVVLTNYTKSQYNRFLNDTKYSGVGIANEGDWVVVVLSTSTDSGDYSPAPPGSNWAPSVQPFSWMIVSLVGFVILLMK

SEQ ID NO: 62615 - protein, 196 aa, Triticum aestivum
  peptide (1)..(196): Ceres Seq. ID no. 13654740
MDSSSRAALFCFLAVASSLLHPARSDGEDNQLLKGINSYRASLKVPALTENSNADCLAEQLAKKFKGQECTNTTGANTVPGTEPQFPDYPQFLDRCHLNASVTEDGQVMPACVPGLVADVVLTNYTKSQYNRFLNDTKYSGVGIANEGDWVVVVLSTSTDSGDYSPAPPGSNWAPSVQPFSWMIVSLVGFVILLMK

SEQ ID NO: 62616 - DNA, 1093 bp, Triticum aestivum
  misc_feature (1)..(1093): Ceres Seq. ID no. 13583408
aaggctcttcccaaaccctccccgaccgccgccccccgttcgcctccgccgccgcctagccaccacgcgccaggagaaccccgcgccgccggccatggcggaggaggagggcacgcagcagctgccgttcgtgcgggagacggtcctcaagaagaggaaggacaacgaggagtgggccaccaagaaccgggagcgcaaggcggccaagaggcagcgccgctgccacgacgccaagggcgccatcaagcgccccgaggacttcgtcaaggagttccgcaacaaggagctcgacttcctgcggatgcgcacgcgcctcaaggtccggaacctgcgccccgccgaggccatcgacgccaagctgctcttcgccgtccgcatcccaggcaccgccgacttgcacccgcaaatcaggaagatcttggccaggctgcggctcacgcaggtcctcaccggcgtgttcctcaaggccaccgaggcaaacctcaagaggcttgcagctgtcggaccgttcgtcacctatgggttccccaatttgaagaatgtgaaggagcttatttacaagaagggtcgcggttatttcgacaaggagcctttcccccttaccagcaatgatctaatcgagaaggcacttggagaacacggtgtcatatgcttggaagacgtggtgcacgaaatctccacggtcgggccacacttcagagaaacggcgagctttctcatgcccttcaagctcaagtgtccggagaggaggctgcggatgaagaagaagcccttcaaggatggtggcgactcgggcaaccgtggggacaagatcaacgagctactcgagaagctgaactgaggcagtctccaacctgcgtccgcaaacaagcgatggatccgttattaccttgtcggttttgtaatagcatagctgaatgtacctttgttttggaaaccctgcctgagtgtttgggatcaaatcacgaaatactgttcttcgcccctcgctctgtccttcatgatcgatctgccgtgctttgcttgcgctgacagacttagtgaggttggatgatattgcaacaaaacatcaggttctcaaaaaaattttttt

SEQ ID NO: 62617 - protein, 279 aa, Triticum aestivum
  peptide (1)..(279): Ceres Seq. ID no. 13583409
RLFPNPPRPPPPVRLRRRLATTRQENPAPPAMAEEEGTQQLPFVRETVLKKRKDNEEWATKNRERKAAKRQRRCHDAKGAIKRPEDFVKEFRNKELDFLRMRTRLKVRNLRPAEAIDAKLLFAVRIPGTADLHPQIRKILARLRLTQVLTGVFLKATEANLKRLAAVGPFVTYGFPNLKNVKELIYKKGRGYFDKEPFPLTSNDLIEKALGEHGVICLEDVVHEISTVGPHFRETASFLMPFKLKCPERRLRMKKKPFKDGGDSGNRGDKINELLEKLN

SEQ ID NO: 62618 - protein, 248 aa, Triticum aestivum
  peptide (1)..(248): Ceres Seq. ID no. 13583410
MAEEEGTQQLPFVRETVLKKRKDNEEWATKNRERKAAKRQRRCHDAKGAIKRPEDFVKEFRNKELDFLRMRTRLKVRNLRPAEAIDAKLLFAVRIPGTADLHPQIRKILARLRLTQVLTGVFLKATEANLKRLAAVGPFVTYGFPNLKNVKELIYKKGRGYFDKEPFPLTSNDLIEKALGEHGVICLEDVVHEISTVGPHFRETASFLMPFKLKCPERRLRMKKKPFKDGGDSGNRGDKINELLEKLN

SEQ ID NO: 62619 - protein, 203 aa, Triticum aestivum
  peptide (1)..(203): Ceres Seq. ID no. 13583411
KALPKPSPTAAPRSPPPPPSHHAPGEPRAAGHGGGGGHAAAAVRAGDGPQEEEGQRGVGHQEPGAQGGQEAAPLPRRQGRHQAPRGLRQGVPQQGARLPADAHAPQGPEPAPRRGHRRQAALRRPHPRHRRLAPANQEDLGQAAAHAGPHRRVPQGHRGKPQEACSCRTVRHLWVPQFEECEGAYLQEGSRLFRQGAFPPYQQ

SEQ ID NO: 62620 - DNA, 915 bp, Triticum aestivum
  misc_feature (1)..(915): Ceres Seq. ID no. 15173873
ataaatgagcgaccaaaaccctagtccattcttccccaccgccgccttgccccctctcgccggattgccgctccgcgtccaccgaagaatcaccaatggctccgacgtcgaagatggcgctcggcataaagcgggcgtcgagatcgcacacctaccaccgccgcgggctttgggccatcaaggccaagcacggcggcgccttgcccaaggccgagaagccggccgccatcgccgagcccaagttctatcccgctgatgatgtcaagccacgcaccgtgagcacacgcaagccccatcccaccaagctcagatcgaccatcacaccgggcacggtgctgatcctgctcgcggggaggtacatgggaaagcgcgtggtgttcctcaagcagctccagtccggccttctcctcatcactggacctttcaagatcaatggcgtgccaatccgcagagtgaaccaggcttacgtcattgccacatccacaaaggtcgacatctctaaggttaatgtgcagaagtttgatgacaagtacttcgctagggagaagaagactagggcaaagaagactgagggcgagctatttgagtcggataaggaggcaaccaagaatttgccagacttcaagaaggatgaccagaaggtcattgacgctgagttgatcaaggctatcgatgctgtcccagaccttaaaaattatcttggtgcccggttctccctcagggatggcgacaagccgcatgagatgaccttctaagttacctggtacaagtttcaagatctgtggaagtcttttttgtctagtgtgtgttctggttctgtacttctgatttcttttgcctggttggtgaatatttgatttccactgaagtctgcctgtcaaatattttgagaagataactaggaagtaccatcct

SEQ ID NO: 62621 - protein, 219 aa, Triticum aestivum
  peptide (1)..(219): Ceres Seq. ID no. 15173874
MAPTSKMALGIKRASRSHTYHRRGLWAIKAKHGGALPKAEKPAAIAEPKFYPADDVKPRTVSTRKPHPTKLRSTITPGTVLILLAGRYMGKRVVFLKQLQSGLLLITGPFKINGVPIRRVNQAYVIATSTKVDISKVNVQKFDDKYFAREKKTRAKKTEGELFESDKEATKNLPDFKKDDQKVIDAELIKAIDAVPDLKNYLGARFSLRDGDKPHEMTF

SEQ ID NO: 62622 - protein, 213 aa, Triticum aestivum
  peptide (1)..(213): Ceres Seq. ID no. 15173875
MALGIKRASRSHTYHRRGLWAIKAKHGGALPKAEKPAAIAEPKFYPADDVKPRTVSTRKPHPTKLRSTITPGTVLILLAGRYMGKRVVFLKQLQSGLLLITGPFKINGVPIRRVNQAYVIATSTKVDISKVNVQKFDDKYFAREKKTRAKKTEGELFESDKEATKNLPDFKKDDQKVIDAELIKAIDAVPDLKNYLGARFSLRDGDKPHEMTF

SEQ ID NO: 62623 - protein, 131 aa, Triticum aestivum
  peptide (1)..(131): Ceres Seq. ID no. 15173876
MGKRVVFLKQLQSGLLLITGPFKINGVPIRRVNQAYVIATSTKVDISKVNVQKFDDKYFAREKKTRAKKTEGELFESDKEATKNLPDFKKDDQKVIDAELIKAIDAVPDLKNYLGARFSLRDGDKPHEMTF

SEQ ID NO: 62624 - DNA, 824 bp, Triticum aestivum
  misc_feature (1)..(824): Ceres Seq. ID no. 13583412
gcatctgaagacaccaagctcgatcgcgctccgacccgtcagccatggctcggctcgccgccctcctcctcgccttcgccgtcgccgtctccgccgccgcgctggcgcatggccgcgatctcccgacccagatcaagctgaccaagggcggtggcgcggtgggcggcgacagccaggagtgcgtgtacacggtgtacgtgcgcacggggtcgatctggaaggccgggacggacgccaacatcacgctggagctctacacggcgggcaacgccgacggcgtggcgatcgcggacctgccgtcgtggggcgggctcatgtgggggggccactcctacttcgagcgcggcaacctggacatcttcagcgggcgcgggccgtgcatggccggcgcgccctgccgcatgagggtgtcctccgacggcaccggcgcgcaccacggctggtactgcaactacgtggaggtcaccgtcaccggcccgcaccgcggctgcgcccagcagctcttcaccgtcgagcagtggctcgccaccgacgccgcgccctacaagctcgaggccgtcgtcgaccgctgccccgccgatggcaccgccgccgaggagtaagatcgagtaagctgtacgccggcctcttcgtcatcgtgtgtggttggtagcaataagctgcggggccgttcgtgccggccccgtgatccgcgtgcgccgcgccggacgcggagatgtactactagatgagttcgtgctgctggtggtggcgaaataatcgggacctgatttgtactgtgtgccattagtgagagttgtgattagttgcggtggctgttttgt

SEQ ID NO: 62625 - protein, 216 aa, Triticum aestivum
  peptide (1)..(216): Ceres Seq. ID no. 13583413
HLKTPSSIALRPVSHGSARRPPPRLRRRRLRRRAGAWPRSPDPDQADQGRWRGGRRQPGVRVHGVRAHGVDLEGRDGRQHHAGALHGGQRRRRGDRGPAVVGRAHVGGPLLLRARQPGHLQRARAVHGRRALPHEGVLRRHRRAPRLVLQLRGGHRHRPAPRLRPAALHRRAVARHRRRALQARGRRRPLPRRWHRRRGVRSSKLYAGLFVIVCGW

SEQ ID NO: 62626 - protein, 185 aa, Triticum aestivum
  peptide (1)..(185): Ceres Seq. ID no. 13583414
MARLAALLLAFAVAVSAAALAHGRDLPTQIKLTKGGGAVGGDSQECVYTVYVRTGSIWKAGTDANITLELYTAGNADGVAIADLPSWGGLMWGGHSYFERGNLDIFSGRGPCMAGAPCRMRVSSDGTGAHHGWYCNYVEVTVTGPHRGCAQQLFTVEQWLATDAAPYKLEAVVDRCPADGTAAEE

SEQ ID NO: 62627 - DNA, 797 bp, Triticum aestivum
  misc_feature (1)..(797): Ceres Seq. ID no. 15224286
gaaaaggcgagaaggaaggaagcaacgaagcgaggggattccgcggagttggtggaggcgagggtttgtgcggccatggagaacctggcgatgctgtgggggatcatcgggccgggcgtcgccggcgcgctcttcggcgccggctggtggttctgggtcgacgccgtcgtctgcagcgccgtccaggtctccttcatccactacctgcccgggatcttcgcgtcgctggccgcgctcatgttcaattgcgtcgacaaggatgccatcgggaacgactactactcgtcctacggggatgattccgagtggagggtgaagctttggctttttgtcgcctacgtcgtttcattcgtctgccttgcgggatcagtgggtttgttggtgcaagacgccctgacagacaagggcccttctgtgtggactggtgttgccggggttctgcaatgcgtttttgtgttgataagcgggttgacatactggacgtgccacaccgaggattaagggtcaaatatcaaatctcgcgaagacgtttagtctatacccgtgtgtggtcctgtgtaaaaaaaatatgttcattccagggcgggattacttggtgtccgtgtgtgcatagctgaccgcttcctgaaatggatccgtagcatcagtactacgtacgtacgtgtttattatcctaatttgttgtgagattgtggtgcttggtggcttgagaggttagcattgagattggatcacgagctgcctgcagcaagtcgttattactgtcaaacctccataagaaaattcagttgactccg

SEQ ID NO: 62628 - protein, 166 aa, Triticum aestivum
  peptide (1)..(166): Ceres Seq. ID no. 15224287
EKARRKEATKRGDSAELVEARVCAAMENLAMLWGIIGPGVAGALFGAGWWFWVDAVVCSAVQVSFIHYLPGIFASLAALMFNCVDKDAIGNDYYSSYGDDSEWRVKLWLFVAYVVSFVCLAGSVGLLVQDALTDKGPSVWTGVAGVLQCVFVLISGLTYWTCHTED

SEQ ID NO: 62629 - protein, 141 aa, Triticum aestivum
  peptide (1)..(141): Ceres Seq. ID no. 15224288
MENLAMLWGIIGPGVAGALFGAGWWFWVDAVVCSAVQVSFIHYLPGIFASLAALMFNCVDKDAIGNDYYSSYGDDSEWRVKLWLFVAYVVSFVCLAGSVGLLVQDALTDKGPSVWTGVAGVLQCVFVLISGLTYWTCHTED

SEQ ID NO: 62630 - protein, 136 aa, Triticum aestivum
  peptide (1)..(136): Ceres Seq. ID no. 15224289
MLWGIIGPGVAGALFGAGWWFWVDAVVCSAVQVSFIHYLPGIFASLAALMFNCVDKDAIGNDYYSSYGDDSEWRVKLWLFVAYVVSFVCLAGSVGLLVQDALTDKGPSVWTGVAGVLQCVFVLISGLTYWTCHTED

SEQ ID NO: 62631 - DNA, 751 bp, Triticum aestivum
  misc_feature (1)..(751): Ceres Seq. ID no. 13598378
acaaaacggcccggactcgcctcctcctcctccccctcacaactcgccaacgccaaatccgcctccgccaccggccagccagagagcgagcgagcgattcgccgccgccgtcaagcctgcagggagcgagcccctctcgcctccaaacagcctcaccctcgcggcccccgtcccctcaaagtccccgcgtctcccgcgagaatcgcgcccgcccgcctagggtttccgccgccgccggagaggaggggagtgggaggaggggacgagatggccggacggctcctcgggcagctcctcgtcatgggcggcgccgtcgtcggcagggccgtggtccaggcctaccgccaggccatcgtcaatgcacagagaaccggagctgcccaggaagctgtgaatggtattcgaagggctagcaaggctatgaccgaacaagaagcccggcaaatattaggtatcagtgaaaagacgagttgggaagagattgtcaagaagtatgatacgatgtttgagaagaatgccaagagcggaagcttctatctccagtcgaaagtacaccgggccaaagaatgtctggagtccatataccatgataagcccgacataatgaactgaactgagatgggcagcgtttcgtctaatcgatcgattttgtcagtcgatgttctgtctgagctatgctgggctgctgcatcaggtcaaatttggttgtaacaggatgtttgttctgcttgactcgaataatatattcaac

SEQ ID NO: 62632 - protein, 203 aa, Triticum aestivum
  peptide (1)..(203): Ceres Seq. ID no. 13598379
TKRPGLASSSSPSQLANAKSASATGQPESERAIRRRRQACRERAPLASKQPHPRGPRPLKVPASPARIAPARLGFPPPPERRGVGGGDEMAGRLLGQLLVMGGAVVGRAVVQAYRQAIVNAQRTGAAQEAVNGIRRASKAMTEQEARQILGISEKTSWEEIVKKYDTMFEKNAKSGSFYLQSKVHRAKECLESIYHDKPDIMN

SEQ ID NO: 62633 - protein, 136 aa, Triticum aestivum
  peptide (1)..(136): Ceres Seq. ID no. 13598380
KTARTRLLLLPLTTRQRQIRLRHRPARERASDSPPPSSLQGASPSRLQTASPSRPPSPQSPRVSRENRARPPRVSAAAGEEGSGRRGRDGRTAPRAAPRHGRRRRRQGRGPGLPPGHRQCTENRSCPGSCEWYSKG

SEQ ID NO: 62634 - protein, 114 aa, Triticum aestivum; identical to SEQ ID NO: 56143
  peptide (1)..(114): Ceres Seq. ID no. 13598381

SEQ ID NO: 62635 - DNA, 779 bp, Triticum aestivum
  misc_feature (1)..(779): Ceres Seq. ID no. 12587336
gaagcccctccctcccctgtgctccgtcttctatctcacctcccgtgatctctgccgtcccacctcccccgattcatcttcagatcgaggcttccggaggctgcatcgagagtagcaccgccacgcccaactccgctcccttccggcgctaatccatgctcagcagatctagtcgcgaaaaggacggcgccccgccgcccctgctggatccgccgagccagcggccggatctatcgagatgcgccgggatcccgagcctttctcctccccaccttctcctccgtcgacagtaggcagcagagcaaggcgcgggcgactgctccggccagaggagggcgtgaggtacaacgcgacctcactggggcgcgactccgtcagccagcaccggcgcccaactaggatccaccgaacccaggcgcggcctacggcaggcgtgcggttttgagttcaacaggagagctcgcgcgagattgagcgctcctcccatcttccagcgaacccaaaagagagcagaggaggagatgaccaagggcgttggtccgtcgatcggcatcgacctcgggatgacctactcctgcgttggcgtgtggcagcatgtcgacatcatgggcaacgaccaggccaccatggcaactgcaccacgccctcctacgtctccaccaccagcgacgccgccaggaaccaggtcgcaacgaactccaccaacaccgtcttctgtacgtgcatcaatatagaatttcttctagtacgcatcgtccaactctttttcatatgcacac

SEQ ID NO: 62636 - protein, 70 aa, Triticum aestivum
  peptide (1)..(70): Ceres Seq. ID no. 12587337
MTKGVGPSIGIDLGMTYSCVGVWQHVDIMGNDQATMATAPRPPTSPPPATPPGTRSQRTPPTPSSVRASI

SEQ ID NO: 62637 - protein, 68 aa, Triticum aestivum
  peptide (1)..(68): Ceres Seq. ID no. 12587338
MRRDPEPFSSPPSPPSTVGSRARRGRLLRPEEGVRYNATSLGRDSVSQHRRPTRIHRTQARPTAGVRF

SEQ ID NO: 62638 - protein, 61 aa, Triticum aestivum
  peptide (1)..(61): Ceres Seq. ID no. 12587339
MSTSWATTRPPWQLHHALLRLHHQRRRQEPGRNELHQHRLLYVHQYRISSSTHRPTLFHMH

SEQ ID NO: 62639 - DNA, 861 bp, Triticum aestivum
  misc_feature (1)..(861): Ceres Seq. ID no. 13655072
ccgattcccatccagcgtacagactaggcgacccccgcttcccgtcccctctctcctccacacgcctctctccctctcccctcgtccgccgccgccgccgccgccaccatgggcaggggcaagttcaagggcaagccaaccggccgccgcaacttctccaccccggaggagatcgcttctggaacttctgggcgtccacgctcgtttaagaagaatgtagctgaagcagaagaggaagaggaagaagtagaagaatctgaggaggaagaatccgaagacgacggtgaagagaagaaacataaaggaactgaaggtgttattcaaatcgaaaatccaaacctggtgaaagcaaagaatataaaagccaaagaagctgatcttggaaagacaactgaactctcgaggcgtgagagagaggagattgagaaacaaaaatctcatgagcgctatatgaagcttcaggagcaagggaaaacagaacaggcgaagaaagatttggaacgtcttgctttaataaggcagcaaagagcagatgctgcaaagaaacgcgaagaggagaaagctgctaaagaacagaggaagaccgaagcgcgcaaataactgccaaggtggtggaggcatgagctaagctgagctgtgttggctggatatttatttctatgcatcttagtatatttaaaccctggtctctattccatcatctacatttccataaaaaccgtgcattgacaagtgtaaagtagtcctgtcggcgtggcttgctgtaaacttgagcttggcagggtacacatttagtgagatcagcttatgtgagatttgctttcactcaaaaattggtatggaaaataactgttgaaattt

SEQ ID NO: 62640 - protein, 163 aa, Triticum aestivum; identical to SEQ ID NO: 51870
  peptide (1)..(163): Ceres Seq. ID no. 13655073

SEQ ID NO: 62641 - DNA, 913 bp, Triticum aestivum
  misc_feature (1)..(913): Ceres Seq. ID no. 13580026
ccgagagccaggtttgccctagccccttgccgcgcaccggatcgccacctcttccgacttccgcggccgcataaactgtcgaaaccacaactccacaaatttgcctcccctctttccccaggttaaacaacccatccggagccggagaacgycagaagaatccagaggcaccyccgagtttgttggcgatgttgcgcgcgggaggaagccggctcgtcgcccccggactccggcgkctcctcggcccggrsgccggsgagagggctgcgccggggctggcggcggcgggggcgggggcgagggcgtaccacgagcgggtggtggaccactacaacaacccgcggaacgtcgggtcyttcgacaaggacgaccccnacgtcggcaccgggctsgtcggcgcgccggcctgcggcgacgtcatgaagctkcagatccgtgtcgacgaaggcaccgggaagatmgtcgacgcctgcttcaagaccttcggctgcggctcygcaatcgcgtcgtcctccgtccgctactgaatgggtgaagggaaagcaaatggaggaagtagtgagtatcaagaacactgagattgcaawgcacttgtcacttccaccagtaaagctccattgcagtatgcttgctgaagatgcaattaaagctgccgtgaaagattatgaatcaaagaaggcgaagctgggagacagccctgcagagaaggctgccgaagcatgaacatgatatatgcttctgttctatgagggtgagaaatggtgtgcaatgttgacaaactccagtgttgtagcatgtatcataaggatgaacacgaacaacttgaaataaatgtgatgtcatgttaggagaagttgtgcatgtatagcagctgctaagaaaatttgtgcatgtatagcaactgctggaagtc

SEQ ID NO: 62642 - protein, 112 aa, Triticum aestivum
  peptide (1)..(112): Ceres Seq. ID no. 15222711
  misc_feature (16)..(16): Xaa is any aa, unknown or other
  misc_feature (21)..(21): Xaa is any aa, unknown or other
  misc_feature (23)..(23): Xaa is any aa, unknown or other
  misc_feature (56)..(56): Xaa is any aa, unknown or other
  misc_feature (63)..(63): Xaa is any aa, unknown or other
  misc_feature (68)..(68): Xaa is any aa, unknown or other
  misc_feature (80)..(80): Xaa is any aa, unknown or other
  misc_feature (91)..(91): Xaa is any aa, unknown or other
  misc_feature (103)..(103): Xaa is any aa, unknown or other
MLRAGGSRLVAPGLRXLLGPXAXERAAPGLAAAGAGARAYHERVVDHYNNPRNVGXFDKDDPXVGTGXVGAPACGDVMKXQIRVDEGTGKXVDACFKTFGCGXAIASSSVRY

SEQ ID NO: 62643 - protein, 58 aa, Triticum aestivum
  peptide (1)..(58): Ceres Seq. ID no. 15222712
  misc_feature (14)..(14): Xaa is any aa, unknown or other
MEEVVSIKNTEIAXHLSLPPVKLHCSMLAEDAIKAAVKDYESKKAKLGDSPAEKAAEA

SEQ ID NO: 62644 - DNA, 1092 bp, Triticum aestivum
  misc_feature (1)..(1092): Ceres Seq. ID no. 13598386
aaaaatagcatctcaccccacccatggacaccgacctcgacctggacgccctcctcgcctccttcgccggcgagtccgccgcagtctccgagctcctcgccccgcctccgctcgatgcggcggaggcggggtcgccggagtcggtgacctcccggtccagccacgccggcgaggaggtgctgtcggagatcgagaggtttctgatgcaggaggacgaggcggcgggggcggagccggtggacgggatcagcgtggatgagttcttcgacgcgctgttcgatggtggggaggaggggggcgagaaggggaacgggagtgaggctgaggctgggggcagcaccgatggggactctaggagggaggaagaaggggtggaggtggtgacgccggagacagaggcggaggtggtgacgcccgaaacggaggtcgatggcgatgatcccatcagcaagaagaagaggaggcaaatgaggaatagggattctgccatgaaatcaagggrgaggaagaagtcatatgtgaaggrcttggagacgaagagcaagtatcttgaggcggagtgtcgccgcctcagctacgcacttcagtgctgcgcagctgagaacatggcactgcgccagaacatgttgaaggataggcctattggtgctcacacagccatgcaggagtctgccgtactttcggaaaccctgccgctggtttccctgctttggctagtgagcatcgtgtgcctattcctaacgcccggtctacccaaccgaagcctggcggctccaaggagagccgaaagaggtctcgcaatggtagccggaaagccaagcagtgatcaaccagagaccttggagcttctaccccatggaaggcgctggaggggcacaagggagaggatcaagctagatgctccgccattgcgtgcagctgccgcttgctagactagtgccagcttattcgcaagtttccagtatgtagtgtagttagcaatgaatgtctaaatatgtgttctcttgctgccaccgtggctttatccatgactatcttctgctctctctgttcgcgtkgttttgatgatcttctaatcagatgctagttttg

SEQ ID NO: 62645 - protein, 302 aa, Triticum aestivum
  peptide (1)..(302): Ceres Seq. ID no. 15222334
  misc_feature (160)..(160): Xaa is any aa, unknown or other
  misc_feature (168)..(168): Xaa is any aa, unknown or other
MDTDLDLDALLASFAGESAAVSELLAPPPLDAAEAGSPESVTSRSSHAGEEVLSEIERFLMQEDEAAGAEPVDGISVDEFFDALFDGGEEGGEKGNGSEAEAGGSTDGDSRREEEGVEVVTPETEAEVVTPETEVDGDDPISKKKRRQMRNRDSAMKSRXRKKSYVKXLETKSKYLEAECRRLSYALQCCAAENMALRQNMLKDRPIGAHTAMQESAVLSETLPLVSLLWLVSIVCLFLTPGLPNRSLAAPRRAERGLAMVAGKPSSDQPETLELLPHGRRWRGTRERIKLDAPPLRAAAAC

SEQ ID NO: 62646 - protein, 242 aa, Triticum aestivum
  peptide (1)..(242): Ceres Seq. ID no. 15222335
  misc_feature (100)..(100): Xaa is any aa, unknown or other
  misc_feature (108)..(108): Xaa is any aa, unknown or other
MQEDEAAGAEPVDGISVDEFFDALFDGGEEGGEKGNGSEAEAGGSTDGDSRREEEGVEVVTPETEAEVVTPETEVDGDDPISKKKRRQMRNRDSAMKSRXRKKSYVKXLETKSKYLEAECRRLSYALQCCAAENMALRQNMLKDRPIGAHTAMQESAVLSETLPLVSLLWLVSIVCLFLTPGLPNRSLAAPRRAERGLAMVAGKPSSDQPETLELLPHGRRWRGTRERIKLDAPPLRAAAAC

SEQ ID NO: 62647 - protein, 154 aa, Triticum aestivum
  peptide (1)..(154): Ceres Seq. ID no. 15222336
  misc_feature (12)..(12): Xaa is any aa, unknown or other
  misc_feature (20)..(20): Xaa is any aa, unknown or other
MRNRDSAMKSRXRKKSYVKXLETKSKYLEAECRRLSYALQCCAAENMALRQNMLKDRPIGAHTAMQESAVLSETLPLVSLLWLVSIVCLFLTPGLPNRSLAAPRRAERGLAMVAGKPSSDQPETLELLPHGRRWRGTRERIKLDAPPLRAAAAC

SEQ ID NO: 62648 - DNA, 777 bp, Triticum aestivum
  misc_feature (1)..(777): Ceres Seq. ID no. 12584790
acatcctaatcgaaaaagttccgtcccattattggttcttgcgaggaggggggcggagaaacggaagcaggaggcagagaggagatcgagccagagggcggcgagcaagggcgcgatggcgtccaagaggatacagaaggagcttaaggatctgcagaaggacccccctacctcatgcagcgcaggtcctgtgggtgaagatatgttccattggcaggcaacaataatgggcccatctgacagcccatattctggtggagttttcctagttactatccacttccctcctgattatcctttcaaaccaccaaaggtggcattccgcaccaaggtgttccatccaaacatcaacagcaacgggagcatttgtctggacatcctcaaggaccaatggagccccgctctgaccatttccaaggtgctgctgtccatctgctccctgctgtatgacccgaaccctgatgaccctctggtccctgagatcgcccacatgtacaagacggaccggcacaagtacgagagcaccgccaggacctggacgcaaaggtatgccatgtaatgcaagacggcggatgggtcgccggagtcagtcttgtttgtaacattctcgatcagttcgtgtgtgcccgcccagtgtgtcacctgtctgtcaaactggcactcgttgctcaactgtgtcacctggcgcagtgacttggaacatggaaccggtgttgcatattttggattcagataaatgtagccacctgcctgccacttaaaaaaaaaaaaaaaaaa

SEQ ID NO: 62649 - protein, 185 aa, Triticum aestivum
  peptide (1)..(185): Ceres Seq. ID no. 12584791
HPNRKSSVPLLVLARRGAEKRKQEAERRSSQRAASKGAMASKRIQKELKDLQKDPPTSCSAGPVGEDMFHWQATIMGPSDSPYSGGVFLVTIHFPPDYPFKPPKVAFRTKVFHPNINSNGSICLDILKDQWSPALTISKVLLSICSLLYDPNPDDPLVPEIAHMYKTDRHKYESTARTWTQRYAM

SEQ ID NO: 62650 - protein, 147 aa, Triticum aestivum
  peptide (1)..(147): Ceres Seq. ID no. 12584792
MASKRIQKELKDLQKDPPTSCSAGPVGEDMFHWQATIMGPSDSPYSGGVFLVTIHFPPDYPFKPPKVAFRTKVFHPNINSNGSICLDILKDQWSPALTISKVLLSICSLLYDPNPDDPLVPEIAHMYKTDRHKYESTARTWTQRYAM

SEQ ID NO: 62651 - protein, 118 aa, Triticum aestivum
  peptide (1)..(118): Ceres Seq. ID no. 12584793
MFHWQATIMGPSDSPYSGGVFLVTIHFPPDYPFKPPKVAFRTKVFHPNINSNGSICLDILKDQWSPALTISKVLLSICSLLYDPNPDDPLVPEIAHMYKTDRHKYESTARTWTQRYAM

SEQ ID NO: 62652 - DNA, 1937 bp, Triticum aestivum
  misc_feature (1)..(1937): Ceres Seq. ID no. 14314088
ctattccaccgccccccttcctcccgccaccagcccaacctcgccgccggcctcactctccctctatcctccgccccaccgcccggcctcccaccaccggagcgcgccgccctccccgtcgaagaaaccagaacccctcgccctccgcgtgccctcgtcagctcggccgcgatgatctccgccatgtcctgggtccccaggggcgccgccaagagcgtccccatcgaggcggagccgcccaccaaggaggagatcgaggaggccatgaagaaaatcgccctcggcagagaggccgggagcgacgccgacgacgcggacggggacgaggacgacgacgccgtgatggaggtcgacggcgccgaggacgaggaggtcgacgaggtcgcccaggccaaggccgccgccaaggcgctcgggaccaagagcagctcgggctcggccgccgtcggcgacgtttccgacgggctcgccgagctcaacatggacgcctacgacgacgaggaggatgggctcgagcttttcagcaccgggctgggggacttgtactacaagagcaacgaggaggacccctatatcatcaagaacgaagaagatgatgatggcgaggatgacgatgaggagattgaggacatgactatcaaacctactgatatagtcattgtttgtgctcataacgaggatgaattcaattctctccaggttagtatagtggaagaactggaagatggggatcctaatatgtttgtgcaccatgaggtccctctctcagattttccgctctgcacagcttggatggattttaaccgtcaggatggcgaacagaaaggaaatttcatagctgttggcaccatggatcctacaattgaaatatggaacttggatgtcgtcgacgaggtcgaaccacattatgtgctaggaggagtttcaaaaaagaagaagaaagttaaggggaaaaagggaaaaacatataagaagggtagccatagaagttctgtgcttggtcttgcgtggaacacggtggtgaggaatgctctagctagtgcaagtgcagacaaaactgtgaaagtttgggacttaagtgctggtaaatgtttagtcacactgcaacatcatgatgacaaggttcaatcagttgcctggaggtcacctgaagttcttctcagtggatcttttgatagaacaattgccatgacagatatgaaagacagtggacaatgttgtcataaatggcctgtcgaagcagatgtagagagcttagtttgtgatccacacaatgaacactcctttgtggttagtcttgaaaatgggatggttcaagtatttgatattcggacagcttcatcaaattcaaatcctggacagccgatttttactctgcatgcacacgaaaaggccgtttcttccatatctttcgcaccttctacccctaattttcttgcgactggttcaactgacaaaatggtgaagctctgggatctatcgaataaccagccttcgtgtgtctcgtcgctgaatcctaagcttggagctatattctcggtgtcgttttcgatcgacaaccccttcctgttagcgtgcggaggatcgaaaggcaaactgaaggtctggaacacactgtctgaacccgccgtcgccaacaaatttggtaaggggcggcaaattgcaccagctctgcgaagcgaatcccccacagaatgatgggctcgagctgtttctggctatgtggtagaatagattttttcgcgtttcagttttgttactgggtgcaatgtaatgggagcatggatttatttatatatgtacaaccaaacgacagctgaaatggatctgtagcgggagttcgcagtttatcatggattccgttttatttggacctagaaaaaggaagtcaaagatagctgttttatactccctctgtttcaaatgtttcaaaatgc

SEQ ID NO: 62653 - protein, 565 aa, Triticum aestivum
  peptide (1)..(565): Ceres Seq. ID no. 14314089
LFHRPPSSRHQPNLAAGLTLPLSSAPPPGLPPPERAALPVEETRTPRPPRALVSSAAMISAMSWVPRGAAKSVPIEAEPPTKEEIEEAMKKIALGREAGSDADDADGDEDDDAVMEVDGAEDEEVDEVAQAKAAAKALGTKSSSGSAAVGDVSDGLAELNMDAYDDEEDGLELFSTGLGDLYYKSNEEDPYIIKNEEDDDGEDDDEEIEDMTIKPTDIVIVCAHNEDEFNSLQVSIVEELEDGDPNMFVHHEVPLSDFPLCTAWMDFNRQDGEQKGNFIAVGTMDPTIEIWNLDVVDEVEPHYVLGGVSKKKKKVKGKKGKTYKKGSHRSSVLGLAWNTVVRNALASASADKTVKVWDLSAGKCLVTLQHHDDKVQSVAWRSPEVLLSGSFDRTIAMTDMKDSGQCCHKWPVEADVESLVCDPHNEHSFVVSLENGMVQVFDIRTASSNSNPGQPIFTLHAHEKAVSSISFAPSTPNFLATGSTDKMVKLWDLSNNQPSCVSSLNPKLGAIFSVSFSIDNPFLLACGGSKGKLKVWNTLSEPAVANKFGKGRQIAPALRSESPTE

SEQ ID NO: 62654 - protein, 508 aa, Triticum aestivum
  peptide (1)..(508): Ceres Seq. ID no. 14314090
MISAMSWVPRGAAKSVPIEAEPPTKEEIEEAMKKIALGREAGSDADDADGDEDDDAVMEVDGAEDEEVDEVAQAKAAAKALGTKSSSGSAAVGDVSDGLAELNMDAYDDEEDGLELFSTGLGDLYYKSNEEDPYIIKNEEDDDGEDDDEEIEDMTIKPTDIVIVCAHNEDEFNSLQVSIVEELEDGDPNMFVHHEVPLSDFPLCTAWMDFNRQDGEQKGNFIAVGTMDPTIEIWNLDVVDEVEPHYVLGGVSKKKKKVKGKKGKTYKKGSHRSSVLGLAWNTVVRNALASASADKTVKVWDLSAGKCLVTLQHHDDKVQSVAWRSPEVLLSGSFDRTIAMTDMKDSGQCCHKWPVEADVESLVCDPHNEHSFVVSLENGMVQVFDIRTASSNSNPGQPIFTLHAHEKAVSSISFAPSTPNFLATGSTDKMVKLWDLSNNQPSCVSSLNPKLGAIFSVSFSIDNPFLLACGGSKGKLKVWNTLSEPAVANKFGKGRQIAPALRSESPTE

SEQ ID NO: 62655 - protein, 504 aa, Triticum aestivum
  peptide (1)..(504): Ceres Seq. ID no. 14314091
MSWVPRGAAKSVPIEAEPPTKEEIEEAMKKIALGREAGSDADDADGDEDDDAVMEVDGAEDEEVDEVAQAKAAAKALGTKSSSGSAAVGDVSDGLAELNMDAYDDEEDGLELFSTGLGDLYYKSNEEDPYIIKNEEDDDGEDDDEEIEDMTIKPTDIVIVCAHNEDEFNSLQVSIVEELEDGDPNMFVHHEVPLSDFPLCTAWMDFNRQDGEQKGNFIAVGTMDPTIEIWNLDVVDEVEPHYVLGGVSKKKKKVKGKKGKTYKKGSHRSSVLGLAWNTVVRNALASASADKTVKVWDLSAGKCLVTLQHHDDKVQSVAWRSPEVLLSGSFDRTIAMTDMKDSGQCCHKWPVEADVESLVCDPHNEHSFVVSLENGMVQVFDIRTASSNSNPGQPIFTLHAHEKAVSSISFAPSTPNFLATGSTDKMVKLWDLSNNQPSCVSSLNPKLGAIFSVSFSIDNPFLLACGGSKGKLKVWNTLSEPAVANKFGKGRQIAPALRSESPTE

SEQ ID NO: 62656 - DNA, 1257 bp, Triticum aestivum
  misc_feature (1)..(1257): Ceres Seq. ID no. 13598714
agaacatcctaatcgaaaatcatcgagctcgcaycacargagttayctctrgctagtcrcgtcrcatcaaagccgaagaagcaatggccgccttcgccaccaggtcsgcggccttcctyggcctcgccgycgtgctctgtktcctcgycggcgmggcgagcgcgcagcagctctckcccarcttctactcgaggtcttgccccaacctggcgtccatcgtgcggtcggggatgacckccgcrttgcagacggagaggcggatgggcgcgtccatcctccgcctcttcttccacgactgcttcgtcaatgggtgtgacggctcsattctgcttgacgacacstcgacgttcaccggcgagaagaacgccgggccgaacgccaactcggcscgygggttcgaggtgatcgacgccmtcaagacccrggtcgargccgcgtgcagggccaccgtctcctgcgccgacatcctcgcgctcgccgcccgtgacggagtcaacctgctcggaggtcccacctggagcgtgccgctggggcgcaaggactcgcgcacggcgagtcagagcgcggccaacgcgaacctgccggggcccggctccagcctcgccacgctcatcaccatgttcggcaacaagaacctgtcgccgcgggacatgacggcgctctccggcgcgcacaccatcgggcggtcgcagtgccagttctttcgcaaccgcatctacaacgagcgcaacatcaacgccagcttcgcggcgctgcggcagcggacgtgcccgcggtccggcggcaacggcaacctcgcgcccttcgacgtgcagaccgccgacgggttcgacaacgcatactaccagaacctggtggggcagcgcggcctcctgcactcggaccaggagctcttcaacggcgggtcgcaggatgcgctggtgaggcagtacagcaacagccccagccagttctccgccgacttcgtcacggccatgcttaagatgggcggcctgctgtgtatgtattaatgtgtatgtatgaagaagaacaccaaataatgattgatgccttggaaaaccaggcattggtcaggttcacgtatgtatgtgttaatgtgtatgtatgaagaagaacaccaaatgtacaaacgctcgtttgctcaatccggggcgaacgtgcaaactacaaagtatcaaaatgtacgttggtcgtaaaagtgtatcatcatcaacatcatcaatacagaataatgggatggtgcaatcatcataactg

SEQ ID NO: 62657 - protein, 308 aa, Triticum aestivum
  peptide (1)..(308): Ceres Seq. ID no. 15222409
  misc_feature (8)..(8): Xaa is any aa, unknown or other
  misc_feature (12)..(12): Xaa is any aa, unknown or other
  misc_feature (16)..(16): Xaa is any aa, unknown or other
  misc_feature (20)..(20): Xaa is any aa, unknown or other
  misc_feature (22)..(22): Xaa is any aa, unknown or other
  misc_feature (24)..(24): Xaa is any aa, unknown or other
  misc_feature (31)..(31): Xaa is any aa, unknown or other
  misc_feature (33)..(33): Xaa is any aa, unknown or other
  misc_feature (52)..(52): Xaa is any aa, unknown or other
  misc_feature (53)..(53): Xaa is any aa, unknown or other
  misc_feature (80)..(80): Xaa is any aa, unknown or other
  misc_feature (86)..(86): Xaa is any aa, unknown or other
  misc_feature (102)..(102): Xaa is any aa, unknown or other
  misc_feature (103)..(103): Xaa is any aa, unknown or other
  misc_feature (111)..(111): Xaa is any aa, unknown or other
  misc_feature (114)..(114): Xaa is any aa, unknown or other
  misc_feature (116)..(116): Xaa is any aa, unknown or other
MAAFATRXAAFXGLAXVLCXLXGXASAQQLXPXFYSRSCPNLASIVRSGMTXXLQTERRMGASILRLFFHDCFVNGCDGXILLDDXSTFTGEKNAGPNANSXXGFEVIDAXKTXVXAACRATVSCADILALAARDGVNLLGGPTWSVPLGRKDSRTASQSAANANLPGPGSSLATLITMFGNKNLSPRDMTALSGAHTIGRSQCQFFRNRIYNERNINASFAALRQRTCPRSGGNGNLAPFDVQTADGFDNAYYQNLVGQRGLLHSDQELFNGGSQDALVRQYSNSPSQFSADFVTAMLKMGGLLCMY

SEQ ID NO: 62658 - protein, 259 aa, Triticum aestivum
  peptide (1)..(259): Ceres Seq. ID no. 15222410
  misc_feature (3)..(3): Xaa is any aa, unknown or other
  misc_feature (4)..(4): Xaa is any aa, unknown or other
  misc_feature (31)..(31): Xaa is any aa, unknown or other
  misc_feature (37)..(37): Xaa is any aa, unknown or other
  misc_feature (53)..(53): Xaa is any aa, unknown or other
  misc_feature (54)..(54): Xaa is any aa, unknown or other
  misc_feature (62)..(62): Xaa is any aa, unknown or other
  misc_feature (65)..(65): Xaa is any aa, unknown or other
  misc_feature (67)..(67): Xaa is any aa, unknown or other
MTXXLQTERRMGASILRLFFHDCFVNGCDGXILLDDXSTFTGEKNAGPNANSXXGFEVIDAXKTXVXAACRATVSCADILALAARDGVNLLGGPTWSVPLGRKDSRTASQSAANANLPGPGSSLATLITMFGNKNLSPRDMTALSGAHTIGRSQCQFFRNRIYNERNINASFAALRQRTCPRSGGNGNLAPFDVQTADGFDNAYYQNLVGQRGLLHSDQELFNGGSQDALVRQYSNSPSQFSADFVTAMLKMGGLLCMY

SEQ ID NO: 62659 - protein, 249 aa, Triticum aestivum
  peptide (1)..(249): Ceres Seq. ID no. 15222411
  misc_feature (21)..(21): Xaa is any aa, unknown or other
  misc_feature (27)..(27): Xaa is any aa, unknown or other
  misc_feature (43)..(43): Xaa is any aa, unknown or other
  misc_feature (44)..(44): Xaa is any aa, unknown or other
  misc_feature (52)..(52): Xaa is any aa, unknown or other
  misc_feature (55)..(55): Xaa is any aa, unknown or other
  misc_feature (57)..(57): Xaa is any aa, unknown or other
MGASILRLFFHDCFVNGCDGXILLDDXSTFTGEKNAGPNANSXXGFEVIDAXKTXVXAACRATVSCADILALAARDGVNLLGGPTWSVPLGRKDSRTASQSAANANLPGPGSSLATLITMFGNKNLSPRDMTALSGAHTIGRSQCQFFRNRIYNERNINASFAALRQRTCPRSGGNGNLAPFDVQTADGFDNAYYQNLVGQRGLLHSDQELFNGGSQDALVRQYSNSPSQFSADFVTAMLKMGGLLCMY

SEQ ID NO: 62660 - DNA, 686 bp, Triticum aestivum
  misc_feature (1)..(686): Ceres Seq. ID no. 13590885
atcacttcaccaccaccacaaaccctatccccattaacccgctccaaaaccctgagctgcgcacccaccggcgatgtcggcgacggccatccgctccggcgagctcctcgcttttcccgccgcgctgaggcgtggcctgcccgtggcttctgcctcggtggtcgcgttccggttgagggcgccagtggccgggcgcgtggcggtcagggttgtcgcggcggcggcggagggggcaggggcggaggcggaggcggaagggaagccgaagccgaagaagaagagggcagcgagcgggatcatgaagcctaagccgatttctccggagctaagggagtttgtcggaggcgcggcggagctgccccggacagaggcgctcaagatcatctgggcgcacatcaagggaaacaacctccaggatcccgagaacaagaagataatagtctgcgatgagaaactgaagaagatatttggagggcgtgaccgtgttgggtttcttgagatctctgggctcctcaatccccatttccagaaatgatagggtttatgtagatgttgcactttttctgtattagctaagacagttgtatcagcatatttagctgaacctggtatggagggtccgtaattctggtttgagaatggtacgtctagtatttgcagtaaatggctttgctggtttttggccc

SEQ ID NO: 62661 - protein, 153 aa, Triticum aestivum; identical to SEQ ID NO: 56169
  peptide (1)..(153): Ceres Seq. ID no. 13590886

SEQ ID NO: 62662 - protein, 102 aa, Triticum aestivum
  peptide (1)..(102): Ceres Seq. ID no. 13590887
ITSPPPQTLSPLTRSKTLSCAPTGDVGDGHPLRRAPRFSRRAEAWPARGFCLGGRVPVEGASGRARGGQGCRGGGGGGRGGGGGGREAEAEEEEGSERDHEA

SEQ ID NO: 62663 - protein, 78 aa, Triticum aestivum; identical to SEQ ID NO: 56171
  peptide (1)..(78): Ceres Seq. ID no. 13590888

SEQ ID NO: 62664 - DNA, 1066 bp, Triticum aestivum
  misc_feature (1)..(1066): Ceres Seq. ID no. 13654802
atccgcccttcgtctcgcccccttcctctcaccgtcggcgccgccgccgccatccaccggagagagccgtccgacgctacccggtccaggtatactcgcctgtgcatgactgcgttggttcggctcgccgggagagcagcttcttggagcaggggcgccagcatcgcgcctccgcgtggcatcggcttattcccgcagcgcaggaccgcgttccagggtgcgaggatggagaatggcggcggcaagggcggccgcggcgcgctcatagtcctggaagggctggacaggagcggcaaatcgtcgcagtgcgcccggctgctgtcctttctgcaagggaaaggctgcgcaaccgaagggtggcgcttcccggacagagacaccagcgtcgggaagatgatctccgcctacctcgccaacgagtcgcagctcgatgatcggaccatccatttgctcttcagcgcgaatcgctgggagaaaagaagtttgatggagagcaagctacttggtggaactacactcgtcgttgaccgctactcttattctggagtggcgttttcagctgctaaaggacttgacattgggtggtgcaaggcccctgaggttggactgctagctccagatcttgtaatatatcttgatgtacaaccagagaaagcggccgaaagaggaggctatgggggtgaaagatacgaaagagttgagttccaaaagagagttgctgagcattaccattcactccgtgattcgacatggaaggtcgtcgatggttcccttcccatggagaccgtggaagaacagctaagagaactagccatgaattgcatttcagaatgccaagacaagcaacttaccaatcttccctggtagagttcccgcgatgaaatgccaaaccacataggcacatcggcaagatctctctttagtatgtgattgactgttgctctgttagatctctgaagtgtgtgattgactgttgcgattgactgctgctccgttagatctcttttaagtgtgtgattgacgactgttactctggatgagatacaggcatatcatttctttcctc

SEQ ID NO: 62665 - protein, 288 aa, Triticum aestivum
  peptide (1)..(288): Ceres Seq. ID no. 13654803
IRPSSRPLPLTVGAAAAIHRREPSDATRSRYTRLCMTALVRLAGRAASWSRGASIAPPRGIGLFPQRRTAFQGARMENGGGKGGRGALIVLEGLDRSGKSSQCARLLSFLQGKGCATEGWRFPDRDTSVGKMISAYLANESQLDDRTIHLLFSANRWEKRSLMESKLLGGTTLVVDRYSYSGVAFSAAKGLDIGWCKAPEVGLLAPDLVIYLDVQPEKAAERGGYGGERYERVEFQKRVAEHYHSLRDSTWKVVDGSLPMETVEEQLRELAMNCISECQDKQLTNLPW

SEQ ID NO: 62666 - protein, 253 aa, Triticum aestivum
  peptide (1)..(253): Ceres Seq. ID no. 13654804
MTALVRLAGRAASWSRGASIAPPRGIGLFPQRRTAFQGARMENGGGKGGRGALIVLEGLDRSGKSSQCARLLSFLQGKGCATEGWRFPDRDTSVGKMISAYLANESQLDDRTIHLLFSANRWEKRSLMESKLLGGTTLVVDRYSYSGVAFSAAKGLDIGWCKAPEVGLLAPDLVIYLDVQPEKAAERGGYGGERYERVEFQKRVAEHYHSLRDSTWKVVDGSLPMETVEEQLRELAMNCISECQDKQLTNLPW

SEQ ID NO: 62667 - protein, 213 aa, Triticum aestivum
  peptide (1)..(213): Ceres Seq. ID no. 13654805
MENGGGKGGRGALIVLEGLDRSGKSSQCARLLSFLQGKGCATEGWRFPDRDTSVGKMISAYLANESQLDDRTIHLLFSANRWEKRSLMESKLLGGTTLVVDRYSYSGVAFSAAKGLDIGWCKAPEVGLLAPDLVIYLDVQPEKAAERGGYGGERYERVEFQKRVAEHYHSLRDSTWKVVDGSLPMETVEEQLRELAMNCISECQDKQLTNLPW

SEQ ID NO: 62668 - DNA, 743 bp, Triticum aestivum
  misc_feature (1)..(743): Ceres Seq. ID no. 15173877
aggagcagaaggcgatggcggacgtgcagatgggcagcggcacggagacggagaccttcgcgttccaggcggagatcaaccagctgctcttgctcatcatcaacaccttctactccaacaaggagatcttcctccgcgatctcatctccaactcatcagatgcgcttgacaagatctggttcgagagcctcacggacaagagtcagaccatgcgaacaacctgggcaccatcgtgggctcgggctccaaggagttcatggaggctctgcagggccggggccgtggctgcgccagcaggagtgaagcaagcgctgatatctttgtcggatacaacagacttggctaatctcggaaacaaccttcagagcttggggttctctatcatctccactggtggtacagcgtcaagcttggaagcagctggagtgaatgtgagaaaagttgaatagcttacacattttcctgaaatgattttggccttcattcatcaaaagttggtgtacaaggaactccaggagaagaatcttgaagtaaataatttatatagataaggatcttatgttgtcgtggtggctgctgctgtgaccgaagatcaaaagaagcctggagatgtgcatcatagttttagttgatgttgccaccatgttttggtgcatgtgtatttgattgtatgtacacttgatggatcgtgcagtcgtgtatgtgttgttgtgagtttcatttagtgatttctggatttgatc

SEQ ID NO: 62669 - protein, 148 aa, Triticum aestivum
  peptide (1)..(148): Ceres Seq. ID no. 15173878
EQKAMADVQMGSGTETETFAFQAEINQLLLLIINTFYSNKEIFLRDLISNSSDALDKIWFESLTDKSQTMRTTWAPSWARAPRSSWRLCRAGAVAAPAGVKQALISLSDTTDLANLGNNLQSLGFSIISTGGTASSLEAAGVNVRKVE

SEQ ID NO: 62670 - protein, 144 aa, Triticum aestivum
  peptide (1)..(144): Ceres Seq. ID no. 15173879
MADVQMGSGTETETFAFQAEINQLLLLIINTFYSNKEIFLRDLISNSSDALDKIWFESLTDKSQTMRTTWAPSWARAPRSSWRLCRAGAVAAPAGVKQALISLSDTTDLANLGNNLQSLGFSIISTGGTASSLEAAGVNVRKVE

SEQ ID NO: 62671 - protein, 139 aa, Triticum aestivum
  peptide (1)..(139): Ceres Seq. ID no. 15173880
MGSGTETETFAFQAEINQLLLLIINTFYSNKEIFLRDLISNSSDALDKIWFESLTDKSQTMRTTWAPSWARAPRSSWRLCRAGAVAAPAGVKQALISLSDTTDLANLGNNLQSLGFSIISTGGTASSLEAAGVNVRKVE

SEQ ID NO: 62672 - DNA, 735 bp, Triticum aestivum
  misc_feature (1)..(735): Ceres Seq. ID no. 12584812
atcgatcgagagagaaagagagagcaaaacctagaactctgaaggaagcggggccgtcggactcgagaaggcggcgagggagggagatgtcgatcctgtgggagaagagcccggcgtggcggtggctggtggggcggacgcgggactccaagcccttcttcttcaccttcgccgcgctctgcggcgtcgtccccggcgtcgtcggctacggcgtcatgcagctcaccagctcccgcaacgacaagctcgaggcccacctccgctccaacgccagaccggagaccacgatgatggggcaagtcaacagggagagactggcagagtttctcggtgagatacagaggaaggaggacacaaatgacagatatgttgctgctcttaaaggggagacgctgacaaggaagcgctatgaacgtattcagcccgtcccccagcaagctgcaccggagaaagccaaggaccagcaagctaccaaggagagcgccaaggcaaagtgaatggcgcatgtttgatgatcggggtgggtgaaatgtgcttctactaagtgaacataaacgggctgtagctccaaaagcttcaagactggcgaatcatttttgtaagcatcattatctacttgcctttcgtttagtcgtggcactgccccgtacgaaaaaactgagaaactctggtgatagtgttgaatcttgtaaatgttttacctgcgtattacgtggtaatattttaggaacctgc

SEQ ID NO: 62673 - protein, 164 aa, Triticum aestivum
  peptide (1)..(164): Ceres Seq. ID no. 12584813
RSREKERAKPRTLKEAGPSDSRRRRGREMSILWEKSPAWRWLVGRTRDSKPFFFTFAALCGVVPGVVGYGVMQLTSSRNDKLEAHLRSNARPETTMMGQVNRERLAEFLGEIQRKEDTNDRYVAALKGETLTRKRYERIQPVPQQAAPEKAKDQQATKESAKAK

SEQ ID NO: 62674 - protein, 136 aa, Triticum aestivum
  peptide (1)..(136): Ceres Seq. ID no. 12584814
MSILWEKSPAWRWLVGRTRDSKPFFFTFAALCGVVPGVVGYGVMQLTSSRNDKLEAHLRSNARPETTMMGQVNRERLAEFLGEIQRKEDTNDRYVAALKGETLTRKRYERIQPVPQQAAPEKAKDQQATKESAKAK

SEQ ID NO: 62675 - protein, 93 aa, Triticum aestivum
  peptide (1)..(93): Ceres Seq. ID no. 12584815
MQLTSSRNDKLEAHLRSNARPETTMMGQVNRERLAEFLGEIQRKEDTNDRYVAALKGETLTRKRYERIQPVPQQAAPEKAKDQQATKESAKAK

SEQ ID NO: 62676 - DNA, 832 bp, Triticum aestivum
  misc_feature (1)..(832): Ceres Seq. ID no. 12615074
gaaaaatcccagccagccgtcaaagcacgacacatccaggtccaagcaaagcatccccagcccagccgagaccgcgtgcgctccacgcagcatccgccgcagcagccgcccagagaagtcgccgccggagaagggggagatgtcgtggcagacgtacgtcgacgaccacctgtgctgcgagatcgacggccagcacctcacctccgccgccatcctcggccacgacggcngcgtctgggccgagtcccccaacttccccaagttcaagcctgaggagattgctggcatcgttaaagactttgaagaacctggacaccttgcaccaactggtcttttccttggaggcacaaagtacatggtcatccaaggtgaacctggggttgtcatccgaggaaagaagggcaccggtggcattactatcaagaagaccggcatggccctgattcttggtatctacgatgagcccatgactcctggccagtgcaatttggtcgtggagaggctcggcgactacctggtcgagcagggtttctaagcccgccctgatatgctgttattttggtcgtctgggactaagtttgctctactgtgggctttgcatccatctgcttggcgtaccgcatgatatatgcagtgaataattttagcttggggtttgtcggttggtgatgtgtcgaaggggaaaaatggatttactatgttttctttttaatgtttggcatcgcgtcgtatcaaactcagccgctctttcgctgagtaatgtacatttgcctggtcatggtaacttgtgggttctgctgctgctttattgaaagatgattgcaattttagc

SEQ ID NO: 62677 - protein, 177 aa, Triticum aestivum
  peptide (1)..(177): Ceres Seq. ID no. 12615075
  misc_feature (77)..(77): Xaa is any aa, unknown or other
KNPSQPSKHDTSRSKQSIPSPAETACAPRSIRRSSRPEKSPPEKGEMSWQTYVDDHLCCEIDGQHLTSAAILGHDGXVWAESPNFPKFKPEEIAGIVKDFEEPGHLAPTGLFLGGTKYMVIQGEPGVVIRGKKGTGGITIKKTGMALILGIYDEPMTPGQCNLVVERLGDYLVEQGF

SEQ ID NO: 62678 - protein, 146 aa, Triticum aestivum
  peptide (1)..(146): Ceres Seq. ID no. 12615076
  misc_feature (76)..(76): Xaa is any aa, unknown or other
KIPASRQSTTHPGPSKASPAQPRPRALHAASAAAAAQRSRRRRRGRCRGRRTSTTTCAARSTASTSPPPPSSATTXASGPSPPTSPSSSLRRLLASLKTLKNLDTLHQLVFSLEAQSTWSSKVNLGLSSEERRAPVALLSRRPAWP

SEQ ID NO: 62679 - protein, 131 aa, Triticum aestivum
  peptide (1)..(131): Ceres Seq. ID no. 12615077
  misc_feature (31)..(31): Xaa is any aa, unknown or other
MSWQTYVDDHLCCEIDGQHLTSAAILGHDGXVWAESPNFPKFKPEEIAGIVKDFEEPGHLAPTGLFLGGTKYMVIQGEPGVVIRGKKGTGGITIKKTGMALILGIYDEPMTPGQCNLVVERLGDYLVEQGF

SEQ ID NO: 62680 - DNA, 721 bp, Triticum aestivum
  misc_feature (1)..(721): Ceres Seq. ID no. 13583459
aaaaaaagagagcccccgctagtactactctctaaccttacccagaccgccgcaggtcttcatcgtcttcctcggaacgccgccgccgaagtgcgcctcgagtaatttcagaggaaggaggagccaagtgttgatcggagatgaatgcccctgaccgctatgagcgcttcgtcgtgcctgagggcacgaagaaggtatcatttgagaaggatacaaagatcatgaatgctgcatctttcactattgaacgtgaggaccacaccatcgggaacatcctccgcatgcagctgcacagggacccaaatgttcactttgctggctataagctccctcacccccttcagtacaagatcattgttaggatccatactgcaagccaatcctccccaactcaggcatatacccaggcaatcaatgatctagacaaggagcttgagaacctgaagcaagcttttgaggatgagaagacccgattcgaggaaaggatgaagcagggctactaggccaagggtgttctggatgctgacgtgaaaccttccttgctagtaattatatctgatgtctgaactgcggtagaaaaaaaattactcaaggattgtcgatgatcctctgaactcgtagaacctcttcatgtgcggattgcgtatgattgcacggttgttaaacatgtgttggcacttgataagcctgctagttgaattgctcgcctttgacaggttcc

SEQ ID NO: 62681 - protein, 120 aa, Triticum aestivum
  peptide (1)..(120): Ceres Seq. ID no. 13583460
MNAPDRYERFVVPEGTKKVSFEKDTKIMNAASFTIEREDHTIGNILRMQLHRDPNVHFAGYKLPHPLQYKIIVRIHTASQSSPTQAYTQAINDLDKELENLKQAFEDEKTRFEERMKQGY

SEQ ID NO: 62682 - protein, 93 aa, Triticum aestivum
  peptide (1)..(93): Ceres Seq. ID no. 13583461
MNAASFTIEREDHTIGNILRMQLHRDPNVHFAGYKLPHPLQYKIIVRIHTASQSSPTQAYTQAINDLDKELENLKQAFEDEKTRFEERMKQGY

SEQ ID NO: 62683 - protein, 73 aa, Triticum aestivum
  peptide (1)..(73): Ceres Seq. ID no. 13583462
MQLHRDPNVHFAGYKLPHPLQYKIIVRIHTASQSSPTQAYTQAINDLDKELENLKQAFEDEKTRFEERMKQGY

SEQ ID NO: 62684 - DNA, 826 bp, Triticum aestivum
  misc_feature (1)..(826): Ceres Seq. ID no. 13583463
acaacacacatccatccatggagggagtggtcaagcaggccatccacgcgggcggggagcagggagtccgcatgggcagcgagcaaggcggatgcgcgggcggcgagccgagcccgcatgtgcagcgagcaaggcggacacgctggcggcgagccgagcccgcatgggcagcgagcaaggcggacgcacggacggcgagccgaggccgcgtgggcagcgagcaaggcagacgcgcgggcgacgagccgagcccgcatgcgcagcgagcaaggcggactcgcggacggcgagccgaggccgcgtgggcagtgaacaaggcagatgcgcgggcggcgagcatggtgcgcggcggcggcccactccaccgtcggcttcttccctcgggcgtgtggcggcctattcccttgggcgcacggtggcctattccctcaagcatggcgcgtgacggccactacagaggagctccttcctccggcgtcggccgcccgacgctgcactagcgcgcggcggtgcccctctctctctctccaggaaccagcgagcacggccgggcggcggtgcagataccagggtcgggcgggcgtgcctgtctggtggcgtggcgagtagggcggggcgagcggcgcggtgagcagggggaggcggcagtattgtccccagcgagaagaaggtggctggcggtgaagtagttgttgctgcgatggaggacttgattgcttttcctttttagtttctaggggtccttgtgtaaattttcaggacagcttgtaacttctctgtaacttcaccgacgatgaatgcaagacagcacggctgtgtcaaattc

SEQ ID NO: 62685 - protein, 165 aa, Triticum aestivum
  peptide (1)..(165): Ceres Seq. ID no. 13583464
NTHPSMEGVVKQAIHAGGEQGVRMGSEQGGCAGGEPSPHVQRARRTRWRRAEPAWAASKADARTASRGRVGSEQGRRAGDEPSPHAQRARRTRGRRAEAAWAVNKADARAASMVRGGGPLHRRLLPSGVWRPIPLGARWPIPSSMARDGHYRGAPSSGVGRPTLH

SEQ ID NO: 62686 - protein, 160 aa, Triticum aestivum
  peptide (1)..(160): Ceres Seq. ID no. 13583465
MEGVVKQAIHAGGEQGVRMGSEQGGCAGGEPSPHVQRARRTRWRRAEPAWAASKADARTASRGRVGSEQGRRAGDEPSPHAQRARRTRGRRAEAAWAVNKADARAASMVRGGGPLHRRLLPSGVWRPIPLGARWPIPSSMARDGHYRGAPSSGVGRPTLH

SEQ ID NO: 62687 - protein, 147 aa, Triticum aestivum
  peptide (1)..(147): Ceres Seq. ID no. 13583466
QHTSIHGGSGQAGHPRGRGAGSPHGQRARRMRGRRAEPACAASKADTLAASRARMGSEQGGRTDGEPRPRGQRARQTRGRRAEPACAASKADSRTASRGRVGSEQGRCAGGEHGARRRPTPPSASSLGRVAAYSLGRTVAYSLKHGA

SEQ ID NO: 62688 - DNA, 890 bp, Triticum aestivum
  misc_feature (1)..(890): Ceres Seq. ID no. 13655197
cagatttacagagttctagaatagaagatgatctggtggttacctctctattatttactcgaatgactgtacttatatcttacgttcaaactttacccgatcttggtttagtttccatctccaatcagattaatggtttgcggaccaaagccaatgttttatggagttcttattcctaatttagttatacatttcatttgtagtttcttggtagataataagcagtggcagatgaaccaataagttatctgtgcccatgctttattgtaagcgttaaatttgctctctggtattactttcaatgtgttatccatacccatgctttttgcggttaattatcatgtcttatcaacttatgcagagtccatgatatcatacagtttgaagtcaaaaaattcatgatatgggtgatatggaaaagtcattgccttctttgctggaacattccctgattgcctggacttcttgggtcaatcgctggacgccacccccgtctcctggacgtcatgacgccgccgatttccttgacgccgcgtgccaccgatcttctataactcaatttctccaatttctctcggctgtgagctcatatatatttttgagttgtgaacatattatgtaaactcaacactttgttttgtgacaagtgaactcatttcatattcatctatcaatcatggttgaagtgtctaaaaaaaaaaaaaaaaaaaaaaaaaaaaaaaaaaaaaaaaaaaaaaaaaaaaaaaaaaaaaaaaccaaaaaaaaaaaaaaaaaggtttatcaaaaccgccaacctcaaggggggccccgaaaccaaattccccaaaaaggaagccaaataacccgcgctaattgcccgccttttaaaaacgccgaaatggaaaaaaccc

SEQ ID NO: 62689 - protein, 72 aa, Triticum aestivum
  peptide (1)..(72): Ceres Seq. ID no. 15219719
MGDMEKSLPSLLEHSLIAWTSWVNRWTPPPSPGRHDAADFLDAACHRSSITQFLQFLSAVSSYIFLSCEHIM

SEQ ID NO: 62690 - protein, 71 aa, Triticum aestivum
  peptide (1)..(71): Ceres Seq. ID no. 15219720
MVEVSKKKKKKKKKKKKKKKKKKKKKTKKKKKKVYQNRQPQGGPRNQIPQKGSQITRANCPPFKNAEMEKT

SEQ ID NO: 62691 - protein, 69 aa, Triticum aestivum
  peptide (1)..(69): Ceres Seq. ID no. 15219721
MEKSLPSLLEHSLIAWTSWVNRWTPPPSPGRHDAADFLDAACHRSSITQFLQFLSAVSSYIFLSCEHIM

SEQ ID NO: 62692 - DNA, 622 bp, Triticum aestivum
  misc_feature (1)..(622): Ceres Seq. ID no. 13654829
atttgcggtcacgtcagtcattacttcgcaagatccgcatccaaacctgagctgtataaggtcgacgacggacaaggaaaagagatgccgttgaacaccatctgcgtacgtaagggtatggctgcttccttcttcctgagtctcgtcgtccccttggttctgcttcttctgccgctctcgcgctcggcgtcggtggtgacccatctccccggcttccatggccgccttccgttccacctggagaccgggtacgtcaacgtggacgaggagacgggaacggagctcttctactacttcgtggagtcggagaggagccccgacacggaccccgtcgtcctgtggctgacgggcgggcccggctgctctagcttgattttctacgaagttggtgaggccctcatcctccgttcctcgtctcctgtgggcgtattagctggctagaaggaagccgccatgctgtcaattactacatcagattaagataaagagtgaagttaacttctattagcctctaattcaaagctagatgagcaaatcgtccgagtttgcaaatgtgtatcaggttgtgttacaaagtttggcaccttttatccaaagttttaaatagccccatagctgggtt

SEQ ID NO: 62693 - protein, 146 aa, Triticum aestivum
  peptide (1)..(146): Ceres Seq. ID no. 13654830
ICGHVSHYFARSASKPELYKVDDGQGKEMPLNTICVRKGMAASFFLSLVVPLVLLLLPLSRSASVVTHLPGFHGRLPFHLETGYVNVDEETGTELFYYFVESERSPDTDPVVLWLTGGPGCSSLIFYEVGEALILRSSSPVGVLAG

SEQ ID NO: 62694 - protein, 118 aa, Triticum aestivum
  peptide (1)..(118): Ceres Seq. ID no. 13654831
MPLNTICVRKGMAASFFLSLVVPLVLLLLPLSRSASVVTHLPGFHGRLPFHLETGYVNVDEETGTELFYYFVESERSPDTDPVVLWLTGGPGCSSLIFYEVGEALILRSSSPVGVLAG

SEQ ID NO: 62695 - protein, 107 aa, Triticum aestivum
  peptide (1)..(107): Ceres Seq. ID no. 13654832
MAASFFLSLVVPLVLLLLPLSRSASVVTHLPGFHGRLPFHLETGYVNVDEETGTELFYYFVESERSPDTDPVVLWLTGGPGCSSLIFYEVGEALILRSSSPVGVLAG

SEQ ID NO: 62696 - DNA, 1127 bp, Triticum aestivum
  misc_feature (1)..(1127): Ceres Seq. ID no. 13596876
agaacatcctaatcgaaaagaccccaccgccgcccccatcatgccgccgctcctcctcgccgcgctcgcgctcgccctggccctctcccacgccgccgccggaggaggcaccgggttctacgacccggcgcgggttacccagatctcctggcgccccagggcgttcctgtacagcggcttcctctcgcacgccgagtgcgaccacctcatcaagctggccaaggggaggctggagaagtcgatggtggccgacaacgagtccgggaagagtgtcatgagccaggtgcgcacaagctctggcaccttcttgtccaagcgcgaggatgaaattatctctggaattgaaaagcgtgtagctgcttggacgtttctccctgaagaaaatgccgaatcaatgcaggttctgcattatgaagttggtcagaagtatgatgcccacttcgattattttagtgacaaaaagaacgtgaagcgtggtggtcatcgggttgctactgttcttatgtacctgacagatgtgaagaagggtggagagaccgtgttcccaattgctgagggaagagatttacaacataaggatgaaacgtggtcggagcgcgcgagacatggcctggcagtgaagccaagaaaaggcgatgcgctactcttcttcagtctccacgttaacgcgacaacagatccgagcagtcttcacgcgagctgcccagtagtcgagggcgagaagtggtctgccacaaaatggatccacgtccggtcattcgacaaccctccagatgttatgacggacgcacggtgttctgatgacaatgagcaatgccctagatgggctgctcttggtgagtgttacaagaacgcaaaatacatggtgggcacgaaggacaccctcgggtcttgccgcaaaagttgcggggtctgcgatgcttgaaccccggcaccaatcttaactgaatttgcatggttactgagatgtagattacaaaaccaaataggttcttagtagcatggcattagatgtttactctccttgtcatgtagtttgacctcagagcatcttgatataaagcaaaaagggaattgactttgtttcagaagaatttggatataacctgatggtatcaaatatttcc

SEQ ID NO: 62697 - protein, 307 aa, Triticum aestivum
  peptide (1)..(307): Ceres Seq. ID no. 15221988
EHPNRKDPTAAPIMPPLLLAALALALALSHAAAGGGTGFYDPARVTQISWRPRAFLYSGFLSHAECDHLIKLAKGRLEKSMVADNESGKSVMSQVRTSSGTFLSKREDEIISGIEKRVAAWTFLPEENAESMQVLHYEVGQKYDAHFDYFSDKKNVKRGGHRVATVLMYLTDVKKGGETVFPIAEGRDLQHKDETWSERARHGLAVKPRKGDALLFFSLHVNATTDPSSLHASCPVVEGEKWSATKWIHVRSFDNPPDVMTDARCSDDNEQCPRWAALGECYKNAKYMVGTKDTLGSCRKSCGVCDA

SEQ ID NO: 62698 - protein, 294 aa, Triticum aestivum
  peptide (1)..(294): Ceres Seq. ID no. 15221989
MPPLLLAALALALALSHAAAGGGTGFYDPARVTQISWRPRAFLYSGFLSHAECDHLIKLAKGRLEKSMVADNESGKSVMSQVRTSSGTFLSKREDEIISGIEKRVAAWTFLPEENAESMQVLHYEVGQKYDAHFDYFSDKKNVKRGGHRVATVLMYLTDVKKGGETVFPIAEGRDLQHKDETWSERARHGLAVKPRKGDALLFFSLHVNATTDPSSLHASCPVVEGEKWSATKWIHVRSFDNPPDVMTDARCSDDNEQCPRWAALGECYKNAKYMVGTKDTLGSCRKSCGVCDA

SEQ ID NO: 62699 - protein, 227 aa, Triticum aestivum
  peptide (1)..(227): Ceres Seq. ID no. 15221990
MVADNESGKSVMSQVRTSSGTFLSKREDEIISGIEKRVAAWTFLPEENAESMQVLHYEVGQKYDAHFDYFSDKKNVKRGGHRVATVLMYLTDVKKGGETVFPIAEGRDLQHKDETWSERARHGLAVKPRKGDALLFFSLHVNATTDPSSLHASCPVVEGEKWSATKWIHVRSFDNPPDVMTDARCSDDNEQCPRWAALGECYKNAKYMVGTKDTLGSCRKSCGVCDA

SEQ ID NO: 62700 - DNA, 1320 bp, Triticum aestivum
  misc_feature (1)..(1320): Ceres Seq. ID no. 15226612
ctttttgcagtgtctggccgtcgcgctctcgccgtctcgctgccggctgccggctgcccctccccctcgccgcgcccgatttctccgccaactcccatacccaagttctagggaaagatacactgctccgatggcggtcagagttccgtccatggagctgaaccgctccccgccgctcctctccggcggcagaggcaaaacatgccttcagaagcctttcattgtccaagcaaagagatcaggtggattggagaaagcaaatactagcaggtcacgaggaccgcaagcttctgaaaaactcaagaaaagagaacccctgactcgtgggactgttagtgcgcctcttccggtaccaggacacatacctcgacctccttacgttggatcaaacaaaatgcccgagatatcgagtgagagacaaatgcaggacaaagacaccatcgtgcacatgaaagctgcatgtgagcttgctgctcgtgttcttcaaaatgcagggaaattagtcaaaccctctgtaacaacagacgaaattgataaagcagtgcacaagatgatcattgatgctggagcctatccatccccgcttggatacggtgggtttccaaaaagtgtatgcacatcagtgaacgaatgcatgtgccatggtattcctgattcacgagaactaaaggatggagacataattaacatcgatgtcactgtctacttgaacggttttcatggggatacctctaaaacgtttttctgtggagaagttgacgaagctgctaaaagacttgtgaaggttactgaagagtgcatgcttaggggcatatcatcctgcaaacacggtgtgagctttaagaaaatcggcagaagaataagcgagcatgctgagaggaatggatttggtgtcgtggagcaatttgttgggcatggagttggcagagtttttcattcacaaccaattatatatcaccagcgcaacaacatgccagggcagatggttgaaggccagacgttcacaatagagccgatcctgaccatgggaagcaacagcaacagcatcgagtgcgacatgtgggaggacggctggacggcggtgacgacggacggcagcctggcggcgcagttcgagcacaccatcctcatcaccaggaccggcgcagagatcctaaccaaatgctagcaaagccagcgctgaaggcgtacggatcctgaccgcgtagatcacgtgatttcttcttatgttgtatgccaaagcatcactggaacagctgcttacgtataaccgatgatttttggcagcggcaaagagctccaggcttcctctggcacact

SEQ ID NO: 62701 - protein, 388 aa, Triticum aestivum
  peptide (1)..(388): Ceres Seq. ID no. 15226613
FLQCLAVALSPSRCRLPAAPPPRRARFLRQLPYPSSRERYTAPMAVRVPSMELNRSPPLLSGGRGKTCLQKPFIVQAKRSGGLEKANTSRSRGPQASEKLKKREPLTRGTVSAPLPVPGHIPRPPYVGSNKMPEISSERQMQDKDTIVHMKAACELAARVLQNAGKLVKPSVTTDEIDKAVHKMIIDAGAYPSPLGYGGFPKSVCTSVNECMCHGIPDSRELKDGDIINIDVTVYLNGFHGDTSKTFFCGEVDEAAKRLVKVTEECMLRGISSCKHGVSFKKIGRRISEHAERNGFGVVEQFVGHGVGRVFHSQPIIYHQRNNMPGQMVEGQTFTIEPILTMGSNSNSIECDMWEDGWTAVTTDGSLAAQFEHTILITRTGAEILTKC

SEQ ID NO: 62702 - protein, 345 aa, Triticum aestivum
  peptide (1)..(345): Ceres Seq. ID no. 15226614
MAVRVPSMELNRSPPLLSGGRGKTCLQKPFIVQAKRSGGLEKANTSRSRGPQASEKLKKREPLTRGTVSAPLPVPGHIPRPPYVGSNKMPEISSERQMQDKDTIVHMKAACELAARVLQNAGKLVKPSVTTDEIDKAVHKMIIDAGAYPSPLGYGGFPKSVCTSVNECMCHGIPDSRELKDGDIINIDVTVYLNGFHGDTSKTFFCGEVDEAAKRLVKVTEECMLRGISSCKHGVSFKKIGRRISEHAERNGFGVVEQFVGHGVGRVFHSQPIIYHQRNNMPGQMVEGQTFTIEPILTMGSNSNSIECDMWEDGWTAVTTDGSLAAQFEHTILITRTGAEILTKC

SEQ ID NO: 62703 - protein, 338 aa, Triticum aestivum
  peptide (1)..(338): Ceres Seq. ID no. 15226615
MELNRSPPLLSGGRGKTCLQKPFIVQAKRSGGLEKANTSRSRGPQASEKLKKREPLTRGTVSAPLPVPGHIPRPPYVGSNKMPEISSERQMQDKDTIVHMKAACELAARVLQNAGKLVKPSVTTDEIDKAVHKMIIDAGAYPSPLGYGGFPKSVCTSVNECMCHGIPDSRELKDGDIINIDVTVYLNGFHGDTSKTFFCGEVDEAAKRLVKVTEECMLRGISSCKHGVSFKKIGRRISEHAERNGFGVVEQFVGHGVGRVFHSQPIIYHQRNNMPGQMVEGQTFTIEPILTMGSNSNSIECDMWEDGWTAVTTDGSLAAQFEHTILITRTGAEILTKC

SEQ ID NO: 62704 - DNA, 1227 bp, Triticum aestivum
  misc_feature (1)..(1227): Ceres Seq. ID no. 13654868
gtggttggatcggcttccgagtgccgcggcgtgtcggcggcgaccggccgacatgagggtggtggtgacgggcgcgacggggtacctgggcgggcgcctgtgcgcggcgctggcgggggcggggcacgacgtgcgggcgttcgtgcgccgcaccggcgacgcgtccggcctgcccgacgccgtcgagctcgcctacggcgacgtcggcgacgcggactccctcgccgcggccttcgacgggcgcgacgccgtcttccacgccgccgcctccgtcgagccatggctccccgacccctccgtcttcacggccgtcaatgtgagagggcttgagaatgtgttaacagcggccaagagaacgccgacagtaaagaagatcatatacacgtcgtcgttcttcgcacttggcccaacagatggttatgtcgcagatgagacacagatgcacaaagggaaaacattttgcacggagtatgagaaatcaaaggttcttgcagatagaatcgcattgcaggcagcagcagagggggtgccaataaccattgtctatccaggagtcatctatggtcctggaaaacttacaactggaaaccttgtttcccgcattttaattgaaaggtttaatggccgtctacctggctacattggagatgggtatgatagagaatcattttgccatgtcgacgatgttgttagtgggcacatagcagctatggagaagggcagagtgggagaaagatatctgctcaccggcgaaaacttgtcattcatgcatattttcagtatggctgctaatatcacaaacacaaaggccccgtacttccacgtaccgctctggttgattgaaatatatggatggatttcagttttcatttcccgcatcactggaaagctccctcttatcagttaccctacagtgcgtgttattagacatcaatgggcgtattcatgtgagaaagcaaaaagggaactaggctacaatccaagaaacttgactgaaggtcttgctgagatgcttttatggctcaagaacgagaaactgatcaaattttagtgttctactctgttattacttccgttacatttctcacttcatgtagaccgtcatgttttatgtactggatcattgacatgtatatactgcagtatgccactgttctgttgtatcaagttgagatgtaataatgtaatactgagtccatatattcatataaaggaagagactgtatt

SEQ ID NO: 62705 - protein, 349 aa, Triticum aestivum
  peptide (1)..(349): Ceres Seq. ID no. 13654869
WLDRLPSAAACRRRPADMRVVVTGATGYLGGRLCAALAGAGHDVRAFVRRTGDASGLPDAVELAYGDVGDADSLAAAFDGRDAVFHAAASVEPWLPDPSVFTAVNVRGLENVLTAAKRTPTVKKIIYTSSFFALGPTDGYVADETQMHKGKTFCTEYEKSKVLADRIALQAAAEGVPITIVYPGVIYGPGKLTTGNLVSRILIERFNGRLPGYIGDGYDRESFCHVDDVVSGHIAAMEKGRVGERYLLTGENLSFMHIFSMAANITNTKAPYFHVPLWLIEIYGWISVFISRITGKLPLISYPTVRVIRHQWAYSCEKAKRELGYNPRNLTEGLAEMLLWLKNEKLIKF

SEQ ID NO: 62706 - protein, 332 aa, Triticum aestivum
  peptide (1)..(332): Ceres Seq. ID no. 13654870
MRVVVTGATGYLGGRLCAALAGAGHDVRAFVRRTGDASGLPDAVELAYGDVGDADSLAAAFDGRDAVFHAAASVEPWLPDPSVFTAVNVRGLENVLTAAKRTPTVKKIIYTSSFFALGPTDGYVADETQMHKGKTFCTEYEKSKVLADRIALQAAAEGVPITIVYPGVIYGPGKLTTGNLVSRILIERFNGRLPGYIGDGYDRESFCHVDDVVSGHIAAMEKGRVGERYLLTGENLSFMHIFSMAANITNTKAPYFHVPLWLIEIYGWISVFISRITGKLPLISYPTVRVIRHQWAYSCEKAKRELGYNPRNLTEGLAEMLLWLKNEKLIKF

SEQ ID NO: 62707 - protein, 203 aa, Triticum aestivum
  peptide (1)..(203): Ceres Seq. ID no. 13654871
MHKGKTFCTEYEKSKVLADRIALQAAAEGVPITIVYPGVIYGPGKLTTGNLVSRILIERFNGRLPGYIGDGYDRESFCHVDDVVSGHIAAMEKGRVGERYLLTGENLSFMHIFSMAANITNTKAPYFHVPLWLIEIYGWISVFISRITGKLPLISYPTVRVIRHQWAYSCEKAKRELGYNPRNLTEGLAEMLLWLKNEKLIKF

SEQ ID NO: 62708 - DNA, 1332 bp, Triticum aestivum
  misc_feature (1)..(1332): Ceres Seq. ID no. 13662245
ctcaccgccacgcttcaaggctagctagctcgatcgcacagcgaaaatggcgggtagattagttctgtcggtggtggtgactctgctagctgcggccggggcagccgcggcggagtcgtcgtgcccggcgacgccgccggacgcggggccgatgctgcaggtgtcgcacgcgttcgggccgtgctcgccgctgggaaacgcggccgcagcgccgtcgtgggcggggttcctcgcggaccagtcctcccgggacgcgtcgcggctgctgtacctcgactccctcgccgtggccgggcgcgcgtacgcgccgatcgcgtccgggcggcagctgctgcagacgccgacgtacgtggtgcgcgcgcgcctcggcaccccgccgcagcagctcctgctcgccgtcgacaccagcaacgacgccgcgtggatcccctgctccggctgcgcgggctgccccaccaccacgcccttcaagccagccgcgtccacctcgtaccgcgccgtgccgtgcggctcgccggcgtgctcgcgggcgccgaacccgtcctgctcgctcaacaccaagtcctgcgggttcagcctcacctacgccgactcctcgctggaggccgcgctgtcccaggactccctcgccgtcgccaacgacgtcgtgaagagctacaccttcggatgtctccagaaggccaccggcacggcggcgccgccgcagggcctcctcgggctcggccgcgggccgctgtcgttcctgtcgcagaccaaggacatgtacgagggcaccttctcctactgcctcccgagcttcaagtccctcaacttctccggcacgctcaggctcggccgcaagggccaaccgctgcgcatcaagacgacgccgctgctcgtcaacccgcaccgctcctcgctctactacgtgggcatgaccggcatccgcgtgggcaagaaggtggtgcccatcccgccctccgcgctggcgttcgacccggcgacgggcgccggcacggtgctcgactccgggacgatgttcaccaggctggtggcgccggcgtacgtggcggtgcgcgacgaggtccgccaccgcatccgcggcgccaacggccgcgtcggcttcgcccgcgagcagtgcaccgcggcttgacaccgattgattatccctctgccggtagctgggaaccgaggctgcggcctgcgccactgttgcctgtccgttggtgtcggacctgcatgcatccatgctggtgatttaattattttgtagcctagtgagtgtgtcgtctccatcggtgtgcaagatcttgtgtctttctttcttgtttgtgtaatatcatgtgtgtctct

SEQ ID NO: 62709 - protein, 361 aa, Triticum aestivum
  peptide (1)..(361): Ceres Seq. ID no. 13662246
MAGRLVLSVVVTLLAAAGAAAAESSCPATPPDAGPMLQVSHAFGPCSPLGNAAAAPSWAGFLADQSSRDASRLLYLDSLAVAGRAYAPIASGRQLLQTPTYVVRARLGTPPQQLLLAVDTSNDAAWIPCSGCAGCPTTTPFKPAASTSYRAVPCGSPACSRAPNPSCSLNTKSCGFSLTYADSSLEAALSQDSLAVANDVVKSYTFGCLQKATGTAAPPQGLLGLGRGPLSFLSQTKDMYEGTFSYCLPSFKSLNFSGTLRLGRKGQPLRIKTTPLLVNPHRSSLYYVGMTGIRVGKKVVPIPPSALAFDPATGAGTVLDSGTMFTRLVAPAYVAVRDEVRHRIRGANGRVGFAREQCTAA

SEQ ID NO: 62710 - protein, 326 aa, Triticum aestivum
  peptide (1)..(326): Ceres Seq. ID no. 13662247
MLQVSHAFGPCSPLGNAAAAPSWAGFLADQSSRDASRLLYLDSLAVAGRAYAPIASGRQLLQTPTYVVRARLGTPPQQLLLAVDTSNDAAWIPCSGCAGCPTTTPFKPAASTSYRAVPCGSPACSRAPNPSCSLNTKSCGFSLTYADSSLEAALSQDSLAVANDVVKSYTFGCLQKATGTAAPPQGLLGLGRGPLSFLSQTKDMYEGTFSYCLPSFKSLNFSGTLRLGRKGQPLRIKTTPLLVNPHRSSLYYVGMTGIRVGKKVVPIPPSALAFDPATGAGTVLDSGTMFTRLVAPAYVAVRDEVRHRIRGANGRVGFAREQCTAA

SEQ ID NO: 62711 - protein, 189 aa, Triticum aestivum
  peptide (1)..(189): Ceres Seq. ID no. 13662248
MSPEGHRHGGAAAGPPRARPRAAVVPVADQGHVRGHLLLLPPELQVPQLLRHAQARPQGPTAAHQDDAAARQPAPLLALLRGHDRHPRGQEGGAHPALRAGVRPGDGRRHGARLRDDVHQAGGAGVRGGARRGPPPHPRRQRPRRLRPRAVHRGLTPIDYPSAGSWEPRLRPAPLLPVRWCRTCMHPCW

SEQ ID NO: 62712 - DNA, 934 bp, Triticum aestivum
  misc_feature (1)..(934): Ceres Seq. ID no. 12584903
acaatcgtcccagatctcaagctctcaactcacctcacctcgcatctcaaacagtcttctcttttcggttggcataattgctagaagcagggttctatccatggcaatggtggtgaaggccctcctcgttgccgtcgtggccgtggcagcgcttgcgcagctcaccgtggcagtggatcaccaggtgggcggcagcggcgcgacctgggccaccagcggcggctacgactcgtggtcggggaagcagaagttctctccgggagacagcctcgtattttcgtactcgccggcgcacgacgtcgtggaggtgagcaaggccgactacgacgcctgcacggccagcaaagtcgtcgccagatacaccggcggcaagaccaccgtcaagctcaccactgccggaaagcgctacttcatctgcagcatcaccggccactgcgacgccggcatgaagctccaggtgaacgtcgccgacgtgaccgccggccccaccaagcccaggggccagaggagcgtcgcccctgtcgccgccccggcgccggcaccggaggggtcggccaccgacgagcagctgccgacagtgtcgtcgcctacgggaacaccgacgcccagttcaccgtccggctcgggcgccgctagcatcggtgcgagcgctgcggtggcgctcgccatgggcatggccgtggcgttggccatttgagagggatctggccgatccatgtgtaccaaggcttagttttggagtgctcaagtcttaatcacgtcgatacatttgcggatttgttcttgttattcttggctggcagtggcatgcacattgccttccctgcatgttccttccttcctactagtacagtgctatcagggttcagtgtactactgtgcgatttatttgttgtatttgtctgtcggagaataaatacaattcacattcttt

SEQ ID NO: 62713 - protein, 231 aa, Triticum aestivum
  peptide (1)..(231): Ceres Seq. ID no. 12584904
QSSQISSSQLTSPRISNSLLFSVGIIARSRVLSMAMVVKALLVAVVAVAALAQLTVAVDHQVGGSGATWATSGGYDSWSGKQKFSPGDSLVFSYSPAHDVVEVSKADYDACTASKVVARYTGGKTTVKLTTAGKRYFICSITGHCDAGMKLQVNVADVTAGPTKPRGQRSVAPVAAPAPAPEGSATDEQLPTVSSPTGTPTPSSPSGSGAASIGASAAVALAMGMAVALAI

SEQ ID NO: 62714 - protein, 198 aa, Triticum aestivum
  peptide (1)..(198): Ceres Seq. ID no. 12584905
MAMVVKALLVAVVAVAALAQLTVAVDHQVGGSGATWATSGGYDSWSGKQKFSPGDSLVFSYSPAHDVVEVSKADYDACTASKVVARYTGGKTTVKLTTAGKRYFICSITGHCDAGMKLQVNVADVTAGPTKPRGQRSVAPVAAPAPAPEGSATDEQLPTVSSPTGTPTPSSPSGSGAASIGASAAVALAMGMAVALAI

SEQ ID NO: 62715 - protein, 196 aa, Triticum aestivum
  peptide (1)..(196): Ceres Seq. ID no. 12584906
MVVKALLVAVVAVAALAQLTVAVDHQVGGSGATWATSGGYDSWSGKQKFSPGDSLVFSYSPAHDVVEVSKADYDACTASKVVARYTGGKTTVKLTTAGKRYFICSITGHCDAGMKLQVNVADVTAGPTKPRGQRSVAPVAAPAPAPEGSATDEQLPTVSSPTGTPTPSSPSGSGAASIGASAAVALAMGMAVALAI

SEQ ID NO: 62716 - DNA, 1653 bp, Triticum aestivum
  misc_feature (1)..(1653): Ceres Seq. ID no. 13655244
aaaaaaactctccaagcgaatcccatttccgccggtcctcccttcgccaagccatcggcgactgctgcagcacagcctcctccccctcctcatggccgacccctccttctcctcccccacggcggcctccgcaggcgacgccctccccgcgccggcggcttccgacgcgccggaggtgaccctccccgccgccgcccccgacctggacaaggagttcgggttccagcgggcggagctcggtaaggagaagctcgccgggacggtgggcttccacgagcgccacgtgttcctctgctacaagggccctgaggagtggccatcccacgtcgaggcctccgagtccgaccacctcccccgcctcctcgccgccgccatcaaggcccgcaagcccaatctgaagaagagcaccaaactgacaatttgtgaaggagaagatggcactgagtcatctcttggagacgtgttgatctttcctgatatgatccgatacagagagctgacccaccttgatgtcgacaactttgtggatgaagtactcgtgaaagatactgaatggcttcctggatctcctgaggctataaaaggttcctatgtttttgtctgctgccatggaagcagggataaaaggtgtggtgtttgcggtcctgctctgattacaaggttcaaggaagggattgaaggacaaggtcttcatggtcaggtggctgttagtgcatgctcacacgttggaggtcacaagtatgcaggaaatgtcatcatattcagtccagatgccaagggagaagtgactggtcattggtatggttatgttgctcctgatgatgtgcctgtgttactgcgtcaacatatcggacaaggagagatcgtgggccatctatggaggggccagttgggtttgtctgaagagcagcagaagaaagctctggagcttaggcgcgcgacgaatggcctgactgaggaagaatcaagcgccaaagaatcccctgaagcaaatggagccaacggtgctgcttgcaaccctgcacctgcaggtggatgctgccagggcaatggaggaggtttaacctgctgccaaagtgatctgccagcaggaaaacaggataagagcgtcccagctgagcagaaccacaagagctctacgacagagagtgacaaagaaaacggtgctgccagcaagaaggggcgcatgaagatttgccggatgcccacctggttcgagacctgggacaagtccgacacctacaccactcttgctgttgttgcttctgctgcaaccgtgttcgccgccttcaggtgctacaaggccatgaactgaaccctcaaaacaaggccaggttctttgcaccaaggacagtctaccgcagtaaaacaatccgatttgaaaataatatactgcctgtgcatatcaagataatatgcgttaggactttagaaagtacagtagctgatctggagatggcgatgaaaatctgttatgcgtaatgccctcatgtactaaaagtctaaaactcgtaagtttgaagttccccacgccttggctgcatggctgtggctgtggtgttcagcgtgatgatgatgttatgctcgtttggctggaactgggatgcttgcgttagaaaaactgtgcattgctggcatttgcttctttgaagc

SEQ ID NO: 62717 - protein, 437 aa, Triticum aestivum
  peptide (1)..(437): Ceres Seq. ID no. 13655245
KKLSKRIPFPPVLPSPSHRRLLQHSLLPLLMADPSFSSPTAASAGDALPAPAASDAPEVTLPAAAPDLDKEFGFQRAELGKEKLAGTVGFHERHVFLCYKGPEEWPSHVEASESDHLPRLLAAAIKARKPNLKKSTKLTICEGEDGTESSLGDVLIFPDMIRYRELTHLDVDNFVDEVLVKDTEWLPGSPEAIKGSYVFVCCHGSRDKRCGVCGPALITRFKEGIEGQGLHGQVAVSACSHVGGHKYAGNVIIFSPDAKGEVTGHWYGYVAPDDVPVLLRQHIGQGEIVGHLWRGQLGLSEEQQKKALELRRATNGLTEEESSAKESPEANGANGAACNPAPAGGCCQGNGGGLTCCQSDLPAGKQDKSVPAEQNHKSSTTESDKENGAASKKGRMKICRMPTWFETWDKSDTYTTLAVVASAATVFAAFRCYKAMN

SEQ ID NO: 62718 - protein, 407 aa, Triticum aestivum
  peptide (1)..(407): Ceres Seq. ID no. 13655246
MADPSFSSPTAASAGDALPAPAASDAPEVTLPAAAPDLDKEFGFQRAELGKEKLAGTVGFHERHVFLCYKGPEEWPSHVEASESDHLPRLLAAAIKARKPNLKKSTKLTICEGEDGTESSLGDVLIFPDMIRYRELTHLDVDNFVDEVLVKDTEWLPGSPEAIKGSYVFVCCHGSRDKRCGVCGPALITRFKEGIEGQGLHGQVAVSACSHVGGHKYAGNVIIFSPDAKGEVTGHWYGYVAPDDVPVLLRQHIGQGEIVGHLWRGQLGLSEEQQKKALELRRATNGLTEEESSAKESPEANGANGAACNPAPAGGCCQGNGGGLTCCQSDLPAGKQDKSVPAEQNHKSSTTESDKENGAASKKGRMKICRMPTWFETWDKSDTYTTLAVVASAATVFAAFRCYKAMN

SEQ ID NO: 62719 - protein, 278 aa, Triticum aestivum
  peptide (1)..(278): Ceres Seq. ID no. 13655247
MIRYRELTHLDVDNFVDEVLVKDTEWLPGSPEAIKGSYVFVCCHGSRDKRCGVCGPALITRFKEGIEGQGLHGQVAVSACSHVGGHKYAGNVIIFSPDAKGEVTGHWYGYVAPDDVPVLLRQHIGQGEIVGHLWRGQLGLSEEQQKKALELRRATNGLTEEESSAKESPEANGANGAACNPAPAGGCCQGNGGGLTCCQSDLPAGKQDKSVPAEQNHKSSTTESDKENGAASKKGRMKICRMPTWFETWDKSDTYTTLAVVASAATVFAAFRCYKAMN

SEQ ID NO: 62720 - DNA, 1623 bp, Triticum aestivum
  misc_feature (1)..(1623): Ceres Seq. ID no. 13591365
gacgacaacgccagcgccaccactctcaagagtcttaaaccctcactcctctccttccaccacctctccacacacaccatctctgtcagacatggcgccttccgcgacctgccctctccactccatggcatccgtctcccgcgctctccgcccgcgcccgcgtctcgccgctcctcgtctcggatgcggactgagagttggatgctctgtgccagcatatggaagtgctgccacggagaaggccgagtggggattggccattgcgccctcaccagcgaccactcttgttccggttgtcaggagccgtcaaattttctgcaaggcagaagctaacatttctagtaacctgccagcgagcaagcctactggagcaagccagtacgagaaaatagttgagctactcactactcttttccctgtctgggtcatattaggtacagttattggcatctacaagccatcaatggtcacctggttggagactgatctttttaccgtgggcctaggattcctaatgttgtcaatgggactaacattaacatttgaagatttcaggagatgtttaaggaatccatggacagttggtgtgggatttcttgcgcagtatttgatcaaacctatgctaggatatgctatcgcattgtcattgaagttatctgctcctcttgcaactggtcttattttggtctcatgttgtcctggtggtcaagcatcaaacgttgcaacttacatatccaaaggaaatgtggcactttcagttcttatgaccacttgctcgactattggtgctatagcgatgacaccactccttactaaactccttgctggtcaattagtccctgttgatgctgcaggcttggccatcagtacttttcaggttgttttagtaccgactatcgttggagtgttggcacatgagtattttcccaagtttaccgagcggattatctccataacaccactgataggggtcatcctcaccaccttgctttgtgctagccctattgggcaagtcgcagaagtgttgaaaactcaaggtgctcaacttattctccctgttgctctgctgcatgctgttgcattcgctcttggctattggatctcgaaatggtcttctttcggggaatcaacttctagaaccatctcaattgagtgtgggatgcagagttctgcgcttggatttttacttgcccaaaagcacttcacaaaccctcttgttgctgttccttctgctgtcagtgttgtgtgcatggcgctcggaggcagtgctcttgcagtattctggagaaacagaggccttccagcagatgacaaggacgatttcaaggaatgaatgaagcaaaaacaatcctaggctccagcttctagtcgttccatgttttagttgagcgtggttacgtcagagaattttttatattcccatattttaggtatgtaaaacacaaaacaggataaggacgtttgtttattctagataattgattattggtaggaaggacccttgttaatgatttaggcaaggctttgcaattaagtttggtgtgtaatgtatttttcatcttctaaataaataagctgcttctcagacaaagcagtaattcgtttatatatatggtgttatgc

SEQ ID NO: 62721 - protein, 443 aa, Triticum aestivum
  peptide (1)..(443): Ceres Seq. ID no. 13591366
TTTPAPPLSRVLNPHSSPSTTSPHTPSLSDMAPSATCPLHSMASVSRALRPRPRLAAPRLGCGLRVGCSVPAYGSAATEKAEWGLAIAPSPATTLVPVVRSRQIFCKAEANISSNLPASKPTGASQYEKIVELLTTLFPVWVILGTVIGIYKPSMVTWLETDLFTVGLGFLMLSMGLTLTFEDFRRCLRNPWTVGVGFLAQYLIKPMLGYAIALSLKLSAPLATGLILVSCCPGGQASNVATYISKGNVALSVLMTTCSTIGAIAMTPLLTKLLAGQLVPVDAAGLAISTFQVVLVPTIVGVLAHEYFPKFTERIISITPLIGVILTTLLCASPIGQVAEVLKTQGAQLILPVALLHAVAFALGYWISKWSSFGESTSRTISIECGMQSSALGFLLAQKHFTNPLVAVPSAVSVVCMALGGSALAVFWRNRGLPADDKDDFKE

SEQ ID NO: 62722 - protein, 413 aa, Triticum aestivum
  peptide (1)..(413): Ceres Seq. ID no. 13591367
MAPSATCPLHSMASVSRALRPRPRLAAPRLGCGLRVGCSVPAYGSAATEKAEWGLAIAPSPATTLVPVVRSRQIFCKAEANISSNLPASKPTGASQYEKIVELLTTLFPVWVILGTVIGIYKPSMVTWLETDLFTVGLGFLMLSMGLTLTFEDFRRCLRNPWTVGVGFLAQYLIKPMLGYAIALSLKLSAPLATGLILVSCCPGGQASNVATYISKGNVALSVLMTTCSTIGAIAMTPLLTKLLAGQLVPVDAAGLAISTFQVVLVPTIVGVLAHEYFPKFTERIISITPLIGVILTTLLCASPIGQVAEVLKTQGAQLILPVALLHAVAFALGYWISKWSSFGESTSRTISIECGMQSSALGFLLAQKHFTNPLVAVPSAVSVVCMALGGSALAVFWRNRGLPADDKDDFKE

SEQ ID NO: 62723 - protein, 402 aa, Triticum aestivum
  peptide (1)..(402): Ceres Seq. ID no. 13591368
MASVSRALRPRPRLAAPRLGCGLRVGCSVPAYGSAATEKAEWGLAIAPSPATTLVPVVRSRQIFCKAEANISSNLPASKPTGASQYEKIVELLTTLFPVWVILGTVIGIYKPSMVTWLETDLFTVGLGFLMLSMGLTLTFEDFRRCLRNPWTVGVGFLAQYLIKPMLGYAIALSLKLSAPLATGLILVSCCPGGQASNVATYISKGNVALSVLMTTCSTIGAIAMTPLLTKLLAGQLVPVDAAGLAISTFQVVLVPTIVGVLAHEYFPKFTERIISITPLIGVILTTLLCASPIGQVAEVLKTQGAQLILPVALLHAVAFALGYWISKWSSFGESTSRTISIECGMQSSALGFLLAQKHFTNPLVAVPSAVSVVCMALGGSALAVFWRNRGLPADDKDDFKE

SEQ ID NO: 62724 - DNA, 1115 bp, Triticum aestivum
  misc_feature (1)..(1115): Ceres Seq. ID no. 12615296
aaagcggttgttccccattcttaaaccttccacgaccctctcctcccttccggcctgcttccactcttctccgtcaggatttcgttccagaaatcgaaagatgaagatcattccggtggcttgcttggaggataactatgcctacctgatcgttgacgagagcaccaaggcggcggcggccgtcgacccggtggagccggagaaggtgctggcggcggccagcgaggtcggcgcctacatcgactgcgtcctcaccacccaccaccactgggatcatgctggtggcaatgagaagatgaggctgctggtgccagggattaaggtctatgggggatccatggacaatgttaaaggctgcactgatcaggtggaaaacggaactaagttatccattgggaaggaaattgacatactgtgcctacatacgccatgtcatacaaaaggtcatattagctactacgttactagcaaagaggaggaagacccagcagtatttactggagacaccttgttcattgctggctgtgggaggtttttcgagggtacggcagagcaaatgtaccagtccctttgtgttacactgggctcgctgcctaagtcaactcgtgtttactgtggccatgagtacactgtaaagagcctacaattcatgctgacagtcgagccagagaacgaaaaaatgaagcagaaactggaatgggctcaaaagcagcgtgaagcaaatcaaccgacggttccctcaactataggagatgagcttgagataaacaccttcatgcgtgttgatctgcctgaaatacaggcaaaatttggtgccaagtcggcagttgaagcgctgaggacggtcaggaacatcaaggatacctggaaaggttgataaacgcagctgccactcatacttgtaggtggcgtttacagccgtgcgatgctttgagagctacgtacgtgttaagaagataatatgccagtgtttcctttaagaaaaacataagagaaaggagtccagtctgctaatatgctttggtatcaatcagaatacaactgttgtggcatgttaattactactggtatgttatttcttggcaaaacaaacaaaaactatgttggcctgtggc

SEQ ID NO: 62725 - protein, 291 aa, Triticum aestivum
  peptide (1)..(291): Ceres Seq. ID no. 12615297
KRLFPILKPSTTLSSLPACFHSSPSGFRSRNRKMKIIPVACLEDNYAYLIVDESTKAAAAVDPVEPEKVLAAASEVGAYIDCVLTTHHHWDHAGGNEKMRLLVPGIKVYGGSMDNVKGCTDQVENGTKLSIGKEIDILCLHTPCHTKGHISYYVTSKEEEDPAVFTGDTLFIAGCGRFFEGTAEQMYQSLCVTLGSLPKSTRVYCGHEYTVKSLQFMLTVEPENEKMKQKLEWAQKQREANQPTVPSTIGDELEINTFMRVDLPEIQAKFGAKSAVEALRTVRNIKDTWKG

SEQ ID NO: 62726 - protein, 258 aa, Triticum aestivum
  peptide (1)..(258): Ceres Seq. ID no. 12615298
MKIIPVACLEDNYAYLIVDESTKAAAAVDPVEPEKVLAAASEVGAYIDCVLTTHHHWDHAGGNEKMRLLVPGIKVYGGSMDNVKGCTDQVENGTKLSIGKEIDILCLHTPCHTKGHISYYVTSKEEEDPAVFTGDTLFIAGCGRFFEGTAEQMYQSLCVTLGSLPKSTRVYCGHEYTVKSLQFMLTVEPENEKMKQKLEWAQKQREANQPTVPSTIGDELEINTFMRVDLPEIQAKFGAKSAVEALRTVRNIKDTWKG

SEQ ID NO: 62727 - protein, 193 aa, Triticum aestivum
  peptide (1)..(193): Ceres Seq. ID no. 12615299
MRLLVPGIKVYGGSMDNVKGCTDQVENGTKLSIGKEIDILCLHTPCHTKGHISYYVTSKEEEDPAVFTGDTLFIAGCGRFFEGTAEQMYQSLCVTLGSLPKSTRVYCGHEYTVKSLQFMLTVEPENEKMKQKLEWAQKQREANQPTVPSTIGDELEINTFMRVDLPEIQAKFGAKSAVEALRTVRNIKDTWKG

SEQ ID NO: 62728 - DNA, 1313 bp, Triticum aestivum
  misc_feature (1)..(1313): Ceres Seq. ID no. 13596689
acaaaagagggccgaggagacagggacacgcaagcttcaggcacaagccctacgccgcctcgcctcgcctggttgcttgcttgtcttcgaagatccatagttagttgcactacaccagaagaatcaaccaaagcttcggcccgacttaatcgccatcccttgttgttgttgcgcctcgatcgatcttggcgcggtggtgactaatggcgcactgcggcggcggtcaggcggcgtccgtggagagccatttccagggcctgctcgacgacgacgacaagtaccgcgcattgtgcggcgcgttcgggtacctgcagcagcaggagtggccggacctcagcggcgcttgctacgcggccttcggcgcgccaccaccaccgggcagcagcaacggcgccggcaactccttctcctgcagcggtagcgccagcagcggcgacgggtccacgaagagaaaacctgacgcgtatgtggacgcaaaggacgactgcaagaggccgagagggaagcagcagctgtgcgaccctggcgaggctgaaggagcggcgaaaggcaggccggagaaacccaaggcgtgcgccaggaagaagccggaggcggcggccaccggccagaagaccgactacatccacgtccgagcccggcgcgggcaggccacggacagccacagcctcgccgaacgggtgaggcgggagcggatcagcgagcggatgaggtacctgcaggagctggtgcccgggtgcgacaaggtcactggcaaggccggcatgctcgacgagatcattaactacgtccagtccctgcagaagcaggtcgagttcctgtccatgaagatcgccgcctccaacccggtggtgaacttcaacatcgtcgacgacctcttcggcggcaggcggatgaaccaggcgtgcggccccgcggcggccctgcccgccatgacgttgccgatgcaccatgcgcagctggacccgtcctgccttcagatgagcagcactaccatgcagcagatgcagcagccggctgctgggttcgggctggacatgctcctcaacaacccgtacccggcggcgcagagcgcgtcccggtcggcggctgccacgccggtctcggtgtcggccgccgcgtcggtcgagtcatccctcgatgtgaatggagctgctgcttgggacattgcgtctcagcatttgttcagtgggtttgacgcacagtttcagtcagttcaaagtgagtagctgcttctytgaagcaaagcttgcagggttaccttgtactgatattcttgtgtgaaagaacatagatacagagttagccaaggg

SEQ ID NO: 62729 - protein, 341 aa, Triticum aestivum
  peptide (1)..(341): Ceres Seq. ID no. 15221951
MAHCGGGQAASVESHFQGLLDDDDKYRALCGAFGYLQQQEWPDLSGACYAAFGAPPPPGSSNGAGNSFSCSGSASSGDGSTKRKPDAYVDAKDDCKRPRGKQQLCDPGEAEGAAKGRPEKPKACARKKPEAAATGQKTDYIHVRARRGQATDSHSLAERVRRERISERMRYLQELVPGCDKVTGKAGMLDEIINYVQSLQKQVEFLSMKIAASNPVVNFNIVDDLFGGRRMNQACGPAAALPAMTLPMHHAQLDPSCLQMSSTTMQQMQQPAAGFGLDMLLNNPYPAAQSASRSAAATPVSVSAAASVESSLDVNGAAAWDIASQHLFSGFDAQFQSVQSE

SEQ ID NO: 62730 - protein, 173 aa, Triticum aestivum
  peptide (1)..(173): Ceres Seq. ID no. 15221952
MRYLQELVPGCDKVTGKAGMLDEIINYVQSLQKQVEFLSMKIAASNPVVNFNIVDDLFGGRRMNQACGPAAALPAMTLPMHHAQLDPSCLQMSSTTMQQMQQPAAGFGLDMLLNNPYPAAQSASRSAAATPVSVSAAASVESSLDVNGAAAWDIASQHLFSGFDAQFQSVQSE

SEQ ID NO: 62731 - DNA, 1612 bp, Triticum aestivum
  misc_feature (1)..(1612): Ceres Seq. ID no. 13596743
actgatttccccctccacctatctacccgccgccgccacgcccgccgccgacgacgatggcaactaccgcctcaccctccaccacgaccaccccccggtccttcctctcgtcgccttccttctccctcagggcatcgaagtcgagccacctccggacgacgagaaggctgcccgttaatgtacgctgcgccagtagctctccggccgccgatacatcttacacgacgaaggtctcgcggaatgccaacatagccaagctccaagcaggctatttgtttccggagattgccagaagaagggcagctcatctgctaaagcatcctgacgccaaaattataagtctgggaataggtgacactactgagcccattccggaggtcataacaaatgccatggcagagagagcacatgctttatccacagtggatggctacagtggttatggagctgaacaaggtgaaaagaaactaagggcagcaattgctgcaacctactatgcggatcttggtattgacgaaactgatatatttgtctctgatggtgccaaatgtgacatttctcgcctacaggttctttttggatctaaagtgaagattgcagttcaagatccatcatatcccgcatatgttgattcaagtgttatcatggggcaaactgacttatatcagcaggatgttcagaagtatggaaatattgaatacatgagatgcagtcctgaaaatggatttttccctgatctttccaaggtcccacggacagatatcatattcttctgttcacccaacaatcctactggtgctgctgcatctagggaccagctaacacagttggtcaaattcgcaaaggacaatgggtccataatagtctatgattctgcttatgccatgtacatatcagatgacagcccaaaatccatctttgaaattcctggggcgaaggaggttgccctcgagacagcatctttctctaaatatgctgggttcactggtgtccgactgggttggactgtggtccctaaggagctccttttctccgatgggcatccagtcgctaaagatttcaaccgcatagtctgcacttccttcaatggcgcatcgaccatctctcaggccggtggtttaggctgcctctctccagagggtctaaaggctatgcaagacgttgtcggattctacaaggagaacaccaaaatcattgtcgacacgtttgagtcgctcggattcaacgtctacggtgcgaagaatgccccctatgtgtgggtgcacttccctgaccgcaattcctgggatgtctttgccgagatccttgagaaggcaaacgtggtcactactcccggcagtggatttgggcccggcggtgagggctttgtgagggtcagtgcatttggccacagagagaacattattgaagctgcgagaagactgaagcagctatacaaatgagcgttggtttagcaggtggccccctctgtcgctggggagccaggcaataagaacccagcagcatttggagcacgaggtttgcttctcggctgctgggaagtgttagaatagagacagggtgttgtttttgctccattcgtaaccatttaatactggaaatttgcttgttc

SEQ ID NO: 62732 - protein, 461 aa, Triticum aestivum
  peptide (1)..(461): Ceres Seq. ID no. 15221966
MATTASPSTTTTPRSFLSSPSFSLRASKSSHLRTTRRLPVNVRCASSSPAADTSYTTKVSRNANIAKLQAGYLFPEIARRRAAHLLKHPDAKIISLGIGDTTEPIPEVITNAMAERAHALSTVDGYSGYGAEQGEKKLRAAIAATYYADLGIDETDIFVSDGAKCDISRLQVLFGSKVKIAVQDPSYPAYVDSSVIMGQTDLYQQDVQKYGNIEYMRCSPENGFFPDLSKVPRTDIIFFCSPNNPTGAAASRDQLTQLVKFAKDNGSIIVYDSAYAMYISDDSPKSIFEIPGAKEVALETASFSKYAGFTGVRLGWTVVPKELLFSDGHPVAKDFNRIVCTSFNGASTISQAGGLGCLSPEGLKAMQDVVGFYKENTKIIVDTFESLGFNVYGAKNAPYVWVHFPDRNSWDVFAEILEKANVVTTPGSGFGPGGEGFVRVSAFGHRENIIEAARRLKQLYK

SEQ ID NO: 62733 - protein, 349 aa, Triticum aestivum
  peptide (1)..(349): Ceres Seq. ID no. 15221967
MAERAHALSTVDGYSGYGAEQGEKKLRAAIAATYYADLGIDETDIFVSDGAKCDISRLQVLFGSKVKIAVQDPSYPAYVDSSVIMGQTDLYQQDVQKYGNIEYMRCSPENGFFPDLSKVPRTDIIFFCSPNNPTGAAASRDQLTQLVKFAKDNGSIIVYDSAYAMYISDDSPKSIFEIPGAKEVALETASFSKYAGFTGVRLGWTVVPKELLFSDGHPVAKDFNRIVCTSFNGASTISQAGGLGCLSPEGLKAMQDVVGFYKENTKIIVDTFESLGFNVYGAKNAPYVWVHFPDRNSWDVFAEILEKANVVTTPGSGFGPGGEGFVRVSAFGHRENIIEAARRLKQLYK

SEQ ID NO: 62734 - protein, 265 aa, Triticum aestivum
  peptide (1)..(265): Ceres Seq. ID no. 15221968
MGQTDLYQQDVQKYGNIEYMRCSPENGFFPDLSKVPRTDIIFFCSPNNPTGAAASRDQLTQLVKFAKDNGSIIVYDSAYAMYISDDSPKSIFEIPGAKEVALETASFSKYAGFTGVRLGWTVVPKELLFSDGHPVAKDFNRIVCTSFNGASTISQAGGLGCLSPEGLKAMQDVVGFYKENTKIIVDTFESLGFNVYGAKNAPYVWVHFPDRNSWDVFAEILEKANVVTTPGSGFGPGGEGFVRVSAFGHRENIIEAARRLKQLYK

SEQ ID NO: 62735 - DNA, 1263 bp, Triticum aestivum
  misc_feature (1)..(1263): Ceres Seq. ID no. 14313449
ggcagaactcccgcgactatcaggatcggcggctatacaccgtgaactgcgccactagactaggaagaaaatggggtggaagggcgtcctggggttcgactacggcgtcgtgcaggcaccgctcggccccgacatctccggcccggagctcgccgccgccgtcgccaacgctggcgccataggcctcctccgccttcctgactggccggcgccggaccacgtgagggggttgatacagaggaccaggagcctgaccgagaagccgttcggggcggccatcgtgctggccttcccgcacgaggagaatctgagggtcgtgctggaggagaagctcgccgtgctgcaggtgtactggggcgagttccccaaggagcaggtcgacgaggcccatcgtgccggcgtcaaggtcttgcatcaggttggtaaccttgaggaggcagcaaaagctaaggaagctggtgtagatggaattatcgttcaaggccgcgaagcaggggggcatgtgattggtcaagagggtctgctaccgttgctgccgagagtagtggatctagtttcagatagtactgtttcggttatcgccgctggtggaatcgtagatggccgtggctatgctgctgcattggcacttggtgctcatggtgtttgcttaggaactaggtttgtagccaccgaggaaagctttgcgcatccgctgtataagaaaaagctaattgagatgaattgcacggactatacagctgtgttcgggcgtactagatggcctggtgctccacaacgtgtcctgaagacacctttctatgttgagtggaacaatcttccagatcatgaaacagaggaaaatcagcctattataggtcattctatcatccatggtgtgcacaaggatatatgccggtttgctggtactgttcctaatgcgacaacaacaggcgatatcgatagcatggccatgtatgctggccagagtgttgggctaatcaccgagattgtaccagcaagggaagttgtcaagaggctagtcgctgaagcacagcgtgtcattggagaaaagctttctggtttccccaaatcatcagagtagtgctggtgaagtccttggtaattaaactgttaaggtatctaatggtgtacgctgcgtgttatttgtaggcaatagccaatgaaaataaatgggttttccaaggtattccctttttaccacagttttgtacttgtatgtgttgtttgtaagtatatattcaataaaggtaaatgatttcg

SEQ ID NO: 62736 - protein, 337 aa, Triticum aestivum
  peptide (1)..(337): Ceres Seq. ID no. 14313450
MGWKGVLGFDYGVVQAPLGPDISGPELAAAVANAGAIGLLRLPDWPAPDHVRGLIQRTRSLTEKPFGAAIVLAFPHEENLRVVLEEKLAVLQVYWGEFPKEQVDEAHRAGVKVLHQVGNLEEAAKAKEAGVDGIIVQGREAGGHVIGQEGLLPLLPRVVDLVSDSTVSVIAAGGIVDGRGYAAALALGAHGVCLGTRFVATEESFAHPLYKKKLIEMNCTDYTAVFGRTRWPGAPQRVLKTPFYVEWNNLPDHETEENQPIIGHSIIHGVHKDICRFAGTVPNATTTGDIDSMAMYAGQSVGLITEIVPAREVVKRLVAEAQRVIGEKLSGFPKSSE

SEQ ID NO: 62737 - DNA, 951 bp, Triticum aestivum
  misc_feature (1)..(951): Ceres Seq. ID no. 13654873
cctcctcctccttgtcaaagctagccagcaagaaccaagaagaagcagagcagctcagaaccgagcgcagagcgaagcggagccaaacgaaagaagggacctaacctaacctagccaagccagccggcgatcgaccgagagatggcgcggtggtgtcagctggcggcggtgctgctcgccgtgtcgatggcggcgtcgacgtcggtggcgcaggacgcgctgcagaccaagtgccagggggacctgcagaagctgtcggactgcatggactacgcgacggggcacgaggaaacgccgtcggccaagtgctgcgaggacacggcggacacgcagaaggcgcggcccgagtgcctctgctccatcatccagcaggtgcacagcggcagccacggcgtgcagcagctcggcctccgcttcgaccgcctcctggcccagcccgcagcctgcaagctcacctacgccaacgtctccctctgcatcaacctgctgcacctgaccccgagctcgccagactacgctctcttcgcaaatgcttccaagattactccgtccactgccgcaccggcgagagacaccgccgacggcttcaaggtttcgccgggactcggttacggcgtcgtggcagcggccgtcgtctctgctgtcttctcatccatcttctgattttcggacaagcacacgcccttttatcctctccctttcttctatctgtcatgtttgtttacataaccctgcaagttcccacacaacgacgatgctttagatggtctattatctactcacgtggtaagaggattcgttcggatgacatactgttgttttaccccagataagaagatggaaagttgagacttgtgtttcttcatgtggaagtgatggtttgcagtaatatcctcaaaaaaaaaaaaaaaaaagcttatcgataccgtcgactgtttaaacacaataaag

SEQ ID NO: 62738 - protein, 173 aa, Triticum aestivum
  peptide (1)..(173): Ceres Seq. ID no. 13654874
MARWCQLAAVLLAVSMAASTSVAQDALQTKCQGDLQKLSDCMDYATGHEETPSAKCCEDTADTQKARPECLCSIIQQVHSGSHGVQQLGLRFDRLLAQPAACKLTYANVSLCINLLHLTPSSPDYALFANASKITPSTAAPARDTADGFKVSPGLGYGVVAAAVVSAVFSSIF

SEQ ID NO: 62739 - protein, 158 aa, Triticum aestivum
  peptide (1)..(158): Ceres Seq. ID no. 13654875
MAASTSVAQDALQTKCQGDLQKLSDCMDYATGHEETPSAKCCEDTADTQKARPECLCSIIQQVHSGSHGVQQLGLRFDRLLAQPAACKLTYANVSLCINLLHLTPSSPDYALFANASKITPSTAAPARDTADGFKVSPGLGYGVVAAAVVSAVFSSIF

SEQ ID NO: 62740 - protein, 132 aa, Triticum aestivum
  peptide (1)..(132): Ceres Seq. ID no. 13654876
MDYATGHEETPSAKCCEDTADTQKARPECLCSIIQQVHSGSHGVQQLGLRFDRLLAQPAACKLTYANVSLCINLLHLTPSSPDYALFANASKITPSTAAPARDTADGFKVSPGLGYGVVAAAVVSAVFSSIF

SEQ ID NO: 62741 - DNA, 1330 bp, Triticum aestivum
  misc_feature (1)..(1330): Ceres Seq. ID no. 15226378
attaaaactcggacaggtctccggcggtacgtgacgccaacctcgcgggaagcgccggcgtctgcgcgcgtgcgatcatgatgatgaggcgccagttatcggtctgcgtcctcctcctgctcgtgctcgcggggcagcagcaggcggcggccaagaagtacgccgccatcttcaacttcggggactccctcgtggacgccggcaacctcgtcgtggacggcatccccgagtacctcgccacggcgaagctgccgtatggcatgacctacttcgggtaccccaccggccgctgctccgacggccgcctcgtcgtcgacttcatcgcgcaggagctggggctgccgctgctgccgccgtcgaaggcgcgcaacgccacgttccaccacggcgccaacttcgccatcaccggggccacggcgctggacaccagctacttcgtggcgaaggggctgggcaagacggtgtggaactccggctccctgcacacccagatcaagtggctgcaggagatgaagcccaaaatctgcagctcccccgaagagtgcaggggcctgttccggcggtcgctgttcatcgtgggcgagttcggcggcaacgactacaactcgccgctcttcgcgttccgcccgctggaggaggtgcacgagttcgtgggggacgtcgtcaactccatcggcgagggaatcgagaagctgattgcggagggggccgtggacctggtggtgcccggggtgctcccgatcggctgcttcccggtgtacctgtccatcttccggaagcagccggagatgtacggcggcaagagcgggtgcatcaaggacctcaacacgctgtcgtgggtgcacaacgtggcgctgcagcgcaagatcgtggagctccggaagaagcactccgacgtgcgcatcatgtacgccgactactacacgcccaccatccagttcgtcctccacgccgagaaatgggggatgctgaggcagaagccgagggcgtgctgcggggcgccgggcgtcggggtgtacaacttcaacctgacgtccaagtgcggcgagcccggcgcgtacgcgtgcgacgacccgtccaaccactggagctgggacggcatccacctcacggaggcctcctacggccacatcgccaggggctggctctacggccccttcgccgacccgcccatcgtcggcaaccggaacctcgagtagcactgtagcagcagtagtacagggcttgtttttgcgtacatgcacatgggttactgtatgtagagaaaggaaaagaaatcaaagaacagacatgtcttgtgcagattaattaattattaattaattggttc

SEQ ID NO: 62742 - protein, 373 aa, Triticum aestivum
  peptide (1)..(373): Ceres Seq. ID no. 15226379
MMMRRQLSVCVLLLLVLAGQQQAAAKKYAAIFNFGDSLVDAGNLVVDGIPEYLATAKLPYGMTYFGYPTGRCSDGRLVVDFIAQELGLPLLPPSKARNATFHHGANFAITGATALDTSYFVAKGLGKTVWNSGSLHTQIKWLQEMKPKICSSPEECRGLFRRSLFIVGEFGGNDYNSPLFAFRPLEEVHEFVGDVVNSIGEGIEKLIAEGAVDLVVPGVLPIGCFPVYLSIFRKQPEMYGGKSGCIKDLNTLSWVHNVALQRKIVELRKKHSDVRIMYADYYTPTIQFVLHAEKWGMLRQKPRACCGAPGVGVYNFNLTSKCGEPGAYACDDPSNHWSWDGIHLTEASYGHIARGWLYGPFADPPIVGNRNLE

SEQ ID NO: 62743 - protein, 372 aa, Triticum aestivum
  peptide (1)..(372): Ceres Seq. ID no. 15226380
MMRRQLSVCVLLLLVLAGQQQAAAKKYAAIFNFGDSLVDAGNLVVDGIPEYLATAKLPYGMTYFGYPTGRCSDGRLVVDFIAQELGLPLLPPSKARNATFHHGANFAITGATALDTSYFVAKGLGKTVWNSGSLHTQIKWLQEMKPKICSSPEECRGLFRRSLFIVGEFGGNDYNSPLFAFRPLEEVHEFVGDVVNSIGEGIEKLIAEGAVDLVVPGVLPIGCFPVYLSIFRKQPEMYGGKSGCIKDLNTLSWVHNVALQRKIVELRKKHSDVRIMYADYYTPTIQFVLHAEKWGMLRQKPRACCGAPGVGVYNFNLTSKCGEPGAYACDDPSNHWSWDGIHLTEASYGHIARGWLYGPFADPPIVGNRNLE

SEQ ID NO: 62744 - protein, 371 aa, Triticum aestivum
  peptide (1)..(371): Ceres Seq. ID no. 15226381
MRRQLSVCVLLLLVLAGQQQAAAKKYAAIFNFGDSLVDAGNLVVDGIPEYLATAKLPYGMTYFGYPTGRCSDGRLVVDFIAQELGLPLLPPSKARNATFHHGANFAITGATALDTSYFVAKGLGKTVWNSGSLHTQIKWLQEMKPKICSSPEECRGLFRRSLFIVGEFGGNDYNSPLFAFRPLEEVHEFVGDVVNSIGEGIEKLIAEGAVDLVVPGVLPIGCFPVYLSIFRKQPEMYGGKSGCIKDLNTLSWVHNVALQRKIVELRKKHSDVRIMYADYYTPTIQFVLHAEKWGMLRQKPRACCGAPGVGVYNFNLTSKCGEPGAYACDDPSNHWSWDGIHLTEASYGHIARGWLYGPFADPPIVGNRNLE

SEQ ID NO: 62745 - DNA, 1276 bp, Triticum aestivum
  misc_feature (1)..(1276): Ceres Seq. ID no. 13655193
ttttttctactgctctcgccgctggaacctgacggaaaaaccctacctcgccgtcgccccatcgtcgaacttcccgatggcgtcgaggtgcgcggcgaggcttccgcacccgccgtgcgcggcgccgcagcacggttgggcgagctcgcgggtctcggcacgcccggcgcaatccggcgcgtcaagagggcgtgccgtcgcgtgcgccgtcagcttcaggccatgtatcgacattcacaaggggaaagttaaacagattgttggctctactctccgggatgcatcggatgatggcactgcactggtgacgaactttgaatcagacaagtctccagcagaatttgcaaatatttataaagaagatggacttgttggtggacatgtaataatgcttggcggagaccctgcaagccgttctgctgccctggaagcactgcatgcatatcctggtggtttgcaagttggaggtggaataaatttggagaatgcaatgtcataccttaatgaaggagcaagtcacgtgattgtaacttcttatgtgtttagtgatggcaaaatgaacattgaaaggctaacgcaacttgtcgagcttgttgggaaacaaaggcttattttggacctgagttgtcggaaaaaggatggcagatatgccattgtgactgacagatggcagaagttcagtgatgtctttgtggatgggccaacattagaacgtcttgctgcatatgcagatgagtttttggttcatggagttgatgtggagggcaaaaggttaggaattgacgaggaacttgtggaactattgggaagccattcacctatcccgacaacatatgctgggggtgtgtcaacgatggacgacctggagaggatcaagaaagcagggaaaggtcgagtcgatgtcactgtcgggagtgccctagacatattcgggggagatttgccctacgatactgttgtccgttggcacaaggagcaaaacctggttagccaacggtgaagaaatcagatgatctttttatagagcaaatgatcgaagttcagctcatgtgtgatccccacctgaccatggtcaggtcaggttatagagctttattgtttgctggacattgtagtgtgaaccgcgtagtgtgaatgtgtcttgtgtgacatgtcaaagctgaagcggaggtgtcaactcagtgtcgtagaggaccacccggtattcagatactgttcttcacattctgtttgtattgtagtactggtaatggtgaataaacaggggttgaactgc

SEQ ID NO: 62746 - protein, 332 aa, Triticum aestivum
  peptide (1)..(332): Ceres Seq. ID no. 13655194
FFYCSRRWNLTEKPYLAVAPSSNFPMASRCAARLPHPPCAAPQHGWASSRVSARPAQSGASRGRAVACAVSFRPCIDIHKGKVKQIVGSTLRDASDDGTALVTNFESDKSPAEFANIYKEDGLVGGHVIMLGGDPASRSAALEALHAYPGGLQVGGGINLENAMSYLNEGASHVIVTSYVFSDGKMNIERLTQLVELVGKQRLILDLSCRKKDGRYAIVTDRWQKFSDVFVDGPTLERLAAYADEFLVHGVDVEGKRLGIDEELVELLGSHSPIPTTYAGGVSTMDDLERIKKAGKGRVDVTVGSALDIFGGDLPYDTVVRWHKEQNLVSQR

SEQ ID NO: 62747 - protein, 307 aa, Triticum aestivum
  peptide (1)..(307): Ceres Seq. ID no. 13655195
MASRCAARLPHPPCAAPQHGWASSRVSARPAQSGASRGRAVACAVSFRPCIDIHKGKVKQIVGSTLRDASDDGTALVTNFESDKSPAEFANIYKEDGLVGGHVIMLGGDPASRSAALEALHAYPGGLQVGGGINLENAMSYLNEGASHVIVTSYVFSDGKMNIERLTQLVELVGKQRLILDLSCRKKDGRYAIVTDRWQKFSDVFVDGPTLERLAAYADEFLVHGVDVEGKRLGIDEELVELLGSHSPIPTTYAGGVSTMDDLERIKKAGKGRVDVTVGSALDIFGGDLPYDTVVRWHKEQNLVSQR

SEQ ID NO: 62748 - protein, 203 aa, Triticum aestivum
  peptide (1)..(203): Ceres Seq. ID no. 13655196
MLGGDPASRSAALEALHAYPGGLQVGGGINLENAMSYLNEGASHVIVTSYVFSDGKMNIERLTQLVELVGKQRLILDLSCRKKDGRYAIVTDRWQKFSDVFVDGPTLERLAAYADEFLVHGVDVEGKRLGIDEELVELLGSHSPIPTTYAGGVSTMDDLERIKKAGKGRVDVTVGSALDIFGGDLPYDTVVRWHKEQNLVSQR

SEQ ID NO: 62749 - DNA, 1647 bp, Triticum aestivum
  misc_feature (1)..(1647): Ceres Seq. ID no. 13598741
agaacatcctaatcgaaaaacaagcagagtctcttggctgcacccgtcaccggtgcccccttcttcgtcagcctgcaatctccactcacctcactcccactccccctcccaccccccactcttctacacatcgaggacgaaagggtggtgagggagccgggggcctgagggggctagctgctaggcggaggaggggatggagcgagggctcgcattgctgggtctggggctggcgcttcttctgctggcgccctctcgtcgtctcgcctcggccgctccggtggaggacggcctgctcatgaatggtgatttcgagacagcaccacctggcggtttcgtcaaatcggcttcagtttccgagggcgcggcgatcccaagctggacgatcaatggaacagttgagctcatttccgcaggccagcaccagggtggcatgatccttattgttccacaaggggatcatgctgtgcggctagggaatgatgcaggcattgggcaggtggtggaggttgagaagggctcagagtacgcgatcacattcagtgccgcccggacctgcgcgcagctggagtcactgaacatctccgccgggagcgtatcacagacagtcgacttgcagacactttacagcatagaaggctgggatgcatatgccctggctttccaagcagtggatgagcaggcgagcattgagtttaggaaccctggcatggaggacgacccgacctgcgggcctatccttgacaacgtggccatcaagaagctcttctcccccgacaaagcaaaggagaacatggtgatcaatggagactttgaggaggggccatggatgtttccaaacacaagcttcggtgtcctgctcccgacgaaccttgacgagcagacatcggccttgccagggtggatgatcgagtcgaaccgcgcagtccgcttcgtcgactccgaccagtacaccgtgccccaggggaagcgcgccatcgagcttctctccggcaaggagggcatcatctcgcagatggtggagacgacccctcagaaggcgtacaccctgacgttcacgctgggctcggcaggcgactcgtgccagccgccaatggctgtcatggcattcgccggcgaccaggcccagaacttccactactcccccatgggcaacgccacgagccaggccgtgaacgtgaacttcacggcgcgcgccgagaggacacgcgttgcgctctacagcgtctactacaacacgagaagcgacgaccacagctcgctctgcgggccggtgatagacgacgtccgtgtctggggcttgaatggggctgctgggttgaaggcaagtattgcgctgcttattgccatggctagtgtcatcgttctcgtgctgttctgatctcctgaatatacgtatgtaacctcccctgcaagggcgaggaggccactagttttgttagtaagcttgaggtttctatgagattgatgagtaatgtgagcttaggctaaagctaccagtagctataaatggttgttttgttgctttcttgtgtgattcagaaagtagcaaaccatgatgggattgagtggtcactgagccaagggcttgcaatgtgagatgtaagaattgttacaagttcatctcttcaatgcattagaaagtcc

SEQ ID NO: 62750 - protein, 394 aa, Triticum aestivum
  peptide (1)..(394): Ceres Seq. ID no. 13598742
MERGLALLGLGLALLLLAPSRRLASAAPVEDGLLMNGDFETAPPGGFVKSASVSEGAAIPSWTINGTVELISAGQHQGGMILIVPQGDHAVRLGNDAGIGQVVEVEKGSEYAITFSAARTCAQLESLNISAGSVSQTVDLQTLYSIEGWDAYALAFQAVDEQASIEFRNPGMEDDPTCGPILDNVAIKKLFSPDKAKENMVINGDFEEGPWMFPNTSFGVLLPTNLDEQTSALPGWMIESNRAVRFVDSDQYTVPQGKRAIELLSGKEGIISQMVETTPQKAYTLTFTLGSAGDSCQPPMAVMAFAGDQAQNFHYSPMGNATSQAVNVNFTARAERTRVALYSVYYNTRSDDHSSLCGPVIDDVRVWGLNGAAGLKASIALLIAMASVIVLVLF

SEQ ID NO: 62751 - protein, 360 aa, Triticum aestivum
  peptide (1)..(360): Ceres Seq. ID no. 13598743
MNGDFETAPPGGFVKSASVSEGAAIPSWTINGTVELISAGQHQGGMILIVPQGDHAVRLGNDAGIGQVVEVEKGSEYAITFSAARTCAQLESLNISAGSVSQTVDLQTLYSIEGWDAYALAFQAVDEQASIEFRNPGMEDDPTCGPILDNVAIKKLFSPDKAKENMVINGDFEEGPWMFPNTSFGVLLPTNLDEQTSALPGWMIESNRAVRFVDSDQYTVPQGKRAIELLSGKEGIISQMVETTPQKAYTLTFTLGSAGDSCQPPMAVMAFAGDQAQNFHYSPMGNATSQAVNVNFTARAERTRVALYSVYYNTRSDDHSSLCGPVIDDVRVWGLNGAAGLKASIALLIAMASVIVLVLF

SEQ ID NO: 62752 - protein, 315 aa, Triticum aestivum
  peptide (1)..(315): Ceres Seq. ID no. 13598744
MILIVPQGDHAVRLGNDAGIGQVVEVEKGSEYAITFSAARTCAQLESLNISAGSVSQTVDLQTLYSIEGWDAYALAFQAVDEQASIEFRNPGMEDDPTCGPILDNVAIKKLFSPDKAKENMVINGDFEEGPWMFPNTSFGVLLPTNLDEQTSALPGWMIESNRAVRFVDSDQYTVPQGKRAIELLSGKEGIISQMVETTPQKAYTLTFTLGSAGDSCQPPMAVMAFAGDQAQNFHYSPMGNATSQAVNVNFTARAERTRVALYSVYYNTRSDDHSSLCGPVIDDVRVWGLNGAAGLKASIALLIAMASVIVLVLF

SEQ ID NO: 62753 - DNA, 1055 bp, Triticum aestivum
  misc_feature (1)..(1055): Ceres Seq. ID no. 12627566
cccgactccgccgagctcatttccctcaccccctctctatcttcgtcgccgccgccggcgccgccgggacgccgtaccccgcctccctggacccgatagctcctcgcgtccacttcgttcgacgaggaaattctttgggtgactgcaggagatggcggcgttcctgaggtcaaagtgctcgtcagttgggcgtacgttgatgggaagcgttggaaacaatctgtatgggggtatcaattcgtctgctgaaacagtgacaagaccatctcactgtgacgctatcagccagcaaatcaggacattcatccagatgagaaccaacctcaaggtggtagacaactctggagccaagagggtcatgtgcatacagtccttgagggggaagaaaggagctaggcttggggacatgataattggttctgtgaaggaagcgcaacctcgtggcaaggtcaagaaaggtgatgtggtctacggtgtggttgtccgtgccgctatgaagaaaggacgcagtgacggcagcgaggtccagtttgatgacaacgctatcgtcatcgtgaacaacaaaggcgagctgattggcactcgcgtcttcggtcctgttcctcatgagctcaggaagaagaagcatctcaagatcttggcgttggctgaacacatagtttgagaccttaccctgcttagtcatatctcttttatttccacatggagcggaattaacattgctccagagatattttggttgcccctgctgccattccacctttcctttggtaatttgtgtttggaagaatgatgtaccctaaaaggagaatgtgtaccaaactatagggagccctcggcagatcaagttttgtagcacatttaatctgaatgttttgctgcaacggcgaaaatatgttccttatttgctctgttttacctggatcatcacgcgctgcctgtaattttctgcttattgatttagtacatttacagagtgtcctatcattacattcctggaacatgaggaggacagacttccattttcacaacatataacatttgctccctgcttc

SEQ ID NO: 62754 - protein, 170 aa, Triticum aestivum
  peptide (1)..(170): Ceres Seq. ID no. 12627567
MAAFLRSKCSSVGRTLMGSVGNNLYGGINSSAETVTRPSHCDAISQQIRTFIQMRTNLKVVDNSGAKRVMCIQSLRGKKGARLGDMIIGSVKEAQPRGKVKKGDVVYGVVVRAAMKKGRSDGSEVQFDDNAIVIVNNKGELIGTRVFGPVPHELRKKKHLKILALAEHIV

SEQ ID NO: 62755 - protein, 154 aa, Triticum aestivum
  peptide (1)..(154): Ceres Seq. ID no. 12627568
MGSVGNNLYGGINSSAETVTRPSHCDAISQQIRTFIQMRTNLKVVDNSGAKRVMCIQSLRGKKGARLGDMIIGSVKEAQPRGKVKKGDVVYGVVVRAAMKKGRSDGSEVQFDDNAIVIVNNKGELIGTRVFGPVPHELRKKKHLKILALAEHIV

SEQ ID NO: 62756 - protein, 117 aa, Triticum aestivum
  peptide (1)..(117): Ceres Seq. ID no. 12627569
MRTNLKVVDNSGAKRVMCIQSLRGKKGARLGDMIIGSVKEAQPRGKVKKGDVVYGVVVRAAMKKGRSDGSEVQFDDNAIVIVNNKGELIGTRVFGPVPHELRKKKHLKILALAEHIV

SEQ ID NO: 62757 - DNA, 1154 bp, Triticum aestivum
  misc_feature (1)..(1154): Ceres Seq. ID no. 13598387
agcctctccgagaggccaagcagaaatggcggcttcctgcacgctcaccgtccccgcccccttcgccgccgcctcctcctcctcctccacttcagcccgtcgctacaggcgattcggggtggttgccatggcgagcgcggggcagaaggtgtacgctcccggcgtggccgtctccgagggcaacggcggcctgcccaagatcagcctcaaatccccgcacgggagtgaggctgagatttatctgtttggagcatgcgtcacgtcttggaaggttcccaatggaaaggatctgctctttgtcagaccagatgctgtgttcaacggccagaaacccatcagcggtggaattccacattgttttccccagtttggccctggccccatgcagcagcatggattcgcaaggaatgtgaattggtctattactgattcagaagtcacagaaggagatccaactgtaactttggaactaaaagacgactcatacagccgttcaatgtgggattttagtttccaagctttatacaaggttgtgctgcactctacaagcctgtcaacgaccctcaaaataataaatacagacgataaacctttctcattcacctcagccctccacacttatttcagtgcttccattgctggtgtttcagtgaaaggtctcaaaggtagcaagactctcaataaggatcctgaccctaaaaatcctctggagggcaaagaagaaagggacgaggtgacctttccaggatttgtggactgtgtttaccttggcgcaccgagtgagcttaccctcgacaatggattgggtgacaaaattgtaatctcaaacacaaactggtcagatgcagtgttgtggaatcctcatttgcagatggaggcatgctacaaagattttgtttgtgttgaaaatgcaaagattgaaacagtacaactgggtccaaaagaatcttgggtggcagagcagaaaattgaacttatctgaagctaatgggttgagaacagtacagtgcggcgagtatgttgtcaaaggacctttttatgtgtctgccaatgtaaacatgtgccattccccaatgtacttcaacttatgccctcacatgagatgtacatcttataactattttatgttttatgagtaaataagtatttcagtc

SEQ ID NO: 62758 - protein, 326 aa, Triticum aestivum
  peptide (1)..(326): Ceres Seq. ID no. 13598388
ASPRGQAEMAASCTLTVPAPFAAASSSSSTSARRYRRFGVVAMASAGQKVYAPGVAVSEGNGGLPKISLKSPHGSEAEIYLFGACVTSWKVPNGKDLLFVRPDAVFNGQKPISGGIPHCFPQFGPGPMQQHGFARNVNWSITDSEVTEGDPTVTLELKDDSYSRSMWDFSFQALYKVVLHSTSLSTTLKIINTDDKPFSFTSALHTYFSASIAGVSVKGLKGSKTLNKDPDPKNPLEGKEERDEVTFPGFVDCVYLGAPSELTLDNGLGDKIVISNTNWSDAVLWNPHLQMEACYKDFVCVENAKIETVQLGPKESWVAEQKIELI

SEQ ID NO: 62759 - protein, 318 aa, Triticum aestivum
  peptide (1)..(318): Ceres Seq. ID no. 13598389
MAASCTLTVPAPFAAASSSSSTSARRYRRFGVVAMASAGQKVYAPGVAVSEGNGGLPKISLKSPHGSEAEIYLFGACVTSWKVPNGKDLLFVRPDAVFNGQKPISGGIPHCFPQFGPGPMQQHGFARNVNWSITDSEVTEGDPTVTLELKDDSYSRSMWDFSFQALYKVVLHSTSLSTTLKIINTDDKPFSFTSALHTYFSASIAGVSVKGLKGSKTLNKDPDPKNPLEGKEERDEVTFPGFVDCVYLGAPSELTLDNGLGDKIVISNTNWSDAVLWNPHLQMEACYKDFVCVENAKIETVQLGPKESWVAEQKIELI

SEQ ID NO: 62760 - protein, 284 aa, Triticum aestivum
  peptide (1)..(284): Ceres Seq. ID no. 13598390
MASAGQKVYAPGVAVSEGNGGLPKISLKSPHGSEAEIYLFGACVTSWKVPNGKDLLFVRPDAVFNGQKPISGGIPHCFPQFGPGPMQQHGFARNVNWSITDSEVTEGDPTVTLELKDDSYSRSMWDFSFQALYKVVLHSTSLSTTLKIINTDDKPFSFTSALHTYFSASIAGVSVKGLKGSKTLNKDPDPKNPLEGKEERDEVTFPGFVDCVYLGAPSELTLDNGLGDKIVISNTNWSDAVLWNPHLQMEACYKDFVCVENAKIETVQLGPKESWVAEQKIELI

SEQ ID NO: 62761 - DNA, 1331 bp, Triticum aestivum
  misc_feature (1)..(1331): Ceres Seq. ID no. 12615466
aaaaccaacagcaagcaaccatggcttcttatgacaaacaattcaaggttctcgaggtacctccgatcgtgcaagagctggtgggcgccggcgtgcaggagccaccgagccagtacgtgcttcctgagcaagaccgtcccgccgcggcggtctccgagatgcccgagcccatccccatcatcgacctcagccggctgtctgccggcagcgccgaagagttcgacaagctgcggtccgccttggagaactgggacctcttcctggctgttggacatggaatggagcctagctttcttgccgaggcgatgaagtccacgatagagttcttcaacctcccactggaagagaaacagaagtactcaaacattgtcgacggcgagaagctgggcatggatggatacggtaacgacatggtcgtgaaagagaatcaggtccttgactggaacgaccggctcaatctcctagtggaacccgaggccctaagaacctacagactgtggccaacacaacccccttctttcagagacatcctgtctgagtacacggtcaggtgcaaagcggcggctaaccttgtctttcgaaacatggccaagatactcaatttacaagaggaacacctggtaaacatgatcggngagaactccatcacccaagctatattcaactattaccctcagtgtccaaggccggaccacgtcttgggcctcaaggcccataccgatggctccataatcacagtcaacttcgccgatgctgaggggctccagcttcagagaaacggcgtctggtacaacgtgcccatcgttccaaatgcattgattatgaacgtaggggatataatggagattgtgagcaatgggttcttcaagagcctggtgcatagggttgtgaccaacgcggagaaagagcgcttgtcgttggtgctggtctatacatcggagctagagacagagcttgagccggtgtcagacctggtggatgacaagagacctgcacgatacatgaagatcaagctccacgactacatggaaaaatatcatgacacttatgccacagggacaatatccatagtcggcgtgaagatctgaatatgattctgatgtgtgcaagtccgctatatgaacaactatgcatggtgaagtatcttccgtcgaccagtttgtaacgagtttatatttttcatgtacccttttccccaatttttgtgtgtgtactccttcatgtaaaatgttcggcagcttgtgtggctgcatgaaacattaaaataaaatgtatctgctgtgtgcaacatgcagatgcaaaggatggaataaaacttatcggtcgtgtgc

SEQ ID NO: 62762 - protein, 361 aa, Triticum aestivum
  peptide (1)..(361): Ceres Seq. ID no. 12615467
  misc_feature (211)..(211): Xaa is any aa, unknown or other
NQQQATMASYDKQFKVLEVPPIVQELVGAGVQEPPSQYVLPEQDRPAAAVSEMPEPIPIIDLSRLSAGSAEEFDKLRSALENWDLFLAVGHGMEPSFLAEAMKSTIEFFNLPLEEKQKYSNIVDGEKLGMDGYGNDMVVKENQVLDWNDRLNLLVEPEALRTYRLWPTQPPSFRDILSEYTVRCKAAANLVFRNMAKILNLQEEHLVNMIXENSITQAIFNYYPQCPRPDHVLGLKAHTDGSIITVNFADAEGLQLQRNGVWYNVPIVPNALIMNVGDIMEIVSNGFFKSLVHRVVTNAEKERLSLVLVYTSELETELEPVSDLVDDKRPARYMKIKLHDYMEKYHDTYATGTISIVGVKI

SEQ ID NO: 62763 - protein, 355 aa, Triticum aestivum
  peptide (1)..(355): Ceres Seq. ID no. 12615468
  misc_feature (205)..(205): Xaa is any aa, unknown or other
MASYDKQFKVLEVPPIVQELVGAGVQEPPSQYVLPEQDRPAAAVSEMPEPIPIIDLSRLSAGSAEEFDKLRSALENWDLFLAVGHGMEPSFLAEAMKSTIEFFNLPLEEKQKYSNIVDGEKLGMDGYGNDMVVKENQVLDWNDRLNLLVEPEALRTYRLWPTQPPSFRDILSEYTVRCKAAANLVFRNMAKILNLQEEHLVNMIXENSITQAIFNYYPQCPRPDHVLGLKAHTDGSIITVNFADAEGLQLQRNGVWYNVPIVPNALIMNVGDIMEIVSNGFFKSLVHRVVTNAEKERLSLVLVYTSELETELEPVSDLVDDKRPARYMKIKLHDYMEKYHDTYATGTISIVGVKI

SEQ ID NO: 62764 - protein, 309 aa, Triticum aestivum
  peptide (1)..(309): Ceres Seq. ID no. 12615469
  misc_feature (159)..(159): Xaa is any aa, unknown or other
MPEPIPIIDLSRLSAGSAEEFDKLRSALENWDLFLAVGHGMEPSFLAEAMKSTIEFFNLPLEEKQKYSNIVDGEKLGMDGYGNDMVVKENQVLDWNDRLNLLVEPEALRTYRLWPTQPPSFRDILSEYTVRCKAAANLVFRNMAKILNLQEEHLVNMIXENSITQAIFNYYPQCPRPDHVLGLKAHTDGSIITVNFADAEGLQLQRNGVWYNVPIVPNALIMNVGDIMEIVSNGFFKSLVHRVVTNAEKERLSLVLVYTSELETELEPVSDLVDDKRPARYMKIKLHDYMEKYHDTYATGTISIVGVKI

SEQ ID NO: 62765 - DNA, 1490 bp, Triticum aestivum
  misc_feature (1)..(1490): Ceres Seq. ID no. 13596744
gaacatcctaatcgaaaactccattttcctctccaccccgcaacccacgcagacgcagctcgaccgaccacaactgtgcgcagcagcggcggccggcggagaccgtatcgtaccatggcgatggagggctacgaccgcgagttctggcagttcggcgaccagctccgcctccagacggccaccttctccggcctctccctcggcgactccatctggtcccccgccgacgccgccccccgcgcccgcaacgccgaccccggcctcttctccccctcccaggcggcccacaacaacgccggaaccggattcgccgccgccaagatgaacggcagcctcaacgggcccggcctcatcggctccggcaagctcgccttcggcgccaccaccaccagcaaggccgaccgctacaacaacgtcagcctccccgccgccgccgacgccaagccctacgccaacgccaacggcctgtacggtgccaagcccaacaacaccaataacaacggcttcgggctcaacaagatggctgccggcggcgggggctacagcaacttcaacggcggcaacgagggggtgaagagctacttcaacaagtccatcgggaggccggccagcaacaacaacagcagcagcaacaacttcagcggctacggcggcaagaagggcgccgcggacggcaagaagaagcacgccaagaacgagcgaggggacaacaaccacggcgccgcgtcggagaagcggttcaagacgctgccggcgtccgaggcgctgccccggaacgagcccatcggcggctacatcttcgtctgcaacaacgacaccatggaggagaacctcaagaggcagctcttcgggttgccatccagatacagagattcagtgagggcgatcaggccagggctgcccctcttcctctacaactactccacccaccagctccacggcatcttcgaggctgcgagctttggcggagcgaacatcgacccggcggcctgggaggacaagaagtgcaacggcgagtctcgcttccctgcacaggtgagggtggccacaaggaagatctgcgacccactggaggaggacgccttccgccctatcctgcaccactacgacgggcccaagttccggctggagctcagcatcaccgaggctctctcccttcttgatatatttgaagacaaggacgatgcctgatcgagggctgatcagggattcttgaggaaggaatagcacaataagatcggatcggagaatatatacatacatatgattaatatcattatcaattaatggtgatatatacgtgagttttatgtattgggttttccatctcgcgggctatgaaattatgcgtcccccgttgtggtatcatgcgtggtgatggctgcacaagatgagccctcgtgaacataactaatctattgtcacggctatgtatgtataatattgagactttaaaaaaaaaaaaaaaaaagcttatcgataccgtcgac

SEQ ID NO: 62766 - protein, 396 aa, Triticum aestivum
  peptide (1)..(396): Ceres Seq. ID no. 15221969
EHPNRKLHFPLHPATHADAARPTTTVRSSGGRRRPYRTMAMEGYDREFWQFGDQLRLQTATFSGLSLGDSIWSPADAAPRARNADPGLFSPSQAAHNNAGTGFAAAKMNGSLNGPGLIGSGKLAFGATTTSKADRYNNVSLPAAADAKPYANANGLYGAKPNNTNNNGFGLNKMAAGGGGYSNFNGGNEGVKSYFNKSIGRPASNNNSSSNNFSGYGGKKGAADGKKKHAKNERGDNNHGAASEKRFKTLPASEALPRNEPIGGYIFVCNNDTMEENLKRQLFGLPSRYRDSVRAIRPGLPLFLYNYSTHQLHGIFEAASFGGANIDPAAWEDKKCNGESRFPAQVRVATRKICDPLEEDAFRPILHHYDGPKFRLELSITEALSLLDIFEDKDDA

SEQ ID NO: 62767 - protein, 358 aa, Triticum aestivum
  peptide (1)..(358): Ceres Seq. ID no. 15221970
MAMEGYDREFWQFGDQLRLQTATFSGLSLGDSIWSPADAAPRARNADPGLFSPSQAAHNNAGTGFAAAKMNGSLNGPGLIGSGKLAFGATTTSKADRYNNVSLPAAADAKPYANANGLYGAKPNNTNNNGFGLNKMAAGGGGYSNFNGGNEGVKSYFNKSIGRPASNNNSSSNNFSGYGGKKGAADGKKKHAKNERGDNNHGAASEKRFKTLPASEALPRNEPIGGYIFVCNNDTMEENLKRQLFGLPSRYRDSVRAIRPGLPLFLYNYSTHQLHGIFEAASFGGANIDPAAWEDKKCNGESRFPAQVRVATRKICDPLEEDAFRPILHHYDGPKFRLELSITEALSLLDIFEDKDDA

SEQ ID NO: 62768 - protein, 356 aa, Triticum aestivum
  peptide (1)..(356): Ceres Seq. ID no. 15221971
MEGYDREFWQFGDQLRLQTATFSGLSLGDSIWSPADAAPRARNADPGLFSPSQAAHNNAGTGFAAAKMNGSLNGPGLIGSGKLAFGATTTSKADRYNNVSLPAAADAKPYANANGLYGAKPNNTNNNGFGLNKMAAGGGGYSNFNGGNEGVKSYFNKSIGRPASNNNSSSNNFSGYGGKKGAADGKKKHAKNERGDNNHGAASEKRFKTLPASEALPRNEPIGGYIFVCNNDTMEENLKRQLFGLPSRYRDSVRAIRPGLPLFLYNYSTHQLHGIFEAASFGGANIDPAAWEDKKCNGESRFPAQVRVATRKICDPLEEDAFRPILHHYDGPKFRLELSITEALSLLDIFEDKDDA

SEQ ID NO: 62769 - DNA, 1416 bp, Triticum aestivum
  misc_feature (1)..(1416): Ceres Seq. ID no. 13598391
cgaagtcccaaatcaatccatttcatttcggtttcgaatcccctggggacgagctcgcgtcgccttccctctccgcccgccccgtcgccatccgccccttcgaatctgcagggcggcgccgcctggcctcgttgtcgccacgggaggcgcgcgggatggggcggttgtttgcggtggacgccgcggcggcctcgtcggccgcggccgcggcggcgctgaacggcgcggtggactggtggaaagacgtgaacgactcgccgatgtggcaggaccgcatcttccacgccctcgccgtgctctacggcatcgtctccgtcgtcgcgcttgtccaattgatcagaatcgagtgtagggtgcccgagtacgggtggacgacgcagaaggtgttccatttccttaacttcatcgtgaatggcgtgcgggctatcgtatttgtgctgcggcgaaacgtgcagctgatacaaccagagatacttcaacatgtggttcttgacatgcctgggcttgcgttcttcactacatacgcgcttttggtgctattctgggccgatatttactatcaggcacgtgcgatgtcgactgatgggctgaggccaactttctattggatcaatggggtggtgtatgcaattcagataattctgtggttggttttgtggtggaaaccagttcgaattatggtcatattgtccaagatgttctttgcaggcgtatcactgtttgcagcttttgggttccttctgtatggtgggaggctattcctcatgttgcaacgttttcccgtagaatcaaaaggaagacggaagaaattgcaggaggttggctatgtcactaccatctgctttacttgtttcttgatcagatgtgtcatgatgtgtctcaatgcatttgataaagcagctgatcttgatgttctgagccatccgattctgaatttcttttattacctgctggtcgagatcgtaccttcagctatggttctgtttatactaaggaaactgcccccaaaacgtgggatcacgcagtaccatcctatccattagagcagagcagccctggtaccaggctggtacagacgaatgctccttacagagttcgtaaatacatgagaggcaatgtgaagatcaccgcacttgcactgaagcttgcccaggttttaaatgaggaagcctttaggatttcaggttactattgcttgtaaaagagatttgcaatgtagttcaaaaaaagaagagatttgcaatatcatgctgtttacaggtctagaaaaatgcaagttttatataatgtatgtatacctttgttcttctcagtactttcaccctgtagtctgcaccgcgcgacagcaatcacggctggaatcgcatatttgatttttgactgtttaaacacaataaagttggaactggagggggg

SEQ ID NO: 62770 - protein, 346 aa, Triticum aestivum
  peptide (1)..(346): Ceres Seq. ID no. 13598392
KSQINPFHFGFESPGDELASPSLSARPVAIRPFESAGRRRLASLSPREARGMGRLFAVDAAAASSAAAAAALNGAVDWWKDVNDSPMWQDRIFHALAVLYGIVSVVALVQLIRIECRVPEYGWTTQKVFHFLNFIVNGVRAIVFVLRRNVQLIQPEILQHVVLDMPGLAFFTTYALLVLFWADIYYQARAMSTDGLRPTFYWINGVVYAIQIILWLVLWWKPVRIMVILSKMFFAGVSLFAAFGFLLYGGRLFLMLQRFPVESKGRRKKLQEVGYVTTICFTCFLIRCVMMCLNAFDKAADLDVLSHPILNFFYYLLVEIVPSAMVLFILRKLPPKRGITQYHPIH

SEQ ID NO: 62771 - protein, 295 aa, Triticum aestivum
  peptide (1)..(295): Ceres Seq. ID no. 13598393
MGRLFAVDAAAASSAAAAAALNGAVDWWKDVNDSPMWQDRIFHALAVLYGIVSVVALVQLIRIECRVPEYGWTTQKVFHFLNFIVNGVRAIVFVLRRNVQLIQPEILQHVVLDMPGLAFFTTYALLVLFWADIYYQARAMSTDGLRPTFYWINGVVYAIQIILWLVLWWKPVRIMVILSKMFFAGVSLFAAFGFLLYGGRLFLMLQRFPVESKGRRKKLQEVGYVTTICFTCFLIRCVMMCLNAFDKAADLDVLSHPILNFFYYLLVEIVPSAMVLFILRKLPPKRGITQYHPIH

SEQ ID NO: 62772 - protein, 260 aa, Triticum aestivum
  peptide (1)..(260): Ceres Seq. ID no. 13598394
MWQDRIFHALAVLYGIVSVVALVQLIRIECRVPEYGWTTQKVFHFLNFIVNGVRAIVFVLRRNVQLIQPEILQHVVLDMPGLAFFTTYALLVLFWADIYYQARAMSTDGLRPTFYWINGVVYAIQIILWLVLWWKPVRIMVILSKMFFAGVSLFAAFGFLLYGGRLFLMLQRFPVESKGRRKKLQEVGYVTTICFTCFLIRCVMMCLNAFDKAADLDVLSHPILNFFYYLLVEIVPSAMVLFILRKLPPKRGITQYHPIH

SEQ ID NO: 62773 - DNA, 1430 bp, Triticum aestivum
  misc_feature (1)..(1430): Ceres Seq. ID no. 12624849
ctgtcacagaatcccgcagattcccctgaacccggcgagggcgagcagagcaaccccgccatggccgcggcgatcctccgccgcctcagcccggtggcctcccagcgcgtgccccctcgcctcctgccgccgacgctcgcccgcggggtctccgactccacggagccgctcaccgtggagacctcgatccccttcacgtcccacgtcgtggacccgccgtcgcgcgaggtgaccaccacgccgcgggagctcgccgcggccttccgcgacatggcgctcatgcggcgcgcggagatcgccgccgactcgctctacaaggccaagctcatccggggcttctgccacctctacgacggccaggaggcggtcgccgtgggcatggaggccgccatcacccgccgcgacgccatcatcaccgcctaccgcgaccactgcctctacctcgcgcgcggcgggggcctcgtcgccgccttcgccgagctcatgggccgcgtcgacggctgctccaggggcaagggcggctccatgcacttctacaagaaggacgccaacttctacggcgggcacggcatcgtcggcgcgcaggtgcccctcggctgcggcctcgccttcgcgcagaggtaccggaaggagggcaccgtcaccttcgacctctacggcgacggcgccgccaaccagggccagctcttcgaggcgctcaacatggccgcgctctggaagctgcccgtcatactcgtctgcgagaacaaccactatgggatggggacggccgagtggaaggcctccaagagcnccgcgtactacaagcgcggggactatgtgcccggattgaaggttgatggtatggattttcttgcagtgaagcaggcttgtaaatttgccaaagaacatgttctggaaattggaccgattattcttgagatggacacatatagataccatggacactctatgtcagatccaggcagcacttaccgcactagagatgagattgcaggaataagacaggagcgtgatccgattgagcgggtcagaaagctattattgacccatgacttggcaacagcccaggagctcaaggacatggagaaggaaatcaggaaggaagttgacactgcaattgccaaagcaaaggaaagcccaatgccggatacatccgaactgttcaagaatgtatatgtcaatgactgcggtctggagtcttttggggtggacaggaaggtggtgagaaccgtccttccataggctgccaaacgagaagcttggctctgtcagactgttcgcctggtgtatggtacgtgctggggagacataatagagtccaaggaattcgtagttagctgtattgtggacgtttctgtccctaaataagtctgtatatagagacgcgtgaccattcggactctgtaccgcattgcgctagtcattcc

SEQ ID NO: 62774 - protein, 414 aa, Triticum aestivum
  peptide (1)..(414): Ceres Seq. ID no. 12624850
  misc_feature (265)..(265): Xaa is any aa, unknown or other
LSQNPADSPEPGEGEQSNPAMAAAILRRLSPVASQRVPPRLLPPTLARGVSDSTEPLTVETSIPFTSHVVDPPSREVTTTPRELAAAFRDMALMRRAEIAADSLYKAKLIRGFCHLYDGQEAVAVGMEAAITRRDAIITAYRDHCLYLARGGGLVAAFAELMGRVDGCSRGKGGSMHFYKKDANFYGGHGIVGAQVPLGCGLAFAQRYRKEGTVTFDLYGDGAANQGQLFEALNMAALWKLPVILVCENNHYGMGTAEWKASKSXAYYKRGDYVPGLKVDGMDFLAVKQACKFAKEHVLEIGPIILEMDTYRYHGHSMSDPGSTYRTRDEIAGIRQERDPIERVRKLLLTHDLATAQELKDMEKEIRKEVDTAIAKAKESPMPDTSELFKNVYVNDCGLESFGVDRKVVRTVLP

SEQ ID NO: 62775 - protein, 394 aa, Triticum aestivum
  peptide (1)..(394): Ceres Seq. ID no. 12624851
  misc_feature (245)..(245): Xaa is any aa, unknown or other
MAAAILRRLSPVASQRVPPRLLPPTLARGVSDSTEPLTVETSIPFTSHVVDPPSREVTTTPRELAAAFRDMALMRRAEIAADSLYKAKLIRGFCHLYDGQEAVAVGMEAAITRRDAIITAYRDHCLYLARGGGLVAAFAELMGRVDGCSRGKGGSMHFYKKDANFYGGHGIVGAQVPLGCGLAFAQRYRKEGTVTFDLYGDGAANQGQLFEALNMAALWKLPVILVCENNHYGMGTAEWKASKSXAYYKRGDYVPGLKVDGMDFLAVKQACKFAKEHVLEIGPIILEMDTYRYHGHSMSDPGSTYRTRDEIAGIRQERDPIERVRKLLLTHDLATAQELKDMEKEIRKEVDTAIAKAKESPMPDTSELFKNVYVNDCGLESFGVDRKVVRTVLP

SEQ ID NO: 62776 - protein, 324 aa, Triticum aestivum
  peptide (1)..(324): Ceres Seq. ID no. 12624852
  misc_feature (175)..(175): Xaa is any aa, unknown or other
MALMRRAEIAADSLYKAKLIRGFCHLYDGQEAVAVGMEAAITRRDAIITAYRDHCLYLARGGGLVAAFAELMGRVDGCSRGKGGSMHFYKKDANFYGGHGIVGAQVPLGCGLAFAQRYRKEGTVTFDLYGDGAANQGQLFEALNMAALWKLPVILVCENNHYGMGTAEWKASKSXAYYKRGDYVPGLKVDGMDFLAVKQACKFAKEHVLEIGPIILEMDTYRYHGHSMSDPGSTYRTRDEIAGIRQERDPIERVRKLLLTHDLATAQELKDMEKEIRKEVDTAIAKAKESPMPDTSELFKNVYVNDCGLESFGVDRKVVRTVLP

SEQ ID NO: 62777 - DNA, 1251 bp, Triticum aestivum
  misc_feature (1)..(1251): Ceres Seq. ID no. 13596550
aaaaaacaaaataaaagaaatcgtcccctcctcgtcgtcgctgccgtcgctgagtgcgaactccgtcgtgtcctcccctctccctctctctatcccctctctctctctctctctctctctctgctaatctgagttcctcgttgagaagaggaaccgaggggcgcggcagcgactccgcccgtgatggtcgcccgccgcgctctgtggcggacgcggacatgcacagctcctccccctcctccgccgccgtcgcgtattcttcctcgtctccatcacacctctccccagtagacggcttcctctgcgtgaaggagggggtcgacgagatgatcaagcacgtcgccaatgagccctccctcgggctctacttcgtccagcagcacgctcaggcatccatgcccatcctccttgacgtcaagggcaaggttacagaaaagactcgtgagataacattacacactgaagatatagaggattctatttgtgctgtgaggtccatggctgagtttggacttccaattgctgatgatatgataaaggacataaataaatctctaaagataatgtcgaagacccaaccaaagaaagggttaacccagaaccccatttgggggttccaatcagacaaaagctcggaagcatggaacgatttggacgcaactaatggtggaagtagcaagaactatttgtcttccatgttgaacaccgcaaagcaaaaggcatcgagtctcagatggccacagactgatttcgctatgaacgatggcgttagtgagaagtcagtgtcatctacagctcaggagtcgtcacaagccggaggacatggtgcgtcaacaccctcggatgcagaaagggatgaagtctccatttcaagccgattgttggaaaataaaaatgcaggtactatgaaccagggcctgtctgcttctgatatctcccacacggcggagagctacaacaagttcaaagaagaacaggaactgaaactgcaagagtggctcagggagtcgaaagaagctgacgataatagaggttgagactgttgtaccagctccggtgttttccaccgctgtcggagcacgtcagaaatgaaaaacatgtccaaaccttggaatatgtttatgaccacagatctttttgtattgatgatcagtgtacatgtgcggcgtctctgtaaacattcgtgttcactttgcagctgttacattgatattcacaaggcagagagatctctctcgagtgtattgttgc

SEQ ID NO: 62778 - protein, 272 aa, Triticum aestivum
  peptide (1)..(272): Ceres Seq. ID no. 15221923
MHSSSPSSAAVAYSSSSPSHLSPVDGFLCVKEGVDEMIKHVANEPSLGLYFVQQHAQASMPILLDVKGKVTEKTREITLHTEDIEDSICAVRSMAEFGLPIADDMIKDINKSLKIMSKTQPKKGLTQNPIWGFQSDKSSEAWNDLDATNGGSSKNYLSSMLNTAKQKASSLRWPQTDFAMNDGVSEKSVSSTAQESSQAGGHGASTPSDAERDEVSISSRLLENKNAGTMNQGLSASDISHTAESYNKFKEEQELKLQEWLRESKEADDNRG

SEQ ID NO: 62779 - protein, 236 aa, Triticum aestivum
  peptide (1)..(236): Ceres Seq. ID no. 15221924
MIKHVANEPSLGLYFVQQHAQASMPILLDVKGKVTEKTREITLHTEDIEDSICAVRSMAEFGLPIADDMIKDINKSLKIMSKTQPKKGLTQNPIWGFQSDKSSEAWNDLDATNGGSSKNYLSSMLNTAKQKASSLRWPQTDFAMNDGVSEKSVSSTAQESSQAGGHGASTPSDAERDEVSISSRLLENKNAGTMNQGLSASDISHTAESYNKFKEEQELKLQEWLRESKEADDNRG

SEQ ID NO: 62780 - protein, 213 aa, Triticum aestivum
  peptide (1)..(213): Ceres Seq. ID no. 15221925
MPILLDVKGKVTEKTREITLHTEDIEDSICAVRSMAEFGLPIADDMIKDINKSLKIMSKTQPKKGLTQNPIWGFQSDKSSEAWNDLDATNGGSSKNYLSSMLNTAKQKASSLRWPQTDFAMNDGVSEKSVSSTAQESSQAGGHGASTPSDAERDEVSISSRLLENKNAGTMNQGLSASDISHTAESYNKFKEEQELKLQEWLRESKEADDNRG

SEQ ID NO: 62781 - DNA, 1088 bp, Triticum aestivum
  misc_feature (1)..(1088): Ceres Seq. ID no. 14302415
agagcagagccgagcataccccatctattaccgtcttctcggaccgtgcttccctgccgccctcgctgctgctgcgagctccggtcggcaatcttttcccggttcaagatgaccatcatcatcgagcagcctcagttcgatgcggcggcggagaggaaggtcgccggcgacccggcggagctcgtgctcgacggcggcttcaccgtaccggactccaacgccttcggccacaccttcagggactacgacgcggagtcggagcggaagaagactgtggaggagttctaccgcgtgaaccacatcaaccagacgtacgagtttgtgcagcggatgcgggacgcatacgggcggctggacaagacggagatgagcatctgggagtgcatcgagcttctcaacgagttcatcgacgacagcgaccctgacctggacatgccgcagatcgagcacctcctccagaccgccgaggccatccgcaaggactaccccgatgaggactggctccacctcactggcctcatccatgatctgggcaaggtgctgctgcatcccagcttcggggagcttcctcagtgggcagtcgtaggtgacaccttccccgtcggctgcgcgttcgacgaatgcaacgtccacttcaagtacttcaaggagaaccctgactaccacaacccggagttcaacaccaagttcggggtctactccgaggggtgcgggctggacaacgtgctcatgtcatggggccatgacgactacatgtgcctggttgccaaggagaacaagaccacccttccttccgcagggctgttcatcatcagataccactccttctaccccctgcacaagcatggagcctacatgcacctgatgaacgaggaggacaaggagaacctcaaatggctgcacgtcttcaacaagtatgacctgtacagcaagagcagcgtcaggatcgacgtcgaggaagtgaagccctactacatgtcgctcatcgacaagtacttcccggggaagctgcgatggtgaggaggccgcacccagacagggaacggagcccagacaacatattatatagtttatttaccttcgaaagc

SEQ ID NO: 62782 - protein, 339 aa, Triticum aestivum
  peptide (1)..(339): Ceres Seq. ID no. 14302416
RAEPSIPHLLPSSRTVLPCRPRCCCELRSAIFSRFKMTIIIEQPQFDAAAERKVAGDPAELVLDGGFTVPDSNAFGHTFRDYDAESERKKTVEEFYRVNHINQTYEFVQRMRDAYGRLDKTEMSIWECIELLNEFIDDSDPDLDMPQIEHLLQTAEAIRKDYPDEDWLHLTGLIHDLGKVLLHPSFGELPQWAVVGDTFPVGCAFDECNVHFKYFKENPDYHNPEFNTKFGVYSEGCGLDNVLMSWGHDDYMCLVAKENKTTLPSAGLFIIRYHSFYPLHKHGAYMHLMNEEDKENLKWLHVFNKYDLYSKSSVRIDVEEVKPYYMSLIDKYFPGKLRW

SEQ ID NO: 62783 - protein, 303 aa, Triticum aestivum
  peptide (1)..(303): Ceres Seq. ID no. 14302417
MTIIIEQPQFDAAAERKVAGDPAELVLDGGFTVPDSNAFGHTFRDYDAESERKKTVEEFYRVNHINQTYEFVQRMRDAYGRLDKTEMSIWECIELLNEFIDDSDPDLDMPQIEHLLQTAEAIRKDYPDEDWLHLTGLIHDLGKVLLHPSFGELPQWAVVGDTFPVGCAFDECNVHFKYFKENPDYHNPEFNTKFGVYSEGCGLDNVLMSWGHDDYMCLVAKENKTTLPSAGLFIIRYHSFYPLHKHGAYMHLMNEEDKENLKWLHVFNKYDLYSKSSVRIDVEEVKPYYMSLIDKYFPGKLRW

SEQ ID NO: 62784 - protein, 229 aa, Triticum aestivum
  peptide (1)..(229): Ceres Seq. ID no. 14302418
MRDAYGRLDKTEMSIWECIELLNEFIDDSDPDLDMPQIEHLLQTAEAIRKDYPDEDWLHLTGLIHDLGKVLLHPSFGELPQWAVVGDTFPVGCAFDECNVHFKYFKENPDYHNPEFNTKFGVYSEGCGLDNVLMSWGHDDYMCLVAKENKTTLPSAGLFIIRYHSFYPLHKHGAYMHLMNEEDKENLKWLHVFNKYDLYSKSSVRIDVEEVKPYYMSLIDKYFPGKLRW

SEQ ID NO: 62785 - DNA, 1570 bp, Triticum aestivum
  misc_feature (1)..(1570): Ceres Seq. ID no. 13596872
aaaaccctagagaaaccccgagccaagcacgacaccagatggcctccgccggcggcaagcccaacgccaacaccggcggcgacaccaaggggaggaagcgcaagttcctgccccacggcaagccggtgcggaagggcgcgtacccgctgcgccccggcgtgcagggcttcttcatcacctgcgacggcggccgcgagcaccaggccacccgtgaggcgatctccctcctggacaccttttacgaggacctggttgacgggaaagtatttgatgagaagcccaagagcatccctgacaagccgctgaacaaaaaaataaagtttgaggactctgattcctctgatgatgaggatgaaggtcattcagtggaggaggctgacaatggaaatgatgtagaaaaaggtgaagcaaagtcatctgagcagcaacaagaggtacctggtgccttggaagttgtcagcaaggaggatgaagaacaagttgaaactgccgacggatcagcgccaaagaaacaacgtatagaagatcctttggtttctgaacagacagaaccaaaagtgcccactgatgaaccaacagagactactgatgataagccaaaggagtccactgataaaccagcagagactactgatgataagccaaaagagtccactgataagccagcagagactactgatgataagccaaaagagtccactgataaaccaacagagactagtgataaaccaaaagcgtccaacgataaaccaaaagagttcactggtaaaccaaaagcgtccaatgacatacctattgatgatttaattgatgaggacctgaaacaactgggggacaggaaaaagaggctgtttgcaagcgtcgattccggttgcaatggttgcatcttcattcaaatgcacaaaagaggtggagaccctggtccagttgagattgtacaaaacatgatgtcttcggctgcttcaactcgtaaacatatgtccaggtttattctgagggtgttgcctgctgaggtggtatgttatgcttcagaagaggaaataacaagagccgttactccacttgttgaaaagtacttccccaaagaatctccttcgggacataagtttgctgtgttatacgaagcaaggtcaaacacaggaatcgatagaatgaaaattataaatgcagtagcaaaatctatacctcaacctcacaaagttgacctcagcaaccccgacaagactattattgtccagattgccaagactatatgcatgattggagtggtggagagatacaaagagctttcgaagttcaacctaaggcagctgacctcgccaccggagaagtagtttctgcgtgacaaattcttcctcctggttgagttttaagcagatgcagcatcagttggttactacgagtagctaccgtgaaagtcattgccaaatgattcaggtgtattatgccgttaaaacagatggccattgtcgtgtggatgcatcctgaatcgcttgcttaatgccgtatggtgcaattttggaacctgttgaatttcctacagcgatcgttggaataaagggttaattag

SEQ ID NO: 62786 - protein, 443 aa, Triticum aestivum
  peptide (1)..(443): Ceres Seq. ID no. 13596873
NPRETPSQARHQMASAGGKPNANTGGDTKGRKRKFLPHGKPVRKGAYPLRPGVQGFFITCDGGREHQATREAISLLDTFYEDLVDGKVFDEKPKSIPDKPLNKKIKFEDSDSSDDEDEGHSVEEADNGNDVEKGEAKSSEQQQEVPGALEVVSKEDEEQVETADGSAPKKQRIEDPLVSEQTEPKVPTDEPTETTDDKPKESTDKPAETTDDKPKESTDKPAETTDDKPKESTDKPTETSDKPKASNDKPKEFTGKPKASNDIPIDDLIDEDLKQLGDRKKRLFASVDSGCNGCIFIQMHKRGGDPGPVEIVQNMMSSAASTRKHMSRFILRVLPAEVVCYASEEEITRAVTPLVEKYFPKESPSGHKFAVLYEARSNTGIDRMKIINAVAKSIPQPHKVDLSNPDKTIIVQIAKTICMIGVVERYKELSKFNLRQLTSPPEK

SEQ ID NO: 62787 - protein, 431 aa, Triticum aestivum
  peptide (1)..(431): Ceres Seq. ID no. 13596874
MASAGGKPNANTGGDTKGRKRKFLPHGKPVRKGAYPLRPGVQGFFITCDGGREHQATREAISLLDTFYEDLVDGKVFDEKPKSIPDKPLNKKIKFEDSDSSDDEDEGHSVEEADNGNDVEKGEAKSSEQQQEVPGALEVVSKEDEEQVETADGSAPKKQRIEDPLVSEQTEPKVPTDEPTETTDDKPKESTDKPAETTDDKPKESTDKPAETTDDKPKESTDKPTETSDKPKASNDKPKEFTGKPKASNDIPIDDLIDEDLKQLGDRKKRLFASVDSGCNGCIFIQMHKRGGDPGPVEIVQNMMSSAASTRKHMSRFILRVLPAEVVCYASEEEITRAVTPLVEKYFPKESPSGHKFAVLYEARSNTGIDRMKIINAVAKSIPQPHKVDLSNPDKTIIVQIAKTICMIGVVERYKELSKFNLRQLTSPPEK

SEQ ID NO: 62788 - DNA, 1478 bp, Triticum aestivum
  misc_feature (1)..(1478): Ceres Seq. ID no. 14314092
ctcacccacactcacgctcgcacccacaccaccggccggccgcccgcgtctgtcaaccgaaagcagcacagcgcccccacggtcggtctacatctactacccaccgcctggttctcctccgaaaccacgcccgtctactagttgtgtgccgatcgaactagcgcgtacgtgaaaaatgcaccgccagatggccgcgccggtggctgccgctgtggcgtgggcgccgctgctgctggtgctgctctgggcggcggggtgcgcgggccaggcgctggtgccgggcgtgatgatcttcggggactcggtggtggacgccggcaacaacaaccggctggccacgctggtgcgcgccgacttcccgccctacggccgcgacttcccggccacccacgcgcccaccggccgcttctgcaacggcaagctcgccaccgactacaccgtggagagcctggggctcagctcgtacccgccggcgtacctgagcgaggaggcgcagagcgacaacaggaccctcctccacggcgccaacttcgcctccggcgccgccggctacctcgacgccaccgccgcgctctacggcgccatctcgctggggcggcagctggactacttcaaggagtaccagtccaaggtggcggcggtggccggcgagaagcgcgcggcggcgctcacgtccgggtccatctacgtggtgagcgccgggacgagcgactacgtgcagaactactacgtgaacgccatgctggccgccgcctacacccccgaccagttcgccgacgcgctcatgcagccattcacggccttcgtcgagaggctgtacgggctgggagcgcggcggatcggggtgacgtcgctgccgcccatggggtgcctgccggcgtccgtcaccctcttcggcggcggcggcgggggcggctgcgtggagcggctcaacaacgactccctcaccttcaacgccaagctgcaggcggcgtcggacgcggccaagaagcgccactcggacctcaagctcgtcgtcttcgacatctacaacccgctcctcaacctcgtcgccgaccccatgagcgccgggttcttcgagtctcggcgcgcgtgctgtgggacggggaccatcgagacgtcggtgctgtgccaccagggggcgccggggacgtgcgccaacgccaccggctacgtcttctgggacggcttccaccccaccgacgccgccaacaaggtgctcgccgacgcgctgctcctccagggactccagctcatctcctagctagctgctcagtccttcctcgccgctccaatggcgctctgacaccgcaccgaccgtcttgtgcatgtctgtccgtttacctcctggcttttcttgcttgtcatctctactaccggatcatctctcctgctgttttgtttgctttcaactactactgtgtttccgtgcttttgtgtgatgtgaatgtgatccgtaatgtgatatagcggcactc

SEQ ID NO: 62789 - protein, 362 aa, Triticum aestivum
  peptide (1)..(362): Ceres Seq. ID no. 14314093
MHRQMAAPVAAAVAWAPLLLVLLWAAGCAGQALVPGVMIFGDSVVDAGNNNRLATLVRADFPPYGRDFPATHAPTGRFCNGKLATDYTVESLGLSSYPPAYLSEEAQSDNRTLLHGANFASGAAGYLDATAALYGAISLGRQLDYFKEYQSKVAAVAGEKRAAALTSGSIYVVSAGTSDYVQNYYVNAMLAAAYTPDQFADALMQPFTAFVERLYGLGARRIGVTSLPPMGCLPASVTLFGGGGGGGCVERLNNDSLTFNAKLQAASDAAKKRHSDLKLVVFDIYNPLLNLVADPMSAGFFESRRACCGTGTIETSVLCHQGAPGTCANATGYVFWDGFHPTDAANKVLADALLLQGLQLIS

SEQ ID NO: 62790 - protein, 358 aa, Triticum aestivum
  peptide (1)..(358): Ceres Seq. ID no. 14314094
MAAPVAAAVAWAPLLLVLLWAAGCAGQALVPGVMIFGDSVVDAGNNNRLATLVRADFPPYGRDFPATHAPTGRFCNGKLATDYTVESLGLSSYPPAYLSEEAQSDNRTLLHGANFASGAAGYLDATAALYGAISLGRQLDYFKEYQSKVAAVAGEKRAAALTSGSIYVVSAGTSDYVQNYYVNAMLAAAYTPDQFADALMQPFTAFVERLYGLGARRIGVTSLPPMGCLPASVTLFGGGGGGGCVERLNNDSLTFNAKLQAASDAAKKRHSDLKLVVFDIYNPLLNLVADPMSAGFFESRRACCGTGTIETSVLCHQGAPGTCANATGYVFWDGFHPTDAANKVLADALLLQGLQLIS

SEQ ID NO: 62791 - protein, 325 aa, Triticum aestivum
  peptide (1)..(325): Ceres Seq. ID no. 14314095
MIFGDSVVDAGNNNRLATLVRADFPPYGRDFPATHAPTGRFCNGKLATDYTVESLGLSSYPPAYLSEEAQSDNRTLLHGANFASGAAGYLDATAALYGAISLGRQLDYFKEYQSKVAAVAGEKRAAALTSGSIYVVSAGTSDYVQNYYVNAMLAAAYTPDQFADALMQPFTAFVERLYGLGARRIGVTSLPPMGCLPASVTLFGGGGGGGCVERLNNDSLTFNAKLQAASDAAKKRHSDLKLVVFDIYNPLLNLVADPMSAGFFESRRACCGTGTIETSVLCHQGAPGTCANATGYVFWDGFHPTDAANKVLADALLLQGLQLIS

SEQ ID NO: 62792 - DNA, 1534 bp, Triticum aestivum
  misc_feature (1)..(1534): Ceres Seq. ID no. 12778345
ataccgctcccatctcacacaacccccttaaaccccagaagcctccatccgcggcgcccccaacgaaaaccctagcccgccatggccctcgcgctccgcctccgtcgggccctcgccgccgcctccacctccgcatccctcctccgtccgactgcctccgccgcggcatccccccatcgggctcccctcctcgcccctttcgtcgcgccgctgccgcgcccgttcctccccgggggcgccgccggcttccggtcgacggcggcggcagcggcacggggaaactacggcggtggggcggacgacgccaaaatcgaccccgacgagatcctcttcgaggggtgcgactacaaccactggctcatcaccatggagttccccgaccccaagccctcccgcgaggagatgatcgagacctacctgcagaccctcgccaaggtcgtcggaagttatgaggaggctaagaagaggatgtatgctcttagtacaacaacatatgttgggtttcaagctgtaatgactgaggaaatgtcagaaaagtttcgcggattgcctggagttgtttttatcttgcctgattcatatttatacccagagacaaaggagtatggaggagacaaatacgagaatggtgtcataactccaagaccaccacctgttcagtatagcaaaccgtcaaggaatgatagaaaccgcaactgtcgtggaaattacgaaaacagtcctccaccgcaaggtaattaccagaacaggtcgccaccacaaggaaacttccaagggtcccgcccacagcaagacgtaagaggctacgctccacagcagaattacgcacaagctgggcaagatggtagaggttatgggaggaatgattctgccgaccatccaggttacaatgcgcctggtgggtaccaagggcgtgtaaatgaagccggtcaaggtttccaagatccacaagagcgcaggagtttctcgcaaggacaggaaggagatctcaggcctggtggcccttcagcacctggaaattatggtcaaccgcctgcacctggaaattatggtcaaccacctgcacctggaaattacggtcaaccgcctgcacctggaaattatggtcaaccacctgctcctggatcctatgggaagccatctggacctccagcttatggacaaccgtctgggtcgagatatcctggaggtaaccaagggggtcctggttatggtggagacaacagacagggtgcagcgcctgcatatggaggggataacttgcaaggggtttctggtcagtatcctagcccaggtgaaggacaacaagggaactggcagggtaggcagtaaggacctgatgagaagtagcttcacttaagaacaaggcattagttcctctacttgaaatgtagaaatttccacctgtaaaataaacagctgaactactttattttgtcttgttgcctgcattcacatcagacttattattgatgtgcgttactatctcttgtagccatatatttgacgtttggaaaggcttgtggagtctggc

SEQ ID NO: 62793 - protein, 416 aa, Triticum aestivum
  peptide (1)..(416): Ceres Seq. ID no. 12778346
MALALRLRRALAAASTSASLLRPTASAAASPHRAPLLAPFVAPLPRPFLPGGAAGFRSTAAAAARGNYGGGADDAKIDPDEILFEGCDYNHWLITMEFPDPKPSREEMIETYLQTLAKVVGSYEEAKKRMYALSTTTYVGFQAVMTEEMSEKFRGLPGVVFILPDSYLYPETKEYGGDKYENGVITPRPPPVQYSKPSRNDRNRNCRGNYENSPPPQGNYQNRSPPQGNFQGSRPQQDVRGYAPQQNYAQAGQDGRGYGRNDSADHPGYNAPGGYQGRVNEAGQGFQDPQERRSFSQGQEGDLRPGGPSAPGNYGQPPAPGNYGQPPAPGNYGQPPAPGNYGQPPAPGSYGKPSGPPAYGQPSGSRYPGGNQGGPGYGGDNRQGAAPAYGGDNLQGVSGQYPSPGEGQQGNWQGRQ

SEQ ID NO: 62794 - protein, 321 aa, Triticum aestivum
  peptide (1)..(321): Ceres Seq. ID no. 12778347
MEFPDPKPSREEMIETYLQTLAKVVGSYEEAKKRMYALSTTTYVGFQAVMTEEMSEKFRGLPGVVFILPDSYLYPETKEYGGDKYENGVITPRPPPVQYSKPSRNDRNRNCRGNYENSPPPQGNYQNRSPPQGNFQGSRPQQDVRGYAPQQNYAQAGQDGRGYGRNDSADHPGYNAPGGYQGRVNEAGQGFQDPQERRSFSQGQEGDLRPGGPSAPGNYGQPPAPGNYGQPPAPGNYGQPPAPGNYGQPPAPGSYGKPSGPPAYGQPSGSRYPGGNQGGPGYGGDNRQGAAPAYGGDNLQGVSGQYPSPGEGQQGNWQGRQ

SEQ ID NO: 62795 - protein, 309 aa, Triticum aestivum
  peptide (1)..(309): Ceres Seq. ID no. 12778348
MIETYLQTLAKVVGSYEEAKKRMYALSTTTYVGFQAVMTEEMSEKFRGLPGVVFILPDSYLYPETKEYGGDKYENGVITPRPPPVQYSKPSRNDRNRNCRGNYENSPPPQGNYQNRSPPQGNFQGSRPQQDVRGYAPQQNYAQAGQDGRGYGRNDSADHPGYNAPGGYQGRVNEAGQGFQDPQERRSFSQGQEGDLRPGGPSAPGNYGQPPAPGNYGQPPAPGNYGQPPAPGNYGQPPAPGSYGKPSGPPAYGQPSGSRYPGGNQGGPGYGGDNRQGAAPAYGGDNLQGVSGQYPSPGEGQQGNWQGRQ

SEQ ID NO: 62796 - DNA, 1236 bp, Triticum aestivum
  misc_feature (1)..(1236): Ceres Seq. ID no. 13654922
acctaccccagtggccagccctatagacgacttcctgtctccttccggcggccacctccgtccatcgctctccgccgccgccgccacccggactctaaatcccttgctcctctccaccggaaaccttgaccggccgaggaggcagcacattcacaccggcggcgtgatctggtctggtctgctagattgatcgttcattcactccattgatgacgctctctgcttccccgcactccccgccgccgtctacctcccggcccccgctcctctcctggcccagctagccagccggcgcgagcgagcgagctccccgtccaccgtccagctattagccaagctccttcgaggccggcaatggcggcgcccaggcccaagtccccgctcgacccctgcggccgccaccggctgcagctcgccgtcgacgcgctccaccgccagatcagcttcctcgagggggagatcagttccattgaagggctccatgctgcctccatatgctgcaaagaggtcgatgagttcataggaaagaatgccgatccattcatcacgatttcatctgagaagggaaatgctgatcaatctcatcgcttcccaaagaagattcgaacccggtgggcgtgtttgagctgcttcccgtggatctgcggcggcgggtgctccgccgtccagctcaaggggccgagctgctgctgcggatgcccccgttgctgcgtggggagcgggggctgcggcggcggaccctcgtgtggctgctcatgctcctgcgccggttgctcctcctcttgcgcgtgccctgcctgcgccggctgcggcgccgcgtgctgcggcggtgcccctcgccctcgctgctgcctgtgttcatgaggcgccctattgagatttttcctcttctttgttcttgctgtgtgcgttgcctgtaggctcaggctcggctggtgtttttgacgggcatgatgatgatgatgtatttctggctcagttggcgctgtggatttgcctggttttacttgccacagcgatggatcccttgtgctttcgtccttgctatagtctcctatgttgtaattaaaggtttggagataactgcagaatgaacggttcttctcnnaaaaaaaaaaaaaaaaaaaaaaaaaaaaaaaaaaaaaaaaaaaaaaaaaaaaaaaaaaaaaaaaaaaaaaaacccaaaaaaaaaaaaaaaaagttttttgaatcgggggaacttggggggggggcggg

SEQ ID NO: 62797 - protein, 169 aa, Triticum aestivum
  peptide (1)..(169): Ceres Seq. ID no. 13654923
MAAPRPKSPLDPCGRHRLQLAVDALHRQISFLEGEISSIEGLHAASICCKEVDEFIGKNADPFITISSEKGNADQSHRFPKKIRTRWACLSCFPWICGGGCSAVQLKGPSCCCGCPRCCVGSGGCGGGPSCGCSCSCAGCSSSCACPACAGCGAACCGGAPRPRCCLCS

SEQ ID NO: 62798 - DNA, 1534 bp, Triticum aestivum
  misc_feature (1)..(1534): Ceres Seq. ID no. 13654809
gtcctcccctccctcgcgagtccgaagtcaaggcgaaaaccctcgaggcgaagcgagagtcagataggataccgcgagagacgagagtcgagtgagagggtggaagggaagccgagatgaagctcaacgtgaagaccctcaagggcacaagcttcgagatcgaggcgacccccgaggcctcggtgggtgaggtcaagagaatcatcgagagtgctcaggggcagaatgtgtaccctgcggatcagctgatgatcatatatcaaggaaaaattcttaaggatgataccactctggaagttaataaggttgcagagaacagcttccttgttataatgctgtctaagccgaaggcgtcgtctagtggtgcttctactgcttcaaagacacctgttagtcagtctcaacctgccactccacctgcccctgttacctcagctgcaagatcaccaccttcacaggcacctgttgctgcatctgaaccggcgcctcccagtgcacagccttcagctgtctctgatactccatctcctgcagtaactgcatcaggcgatgctgatgtatacagtcaggctgcatcaaaccttgtctctggcggcagtctagaacagacagtccaacaaattcttgacatgggcggtggaacctgggaacgtgatatggttgtccgtgcattacgtgctgcatataacaaccctgagagggctattgactatctgtattctggaatacctgaatctgtagaggccycacctgtggctcgagcacctgctcctgctcaacaggcaccaaacctgcaggctcctcaggctcaggctgcacctctaccaccagtgcagccatctggtggcgtctctgcagggcctaatgcaaatcctctaaaccttttcccgcagggtattccaagtggcggggcaaatgctggtgccggtgtgggtgccggtgctggtgcccttgatgcattgcgacagcttccacagttccaagcactgcttgcattggtccaggctaatccccaaatcctgcagccaatgcttcaagagctggggaaacaaaatccgcagatcctgcggttgattcaggaaaatcaggctgagtttctccgcctggtaaatgaaacacctgagagtggtgctggcggaaatatactaggcgcactcgcagctcaaatgccacaggcagttcaagttactccagaagaacgggaggccatccagcggctcgaggcgatggggttcaaccgtgagcttgtgttggaggtcttctttgcatgcaacagggatgaagaactggctgccaactatcttttggatcatggccacgagtttgaggaacaacaatagatgttagattggtgttaccgtcgaaagacagaagagtcagtgacataagcagtacagtttggtgtcgttcttatatcttgctgctgaatatcactactagtacttgtcattagtgcgatgctgctgactttaaatttcttgtatcctggaaattctttctaagtacatatcaatatcaatattcaaacctcatg

SEQ ID NO: 62799 - protein, 407 aa, Triticum aestivum
  peptide (1)..(407): Ceres Seq. ID no. 15219694
  misc_feature (211)..(211): Xaa is any aa, unknown or other
MKLNVKTLKGTSFEIEATPEASVGEVKRIIESAQGQNVYPADQLMIIYQGKILKDDTTLEVNKVAENSFLVIMLSKPKASSSGASTASKTPVSQSQPATPPAPVTSAARSPPSQAPVAASEPAPPSAQPSAVSDTPSPAVTASGDADVYSQAASNLVSGGSLEQTVQQILDMGGGTWERDMVVRALRAAYNNPERAIDYLYSGIPESVEAXPVARAPAPAQQAPNLQAPQAQAAPLPPVQPSGGVSAGPNANPLNLFPQGIPSGGANAGAGVGAGAGALDALRQLPQFQALLALVQANPQILQPMLQELGKQNPQILRLIQENQAEFLRLVNETPESGAGGNILGALAAQMPQAVQVTPEEREAIQRLEAMGFNRELVLEVFFACNRDEELAANYLLDHGHEFEEQQ

SEQ ID NO: 62800 - protein, 363 aa, Triticum aestivum
  peptide (1)..(363): Ceres Seq. ID no. 15219695
  misc_feature (167)..(167): Xaa is any aa, unknown or other
MIIYQGKILKDDTTLEVNKVAENSFLVIMLSKPKASSSGASTASKTPVSQSQPATPPAPVTSAARSPPSQAPVAASEPAPPSAQPSAVSDTPSPAVTASGDADVYSQAASNLVSGGSLEQTVQQILDMGGGTWERDMVVRALRAAYNNPERAIDYLYSGIPESVEAXPVARAPAPAQQAPNLQAPQAQAAPLPPVQPSGGVSAGPNANPLNLFPQGIPSGGANAGAGVGAGAGALDALRQLPQFQALLALVQANPQILQPMLQELGKQNPQILRLIQENQAEFLRLVNETPESGAGGNILGALAAQMPQAVQVTPEEREAIQRLEAMGFNRELVLEVFFACNRDEELAANYLLDHGHEFEEQQ

SEQ ID NO: 62801 - protein, 335 aa, Triticum aestivum
  peptide (1)..(335): Ceres Seq. ID no. 15219696
  misc_feature (139)..(139): Xaa is any aa, unknown or other
MLSKPKASSSGASTASKTPVSQSQPATPPAPVTSAARSPPSQAPVAASEPAPPSAQPSAVSDTPSPAVTASGDADVYSQAASNLVSGGSLEQTVQQILDMGGGTWERDMVVRALRAAYNNPERAIDYLYSGIPESVEAXPVARAPAPAQQAPNLQAPQAQAAPLPPVQPSGGVSAGPNANPLNLFPQGIPSGGANAGAGVGAGAGALDALRQLPQFQALLALVQANPQILQPMLQELGKQNPQILRLIQENQAEFLRLVNETPESGAGGNILGALAAQMPQAVQVTPEEREAIQRLEAMGFNRELVLEVFFACNRDEELAANYLLDHGHEFEEQQ

SEQ ID NO: 62802 - DNA, 1382 bp, Triticum aestivum
  misc_feature (1)..(1382): Ceres Seq. ID no. 12615622
aaaaaaccaagtctcgcacgccatcttggcaagcactctctcctcccccaccgcgccgccgagctccgcctccggcagacgcaagcaggccacctcggacgaattcttcttcccctactcctcgtatctaccgcgatggcgtcgggtggagatctcccatccgggtttgctgatgagagcaaaagtacgaaaacagaaggatcatccaacgaacgtcaaggggttcctccagctgccgctgcaggcttgtcgggtcctttcgatttttcttctatgcaaagtttgctcaatgatccatctataaaggagatggcagaccagattgcaagggaccctgcattcaatcagatggctgagcagctacagaaaggtgctcagactgcaggagaacagggcatgcctccattggatcctcatcaatacatggaaacaatgcaaaaggtcatggaaaaccctcagtttatgacaatggcagagcgcctcgggactgctcttatgcaggatcctgctatgtccagtatgctggaaaatttgactagtccaacacataaggaggagcttgaagagcgcatgtctcggattaaggaagatccagccttgaagccaattcttgatgagttagagaatggtggtcctgctgcaatgataaagtactggaatgaccctgaaactcttcaaaagattggccaggcaatgggaactaccatgccgtttagcactgtctctactgctgaaccttctggtactgaagaaactgaagaagaaggtgaagatgaagacgaatccattgtccaccacactgccagtgttggtgacggtgagggtctgaagaaggctctagatggtggagcagacaaggatgaagaagactctgagggaagaagggccttgcactttgcatgtggatatggtgagttcaagtgtgcggaaatcctccttgaggcgggtgctgctgtagatgccatggataagaacaagaacaccccactgcattacgctgctggctatggccggaaagagtgtgtggatcttctgttgaagcacggtgctgctgtcactctccaaaacatggatgggaagacgcccatcgacgtcgccaagctcaacaaccaggacgaggtcctcaagctgctcgagaaggacgtgttcctgtaaatcacttcacttggcccccatgaagagacatcatgttttacatcccttggcattggttttatatagtcatacacgaatcggcattttattcgttgtgtaagaatctactgttagctagcctgcaggccgactggctgaggttagaactgcatgttactgtatatggagacctgtgtatcgtccactttgtttctgttgattccactagagtaatccaagatgtactc

SEQ ID NO: 62803 - protein, 384 aa, Triticum aestivum
  peptide (1)..(384): Ceres Seq. ID no. 12615623
KKPSLARHLGKHSLLPHRAAELRLRQTQAGHLGRILLPLLLVSTAMASGGDLPSGFADESKSTKTEGSSNERQGVPPAAAAGLSGPFDFSSMQSLLNDPSIKEMADQIARDPAFNQMAEQLQKGAQTAGEQGMPPLDPHQYMETMQKVMENPQFMTMAERLGTALMQDPAMSSMLENLTSPTHKEELEERMSRIKEDPALKPILDELENGGPAAMIKYWNDPETLQKIGQAMGTTMPFSTVSTAEPSGTEETEEEGEDEDESIVHHTASVGDGEGLKKALDGGADKDEEDSEGRRALHFACGYGEFKCAEILLEAGAAVDAMDKNKNTPLHYAAGYGRKECVDLLLKHGAAVTLQNMDGKTPIDVAKLNNQDEVLKLLEKDVFL

SEQ ID NO: 62804 - protein, 339 aa, Triticum aestivum
  peptide (1)..(339): Ceres Seq. ID no. 12615624
MASGGDLPSGFADESKSTKTEGSSNERQGVPPAAAAGLSGPFDFSSMQSLLNDPSIKEMADQIARDPAFNQMAEQLQKGAQTAGEQGMPPLDPHQYMETMQKVMENPQFMTMAERLGTALMQDPAMSSMLENLTSPTHKEELEERMSRIKEDPALKPILDELENGGPAAMIKYWNDPETLQKIGQAMGTTMPFSTVSTAEPSGTEETEEEGEDEDESIVHHTASVGDGEGLKKALDGGADKDEEDSEGRRALHFACGYGEFKCAEILLEAGAAVDAMDKNKNTPLHYAAGYGRKECVDLLLKHGAAVTLQNMDGKTPIDVAKLNNQDEVLKLLEKDVFL

SEQ ID NO: 62805 - protein, 293 aa, Triticum aestivum
  peptide (1)..(293): Ceres Seq. ID no. 12615625
MQSLLNDPSIKEMADQIARDPAFNQMAEQLQKGAQTAGEQGMPPLDPHQYMETMQKVMENPQFMTMAERLGTALMQDPAMSSMLENLTSPTHKEELEERMSRIKEDPALKPILDELENGGPAAMIKYWNDPETLQKIGQAMGTTMPFSTVSTAEPSGTEETEEEGEDEDESIVHHTASVGDGEGLKKALDGGADKDEEDSEGRRALHFACGYGEFKCAEILLEAGAAVDAMDKNKNTPLHYAAGYGRKECVDLLLKHGAAVTLQNMDGKTPIDVAKLNNQDEVLKLLEKDVFL

SEQ ID NO: 62806 - DNA, 1415 bp, Triticum aestivum
  misc_feature (1)..(1415): Ceres Seq. ID no. 13596868
attaaaccgagcgccagtggatctctcctcgggcatcggcatcggagcggagagagagagagagagagccacccagccatgagatggtatgcatcggtaggctgagggcgctggtgcttcgtgcggcggcgggcgcgggcgcgggcaggcgccggtgggccagggtcctgtgcggtcgggcggtcgatgtgtgcgtgacaccccgtccgcgcgggcacggttggcgtggattccgggcggtggctggcgccaggacgaagatgatgctcgattcctccgactctgactccggcgctccggcggggcagctgcagctgcagcgccgcgcggttgctgctgggacccagccgcaggatggagggtacgccagtgcggggtggcagagggaagatggtaaactgaaatgtgggtattcaagttttagagggaaaagggctacaatggaggatttctatgatgtaaaactaactgaaattgatggacacgctgttagcctatttggtgtattcgatggtcatggggggtcacgtgctgctgagtatttgaaggagcatttgttcgagaaccttatgaaacaccccaagttcttgactgatacaaagcttgctataagtgaaacatatcagaagacagatgcagatttcttagaatcagaatcaagtgctttcagggatgatggttccacagcttcgactgcggttttagtgggtggccatctatatgtagcaaatgttggtgactcccgtgctgttatttcaaaagccgggaaagctagggcactctcagtagatcacaaacctaacaggtctgatgaacgcaagagaattgaaaatgctggaggtgttgtcatctgggctggtacttggagggtaggtggcgtactggcaatgtcccgtgcgtttggtaatcgtctactgaagccatttgtggtggcagaacctgaaattcaggaagaattgattaatggagaattggagagcctggttcttgccagtgatgggctttgggatgccgtagaaaatgaggaagctgtgtcccttgcaaaaacagaagatgtgccagagtctgcggccaggaaactgacggagattgcctactctcgtggcagcgctgacaatattacatgcatcgtggtgcaattccaccatgataaaattacaggatgagatggactacagctgatttaaggtttctctgcttcaggcctctttttatcctgcaagcggagtggggtttctcccacatctatttttgcctctgtggcaactgctcaggacttcctctattgattctttcctttgtgtggcagaccttttctcttttgagaattgtaatgggaatttttgagtttgatgtatccatgtctatgtctgtactaatacttgttatatttaatataaaaagagtgagttacg

SEQ ID NO: 62807 - protein, 360 aa, Triticum aestivum
  peptide (1)..(360): Ceres Seq. ID no. 13596869
MVCIGRLRALVLRAAAGAGAGRRRWARVLCGRAVDVCVTPRPRGHGWRGFRAVAGARTKMMLDSSDSDSGAPAGQLQLQRRAVAAGTQPQDGGYASAGWQREDGKLKCGYSSFRGKRATMEDFYDVKLTEIDGHAVSLFGVFDGHGGSRAAEYLKEHLFENLMKHPKFLTDTKLAISETYQKTDADFLESESSAFRDDGSTASTAVLVGGHLYVANVGDSRAVISKAGKARALSVDHKPNRSDERKRIENAGGVVIWAGTWRVGGVLAMSRAFGNRLLKPFVVAEPEIQEELINGELESLVLASDGLWDAVENEEAVSLAKTEDVPESAARKLTEIAYSRGSADNITCIVVQFHHDKITG

SEQ ID NO: 62808 - protein, 301 aa, Triticum aestivum
  peptide (1)..(301): Ceres Seq. ID no. 13596870
MMLDSSDSDSGAPAGQLQLQRRAVAAGTQPQDGGYASAGWQREDGKLKCGYSSFRGKRATMEDFYDVKLTEIDGHAVSLFGVFDGHGGSRAAEYLKEHLFENLMKHPKFLTDTKLAISETYQKTDADFLESESSAFRDDGSTASTAVLVGGHLYVANVGDSRAVISKAGKARALSVDHKPNRSDERKRIENAGGVVIWAGTWRVGGVLAMSRAFGNRLLKPFVVAEPEIQEELINGELESLVLASDGLWDAVENEEAVSLAKTEDVPESAARKLTEIAYSRGSADNITCIVVQFHHDKITG

SEQ ID NO: 62809 - protein, 300 aa, Triticum aestivum
  peptide (1)..(300): Ceres Seq. ID no. 13596871
MLDSSDSDSGAPAGQLQLQRRAVAAGTQPQDGGYASAGWQREDGKLKCGYSSFRGKRATMEDFYDVKLTEIDGHAVSLFGVFDGHGGSRAAEYLKEHLFENLMKHPKFLTDTKLAISETYQKTDADFLESESSAFRDDGSTASTAVLVGGHLYVANVGDSRAVISKAGKARALSVDHKPNRSDERKRIENAGGVVIWAGTWRVGGVLAMSRAFGNRLLKPFVVAEPEIQEELINGELESLVLASDGLWDAVENEEAVSLAKTEDVPESAARKLTEIAYSRGSADNITCIVVQFHHDKITG

SEQ ID NO: 62810 - DNA, 1113 bp, Triticum aestivum
  misc_feature (1)..(1113): Ceres Seq. ID no. 15224290
gagccgcagagacgttcgcaccaactcctctgaactctgaagcctgaacggagcggcggagaggaaggggagagatcacccaccggcggcgaggggagatggccggaggcgaggaagggtggaggaggagcggcatcgaggtgagcaccctgcagttcggctacgacggggaggcgccgctcttcgcgcgcttcaacctccgcgtcgcccccggctcgcgctgcctcctcgtcggcgccaacggatccggcaagactactctcttgaagattcttgcaggaaaacatatggttggaggaaaggatgttgtccgtgttcttaatggttctgcttttcatgacacacaattcgtgtgcagtggtgacctttcctacttgggtggttcttggagtcggaatgtcagttcagttggtgatgttccactacaaggcgatttctctgctgagcacatgatatttggagttgatggggttgatcctgttaggcgagagaagctgattgatctactggatattgatctgcaatggcgcatgcataaagtttcagatggacagcgccgcagggtacaaatttgcatgggtcttcttcatccatacaaggtactcttactcgatgagatcaccgtggatctcgatgtcgtgaccaggatggatctcctcgacttcttcaaggaagaatgcgagcagagggaagccacgatcgtctacgccacccacatattcgacgggctggagacatgggccaccgacatcgcgtacatccaagagggcgagctgaaaaagtcggcgaaatactcggacatcgaagagctgaagacggccaagaacctgctgtcggtcgttgagtcatggctgaaatccgagaccaagctcccgaagaaagaacccgcccgcgtcgagagccagcccaggcgcccttccccgttcgacgcctcccctttccgggcgtcgcgccacatggcctactaccgatgatgaccgtgtaaaacctctgcacccattccggtgccatgcaactctggagtctgtatcttccttttttttgttccccatccatccctgtatacggcaatgtatctatctaaatctaaataataaacaagtcgagcgtgcc

SEQ ID NO: 62811 - protein, 291 aa, Triticum aestivum; identical to SEQ ID NO: 51319
  peptide (1)..(291): Ceres Seq. ID no. 15224291

SEQ ID NO: 62812 - protein, 228 aa, Triticum aestivum; identical to SEQ ID NO: 51320
  peptide (1)..(228): Ceres Seq. ID no. 15224292

SEQ ID NO: 62813 - protein, 174 aa, Triticum aestivum; identical to SEQ ID NO: 51321
  peptide (1)..(174): Ceres Seq. ID no. 15224293

SEQ ID NO: 62814 - DNA, 1372 bp, Triticum aestivum
  misc_feature (1)..(1372): Ceres Seq. ID no. 12585444
catctcaacgaagaaaaggagcggccgaatctccagccccacgatttccccacgcgcacccaccaccgacccggcccccaaaaccctacgccgcgcaaaccctagcggcggccgccgcccccctcctcatcagcaatgtccggcatcctgcggctcgccggcgccgccagatccttctcccgcgcgttggctccggccgcgccgcaccaccgcaggctcgcggcatcggcggccgccctggcggaggacgatgcgtgctggaccgagtgggaggaggaggaggaggaggcgcggcggcagcgcgcccgcgcatcggcgaccgccgcggagtcttgcccggcggacggcggtcccaggggcgtgcagtgggtggtgatgggccgccccggcccgcagaagcacgcccacgccgcgcgcctcgccgaggtcctcgccgtgccgtacatctccatgggcacgctcgtcaggcaggagctcagccccacatcctcgctctacaagaagattgctaattcggtgaatgaagggaagcttgtgccagaggatatcatatttgggttgctgactaagcgtctcgaggagggatactacaagggtgaaaatggatttatccttgacggaatcccacgtacccgtgtgcaagctgagattcttgatgagatcgttgacatcgacttggttctgaacttcaaatgtgctggtaactgtttcatgaagaagcgatctggaggcgacatatgttcccactgtgggcagcattttggtgtcagcagtctggtgtctagggagcgtaatctctcccttggaagctctacatggcctgctcaggcacaacatgcttctgttataggcctggaaaacccaaggatggagaagctgcgtgcttatgctgagcagaccaagcagctggaagattactacaagaagcacaggaaacttgtggagttgaagacatccgctcgccctggtgaaacctggcaggggctcgtagctgcccttcacctccagcatctagacccatccccaacaccacacaaactcaccgtgtaattatcatccactgagtctaaggatctacattgtgatcctcacctgcgacatacgtagtatgtttctaagttttgtgagttctggctgaggagtcagtcggctgtggtgctttggtctttatctgttataggtataatgtaaggctctggtctttactgttatagataaaatgtaagcgattttgtagacccgcttgcttatatgtttgtaacggagagctttgaacttgcaagtgcaagtgtgcggtgtgccaggctccgctgtgctgttgttttgagtaccagttttgatcaatatataagttactgtgaatgttgtgcgc

SEQ ID NO: 62815 - protein, 304 aa, Triticum aestivum
  peptide (1)..(304): Ceres Seq. ID no. 12585445
MSGILRLAGAARSFSRALAPAAPHHRRLAASAAALAEDDACWTEWEEEEEEARRQRARASATAAESCPADGGPRGVQWVVMGRPGPQKHAHAARLAEVLAVPYISMGTLVRQELSPTSSLYKKIANSVNEGKLVPEDIIFGLLTKRLEEGYYKGENGFILDGIPRTRVQAEILDEIVDIDLVLNFKCAGNCFMKKRSGGDICSHCGQHFGVSSLVSRERNLSLGSSTWPAQAQHASVIGLENPRMEKLRAYAEQTKQLEDYYKKHRKLVELKTSARPGETWQGLVAALHLQHLDPSPTPHKLTV

SEQ ID NO: 62816 - protein, 224 aa, Triticum aestivum
  peptide (1)..(224): Ceres Seq. ID no. 12585446
MGRPGPQKHAHAARLAEVLAVPYISMGTLVRQELSPTSSLYKKIANSVNEGKLVPEDIIFGLLTKRLEEGYYKGENGFILDGIPRTRVQAEILDEIVDIDLVLNFKCAGNCFMKKRSGGDICSHCGQHFGVSSLVSRERNLSLGSSTWPAQAQHASVIGLENPRMEKLRAYAEQTKQLEDYYKKHRKLVELKTSARPGETWQGLVAALHLQHLDPSPTPHKLTV

SEQ ID NO: 62817 - protein, 199 aa, Triticum aestivum
  peptide (1)..(199): Ceres Seq. ID no. 12585447
MGTLVRQELSPTSSLYKKIANSVNEGKLVPEDIIFGLLTKRLEEGYYKGENGFILDGIPRTRVQAEILDEIVDIDLVLNFKCAGNCFMKKRSGGDICSHCGQHFGVSSLVSRERNLSLGSSTWPAQAQHASVIGLENPRMEKLRAYAEQTKQLEDYYKKHRKLVELKTSARPGETWQGLVAALHLQHLDPSPTPHKLTV

SEQ ID NO: 62818 - DNA, 1348 bp, Triticum aestivum
  misc_feature (1)..(1348): Ceres Seq. ID no. 13596554
ctcgaaccgaccgacaggccgtggtgcgcatctctcccactatctggctcaggtttcttgcctcggctctcgattttgtcatagcattcgctgttcccgtggtgtctgtagccgcgggcgggtgggcgagatccggttgcggcggccatggtgaaggagaccgcctactacgaaaccctgggggtcagcgtcgacgcctccccctccgacatcaagaaggcctactacgtccaggccaggctggtgcacccggacaagaatcccggcaaccccgacgcggcgcgcaaattccaggatctcggagaggcctaccaagtcctaagcgatccagcgaagaaggaggcttatgataagcatggaaaggagggtctttcccaggataacatggttgatcctgctgctgtatttgggatgctttttggaagcgactattttgaagattatgttggtcagcttgctctggcatccatcgcttcagtggaggttgatgaaggtttaagcagtcaagatgccagagcaaaggttcaagataagataaaagagttgcaaactgaaagagagaaaaagcttactcagagcctaaaggatcgacttcagccatatgtggatggtagaaaggatgattttgtgcactgggcgaatgcagaagccaagcgtttatcagaagcagcttttggtgaggctatgcttcacactgttggatatatttatgtaaggcaagcggcaagagaacttggaaagagtaaattgtatatgggtgtaccattcatagctgagtgggtaagagacaagggtcataccattaaatcacaagttcatgctgcttcaggtgctattgctctgatgcagctacaagaaggaatgaaaaaggtggaggagggtgccgacaaggaagagcagcttatgaagagttttgaggagaaaaaagaagccatgcttaattctctatggaaaattaatgtggtcgatatcgagtcaactctttcccgagtatgccaagcagttcttaaagatagcactgtctcaaaagatgttctgaagttgcgaggaaaagcgttgaaaaagcttggaacgatattccaaggcgcggaatctctgtaccatcgtgagaacagcctacgtgtggagtctccgatgaaagaggatggaacgacatcgtcgcactgaagactgataacatttttaacaatttgtgaattattcggatctctgtgcattattgtctgcttgtattattttgacacagcaggtttgctctggacgcaccctgtatgtatgggtttccttgttttctgtaaaaagggtgaatgctgagacacgaagcatctctgttattgacccggcattc

SEQ ID NO: 62819 - protein, 339 aa, Triticum aestivum
  peptide (1)..(339): Ceres Seq. ID no. 15221926
MVKETAYYETLGVSVDASPSDIKKAYYVQARLVHPDKNPGNPDAARKFQDLGEAYQVLSDPAKKEAYDKHGKEGLSQDNMVDPAAVFGMLFGSDYFEDYVGQLALASIASVEVDEGLSSQDARAKVQDKIKELQTEREKKLTQSLKDRLQPYVDGRKDDFVHWANAEAKRLSEAAFGEAMLHTVGYIYVRQAARELGKSKLYMGVPFIAEWVRDKGHTIKSQVHAASGAIALMQLQEGMKKVEEGADKEEQLMKSFEEKKEAMLNSLWKINVVDIESTLSRVCQAVLKDSTVSKDVLKLRGKALKKLGTIFQGAESLYHRENSLRVESPMKEDGTTSSH

SEQ ID NO: 62820 - protein, 260 aa, Triticum aestivum
  peptide (1)..(260): Ceres Seq. ID no. 15221927
MVDPAAVFGMLFGSDYFEDYVGQLALASIASVEVDEGLSSQDARAKVQDKIKELQTEREKKLTQSLKDRLQPYVDGRKDDFVHWANAEAKRLSEAAFGEAMLHTVGYIYVRQAARELGKSKLYMGVPFIAEWVRDKGHTIKSQVHAASGAIALMQLQEGMKKVEEGADKEEQLMKSFEEKKEAMLNSLWKINVVDIESTLSRVCQAVLKDSTVSKDVLKLRGKALKKLGTIFQGAESLYHRENSLRVESPMKEDGTTSSH

SEQ ID NO: 62821 - protein, 251 aa, Triticum aestivum
  peptide (1)..(251): Ceres Seq. ID no. 15221928
MLFGSDYFEDYVGQLALASIASVEVDEGLSSQDARAKVQDKIKELQTEREKKLTQSLKDRLQPYVDGRKDDFVHWANAEAKRLSEAAFGEAMLHTVGYIYVRQAARELGKSKLYMGVPFIAEWVRDKGHTIKSQVHAASGAIALMQLQEGMKKVEEGADKEEQLMKSFEEKKEAMLNSLWKINVVDIESTLSRVCQAVLKDSTVSKDVLKLRGKALKKLGTIFQGAESLYHRENSLRVESPMKEDGTTSSH

SEQ ID NO: 62822 - DNA, 1225 bp, Triticum aestivum
  misc_feature (1)..(1225): Ceres Seq. ID no. 12615485
atcctaaatcctccccaatccaggcgacaaggatctcgccatggcgccgccgcccaccgccgccgcggccgtccgttgccacccgcacatcctccgcaggggcctcctgcccgcttcgtcgccgctgctccccttcgcctcccgggtggcctcctccacgccgctccgcgcccagcccctgcgcttctcgctctcccccgtccccaagagcatctcctcctcctcgacctcccacatccccgtgcgctccctcttcaccgggatcgtcgaggaggtcggccgcgtgcgccgcatcggcccgccgcccacgcctcctgggggcgggggagacgcggctcccggtgtcgacctcgaggtcgagaccaagaacctcctcgccgggacgcagctgggcgacagcatcgccgtcgacgggacgtgcctcaccgtggcggccatcgacaccgctgcctccacgctcaccttcggcgtcgcgccggagaccctccggtgcacgtcactcggcgagcgcgtcgcgggcgacgacgttaacctcgagcgcgcgctcacgccggcgtctcgcatgggcgggcacttcgtccagggccacgtcgacggcaccggcgagatcgccgcgttccggcccgagggcgattctatctgggtcaccgtgcgtgcgccgccagagatcctcagcttgctcgtgcctaaggggttcgtcgccgtggacggaaccagcctcaccgtcgtcaatgtgaacgaggaggccgggtggttcgacttcatgcttgtgcgctacacgcaggacaatgttgtgctgccaaagaagaaggttggggataaggtgaaccttgaggctgacattcttgggaagtatgtagtgaagctacttgccgggagattggaggcaacatcaaaggcaaattcttgagttgtgcctgttggactgatgaactactatcagtattagtgcagcgtattcttgtccatcaataatagtgcattttttgcactaatgagtgaagctttttttcgtactaggggggtgatatagttcatgccattgcctgtttccatgtaaaagttatagcgtttccgcatggagaagcttttttcgggtgtgcatgatctgttaaccccattcaaatgaacaagatttgtttagttgttcataccaggagtccagcttttctgggacaacaatgaatgctagtgctcgtttgagtttatatttgatcattgcctg

SEQ ID NO: 62823 - protein, 289 aa, Triticum aestivum
  peptide (1)..(289): Ceres Seq. ID no. 12615486
MAPPPTAAAAVRCHPHILRRGLLPASSPLLPFASRVASSTPLRAQPLRFSLSPVPKSISSSSTSHIPVRSLFTGIVEEVGRVRRIGPPPTPPGGGGDAAPGVDLEVETKNLLAGTQLGDSIAVDGTCLTVAAIDTAASTLTFGVAPETLRCTSLGERVAGDDVNLERALTPASRMGGHFVQGHVDGTGEIAAFRPEGDSIWVTVRAPPEILSLLVPKGFVAVDGTSLTVVNVNEEAGWFDFMLVRYTQDNVVLPKKKVGDKVNLEADILGKYVVKLLAGRLEATSKANS

SEQ ID NO: 62824 - protein, 244 aa, Triticum aestivum
  peptide (1)..(244): Ceres Seq. ID no. 12615487
PKSSPIQATRISPWRRRPPPPRPSVATRTSSAGASCPLRRRCSPSPPGWPPPRRSAPSPCASRSPPSPRASPPPRPPTSPCAPSSPGSSRRSAACAASARRPRLLGAGETRLPVSTSRSRPRTSSPGRSWATASPSTGRASPWRPSTPLPPRSPSASRRRPSGARHSASASRATTLTSSARSRRRLAWAGTSSRATSTAPARSPRSGPRAILSGSPCVRRQRSSACSCLRGSSPWTEPASPSSM

SEQ ID NO: 62825 - protein, 176 aa, Triticum aestivum
  peptide (1)..(176): Ceres Seq. ID no. 12615488
ILNPPQSRRQGSRHGAAAHRRRGRPLPPAHPPQGPPARFVAAAPLRLPGGLLHAAPRPAPALLALPRPQEHLLLLDLPHPRALPLHRDRRGGRPRAPHRPAAHASWGRGRRGSRCRPRGRDQEPPRRDAAGRQHRRRRDVPHRGGHRHRCLHAHLRRRAGDPPVHVTRRARRGRRR

SEQ ID NO: 62826 - DNA, 907 bp, Triticum aestivum
  misc_feature (1)..(907): Ceres Seq. ID no. 12593115
cttctccccccttttgttcgtctcctaaaccgccgccagcatggacgccaagaagaggtcgccgcccgccccctcggccgccggagccgcgccccccgcggccaacggatacttcaactccgtcttctccgcgccggcgtcgcctgcggcaaatccaagagacgccaggcagatggacctgtacacgatactgaacaagcagaaccccaaagggcagagtggtgggggcattgcaggtaatgccaaatcccatggcagccctactataggtcgtgttgcttaccaagatggaaaacagttttatccaaacgagtcctcagagtcaccttattttggctcgtctgtgcattacggtggccgggacttctatgacagctctccacacaagcaagctgatgaatcacccagaaattataaggaggataatgcggatggctccctggctaccagaggtgattggtggcaaggttcgctttactactaaaaatactttgcaatggactctcctactgtgaacaaggaataaaaaggagtacgtcgagctggtaggctgtagagttgacatgagtcatcaggcataagaaaagtcatagtggaactacatctgttccgtcggtggtggcagtatttagatgcatcagtcacctaggcagacgtagacgtaccatgtgtctcttttctttgccttactagatttgagtgatgaaatgtaatgggactggtagggcagcagcaagtaggtcctacaaaaagttgctgctattttgcaactgacgagatcacttgctgtatgcgttatgtatcctagttcgtggttgtgttttggtaatatttggatttgcacatctgtttcggtctaccatttgtttgctgacagaaccatgatatgaacttgtgacaatggtct

SEQ ID NO: 62827 - protein, 147 aa, Triticum aestivum
  peptide (1)..(147): Ceres Seq. ID no. 12593116
MDAKKRSPPAPSAAGAAPPAANGYFNSVFSAPASPAANPRDARQMDLYTILNKQNPKGQSGGGIAGNAKSHGSPTIGRVAYQDGKQFYPNESSESPYFGSSVHYGGRDFYDSSPHKQADESPRNYKEDNADGSLATRGDWWQGSLYY

SEQ ID NO: 62828 - protein, 103 aa, Triticum aestivum
  peptide (1)..(103): Ceres Seq. ID no. 12593117
MDLYTILNKQNPKGQSGGGIAGNAKSHGSPTIGRVAYQDGKQFYPNESSESPYFGSSVHYGGRDFYDSSPHKQADESPRNYKEDNADGSLATRGDWWQGSLYY

SEQ ID NO: 62829 - protein, 79 aa, Triticum aestivum
  peptide (1)..(79): Ceres Seq. ID no. 12593118
LLPPFVRLLNRRQHGRQEEVAARPLGRRSRAPRGQRILQLRLLRAGVACGKSKRRQADGPVHDTEQAEPQRAEWWGHCR

SEQ ID NO: 62830 - DNA, 927 bp, Triticum aestivum
  misc_feature (1)..(927): Ceres Seq. ID no. 13662452
accaccctccctccatccacacctcagcctcagctcacctgctcctgctctccttgcctccctccatccgtcctccttgggattgggagagaagagaccacgagcaactcatccaaacaatgaagagcaggacgcagagcggccgcggaggagccatggtcgccgacgggggcagcaagatggagcgcaaggaggtggagaagaaccggcggctgcacatgaagggactctgcctcaagctctcctccctcctcccctcctcctcctcagcccaccacctccgccattattcttcctcgccgccgtccagcaacaaggacgcgacgacgcagctggaccagctggacagcgcggcggcgtacatcaagaagctcaagagccgggtcgacgaactcaagcgccgcaagcaggccgtcgtctccggcaccgctggctgctcgtcctccgtctccgccggcgactacaagggagcagcactgtccacaactgcgctgcctgtgatcgaggtgcggcaccaggacggaacgctggacgtggcgctggcgagcgaggccgggcggccgttccggctgcacgaggtgatcgccgtcctggagcaggagggcgccgaggtggtcagcgccagcttttcggtcgtgggtgacaagatcttctacacggtccattcccaggcattgtacccccgcatcggcctcgaggccggccgggtcgcccaccggctgcgcggcctcgccgcagccgcagccatctcgccgtcggtcctcctgacatgatctctttctctctttcttcgttgttttgccatggtgacagattagctgatctatgggcagcttagcttagtactgctctactctgctcgtgagtgagcttcaggtttgtctgaaatctactagtgtaggcacgtgcttgcgtatcctcctttct

SEQ ID NO: 62831 - protein, 256 aa, Triticum aestivum
  peptide (1)..(256): Ceres Seq. ID no. 13662453
HPPSIHTSASAHLLLLSLPPSIRPPWDWERRDHEQLIQTMKSRTQSGRGGAMVADGGSKMERKEVEKNRRLHMKGLCLKLSSLLPSSSSAHHLRHYSSSPPSSNKDATTQLDQLDSAAAYIKKLKSRVDELKRRKQAVVSGTAGCSSSVSAGDYKGAALSTTALPVIEVRHQDGTLDVALASEAGRPFRLHEVIAVLEQEGAEVVSASFSVVGDKIFYTVHSQALYPRIGLEAGRVAHRLRGLAAAAAISPSVLLT

SEQ ID NO: 62832 - protein, 217 aa, Triticum aestivum
  peptide (1)..(217): Ceres Seq. ID no. 13662454
MKSRTQSGRGGAMVADGGSKMERKEVEKNRRLHMKGLCLKLSSLLPSSSSAHHLRHYSSSPPSSNKDATTQLDQLDSAAAYIKKLKSRVDELKRRKQAVVSGTAGCSSSVSAGDYKGAALSTTALPVIEVRHQDGTLDVALASEAGRPFRLHEVIAVLEQEGAEVVSASFSVVGDKIFYTVHSQALYPRIGLEAGRVAHRLRGLAAAAAISPSVLLT

SEQ ID NO: 62833 - protein, 213 aa, Triticum aestivum
  peptide (1)..(213): Ceres Seq. ID no. 13662455
PPSLHPHLSLSSPAPALLASLHPSSLGLGEKRPRATHPNNEEQDAERPRRSHGRRRGQQDGAQGGGEEPAAAHEGTLPQALLPPPLLLLSPPPPPLFFLAAVQQQGRDDAAGPAGQRGGVHQEAQEPGRRTQAPQAGRRLRHRWLLVLRLRRRLQGSSTVHNCAACDRGAAPGRNAGRGAGERGRAAVPAARGDRRPGAGGRRGGQRQLFGRG

SEQ ID NO: 62834 - DNA, 1565 bp, Triticum aestivum
  misc_feature (1)..(1565): Ceres Seq. ID no. 14302306
gtgcccctcgcctccatcactcactctcacagccccccagctagctagtgccctctgcatctcgtgctcggagaacttagatcagcacagagcgagggtcgattagcagctgatcggcagatcatgggcgtggagggctgctgcaacaagaaggtgatggaggaggaggccctggtgaagaagatcaccggcctcgccgcggccatcggcgagctgccctcgctgagcccctcgccggcggtgaacgcgctcttcaccgagctggtgacgtcctgcatcccggcgagcaccgtcgacgtcgacgcgctgggcccggaggcgcaggagatgcgcgcccgcctcatccgcctctgcgccgacgccgagggccacctggaggcgcactactccgacctcctcgccgcgcacgacaacccgctcgaccacctcaccctcttcccctacttcaacaactacatcaagctcagccagctggagcacggcctcctcgcccgccacgtcccgggcccggccccggcccgcgtcgccttcctcggctccggcccgctgccgctcagctccctcgtgctcgccgcgcgccacctgcccgacgcctccttcgacaactacgacatctccggcgaggccaacgagcgcgccagccggctggtccgcaacgacgccgacgccggcgcgcgcatggcgttccgcacggcagacgtggccgacgtgacgaccgagctggcgggctacgacgtggtgttcctggcggcgctggtgggcatggcggccgaggagaaggcgcgcctggtggagcacctcgggaggcacatggcccccggcgcggcgctcgtggtgcggagcgcgcacggcgcgcgcgggttcctgtacccggtggtggaccccgaggagatccggcgaggcgggttcgaggtgctcaccgtgcaccacccggaggacgaggtgatcaactccgtcatcatcgcgcgcaaggcggcggcgccagcagccgtcgccgccgacggcgacgtgccggtgaacaacggcggcatgccggcccagtgcgcggtggcggtgagcagaccgtgcctgggctgcgcctgcgagctggggacgagggcgcaccagaagatgaaggagatggccatggaggagatggaggcgtaggccggccggcactccggcagacaccgtcaccgtcatcgcccagagcacggtgatgcatgaactcacccaccgattaatatttgcccgattaatcaccgaccgatacatacatgcatggtaataattggtttgtcctcatgcatggatggatggacgtggctacttatttaccataattattaatccttgcctgcgtatggctggctggattatttattttctaccgtaatcgtgccgtgtttgttttagcaatcgtctgacagctgctatatgcctccgggtttaacatagaggagggggatgatatgtgtcgtgttgtggtgtggtgagatcgagtcgagtcgagttgcctgcctgctagctgttgttgtaataagtgtttttgacactctatatgactcaagtgatccatcatcacc

SEQ ID NO: 62835 - protein, 340 aa, Triticum aestivum
  peptide (1)..(340): Ceres Seq. ID no. 14302307
MGVEGCCNKKVMEEEALVKKITGLAAAIGELPSLSPSPAVNALFTELVTSCIPASTVDVDALGPEAQEMRARLIRLCADAEGHLEAHYSDLLAAHDNPLDHLTLFPYFNNYIKLSQLEHGLLARHVPGPAPARVAFLGSGPLPLSSLVLAARHLPDASFDNYDISGEANERASRLVRNDADAGARMAFRTADVADVTTELAGYDVVFLAALVGMAAEEKARLVEHLGRHMAPGAALVVRSAHGARGFLYPVVDPEEIRRGGFEVLTVHHPEDEVINSVIIARKAAAPAAVAADGDVPVNNGGMPAQCAVAVSRPCLGCACELGTRAHQKMKEMAMEEMEA

SEQ ID NO: 62836 - protein, 329 aa, Triticum aestivum
  peptide (1)..(329): Ceres Seq. ID no. 14302308
MEEEALVKKITGLAAAIGELPSLSPSPAVNALFTELVTSCIPASTVDVDALGPEAQEMRARLIRLCADAEGHLEAHYSDLLAAHDNPLDHLTLFPYFNNYIKLSQLEHGLLARHVPGPAPARVAFLGSGPLPLSSLVLAARHLPDASFDNYDISGEANERASRLVRNDADAGARMAFRTADVADVTTELAGYDVVFLAALVGMAAEEKARLVEHLGRHMAPGAALVVRSAHGARGFLYPVVDPEEIRRGGFEVLTVHHPEDEVINSVIIARKAAAPAAVAADGDVPVNNGGMPAQCAVAVSRPCLGCACELGTRAHQKMKEMAMEEMEA

SEQ ID NO: 62837 - protein, 272 aa, Triticum aestivum
  peptide (1)..(272): Ceres Seq. ID no. 14302309
MRARLIRLCADAEGHLEAHYSDLLAAHDNPLDHLTLFPYFNNYIKLSQLEHGLLARHVPGPAPARVAFLGSGPLPLSSLVLAARHLPDASFDNYDISGEANERASRLVRNDADAGARMAFRTADVADVTTELAGYDVVFLAALVGMAAEEKARLVEHLGRHMAPGAALVVRSAHGARGFLYPVVDPEEIRRGGFEVLTVHHPEDEVINSVIIARKAAAPAAVAADGDVPVNNGGMPAQCAVAVSRPCLGCACELGTRAHQKMKEMAMEEMEA

SEQ ID NO: 62838 - DNA, 1263 bp, Triticum aestivum
  misc_feature (1)..(1263): Ceres Seq. ID no. 12615491
aatgaacatcttctccaaaggaggctctcccgttaggcccgttctctgatggagtcgcttgcctcgcaagcgaagccggctgccgtgctctggctcgccggcttcctccaggccgcgcgtctccaccgcgtcgtctccttctgcgtcagctcgagggctctgtcgatcagaatcgctcagtgcttcctgctcaacgggttcatcttcctggggagcttgctaaccttgaaatcagtggtcattccaactcttctatggatactgcccgagcaatgcgatcaatcatggggacaacatctatgtgaacacacaacagctgttgccttgtattcgttcttacgttcggggcttgtcgagattttctatgtattttggttttatcccctctacatcttcagctttataataagtacactttggtatggtgacattgctaagcatgctttggctgttgtgaaaagtaagaagctggatgcaagtcaagcacctgactctgaccctcacagcacatctgtatcagcagataggcctgaaggatttgatggggttgcgattggtgttggagagcaggtctattcgatacttcttttgactattttctttgctgaggttacagtgattggttacataccttaccttggtaaggcaatgaacttcatgttactgtctttgatgtatgcctactactgcttcgagtacaagtggaacttctttgcagtgagcctgaatcaccggcttgatttctttgagtcaaattgggctttctttgccggatttggtagtccatgtgtacttccgattttcttcttctctcctcttacaagttatggtgtgatggcaatactatacccactgtttgtcatgacagctgctggtacacaagaagagcaaaccattgatgaactgaaatctttgcatggagggaaactgaatagaatacccttgttctttgtcgcgaagcgactaacgacgcaagcgctgcagttgctcccagaggcacaaaaggagcaatgagtggtccacataatcacatgaactcagagttgcatagttctcatggaagtgatcatgtggaagctgcatctgagaggtgcatagttcacgcgaaagcgtggctgctcatgtgcgccacaccgcaatgtaaatattctgtaccattgccgctgtacatatacatatattgggccaataaaaaagaaactatggttgtccacgagatacatactgcaactgaagaaggaaatatacaaacatatactgtcc

SEQ ID NO: 62839 - protein, 321 aa, Triticum aestivum
  peptide (1)..(321): Ceres Seq. ID no. 12615492
MESLASQAKPAAVLWLAGFLQAARLHRVVSFCVSSRALSIRIAQCFLLNGFIFLGSLLTLKSVVIPTLLWILPEQCDQSWGQHLCEHTTAVALYSFLRSGLVEIFYVFWFYPLYIFSFIISTLWYGDIAKHALAVVKSKKLDASQAPDSDPHSTSVSADRPEGFDGVAIGVGEQVYSILLLTIFFAEVTVIGYIPYLGKAMNFMLLSLMYAYYCFEYKWNFFAVSLNHRLDFFESNWAFFAGFGSPCVLPIFFFSPLTSYGVMAILYPLFVMTAAGTQEEQTIDELKSLHGGKLNRIPLFFVAKRLTTQALQLLPEAQKEQ

SEQ ID NO: 62840 - DNA, 1156 bp, Triticum aestivum
  misc_feature (1)..(1156): Ceres Seq. ID no. 13596555
gaaaaatctaggcatgcatctcgccgccgactacccccaccgcggcggtggccgcctcggcctagggccattcgcggcagcggtgctccgcaccgacaaccgtcgccgtgcgattgcaggcggcgcggtcctcgcctcggcgctgcttctcgtggccacaccacgactccgccactcgccggcgctccacctcttcgccgacatgcgcaacctcctcggcgtgcccaacaccctcaacgtgctcaccgcctacccgcttctccttgctggagtaccaggactcatcctgtgcctcttcggcggtggatgcttcggcataagcttaaggtgggaggccttgggatggttcctcttctatgtggggaatgtaggggcagcatttggctcagcttactatcacctcaagccagatgatgaccggttaatttgggacaggttgccgatgatgatgtcggcctcctcgcttttgtcgatattggtaattgaaagagttgatgagagggctgggttatcttgtttgatctcgctcttgtctcttttactggtgagcagtgcgtgtgaaaggattcttgatgatatgcgcctgtgggtagttttaaacctggttccttgtgttgccattcctgcaatgctattcttgttcgcgccaaagtatacacactcaagattttggtttcttgctacaggcttttaccttctggcaagattcgaaggccttgccgacagaaaggtttacagtgtgaatagatatttcattagcggtcattccttggagcacctttgcttcgccatggttacattgatacttactgtgatgctatccttcagaaatattaagatcaccagggactcgtgactacaactccaccattgcttgtttgtaacaaatggcaaatttcctgtcagaatttctatgttcggaagggcccctccagagtccggaagcacctgaagaaacataaataggtgatctatgtatcctatctttccactacctgggtgactgacgccctccatccctgggcggcatagacaagtcctgtgagattatttcaatgtgtgttcatgtcgtgagttatttgtgtttggagcttgttaactggaccagcagaaacattggacgactatattgcaatttatacagatttcagctgtc

SEQ ID NO: 62841 - protein, 284 aa, Triticum aestivum
  peptide (1)..(284): Ceres Seq. ID no. 13596556
KNLGMHLAADYPHRGGGRLGLGPFAAAVLRTDNRRRAIAGGAVLASALLLVATPRLRHSPALHLFADMRNLLGVPNTLNVLTAYPLLLAGVPGLILCLFGGGCFGISLRWEALGWFLFYVGNVGAAFGSAYYHLKPDDDRLIWDRLPMMMSASSLLSILVIERVDERAGLSCLISLLSLLLVSSACERILDDMRLWVVLNLVPCVAIPAMLFLFAPKYTHSRFWFLATGFYLLARFEGLADRKVYSVNRYFISGHSLEHLCFAMVTLILTVMLSFRNIKITRDS

SEQ ID NO: 62842 - protein, 280 aa, Triticum aestivum
  peptide (1)..(280): Ceres Seq. ID no. 13596557
MHLAADYPHRGGGRLGLGPFAAAVLRTDNRRRAIAGGAVLASALLLVATPRLRHSPALHLFADMRNLLGVPNTLNVLTAYPLLLAGVPGLILCLFGGGCFGISLRWEALGWFLFYVGNVGAAFGSAYYHLKPDDDRLIWDRLPMMMSASSLLSILVIERVDERAGLSCLISLLSLLLVSSACERILDDMRLWVVLNLVPCVAIPAMLFLFAPKYTHSRFWFLATGFYLLARFEGLADRKVYSVNRYFISGHSLEHLCFAMVTLILTVMLSFRNIKITRDS

SEQ ID NO: 62843 - protein, 217 aa, Triticum aestivum
  peptide (1)..(217): Ceres Seq. ID no. 13596558
MRNLLGVPNTLNVLTAYPLLLAGVPGLILCLFGGGCFGISLRWEALGWFLFYVGNVGAAFGSAYYHLKPDDDRLIWDRLPMMMSASSLLSILVIERVDERAGLSCLISLLSLLLVSSACERILDDMRLWVVLNLVPCVAIPAMLFLFAPKYTHSRFWFLATGFYLLARFEGLADRKVYSVNRYFISGHSLEHLCFAMVTLILTVMLSFRNIKITRDS

SEQ ID NO: 62844 - DNA, 1120 bp, Triticum aestivum
  misc_feature (1)..(1120): Ceres Seq. ID no. 12587345
cattccattcccccattccccgctccaacaacctccatctctcctctcctctcctctcctctcgtctccacagcagcagcagctccggttcgagctcgagcgaggaagaagtataccatttggcccgtgaagatgttggccatcttccagaagcaggtggcgcacgcgccgcaggagctcaacagcccgcgcggcagcaccgccaagcccaggaaccccgacgagatcctccgcgacttccacgccgcccaccccgccgacgccttctccacctccttcggcggcggcgccgccctcgcctgcgtcgccgcgcagccccgctccctcgccgccggcgggtaccagcggatgttctgcgggctggacgacatctactgcgtgttcatgggcacgctggacaacctgagcagtctgatgcggcagtacggcctcaccggccgctccaccaacgaggcgctgctggtgatcgaggcctaccgcacgctgcgcgaccggggcccctacccggcggaccaggtggtgaaggacctctccggctccttcgccttcgtcgtcttcgacaaccgcggccggtccgggtcgggggcggcggtgttcgcggcgcagagcacggacggcggggtgccgctgcactggggcgtggcggcggacgggtcggtggtgatctgcgacgaccgcggcgtggccaaggccgggtgcgggcggtcgtacgcgccgttcccgcccgggtgcatgttccacagcgagggcgggctcaagagcttcgagcaccccatgaaccgcctcaaggcgctccccagggtggacagcgagggcgtcatgtgcggcgccaacttcaaggtcgacgccttcaccaagatcaactccatgccccgcgtcggcagcgccaccaactgggccgccgcctgggacgacgccgccatctgatcctcgccggcgccggcgttgctctccgtcgtggcctcgtcgggcttgggcttattgcattttacttgtttttctttccttggcaatgtacattctgatctgatctgatctgagccgtgtgtgggcgtgggcgcgctggcacgtacggctgtttgcttgtacgatggaggaataagactttgcttccagtcct

SEQ ID NO: 62845 - protein, 340 aa, Triticum aestivum
  peptide (1)..(340): Ceres Seq. ID no. 12587346
FHSPIPRSNNLHLSSPLLSSRLHSSSSSGSSSSEEEVYHLAREDVGHLPEAGGARAAGAQQPARQHRQAQEPRRDPPRLPRRPPRRRLLHLLRRRRRPRLRRRAAPLPRRRRVPADVLRAGRHLLRVHGHAGQPEQSDAAVRPHRPLHQRGAAGDRGLPHAARPGPLPGGPGGEGPLRLLRLRRLRQPRPVRVGGGGVRGAEHGRRGAAALGRGGGRVGGDLRRPRRGQGRVRAVVRAVPARVHVPQRGRAQELRAPHEPPQGAPQGGQRGRHVRRQLQGRRLHQDQLHAPRRQRHQLGRRLGRRRHLILAGAGVALRRGLVGLGLIAFYLFFFPWQCTF

SEQ ID NO: 62846 - protein, 308 aa, Triticum aestivum
  peptide (1)..(308): Ceres Seq. ID no. 12587347
HSIPPFPAPTTSISPLLSSPLVSTAAAAPVRARARKKYTIWPVKMLAIFQKQVAHAPQELNSPRGSTAKPRNPDEILRDFHAAHPADAFSTSFGGGAALACVAAQPRSLAAGGYQRMFCGLDDIYCVFMGTLDNLSSLMRQYGLTGRSTNEALLVIEAYRTLRDRGPYPADQVVKDLSGSFAFVVFDNRGRSGSGAAVFAAQSTDGGVPLHWGVAADGSVVICDDRGVAKAGCGRSYAPFPPGCMFHSEGGLKSFEHPMNRLKALPRVDSEGVMCGANFKVDAFTKINSMPRVGSATNWAAAWDDAAI

SEQ ID NO: 62847 - protein, 264 aa, Triticum aestivum
  peptide (1)..(264): Ceres Seq. ID no. 12587348
MLAIFQKQVAHAPQELNSPRGSTAKPRNPDEILRDFHAAHPADAFSTSFGGGAALACVAAQPRSLAAGGYQRMFCGLDDIYCVFMGTLDNLSSLMRQYGLTGRSTNEALLVIEAYRTLRDRGPYPADQVVKDLSGSFAFVVFDNRGRSGSGAAVFAAQSTDGGVPLHWGVAADGSVVICDDRGVAKAGCGRSYAPFPPGCMFHSEGGLKSFEHPMNRLKALPRVDSEGVMCGANFKVDAFTKINSMPRVGSATNWAAAWDDAAI

SEQ ID NO: 62848 - DNA, 697 bp, Triticum aestivum
  misc_feature (1)..(697): Ceres Seq. ID no. 15175129
acaccgcagcatcagcagcccgcctcacatcccacccaaacccagcctccccacacgctccaaccaccagcacgcatggcacccaaggcggcggagaagaagccggtggtggccgcggagaagaccccggcggggaagaagcccaaggcggagaagcgggcgccggcgtccaaggaggccggcggcgagggcaagacgaggggcaggaagaagggcagcaaggccaagaagggcgtggagacgtacaagatctacatcttcaaggtgctgaagcaggtgcacgagatcaaggacttcctgctgacggcgcgccggaaggacgcgcggtcggtgcggatcaagaggaccaaggacgccgtcaagttcaaggtgcgctgctccaggtacctctacacgctctgcgtcttcgacgccgacaaggccaacaagctcaagcagtccctcccaccaggtttgagcgtccaggaggtttaagcatcaagccagacaatgccttttctagtagcgggaatgttctatccatcttgctttagtaactgttagcaggctctccttgtttacccccattaagagagttttgatgtcccaagactggaatgtaatgttgggagctatgtggttgaacctgtgaggatttttgtgttattttcacttgctggagaaggagatccattatcttatcctaaattggtttagt

SEQ ID NO: 62849 - protein, 176 aa, Triticum aestivum
  peptide (1)..(176): Ceres Seq. ID no. 15175130
TAASAARLTSHPNPASPHAPTTSTHGTQGGGEEAGGGRGEDPGGEEAQGGEAGAGVQGGRRRGQDEGQEEGQQGQEGRGDVQDLHLQGAEAGARDQGLPADGAPEGRAVGADQEDQGRRQVQGALLQVPLHALRLRRRQGQQAQAVPPTRFERPGGLSIKPDNAFSSSGNVLSILL

SEQ ID NO: 62850 - protein, 157 aa, Triticum aestivum
  peptide (1)..(157): Ceres Seq. ID no. 15175131
TPQHQQPASHPTQTQPPHTLQPPARMAPKAAEKKPVVAAEKTPAGKKPKAEKRAPASKEAGGEGKTRGRKKGSKAKKGVETYKIYIFKVLKQVHEIKDFLLTARRKDARSVRIKRTKDAVKFKVRCSRYLYTLCVFDADKANKLKQSLPPGLSVQEV

SEQ ID NO: 62851 - protein, 132 aa, Triticum aestivum
  peptide (1)..(132): Ceres Seq. ID no. 15175132
MAPKAAEKKPVVAAEKTPAGKKPKAEKRAPASKEAGGEGKTRGRKKGSKAKKGVETYKIYIFKVLKQVHEIKDFLLTARRKDARSVRIKRTKDAVKFKVRCSRYLYTLCVFDADKANKLKQSLPPGLSVQEV

SEQ ID NO: 62852 - DNA, 1979 bp, Triticum aestivum
  misc_feature (1)..(1979): Ceres Seq. ID no. 14313559
atgagaagatcaccatagcactggacaacctcccgatcccgagcagctccgattggaaggccgccgtggcgagatcccgcgcgggcagggcctcgatgggaccaccgccgaccaggtggcccctgctggccgccctcgtcgcggcggcgctgctcgccggcgcggcggcggcgacggaggaggcctacgtcacgctgctctacggcgacgagttcgtcctcggcgtgcgcgtcctgggcaagtccatccgcgacaccggcacgcggcgggacatggtcgtgctcgtctccgacggcgtctccgagtactcgcgggagctcctcgaggctgatggttggatcgtgaagcgtataactttactggctaatcctaaccaagtgagaccaacgaggttttggggtgtctacacaaagttgaagatattcaacatgacaagctacaaaaaggttgtttatcttgatgcagatactgtagttgtaaaaagtatcgaggatgttttcaagtgtaggaagttctgtgggaacttgaagcattctgaaagaatgaattccggagtgatggttgtggagccatctgaaactgttttcaaggatatgattagccaagtagaccggttgccttcctacactggaggggatcaaggttttcttaattcatattatgctgattttgctaactcccgcgtgtatgagccagactcacctttaacacctgaaccggagacacagcgcctttctaccttgtataatgctgatgttggtctttacatgctagccaacaagtggatggttgatgaaaaggaacttagagttattcactacacactaggtccccttaaaccctgggactggtggacagcttggcttgtaaaacctgtggagatatggcaggatgttaggcaaaaacttgaagaatctcttccgggaaccggtgggggaaggaaccctcatgatcagctggtggtcaaatttttattcattcttcccttctgcctgctgttatttggttattaccaatcatgctttcagaactataaggattttccaagtgtgcagtctttatgtgcgtttgcaagaagaggccgtcataagtataagtctgaagaggcacttccatcttattcagcagttggtgtttcatcatctacattttctacttcaaatcaaagaatctcaaacgggccacatctgaagctgccttcttatttcggggcgattgctgtgctaatctgttttatgtctgctggtgtctctcttgcctttgctttcactatcattccacgacaaattatgccatggacaggtctgctactgatgtttgagtggaccttcgtggcattcttcttattgtttggtagctatctccgttttgtctatcgatggggaagtatcagtgcaactcatgtgggatatagcaattctgattcatcagagaatcacatggctacaggccatcatcagcgcaatatatctgacttcgacatggaggcgacattttactggacagggatggctgtcatagctatcattactgtattttcaccaactatcttgggtataactgcattatttacaaagctagggttgatggttgccggtggtgttctgctggcatcttttatgacgtatgcttcggtgcatcttgctatctcagccttccacaagggtcaaaaagataggaatgggtcgagaactagaagaatttgtttctggtgtttgtagtaagctttgtgcctgcattgttaatttagttcatgttgttgtacatttttactcaaggaaattttggtggttccgttggcacagatattccacttttgtaacactgatgccaaatcaaaggtacataggttccaatagttgacatgcagctcgcaggcctgcaagtgtaaagctttttgtctataaaactcttcctgccatttgctcgttgtacaatatgatcggcggttctatattggaactatggaacatgaactc

SEQ ID NO: 62853 - protein, 572 aa, Triticum aestivum
  peptide (1)..(572): Ceres Seq. ID no. 14313560
EKITIALDNLPIPSSSDWKAAVARSRAGRASMGPPPTRWPLLAALVAAALLAGAAAATEEAYVTLLYGDEFVLGVRVLGKSIRDTGTRRDMVVLVSDGVSEYSRELLEADGWIVKRITLLANPNQVRPTRFWGVYTKLKIFNMTSYKKVVYLDADTVVVKSIEDVFKCRKFCGNLKHSERMNSGVMVVEPSETVFKDMISQVDRLPSYTGGDQGFLNSYYADFANSRVYEPDSPLTPEPETQRLSTLYNADVGLYMLANKWMVDEKELRVIHYTLGPLKPWDWWTAWLVKPVEIWQDVRQKLEESLPGTGGGRNPHDQLVVKFLFILPFCLLLFGYYQSCFQNYKDFPSVQSLCAFARRGRHKYKSEEALPSYSAVGVSSSTFSTSNQRISNGPHLKLPSYFGAIAVLICFMSAGVSLAFAFTIIPRQIMPWTGLLLMFEWTFVAFFLLFGSYLRFVYRWGSISATHVGYSNSDSSENHMATGHHQRNISDFDMEATFYWTGMAVIAIITVFSPTILGITALFTKLGLMVAGGVLLASFMTYASVHLAISAFHKGQKDRNGSRTRRICFWCL

SEQ ID NO: 62854 - protein, 541 aa, Triticum aestivum
  peptide (1)..(541): Ceres Seq. ID no. 14313561
MGPPPTRWPLLAALVAAALLAGAAAATEEAYVTLLYGDEFVLGVRVLGKSIRDTGTRRDMVVLVSDGVSEYSRELLEADGWIVKRITLLANPNQVRPTRFWGVYTKLKIFNMTSYKKVVYLDADTVVVKSIEDVFKCRKFCGNLKHSERMNSGVMVVEPSETVFKDMISQVDRLPSYTGGDQGFLNSYYADFANSRVYEPDSPLTPEPETQRLSTLYNADVGLYMLANKWMVDEKELRVIHYTLGPLKPWDWWTAWLVKPVEIWQDVRQKLEESLPGTGGGRNPHDQLVVKFLFILPFCLLLFGYYQSCFQNYKDFPSVQSLCAFARRGRHKYKSEEALPSYSAVGVSSSTFSTSNQRISNGPHLKLPSYFGAIAVLICFMSAGVSLAFAFTIIPRQIMPWTGLLLMFEWTFVAFFLLFGSYLRFVYRWGSISATHVGYSNSDSSENHMATGHHQRNISDFDMEATFYWTGMAVIAIITVFSPTILGITALFTKLGLMVAGGVLLASFMTYASVHLAISAFHKGQKDRNGSRTRRICFWCL

SEQ ID NO: 62855 - protein, 482 aa, Triticum aestivum
  peptide (1)..(482): Ceres Seq. ID no. 14313562
MVVLVSDGVSEYSRELLEADGWIVKRITLLANPNQVRPTRFWGVYTKLKIFNMTSYKKVVYLDADTVVVKSIEDVFKCRKFCGNLKHSERMNSGVMVVEPSETVFKDMISQVDRLPSYTGGDQGFLNSYYADFANSRVYEPDSPLTPEPETQRLSTLYNADVGLYMLANKWMVDEKELRVIHYTLGPLKPWDWWTAWLVKPVEIWQDVRQKLEESLPGTGGGRNPHDQLVVKFLFILPFCLLLFGYYQSCFQNYKDFPSVQSLCAFARRGRHKYKSEEALPSYSAVGVSSSTFSTSNQRISNGPHLKLPSYFGAIAVLICFMSAGVSLAFAFTIIPRQIMPWTGLLLMFEWTFVAFFLLFGSYLRFVYRWGSISATHVGYSNSDSSENHMATGHHQRNISDFDMEATFYWTGMAVIAIITVFSPTILGITALFTKLGLMVAGGVLLASFMTYASVHLAISAFHKGQKDRNGSRTRRICFWCL

SEQ ID NO: 62856 - DNA, 1410 bp, Triticum aestivum
  misc_feature (1)..(1410): Ceres Seq. ID no. 14301538
ctcgatcttcttgtttcagcctccacacacttggccatctcgcaagccgtgacagggcgatcaatggcgcccctacgtccgcgcctggccgccctgctcgctctgtgcgcgtgcgccatggctccgccggcggccgccgccaacgtgtcgatcacgacgtgccggtccttctgcggcaacatcacggtggactacccgttcgcgctccacgccgggtgcggccacgcggggttccgcgacctgctctactgcatcgaccgcacgctcatgctgcacctcccctcgggctcctaccgcgtcctcgacatcgactacgcctaccgcggcctcaccctgcacgacccggccatgtccgactgccgcgccatcgaccgctccccgggcggccgcggcaacgggttcgtcgtcgagccgtggcgcgcgccgttcctggccccggacccggacaacgtgttcctcctcctcggctgccgcgccagctcgccgctcttccagggcttccccgaccgccacctgccgtgccggaacgtgtccgggatggggtgcggcgactactacggctgccccgcgtgggacgactacgggcgccggccgtcgggggcggcgtacgggtcggccgtgccgcccgagtgctgcgcggtctcgtagggcgccatccgggccgtgaacgtgagccggctccagtgcgaggggtacagcagcgcgtacagcctcgcgccggtgcgcgcggagggggccggcggctgggcgtacggcatccgggtggcgtgggcgctgccggaggcgaaccgggggttctgcggcgcgtgccgcgccacgggcggggtgtgcggccacgacgtggagagccgcggcgacctgtgcctctgcggtgactggaactcgacttccaactgcgactcctcggcggacgccgcgccgtcaagcaccgccacgcctggcatcgccattgccgctcttctcttggcccttctcgcctcaggattgtcgtccgggtcaatagcgaacatgtgagggacagagggagtgtgcctgtgaaggcgtcatgtttcatccaacagtggccactgacgagctgttcgtgccgccatgattacctccgccgtctggtgtaccgctgcaatacttttgtgtagacaaaaactagtgcgactgaaatgtttgtctgcggcataaatctttgattaggaaatcagtgtcatattacattcgaagtatacctacaaaacatatgcgagtcagaactggggtatattgtgagcttgctcgattcatcatgcttattcgatttgatgtggctccgtttgcatttgtgagtgatgcgttgcggtcctcgcggaggcatgaaaatatgtttgaatatgtttcgcccgtattaacgtataaatgcattacctagtttttttttcg

SEQ ID NO: 62857 - protein, 290 aa, Triticum aestivum
  peptide (1)..(290): Ceres Seq. ID no. 14301539
RSSCFSLHTLGHLASRDRAINGAPTSAPGRPARSVRVRHGSAGGRRQRVDHDVPVLLRQHHGGLPVRAPRRVRPRGVPRPALLHRPHAHAAPPLGLLPRPRHRLRLPRPHPARPGHVRLPRHRPLPGRPRQRVRRRAVARAVPGPGPGQRVPPPRLPRQLAALPGLPRPPPAVPERVRDGVRRLLRLPRVGRLRAPAVGGGVRVGRAARVLRGLVGRHPGREREPAPVRGVQQRVQPRAGARGGGRRLGVRHPGGVGAAGGEPGVLRRVPRHGRGVRPRRGEPRRPVPLR

SEQ ID NO: 62858 - protein, 215 aa, Triticum aestivum
  peptide (1)..(215): Ceres Seq. ID no. 14301540
LDLLVSASTHLAISQAVTGRSMAPLRPRLAALLALCACAMAPPAAAANVSITTCRSFCGNITVDYPFALHAGCGHAGFRDLLYCIDRTLMLHLPSGSYRVLDIDYAYRGLTLHDPAMSDCRAIDRSPGGRGNGFVVEPWRAPFLAPDPDNVFLLLGCRASSPLFQGFPDRHLPCRNVSGMGCGDYYGCPAWDDYGRRPSGAAYGSAVPPECCAVS

SEQ ID NO: 62859 - protein, 194 aa, Triticum aestivum
  peptide (1)..(194): Ceres Seq. ID no. 14301541
MAPLRPRLAALLALCACAMAPPAAAANVSITTCRSFCGNITVDYPFALHAGCGHAGFRDLLYCIDRTLMLHLPSGSYRVLDIDYAYRGLTLHDPAMSDCRAIDRSPGGRGNGFVVEPWRAPFLAPDPDNVFLLLGCRASSPLFQGFPDRHLPCRNVSGMGCGDYYGCPAWDDYGRRPSGAAYGSAVPPECCAVS

SEQ ID NO: 62860 - DNA, 1362 bp, Triticum aestivum
  misc_feature (1)..(1362): Ceres Seq. ID no. 12615907
catcctgtttctattctgagtaaagtgagatactgcaattggactctggtgcttgtacagtactaagtcaacatgtctgatgactcaaggactgtccctcaggagcagctcccgtctgatgacctccacccgccgccaatgccagtgatcaacctgggtcatctcaaccttgatccagcgatacgagcttgcgtggttgaagatatcaccaaagcatgccgtgatctaggatacttccagattataaaccatgggatcagtcaatctgtcatggatggagctgttgacgcagcttcagatttcttcaaactgccaagtgagacaaaggaagagtttgcatcagacgacctccgacggcctgttagatatgacaccagctcaaaggacggcattagtatgtcacgggcatacctaaagcattatgcccatcccctgagtgaatgggtacaatattggccggaaaaacccccaatctacagggagtatatgggaaattttgctactgaagtaaggagggtggccttgcaactaatggaagccatactagaaggcctaggattgggcaaggattaccagcatgagaaatttgagcaaggactgcagctaatgtcagtgaattgctacccgaaagaatcagaaggtgatacagcgatagggctggcgccgcattccgactatggattccttaccatcttgttcacaagttgtcgaggcctggaggtcgtcgaccgcaacagcaacagctggaaagtggtccagccactcccacatgcattgcatgtccacgtaggagaccacatggaagtcctgagcaatggcaaaatcaagactgttgtgcaccgagctgttctgaatcctgaagaggcaaggatctccatggctagcattaatggtttcgcaatgcatgagaaggtctccagcgccagagagctcgtgaatgagcagaatcctgaaaagtacaccgcgagcagttttaatgacttcctcgactatctcacaagcaatctggacaacaagcaccggaactttcttgagagccttaggatgcaaggggcgtagtagggtataatctccacccgaagcacaaaatgatacctgcgacagtttgtctctatgcctacaaccgttcatctctctatattacttttgatctgaaagtactgaagttgttgtgtgttgtcatgctgttttggacaaattatctgtaatattactttcgatctgaaggcactgaagttgttgtgtgtgccatgctgttttcccctttcacccccactacattattacgagtttgtattaggtaaggggaaatccatgatgtaaactttatctagtaagataagatactgtatgctgttagtt

SEQ ID NO: 62861 - protein, 328 aa, Triticum aestivum
  peptide (1)..(328): Ceres Seq. ID no. 12615908
MSDDSRTVPQEQLPSDDLHPPPMPVINLGHLNLDPAIRACVVEDITKACRDLGYFQIINHGISQSVMDGAVDAASDFFKLPSETKEEFASDDLRRPVRYDTSSKDGISMSRAYLKHYAHPLSEWVQYWPEKPPIYREYMGNFATEVRRVALQLMEAILEGLGLGKDYQHEKFEQGLQLMSVNCYPKESEGDTAIGLAPHSDYGFLTILFTSCRGLEVVDRNSNSWKVVQPLPHALHVHVGDHMEVLSNGKIKTVVHRAVLNPEEARISMASINGFAMHEKVSSARELVNEQNPEKYTASSFNDFLDYLTSNLDNKHRNFLESLRMQGA

SEQ ID NO: 62862 - protein, 306 aa, Triticum aestivum
  peptide (1)..(306): Ceres Seq. ID no. 12615909
MPVINLGHLNLDPAIRACVVEDITKACRDLGYFQIINHGISQSVMDGAVDAASDFFKLPSETKEEFASDDLRRPVRYDTSSKDGISMSRAYLKHYAHPLSEWVQYWPEKPPIYREYMGNFATEVRRVALQLMEAILEGLGLGKDYQHEKFEQGLQLMSVNCYPKESEGDTAIGLAPHSDYGFLTILFTSCRGLEVVDRNSNSWKVVQPLPHALHVHVGDHMEVLSNGKIKTVVHRAVLNPEEARISMASINGFAMHEKVSSARELVNEQNPEKYTASSFNDFLDYLTSNLDNKHRNFLESLRMQGA

SEQ ID NO: 62863 - protein, 262 aa, Triticum aestivum
  peptide (1)..(262): Ceres Seq. ID no. 12615910
MDGAVDAASDFFKLPSETKEEFASDDLRRPVRYDTSSKDGISMSRAYLKHYAHPLSEWVQYWPEKPPIYREYMGNFATEVRRVALQLMEAILEGLGLGKDYQHEKFEQGLQLMSVNCYPKESEGDTAIGLAPHSDYGFLTILFTSCRGLEVVDRNSNSWKVVQPLPHALHVHVGDHMEVLSNGKIKTVVHRAVLNPEEARISMASINGFAMHEKVSSARELVNEQNPEKYTASSFNDFLDYLTSNLDNKHRNFLESLRMQGA

SEQ ID NO: 62864 - DNA, 1449 bp, Triticum aestivum
  misc_feature (1)..(1449): Ceres Seq. ID no. 14303631
acgacgttcttcttccacttcccgccaaagaggagcttgcacaggtaaaacatcttgaaaaatctcaagggtgaacgaagtttcttggcgggcatgcagggcacgagagacatgtctgccaagggcggcaaggccctggtccagtcggacgcggggaagtatgtggcgtggtcgggcgtcgaccagccggagctcgctgcagaggggctcgggtgtggcttgctcctgctcaggccgctctccttcgcgctgccacactacgccgactgccacaagttcggctacgtcctccgaggctccggggtcgccggtgtcctcccggtcgccaccggggacgcctcccccgcggccagggagagggtcgtgcgcctcgaggccggcgacgtcatagccacgcgcactggggaggtctcgtggtggtacaacgacagcgacggcgatgcgggcgacctctcaatcgtgttcatgggcgacacggagcgcgctgtcagcccgggggacatgtcctacttctttctccccggcggcaacagcgtcctaggcggcttcgacgcgggcctcctcgccggggcatggcctggcgtgaccaaggagcaggccgccgccgtgttccggagccagccagccgtcctcctcaccgggctgagcaagaagctgcccggcgtccgcccgcgcgaggacgacaggaaacggctcgtcgtgaacgccggccaagtcgctgcaggaaccctgaagacgctcaccgcggccgacatggcggcgctgggcggcctggggatcagcgtggttctcggccggctcgagcccggcgccgcgcgcgcgccgtgggtgctacgcgagggtgcggcgcagttggtgtacgtggcacgcgggagcgcgcgcgtccaggtgtcttcttccgcgggcggcgagacgctgctgctggacgaggaggtcgccgcggggagcgtgttcgtcgtaccgcggttcgccgtgacgctcatctccgccggcgccgacggcgcacagtgggtctccctcatcaagagcgccaggcccgcggtggagcacctgaccggtgatggctcgatgctcggcggcctgaccgcgcaggtggtgcaggcgtcgctgagcgtggcgccggagttgctggagctgctcggagtccgcagcgccgagccgtcgcactgagcggtcggtgcacgcgttcgcgccgcggcgtccgttcactttccgtggcgtgtgtgtcccgtatgctccgttgacgtgcaccacacgattgtatttttatacgctgttacgtctctatacgtgcttacttacgtgaatgagcaaaataattgtgtgcattgttgtactcatatgagaccacaagtgtgttacccctcggcttgggttatatacgttgttacgtctcttacttacgtgcatgaggaaaataattctgcgcgttgttgtactcatatgtgc

SEQ ID NO: 62865 - protein, 358 aa, Triticum aestivum
  peptide (1)..(358): Ceres Seq. ID no. 14303632
MQGTRDMSAKGGKALVQSDAGKYVAWSGVDQPELAAEGLGCGLLLLRPLSFALPHYADCHKFGYVLRGSGVAGVLPVATGDASPAARERVVRLEAGDVIATRTGEVSWWYNDSDGDAGDLSIVFMGDTERAVSPGDMSYFFLPGGNSVLGGFDAGLLAGAWPGVTKEQAAAVFRSQPAVLLTGLSKKLPGVRPREDDRKRLVVNAGQVAAGTLKTLTAADMAALGGLGISVVLGRLEPGAARAPWVLREGAAQLVYVARGSARVQVSSSAGGETLLLDEEVAAGSVFVVPRFAVTLISAGADGAQWVSLIKSARPAVEHLTGDGSMLGGLTAQVVQASLSVAPELLELLGVRSAEPSH

SEQ ID NO: 62866 - protein, 352 aa, Triticum aestivum
  peptide (1)..(352): Ceres Seq. ID no. 14303633
MSAKGGKALVQSDAGKYVAWSGVDQPELAAEGLGCGLLLLRPLSFALPHYADCHKFGYVLRGSGVAGVLPVATGDASPAARERVVRLEAGDVIATRTGEVSWWYNDSDGDAGDLSIVFMGDTERAVSPGDMSYFFLPGGNSVLGGFDAGLLAGAWPGVTKEQAAAVFRSQPAVLLTGLSKKLPGVRPREDDRKRLVVNAGQVAAGTLKTLTAADMAALGGLGISVVLGRLEPGAARAPWVLREGAAQLVYVARGSARVQVSSSAGGETLLLDEEVAAGSVFVVPRFAVTLISAGADGAQWVSLIKSARPAVEHLTGDGSMLGGLTAQVVQASLSVAPELLELLGVRSAEPSH

SEQ ID NO: 62867 - protein, 234 aa, Triticum aestivum
  peptide (1)..(234): Ceres Seq. ID no. 14303634
MGDTERAVSPGDMSYFFLPGGNSVLGGFDAGLLAGAWPGVTKEQAAAVFRSQPAVLLTGLSKKLPGVRPREDDRKRLVVNAGQVAAGTLKTLTAADMAALGGLGISVVLGRLEPGAARAPWVLREGAAQLVYVARGSARVQVSSSAGGETLLLDEEVAAGSVFVVPRFAVTLISAGADGAQWVSLIKSARPAVEHLTGDGSMLGGLTAQVVQASLSVAPELLELLGVRSAEPSH

SEQ ID NO: 62868 - DNA, 1231 bp, Triticum aestivum
  misc_feature (1)..(1231): Ceres Seq. ID no. 13596891
gaacatcctaatcgaaaaactgttcaccggcagcttacctcacctcggcgagttccactccatccgccaaagacgctctctactccccggacggcggcaatggagcaagcgagcccgccggcggggtcggcgaggaacaggaaggtggtgctgcgggagtacatcagccgcgcgccgagggaggacgacatggcgctcgtcgacggcggcgccgtgccgctgcgcgtccccgagggcgccgccggcccggccgtgctggtgaagaacctctacctctcctgcgacccctacatgcgcggccggatgcgggacttccacggctcctacatccccccgttcaagcccggatctgttatagaagggctgggcgtggcgagagtggtggattccactcatccggggttcgttgccggtgacattgtttcgggaatgactggctgggaggaatacagcttgattgacaagcctgaacagctgaacaagattcagcaaagtggcataccactctcctactatttggggcttctcggcatgcctggttttacagcttatgttggattctatgaaatttgctcgccgaaggaaggagagtttgtctttgtttctgctgcatcgggagcagttggccagattgttggtcaacttgcaaagctccatggctgctatgttgtcggaagtgctggaacaaatgaaaaagttaaactcctaaaagataagtttggattcgatgcagcttttaattacaaagaggagcctgacttgactgcagccctaaaaaggtactttcctgaaggtatcgacatctacttcgagaatgtaggaggaccaatgctagatgctgtactccttaacatgcggatgcatggtcgcatagcagtatgtgggatggtctcccagcacggcatgactgatcctgcagggatccacaacctcttctgcctggtgccaaaacggattagtatgaagggcttcatccagagtgattacatcaacttattcccacagttcctcgattacatgaccaagcattacaaggatggcaagattgcatatgtagaagacatgagcattgggctagagaacacaccagctgcctttgttggtctattcagcggtaaaaatgtgggcaaacaagtcgtgtgtgtgtcacaagagtgaagtacgtgtacattctgatgaatatacaaatatctcatgattcaaataaataataaaaattgtgaaccctctc

SEQ ID NO: 62869 - protein, 385 aa, Triticum aestivum
  peptide (1)..(385): Ceres Seq. ID no. 15221991
EHPNRKTVHRQLTSPRRVPLHPPKTLSTPRTAAMEQASPPAGSARNRKVVLREYISRAPREDDMALVDGGAVPLRVPEGAAGPAVLVKNLYLSCDPYMRGRMRDFHGSYIPPFKPGSVIEGLGVARVVDSTHPGFVAGDIVSGMTGWEEYSLIDKPEQLNKIQQSGIPLSYYLGLLGMPGFTAYVGFYEICSPKEGEFVFVSAASGAVGQIVGQLAKLHGCYVVGSAGTNEKVKLLKDKFGFDAAFNYKEEPDLTAALKRYFPEGIDIYFENVGGPMLDAVLLNMRMHGRIAVCGMVSQHGMTDPAGIHNLFCLVPKRISMKGFIQSDYINLFPQFLDYMTKHYKDGKIAYVEDMSIGLENTPAAFVGLFSGKNVGKQVVCVSQE

SEQ ID NO: 62870 - protein, 352 aa, Triticum aestivum
  peptide (1)..(352): Ceres Seq. ID no. 15221992
MEQASPPAGSARNRKVVLREYISRAPREDDMALVDGGAVPLRVPEGAAGPAVLVKNLYLSCDPYMRGRMRDFHGSYIPPFKPGSVIEGLGVARVVDSTHPGFVAGDIVSGMTGWEEYSLIDKPEQLNKIQQSGIPLSYYLGLLGMPGFTAYVGFYEICSPKEGEFVFVSAASGAVGQIVGQLAKLHGCYVVGSAGTNEKVKLLKDKFGFDAAFNYKEEPDLTAALKRYFPEGIDIYFENVGGPMLDAVLLNMRMHGRIAVCGMVSQHGMTDPAGIHNLFCLVPKRISMKGFIQSDYINLFPQFLDYMTKHYKDGKIAYVEDMSIGLENTPAAFVGLFSGKNVGKQVVCVSQE

SEQ ID NO: 62871 - protein, 322 aa, Triticum aestivum
  peptide (1)..(322): Ceres Seq. ID no. 15221993
MALVDGGAVPLRVPEGAAGPAVLVKNLYLSCDPYMRGRMRDFHGSYIPPFKPGSVIEGLGVARVVDSTHPGFVAGDIVSGMTGWEEYSLIDKPEQLNKIQQSGIPLSYYLGLLGMPGFTAYVGFYEICSPKEGEFVFVSAASGAVGQIVGQLAKLHGCYVVGSAGTNEKVKLLKDKFGFDAAFNYKEEPDLTAALKRYFPEGIDIYFENVGGPMLDAVLLNMRMHGRIAVCGMVSQHGMTDPAGIHNLFCLVPKRISMKGFIQSDYINLFPQFLDYMTKHYKDGKIAYVEDMSIGLENTPAAFVGLFSGKNVGKQVVCVSQE

SEQ ID NO: 62872 - DNA, 1230 bp, Triticum aestivum
  misc_feature (1)..(1230): Ceres Seq. ID no. 12598859
actcacaaatagcaccatacacgacacggacacgtacgcaaaaccttcttcccaaatctaaacccctctcttctccaaatggccaagagaaacctcctcctcctcctggcgctaatggcgctcgccacaagcatggaagccgcgtcggctaccacgagcacgaggaagctcatgttcctggtccagcccaagccgaacctcctcacgtaccacaacggcgccgtgctgcacggcgacatccccgtctccgtcctctggtatggccgcttcacggcggcgcagaaggccatcgtatccgacttcctcctctccctctcctccgcgccgcgcgcgtccccggcgccgtccgtgtcccagtggtggagcagcatccaccagctgtacctctccaaggcggcggccgtcggcaagcacggcgccggcgccaccaaggccgcccgggtggtcctgtccggccaggtctccgacgaggcgtgctcgctcgggaagagcctgaagctgtcccagctcccggcgctggcggcgaaggcgaggcccgccaagggcggtatcgcgctggtgctcacagcgcaggacgtgggcgtggagggcttctgcatgagccggtgcggccggcacgggaccgtggacgccaagtccggcacggcctacgtgtgggccggcaacccggcgacgcagtgcgccgggcagtgcgcgtggccgttccaccagccggcgtacgggccgcaggcgccgccgctggccgcgccgaacggcgacgtgggcatggacgggctcatcatcaacgtggcgagcatggtggccggcgcggtgaccaacccgttcggcgacgggttctaccagggggagcgcgaggcgccgctggaggccgcgacggcgtgcccgggggtgtacggcaagggcgcgtaccccgggtacgccggccagctgctggtggacggcgccaccggagcgagctacaacgcccacggtgcgcacgggaggaagtacctgctcccggcgctgttcgaccccgccacctcggcctgctccacgctggtgtaggagtacggcggcacagtggtagcgacaagtgatgtcagtccaatccgctagctgcccgtctagccaagagtgtattgggtacaactagtactgtaccgtagtgcatatatgtgtaaatagttcgtatatgagcttgtgtttggatcttctcatgctaaataaaaaatgtaaatcagcctttgtact

SEQ ID NO: 62873 - protein, 357 aa, Triticum aestivum
  peptide (1)..(357): Ceres Seq. ID no. 12598860
SQIAPYTTRTRTQNLLPKSKPLSSPNGQEKPPPPPGANGARHKHGSRVGYHEHEEAHVPGPAQAEPPHVPQRRRAARRHPRLRPLVWPLHGGAEGHRIRLPPLPLLRAARVPGAVRVPVVEQHPPAVPLQGGGRRQARRRRHQGRPGGPVRPGLRRGVLAREEPEAVPAPGAGGEGEARQGRYRAGAHSAGRGRGGLLHEPVRPARDRGRQVRHGLRVGRQPGDAVRRAVRVAVPPAGVRAAGAAAGRAERRRGHGRAHHQRGEHGGRRGDQPVRRRVLPGGARGAAGGRDGVPGGVRQGRVPRVRRPAAGGRRHRSELQRPRCAREEVPAPGAVRPRHLGLLHAGVGVRRHSGSDK

SEQ ID NO: 62874 - protein, 321 aa, Triticum aestivum
  peptide (1)..(321): Ceres Seq. ID no. 12598861
MAKRNLLLLLALMALATSMEAASATTSTRKLMFLVQPKPNLLTYHNGAVLHGDIPVSVLWYGRFTAAQKAIVSDFLLSLSSAPRASPAPSVSQWWSSIHQLYLSKAAAVGKHGAGATKAARVVLSGQVSDEACSLGKSLKLSQLPALAAKARPAKGGIALVLTAQDVGVEGFCMSRCGRHGTVDAKSGTAYVWAGNPATQCAGQCAWPFHQPAYGPQAPPLAAPNGDVGMDGLIINVASMVAGAVTNPFGDGFYQGEREAPLEAATACPGVYGKGAYPGYAGQLLVDGATGASYNAHGAHGRKYLLPALFDPATSACSTLV

SEQ ID NO: 62875 - protein, 309 aa, Triticum aestivum
  peptide (1)..(309): Ceres Seq. ID no. 12598862
MALATSMEAASATTSTRKLMFLVQPKPNLLTYHNGAVLHGDIPVSVLWYGRFTAAQKAIVSDFLLSLSSAPRASPAPSVSQWWSSIHQLYLSKAAAVGKHGAGATKAARVVLSGQVSDEACSLGKSLKLSQLPALAAKARPAKGGIALVLTAQDVGVEGFCMSRCGRHGTVDAKSGTAYVWAGNPATQCAGQCAWPFHQPAYGPQAPPLAAPNGDVGMDGLIINVASMVAGAVTNPFGDGFYQGEREAPLEAATACPGVYGKGAYPGYAGQLLVDGATGASYNAHGAHGRKYLLPALFDPATSACSTLV

SEQ ID NO: 62876 - DNA, 1476 bp, Triticum aestivum
  misc_feature (1)..(1476): Ceres Seq. ID no. 13596625
aaaaatcctcctcgcgtcacgcgtgaacccagccggatccccaaacctccttccggtccgacgcctcgtgccgccggcgccgacgggggacccctccgcctctcacgcgtgccgccgcccccgccgtcgccgtcccgtctccctcgccggggcatcgcgttccaccccgccggcgactaggaacacggcaccctgaagctcctgagctagagtaggaggggcaaaccatccagctgaagaatgaaaacacatgagcgtgctgccaacttggctcttgctggtttgagcttggcaccgctcgtgatcaatgtgaacccaaatttgaatgtgatactgacagcatgtcttactgtctatgtgggctgttaccgttctgtcaagtcaactccacccgctgagacaatgtccaaagagcatgctatgcggttccctttggtggggagtgctatgcttctgtcgctattccttctattcaagtttctctccaaggacctggtcaatactgttctcactgcctactttttcattcttggcattgctgcgctctgtgcaacgttgctccctaccgtcaaacgttttcttccagaaggatggaatgataatgccatcgtctggcgtgctccatatttccactcactgtcggtggagtttaccaagtctcaagttgtcgcttcagtccctggttttttcttttgcgtatggtatgccatgaagaagcattggctagcaaacaatgttttgggacttgctttctgcattcagggaattgagatgttatcactaggatcattcaaaaccggtggtattctcttggctggactttttgtgtatgacattttctgggttttcttcactccagttatggtcagtgttgctaaatcatttgatgctccaataaagcttctatttcccaccgcggatgccgcacggccgttctctatgcttggtcttggtgatattgttatacctggtatatttgttgcacttgcactccgtttcgatgtctcgagaaacattaagaaccgttacttcaatagtgcatttttgggatacactgcgggcatgacagtaacaatcgttgtgatgaactggtttcaagctgcacagcctgctctgctatacatcgttcctggcgtgactggttttgtggctgttcactctttgtggaatggtgaagtaaagccgctactggagttcaccgagacgcagcccgaggagggagccgccgaggaagaagaagattccagtcagagcaaaaaggtggactagcgctcgctcgggtcgggtcgggtctttttaattaattaggagaggagaaccaaaccaaagcaggatttcaaataggctgtatgatcttgagaatcgaaaaacgattcacatgatagaactctttttgttttgaaaggtcattaactatctgttttggtgagtggtagatgatggacgaaaagggaacatatatgctaaaagacttgc

SEQ ID NO: 62877 - protein, 342 aa, Triticum aestivum
  peptide (1)..(342): Ceres Seq. ID no. 13596626
MKTHERAANLALAGLSLAPLVINVNPNLNVILTACLTVYVGCYRSVKSTPPAETMSKEHAMRFPLVGSAMLLSLFLLFKFLSKDLVNTVLTAYFFILGIAALCATLLPTVKRFLPEGWNDNAIVWRAPYFHSLSVEFTKSQVVASVPGFFFCVWYAMKKHWLANNVLGLAFCIQGIEMLSLGSFKTGGILLAGLFVYDIFWVFFTPVMVSVAKSFDAPIKLLFPTADAARPFSMLGLGDIVIPGIFVALALRFDVSRNIKNRYFNSAFLGYTAGMTVTIVVMNWFQAAQPALLYIVPGVTGFVAVHSLWNGEVKPLLEFTETQPEEGAAEEEEDSSQSKKVD

SEQ ID NO: 62878 - protein, 288 aa, Triticum aestivum
  peptide (1)..(288): Ceres Seq. ID no. 13596627
MSKEHAMRFPLVGSAMLLSLFLLFKFLSKDLVNTVLTAYFFILGIAALCATLLPTVKRFLPEGWNDNAIVWRAPYFHSLSVEFTKSQVVASVPGFFFCVWYAMKKHWLANNVLGLAFCIQGIEMLSLGSFKTGGILLAGLFVYDIFWVFFTPVMVSVAKSFDAPIKLLFPTADAARPFSMLGLGDIVIPGIFVALALRFDVSRNIKNRYFNSAFLGYTAGMTVTIVVMNWFQAAQPALLYIVPGVTGFVAVHSLWNGEVKPLLEFTETQPEEGAAEEEEDSSQSKKVD

SEQ ID NO: 62879 - protein, 282 aa, Triticum aestivum
  peptide (1)..(282): Ceres Seq. ID no. 13596628
MRFPLVGSAMLLSLFLLFKFLSKDLVNTVLTAYFFILGIAALCATLLPTVKRFLPEGWNDNAIVWRAPYFHSLSVEFTKSQVVASVPGFFFCVWYAMKKHWLANNVLGLAFCIQGIEMLSLGSFKTGGILLAGLFVYDIFWVFFTPVMVSVAKSFDAPIKLLFPTADAARPFSMLGLGDIVIPGIFVALALRFDVSRNIKNRYFNSAFLGYTAGMTVTIVVMNWFQAAQPALLYIVPGVTGFVAVHSLWNGEVKPLLEFTETQPEEGAAEEEEDSSQSKKVD

SEQ ID NO: 62880 - DNA, 1207 bp, Triticum aestivum
  misc_feature (1)..(1207): Ceres Seq. ID no. 12615854
aacaacagccaatccatcccatggaataataaagaaactggggcaccccactgcgtggccggtggcgaccgacggcgacccccgccctcaccgtaccctgctacgctccggcgagtccggccgaccgcctccgccacctttcgccgcacggcgtgaccgagtggacgggctcgacggcgggcatcggccggcgcgcgagggcgggagggatcggcgatgagcttcgcggatctggagtccggggcgctgcaggcgccccggagggggaggggcgccgacgccacgcgcgcgctcgtcttccagatcaccaccgcggtgtcctcctaccgccgcctcctcaactcgctcggcacgcccaaggacacgcccgccctccgtgatcagctgcagaagactagtcataaagtcctgcaattggcgaaggatgcgaaggagaaactgacgagtgctgctgaagcagacaagagcactggaactagtgcagacaagcgggtagccgacatgaagcttgccaaagattttgctgcgacgatggaggaattcaggaaacttcagaatcttgcaattcagagggagatggcatataagccggttgttccccagggtgctcagccaagctatactatgaatgatggaagatctgattttgataaaatgcctgaacagcgcgcattgcttgcagaaccaaacaggctagaggtgttgcaattggataatgaaattgttttcaatgaggctatcatcgaggaaagggaccaggcgattcaagacatccaacagcagattggtgaagtacatgaagcatttaaggatcttgctacgctcgtgcattcgcaaggaggcataatagaggaagtcgacagcaacattgaaaactctgcagccgcgaccagtgaagcgaagaaagaaatcggcaaagcgtccaagactcagaagtcaaattcatccttgctttgcctgcttatggtgatctttggggttgttttgcttatcgtgataatagttttggcatcttgagacacggatgcttagaggcctattggtgcactctgaggagccatattacgtgcaagattaatcctcgctgtgcgccgaagactgtcgctaactgaagtgtacattttctttttctcccctcttttttccttgtggtttgttagtgcgtattcttatgtggcgtgagtcctttttttttccagcggcttgc

SEQ ID NO: 62881 - protein, 266 aa, Triticum aestivum
  peptide (1)..(266): Ceres Seq. ID no. 12615855
MSFADLESGALQAPRRGRGADATRALVFQITTAVSSYRRLLNSLGTPKDTPALRDQLQKTSHKVLQLAKDAKEKLTSAAEADKSTGTSADKRVADMKLAKDFAATMEEFRKLQNLAIQREMAYKPVVPQGAQPSYTMNDGRSDFDKMPEQRALLAEPNRLEVLQLDNEIVFNEAIIEERDQAIQDIQQQIGEVHEAFKDLATLVHSQGGIIEEVDSNIENSAAATSEAKKEIGKASKTQKSNSSLLCLLMVIFGVVLLIVIIVLAS

SEQ ID NO: 62882 - protein, 171 aa, Triticum aestivum
  peptide (1)..(171): Ceres Seq. ID no. 12615856
MKLAKDFAATMEEFRKLQNLAIQREMAYKPVVPQGAQPSYTMNDGRSDFDKMPEQRALLAEPNRLEVLQLDNEIVFNEAIIEERDQAIQDIQQQIGEVHEAFKDLATLVHSQGGIIEEVDSNIENSAAATSEAKKEIGKASKTQKSNSSLLCLLMVIFGVVLLIVIIVLAS

SEQ ID NO: 62883 - protein, 161 aa, Triticum aestivum
  peptide (1)..(161): Ceres Seq. ID no. 12615857
MEEFRKLQNLAIQREMAYKPVVPQGAQPSYTMNDGRSDFDKMPEQRALLAEPNRLEVLQLDNEIVFNEAIIEERDQAIQDIQQQIGEVHEAFKDLATLVHSQGGIIEEVDSNIENSAAATSEAKKEIGKASKTQKSNSSLLCLLMVIFGVVLLIVIIVLAS

SEQ ID NO: 62884 - DNA, 1377 bp, Triticum aestivum
  misc_feature (1)..(1377): Ceres Seq. ID no. 13662567
cccgccccgccccgccccttccctccctcccttcctcccccaaattcgcccaacaccttcggaaccccaatggcgagctttaacgccgccggcgccggcgccgccaaccccaaccctaacaaatccctcgaggtgcgtgcgcttggccaatactgttgcccttggtctaaatggctaaaacctaatgtgtgggtcgattcgaccggggactgccttcgtttcgtgcaggtgaatccggcgcccggggactcggtttccagcctcagcttcagccccaaggcgaaccacctaattgccacctcctgggacaaccaggttcggtgctgggaggttcagcctggcggccaatgccaggcgaaggcgtctatttcgcacgatcagccagtcttgtgctctgcctggaaggatgacgggactactgttttttcgggaggttgtgacaaagtggtgaagatgtggccgctgctgtctggcggccaggccacggccttctcagggcatgaggcgccggtcaaagaactcgcctggataccacagatgagccttcttgtcagtgggtcttgggataagactctgaggtactgggacattcggcaacctaatccagctcatgttcagcaacttccggagcgctgctatgcactctcacttagttatcctctaatggcggtcggtactgctgatcgcaacgtagttatcttcaatctgcagaatccacaggctgaattcaagaggatcgtgtcacctttgaaattccagacaaggtgtatcgccgccttccctgatcaacaaggattcttggttggatcaatagagggacgcgttggtgttcatcatgtagatgattctaatcaaagcaagaatttcacattcaaatgtcaccgcgagggcaatgatatattctctgttaactcgctgaactttcatcctgtgcaccatacatttgctactgcaggctctgatggaggtttcaacttttgggacaaggacagtaaacaaagactgaaggcttttagtaagtgcccatcacccatcacatgcagcacatttaatcaggatggctcaatctttgcttatgcggtatgctatgattggagcaagggtgccgagaagcataatccttctactgcaaagacaaatatctttctgcatagcgtgcaggaatctgatgtcaaaggaaagccccgtactggaaaaaagtagacttggaaatggcaagctgcagatctgtgctccgaacctgatgagtttgccgtcgcttgatgctaattacccgcacgagtgttttaatcttttagatcttgactctgtagggcattccttcatctctgagactgcaggcgtatcttctataatgtttaaacacaataaagtggg

SEQ ID NO: 62885 - protein, 400 aa, Triticum aestivum
  peptide (1)..(400): Ceres Seq. ID no. 13662568
PAPPRPFPPSLPPPNSPNTFGTPMASFNAAGAGAANPNPNKSLEVRALGQYCCPWSKWLKPNVWVDSTGDCLRFVQVNPAPGDSVSSLSFSPKANHLIATSWDNQVRCWEVQPGGQCQAKASISHDQPVLCSAWKDDGTTVFSGGCDKVVKMWPLLSGGQATAFSGHEAPVKELAWIPQMSLLVSGSWDKTLRYWDIRQPNPAHVQQLPERCYALSLSYPLMAVGTADRNVVIFNLQNPQAEFKRIVSPLKFQTRCIAAFPDQQGFLVGSIEGRVGVHHVDDSNQSKNFTFKCHREGNDIFSVNSLNFHPVHHTFATAGSDGGFNFWDKDSKQRLKAFSKCPSPITCSTFNQDGSIFAYAVCYDWSKGAEKHNPSTAKTNIFLHSVQESDVKGKPRTGKK

SEQ ID NO: 62886 - protein, 377 aa, Triticum aestivum
  peptide (1)..(377): Ceres Seq. ID no. 13662569
MASFNAAGAGAANPNPNKSLEVRALGQYCCPWSKWLKPNVWVDSTGDCLRFVQVNPAPGDSVSSLSFSPKANHLIATSWDNQVRCWEVQPGGQCQAKASISHDQPVLCSAWKDDGTTVFSGGCDKVVKMWPLLSGGQATAFSGHEAPVKELAWIPQMSLLVSGSWDKTLRYWDIRQPNPAHVQQLPERCYALSLSYPLMAVGTADRNVVIFNLQNPQAEFKRIVSPLKFQTRCIAAFPDQQGFLVGSIEGRVGVHHVDDSNQSKNFTFKCHREGNDIFSVNSLNFHPVHHTFATAGSDGGFNFWDKDSKQRLKAFSKCPSPITCSTFNQDGSIFAYAVCYDWSKGAEKHNPSTAKTNIFLHSVQESDVKGKPRTGKK

SEQ ID NO: 62887 - protein, 249 aa, Triticum aestivum
  peptide (1)..(249): Ceres Seq. ID no. 13662570
MWPLLSGGQATAFSGHEAPVKELAWIPQMSLLVSGSWDKTLRYWDIRQPNPAHVQQLPERCYALSLSYPLMAVGTADRNVVIFNLQNPQAEFKRIVSPLKFQTRCIAAFPDQQGFLVGSIEGRVGVHHVDDSNQSKNFTFKCHREGNDIFSVNSLNFHPVHHTFATAGSDGGFNFWDKDSKQRLKAFSKCPSPITCSTFNQDGSIFAYAVCYDWSKGAEKHNPSTAKTNIFLHSVQESDVKGKPRTGKK

SEQ ID NO: 62888 - DNA, 1293 bp, Triticum aestivum
  misc_feature (1)..(1293): Ceres Seq. ID no. 13655251
tttttctcccgccctcgcaaccacctcccctcccctgtcctgccgagagtctcttctcttctcgtctctcgtcgcctcccgagtctccggcgaccacgccaactagacggccatggagcaaggcgccgactccgcggcggcgaggcggatggccagggtcgcctcccacctccgcccgcccacctcgcagatggaggaggtggccatcttgaagggctctgattgccgtgcaaaaggtgcggcaccagggttcaaggtcgcagtcctgggtgcatctggtggaattggccagccgctctcgctgctcatgaagatgaaccctcttgtttcggtgctccatttatatgatgttgtcaacacacctggtgtcacagctgacattagccacatgaacaccggtgctgtggtgcgtggcttcttgggtcagtcacaattggaaagtgctcttactggaatggatcttgtgatcattcctgctggcattcctcggaaacctgggatgacaagggatgatttgttcaacatcaatgccgggattgttcggactctttgtgagggaattgcaaaatgctgcccaaatgcgattgtgaatgtgatcagtaaccctgtaaattctaccgttccgatcgctgctgaagtatttaaaaaagctggaacatatgatcctaagcgcctattgggggtgacaacacttgatgtagtgagagccaatacctttgtgggagaggttcttggacttgaccccagagatgtcaatgttcctgttgttggtgggcatgcaggagttacgatattaccactcctttcacaggtgaatcctccctgctcgtttacctcagaagaaattagttatctcacttctcgcatacagaatggtgggacagaagtagttgaggccaaagcaggagcaggatccgcgactctttccatggcctacgcagcagccaaattcgcggacgcgtgcctgagagggctgcgcggcgacgccgggatagtggagtgctcttacatagcctgtcaggtgacggagctgcccttcttcgcgtccaaggtgcggctgggccggtcgggcgtcgaggaggtcctgccgctcggcccgctgaacgagtttgagagggcggggctggagaaggccaagggcgagctggccgagagcatccacaagggcgtcgcctttgccaacaagtgaagtgaagacaagagaagagaaatctttcgccccagcatagaaatctgagatgcctcttgcttcctgggagcaacggtcgccgtgtcattgtctcatctccctgt

SEQ ID NO: 62889 - protein, 358 aa, Triticum aestivum
  peptide (1)..(358): Ceres Seq. ID no. 13655252
MEQGADSAAARRMARVASHLRPPTSQMEEVAILKGSDCRAKGAAPGFKVAVLGASGGIGQPLSLLMKMNPLVSVLHLYDVVNTPGVTADISHMNTGAVVRGFLGQSQLESALTGMDLVIIPAGIPRKPGMTRDDLFNINAGIVRTLCEGIAKCCPNAIVNVISNPVNSTVPIAAEVFKKAGTYDPKRLLGVTTLDVVRANTFVGEVLGLDPRDVNVPVVGGHAGVTILPLLSQVNPPCSFTSEEISYLTSRIQNGGTEVVEAKAGAGSATLSMAYAAAKFADACLRGLRGDAGIVECSYIACQVTELPFFASKVRLGRSGVEEVLPLGPLNEFERAGLEKAKGELAESIHKGVAFANK

SEQ ID NO: 62890 - protein, 346 aa, Triticum aestivum
  peptide (1)..(346): Ceres Seq. ID no. 13655253
MARVASHLRPPTSQMEEVAILKGSDCRAKGAAPGFKVAVLGASGGIGQPLSLLMKMNPLVSVLHLYDVVNTPGVTADISHMNTGAVVRGFLGQSQLESALTGMDLVIIPAGIPRKPGMTRDDLFNINAGIVRTLCEGIAKCCPNAIVNVISNPVNSTVPIAAEVFKKAGTYDPKRLLGVTTLDVVRANTFVGEVLGLDPRDVNVPVVGGHAGVTILPLLSQVNPPCSFTSEEISYLTSRIQNGGTEVVEAKAGAGSATLSMAYAAAKFADACLRGLRGDAGIVECSYIACQVTELPFFASKVRLGRSGVEEVLPLGPLNEFERAGLEKAKGELAESIHKGVAFANK

SEQ ID NO: 62891 - protein, 332 aa, Triticum aestivum
  peptide (1)..(332): Ceres Seq. ID no. 13655254
MEEVAILKGSDCRAKGAAPGFKVAVLGASGGIGQPLSLLMKMNPLVSVLHLYDVVNTPGVTADISHMNTGAVVRGFLGQSQLESALTGMDLVIIPAGIPRKPGMTRDDLFNINAGIVRTLCEGIAKCCPNAIVNVISNPVNSTVPIAAEVFKKAGTYDPKRLLGVTTLDVVRANTFVGEVLGLDPRDVNVPVVGGHAGVTILPLLSQVNPPCSFTSEEISYLTSRIQNGGTEVVEAKAGAGSATLSMAYAAAKFADACLRGLRGDAGIVECSYIACQVTELPFFASKVRLGRSGVEEVLPLGPLNEFERAGLEKAKGELAESIHKGVAFANK

SEQ ID NO: 62892 - DNA, 1264 bp, Triticum aestivum
  misc_feature (1)..(1264): Ceres Seq. ID no. 13655237
aaggattcatctcgtttacctcttctctgcaaggatccctcgagtattcccctcaagctcctcagaaatggcgaccggaagtaatagtagtagccaagagagcaagcagccaggccccgagctgcccaagcagctgccgttcgattttctcaagaaaatcaccaacgatttcggccaagaccggaagataagcggaagccccttcggcacactctacaaggggattgtgccagatgacggcagagtgattgccgtgaagaaacttcaggagaacgcgccaatgccagcagataagcagttcaacagagaggtccagaatgtgatgtccctcaagcatgagaacatagtggagcttgtcgggttctgctgcgaaacgcagaagaaactggtgcagtttgataagagatacatccaggcggacatcaccgaaagcttaatctgctatgagtatttacctaatgggagccttcaggagaatctttttgagcccaaggggtccactaaaccagaaattggttgggacgtacgcttcaaaataatcaaggggatttgccaaggcttacgttttctacacaagttggatattcccattgtccatatggatttgaagcctgagaatatactgttggatgcaaatatggtgccaaagatagcggattttgcactctcaagggtctttggccaagaacaaaccagactctgcacgcaaacagttgtcggatcatatgggtacatggctccagaatatctttacagaggtgaaatatcagcccagtcagacatatacagtttaggcctagtgataattgagatcaccactggagagcagaatcctcgcgaaaaagaccaaccatctgcaagaagttttgttgataaagtgcgtaaagaatggacgctggagaacataacatccaaatattcatcactggatcatgaaagcctccaacaagttaaaacatgcattgatatcgggtcaaactgtgttgagattgataggacaaaaagacctcgcatagaagaaattgttgactcgctcaacggactacgttcaagccaaaaagttaccgaggtctcccgtccgcctacaactggcaagaagctaatgggctccatttttggtctgaagaaatgaaacatgcacgcctgttactgctggaagattgtaactttaatttggaaataggagcctttgttgccatctcgtcctggaagcatttaagtgtaattttcttatgtgtaatatgtctttttattactattagtc

SEQ ID NO: 62893 - protein, 376 aa, Triticum aestivum
  peptide (1)..(376): Ceres Seq. ID no. 13655238
RIHLVYLFSARIPRVFPSSSSEMATGSNSSSQESKQPGPELPKQLPFDFLKKITNDFGQDRKISGSPFGTLYKGIVPDDGRVIAVKKLQENAPMPADKQFNREVQNVMSLKHENIVELVGFCCETQKKLVQFDKRYIQADITESLICYEYLPNGSLQENLFEPKGSTKPEIGWDVRFKIIKGICQGLRFLHKLDIPIVHMDLKPENILLDANMVPKIADFALSRVFGQEQTRLCTQTVVGSYGYMAPEYLYRGEISAQSDIYSLGLVIIEITTGEQNPREKDQPSARSFVDKVRKEWTLENITSKYSSLDHESLQQVKTCIDIGSNCVEIDRTKRPRIEEIVDSLNGLRSSQKVTEVSRPPTTGKKLMGSIFGLKK

SEQ ID NO: 62894 - protein, 354 aa, Triticum aestivum
  peptide (1)..(354): Ceres Seq. ID no. 13655239
MATGSNSSSQESKQPGPELPKQLPFDFLKKITNDFGQDRKISGSPFGTLYKGIVPDDGRVIAVKKLQENAPMPADKQFNREVQNVMSLKHENIVELVGFCCETQKKLVQFDKRYIQADITESLICYEYLPNGSLQENLFEPKGSTKPEIGWDVRFKIIKGICQGLRFLHKLDIPIVHMDLKPENILLDANMVPKIADFALSRVFGQEQTRLCTQTVVGSYGYMAPEYLYRGEISAQSDIYSLGLVIIEITTGEQNPREKDQPSARSFVDKVRKEWTLENITSKYSSLDHESLQQVKTCIDIGSNCVEIDRTKRPRIEEIVDSLNGLRSSQKVTEVSRPPTTGKKLMGSIFGLKK

SEQ ID NO: 62895 - protein, 283 aa, Triticum aestivum
  peptide (1)..(283): Ceres Seq. ID no. 13655240
MPADKQFNREVQNVMSLKHENIVELVGFCCETQKKLVQFDKRYIQADITESLICYEYLPNGSLQENLFEPKGSTKPEIGWDVRFKIIKGICQGLRFLHKLDIPIVHMDLKPENILLDANMVPKIADFALSRVFGQEQTRLCTQTVVGSYGYMAPEYLYRGEISAQSDIYSLGLVIIEITTGEQNPREKDQPSARSFVDKVRKEWTLENITSKYSSLDHESLQQVKTCIDIGSNCVEIDRTKRPRIEEIVDSLNGLRSSQKVTEVSRPPTTGKKLMGSIFGLKK

SEQ ID NO: 62896 - DNA, 1230 bp, Triticum aestivum
  misc_feature (1)..(1230): Ceres Seq. ID no. 13655124
acacccttccagctcgcgacgccacctgagacctgaccacctcggctgctactgctagacgggcacggcctcgccgactccttcttccatcagggttcgacagctcacccttttggatccaagttcaggtttgatctgtgaggaagttcaactctgcagtgctgttccgaatcggaagcttgatcatggaaggagccactcccacttccgctccctcgagcacaaggattgctgtggtcaccggcgggagcaaagggatcgggctggaggcgtgcaagcagctggcaggcggcggcgccatcaccgttgttctgacggccaggaacgagacgaggggaacagcggcggtcgagcagatcaagcggctggggcacgcagatgtcatctttcatcagctggacatcacggatgcttccagcatcgctcgactcgcagatttcctcaagacccgtttcgggaagcttgacatcctggtgaataacgccgcgacggatgggattgagcatgtcattgatccagtttatggcttaacgcccggcgatgaaacgttcaatggcatggacgcgggccagaggatcaattggatgtggaccagctgccgccagacgtacgagaccgcgaaacagggcctgcagacaaactactacggcacgaagcgggtgacggaggctctcctgcccctgctccgatcctcgtccgacggaaggatcgtcaacgtctcctccaacttcggattgctcagctttttcaggaacgaggagctgaagcaggagctgaacgacgtcgacagcctgaccgagkgagaggctggacgagctgctggccatgttcctcaaggacttcgaggccggcggcgcggaggcgcgcgggtggccggccgagttctcggcgtacaaggtggccaaggccgccatgaacgcctactcgagaatcctggccaagaggcacccggagctgcgcgtcaactgcgcgcaccccggctacgtgaagacggatatcaccaggaactccgggatcctgacgccggaggagggcgcgcgcaacatcaccagcgttgcgctgctgccggaaggcgggcccaccggcaagtacttctccgaaggcgaggaggcatccttcgtgtgaaagagcatctgtagtactactgttttgttgcgcttatctgtggtgtgtggtgggataatctgcaaagtcgagttcaaaaaaaggaataaagttacgttagtttgg

SEQ ID NO: 62897 - protein, 317 aa, Triticum aestivum
  peptide (1)..(317): Ceres Seq. ID no. 15219205
  misc_feature (206)..(206): Xaa is any aa, unknown or other
MEGATPTSAPSSTRIAVVTGGSKGIGLEACKQLAGGGAITVVLTARNETRGTAAVEQIKRLGHADVIFHQLDITDASSIARLADFLKTRFGKLDILVNNAATDGIEHVIDPVYGLTPGDETFNGMDAGQRINWMWTSCRQTYETAKQGLQTNYYGTKRVTEALLPLLRSSSDGRIVNVSSNFGLLSFFRNEELKQELNDVDSLTEXEAGRAAGHVPQGLRGRRRGGARVAGRVLGVQGGQGRHERLLENPGQEAPGAARQLRAPRLREDGYHQELRDPDAGGGRAQHHQRCAAAGRRAHRQVLLRRRGGILRVKEHL

SEQ ID NO: 62898 - protein, 193 aa, Triticum aestivum
  peptide (1)..(193): Ceres Seq. ID no. 15219206
  misc_feature (82)..(82): Xaa is any aa, unknown or other
MDAGQRINWMWTSCRQTYETAKQGLQTNYYGTKRVTEALLPLLRSSSDGRIVNVSSNFGLLSFFRNEELKQELNDVDSLTEXEAGRAAGHVPQGLRGRRRGGARVAGRVLGVQGGQGRHERLLENPGQEAPGAARQLRAPRLREDGYHQELRDPDAGGGRAQHHQRCAAAGRRAHRQVLLRRRGGILRVKEHL

SEQ ID NO: 62899 - protein, 184 aa, Triticum aestivum
  peptide (1)..(184): Ceres Seq. ID no. 15219207
  misc_feature (73)..(73): Xaa is any aa, unknown or other
MWTSCRQTYETAKQGLQTNYYGTKRVTEALLPLLRSSSDGRIVNVSSNFGLLSFFRNEELKQELNDVDSLTEXEAGRAAGHVPQGLRGRRRGGARVAGRVLGVQGGQGRHERLLENPGQEAPGAARQLRAPRLREDGYHQELRDPDAGGGRAQHHQRCAAAGRRAHRQVLLRRRGGILRVKEHL

SEQ ID NO: 62900 - DNA, 1318 bp, Triticum aestivum
  misc_feature (1)..(1318): Ceres Seq. ID no. 13596892
aagcttcttctgtgtcttccagcttgggcagcaggcaggcgtgtgagctcgaatccaagaggccggagacgatggatctggtgaacggcgcgctcaactgggcggcgatgcccgccatggtcgcctccctcctgctcttctacccgccctactacctcttcaagctctgctactccttcctctcctacctcttccccgacgacctcaagcgcaaggtcgtcctcatcaccggcgcctcctccggcatcggcgagcaactggcctaccagtacgccaccaagggggcatgccttgccctgctcgccaggagggagtggagcctgcggcaggtcgccgaccgcgccttcgagctcggcgcgcccgacgtcatcattctccccggcgacgtcgcagaccccgacgactgcaacagatttgttcaggccacaatcgaccactacggccgattggaccatcttgtgtgcaacgctggaattgcgagcgtgggcgcttttcaggagattcctgacgttactaactacagcccgcagcttgatgtcaacttctggggtgcagttcagtccacttttgctgctctgccccatcttaaaaggacccgagggaggatcgtggtcaccgcctccgcaaccggatggaaccctgttccgcgaatggttttctataatgccgccaatgccgcactgattaacttcttcgagaccctacggtcggagcttggtagtgaagttggcatcacaatagtgacgcctgggtggatcgagtccgagatgtccaaaggcaagtttctcaaggagcacggcggcgtggaggttgatcaagaatatcgagatgcccaaatcggtctcttcccggtggagtacgcgaagaactgcgcgagggccatggtgcaggcagctcgccaaggtgaccgttacctcaccgtgccgtcatggttcggaacaatgtacctgtggagggtgtttgcgccggaggtcgtcgagttctgctaccgcctcctgtatatgcacggccatggcggtggcgaccagaccgacgcgccgagcaagacgatggcccagggtggcgggaagcagatgctgtacccctcctcgctgcgctcttcggacgtcaaaaacgactagaaacttactatagttcgcatcctttgatcgaggacgtggatcctggtgtgcaggctagtttgttctctactaagctttaggtgtggatgctactgctggttagctagtttgtaatcccgaataagctgtgttctgtgttttgtaatattagtgttgtgttgtgtgcttgtaatattagttctgtgtttgagactgcg

SEQ ID NO: 62901 - protein, 372 aa, Triticum aestivum
  peptide (1)..(372): Ceres Seq. ID no. 15221994
ASSVSSSLGSRQACELESKRPETMDLVNGALNWAAMPAMVASLLLFYPPYYLFKLCYSFLSYLFPDDLKRKVVLITGASSGIGEQLAYQYATKGACLALLARREWSLRQVADRAFELGAPDVIILPGDVADPDDCNRFVQATIDHYGRLDHLVCNAGIASVGAFQEIPDVTNYSPQLDVNFWGAVQSTFAALPHLKRTRGRIVVTASATGWNPVPRMVFYNAANAALINFFETLRSELGSEVGITIVTPGWIESEMSKGKFLKEHGGVEVDQEYRDAQIGLFPVEYAKNCARAMVQAARQGDRYLTVPSWFGTMYLWRVFAPEVVEFCYRLLYMHGHGGGDQTDAPSKTMAQGGGKQMLYPSSLRSSDVKND

SEQ ID NO: 62902 - protein, 349 aa, Triticum aestivum
  peptide (1)..(349): Ceres Seq. ID no. 15221995
MDLVNGALNWAAMPAMVASLLLFYPPYYLFKLCYSFLSYLFPDDLKRKVVLITGASSGIGEQLAYQYATKGACLALLARREWSLRQVADRAFELGAPDVIILPGDVADPDDCNRFVQATIDHYGRLDHLVCNAGIASVGAFQEIPDVTNYSPQLDVNFWGAVQSTFAALPHLKRTRGRIVVTASATGWNPVPRMVFYNAANAALINFFETLRSELGSEVGITIVTPGWIESEMSKGKFLKEHGGVEVDQEYRDAQIGLFPVEYAKNCARAMVQAARQGDRYLTVPSWFGTMYLWRVFAPEVVEFCYRLLYMHGHGGGDQTDAPSKTMAQGGGKQMLYPSSLRSSDVKND

SEQ ID NO: 62903 - protein, 337 aa, Triticum aestivum
  peptide (1)..(337): Ceres Seq. ID no. 15221996
MPAMVASLLLFYPPYYLFKLCYSFLSYLFPDDLKRKVVLITGASSGIGEQLAYQYATKGACLALLARREWSLRQVADRAFELGAPDVIILPGDVADPDDCNRFVQATIDHYGRLDHLVCNAGIASVGAFQEIPDVTNYSPQLDVNFWGAVQSTFAALPHLKRTRGRIVVTASATGWNPVPRMVFYNAANAALINFFETLRSELGSEVGITIVTPGWIESEMSKGKFLKEHGGVEVDQEYRDAQIGLFPVEYAKNCARAMVQAARQGDRYLTVPSWFGTMYLWRVFAPEVVEFCYRLLYMHGHGGGDQTDAPSKTMAQGGGKQMLYPSSLRSSDVKND

SEQ ID NO: 62904 - DNA, 1427 bp, Triticum aestivum
  misc_feature (1)..(1427): Ceres Seq. ID no. 13596735
caacatcctaatcgaaaaatctatccgtttcgttgcgacctacgctccactcgctgtctcagtctccagcaacaaaaggagcacactaccctgccggctcacacccgctgccggagcacctacgcacagactaggcagccatgcgtcgcctccactacaccatcaccaccctgctctccgcaacctgcctccttctgcacgccatggcgtcgccggcactgcctgacccggggtcgctcgagccgtccctgctcttcccgtcggccggcgcctcccaggcccaacccgccgcggcatccaccatcccggcattccccgagcagtccgaggccgcggccacctcttccgtctgccagctcaccccttccccgccgctcctcccggccgtcctggcctcctgcaacgccggcagcggcagcggcgtcctcccgccgcggctgcggtgctgcccggccctggccgcgtggctgtacgccgcgtacgcgcccaccgcgttggggagcgacggcagcaggtggtcgaagctccccgccgcggcggcggacgtgacggacctgccgctgctgccggacgacgtggaggagtgcgcgggcgccgcggagcgcgcgctgaggtccgcgggagcgacgctgccgcagccgcaggcggggagcaacaatgggacgacgtgcgacgtgcccttctgctactgcgggataaggctgaggcggccggtctgcgcgctgccggcgggcagggctgcgaggaggctggagagggactgcgcgcggccggggctcgccggctgctcccggtgcctccgggcgctgaacctgctgaacgccattggagagaagaacgccacgtcggggaaggccagtcatggcgggaagccacgtgagcgtgactgccagctcatggggctgacgtggctgctgcagcggaacgccacgaggcatcgggcggccgccacggcggtcctccaggccctcatggcggccgaggaggcgggggctaccagcgcgcccgccacgtgctcgctccccgtcgatggcctgccgctngccgtcgcgtcgtcggagatcaacggcgccgccgatgtgtcccccatgggcagcctgcttcttcgctttctgctggggacgtctgccttcatcttgtcccggcggttctgagcaaaatctgatcttcgctgcgcggtctctttgctatttcttctgtgtttgcacttctgatgttgaattagtagttgttcaatttgtttgtacttctgatgatgtttagttcttgaaaggctagggactagagagtggacttcgttactgtaattatatgcaatcccggtggggatgcctaatctagtgagcgtgcattgcatctccatttaavcraaaaaaaaaaaaaaaaaaaaaaaaaaaaagaaaaaaaaaaaaaaaaaagcttatcga

SEQ ID NO: 62905 - protein, 337 aa, Triticum aestivum
  peptide (1)..(337): Ceres Seq. ID no. 15221961
  misc_feature (301)..(301): Xaa is any aa, unknown or other
MRRLHYTITTLLSATCLLLHAMASPALPDPGSLEPSLLFPSAGASQAQPAAASTIPAFPEQSEAAATSSVCQLTPSPPLLPAVLASCNAGSGSGVLPPRLRCCPALAAWLYAAYAPTALGSDGSRWSKLPAAAADVTDLPLLPDDVEECAGAAERALRSAGATLPQPQAGSNNGTTCDVPFCYCGIRLRRPVCALPAGRAARRLERDCARPGLAGCSRCLRALNLLNAIGEKNATSGKASHGGKPRERDCQLMGLTWLLQRNATRHRAAATAVLQALMAAEEAGATSAPATCSLPVDGLPXAVASSEINGAADVSPMGSLLLRFLLGTSAFILSRRF

SEQ ID NO: 62906 - protein, 316 aa, Triticum aestivum
  peptide (1)..(316): Ceres Seq. ID no. 15221962
  misc_feature (280)..(280): Xaa is any aa, unknown or other
MASPALPDPGSLEPSLLFPSAGASQAQPAAASTIPAFPEQSEAAATSSVCQLTPSPPLLPAVLASCNAGSGSGVLPPRLRCCPALAAWLYAAYAPTALGSDGSRWSKLPAAAADVTDLPLLPDDVEECAGAAERALRSAGATLPQPQAGSNNGTTCDVPFCYCGIRLRRPVCALPAGRAARRLERDCARPGLAGCSRCLRALNLLNAIGEKNATSGKASHGGKPRERDCQLMGLTWLLQRNATRHRAAATAVLQALMAAEEAGATSAPATCSLPVDGLPXAVASSEINGAADVSPMGSLLLRFLLGTSAFILSRRF

SEQ ID NO: 62907 - protein, 182 aa, Triticum aestivum
  peptide (1)..(182): Ceres Seq. ID no. 15221963
QHPNRKIYPFRCDLRSTRCLSLQQQKEHTTLPAHTRCRSTYAQTRQPCVASTTPSPPCSPQPASFCTPWRRRHCLTRGRSSRPCSSRRPAPPRPNPPRHPPSRHSPSSPRPRPPLPSASSPLPRRSSRPSWPPATPAAAAASSRRGCGAARPWPRGCTPRTRPPRWGATAAGGRSSPPRRRT

SEQ ID NO: 62908 - DNA, 1100 bp, Triticum aestivum
  misc_feature (1)..(1100): Ceres Seq. ID no. 13598455
gattgatcctctttcgcctctgtaccgcgtgtcggtcctcgcgagttcgccgtggaacaccccatgggctccggcgaggacaaccccggaggaaccggtggaggagtcggcgggatagtccggggtgcggtgctgaaggcgctcgtcgtcttcggcggcgttattctgatccggcggctgcgccgctccaccacccggtgggaccacgcccgcgccgtcgccgacgccctctctggtgaaaagttctcgagggagcaggcgaggcaggatcctggaaactatttcaaccttagaatgctcacttgccctgcaactgagatggtggatggttctggagtgctctactttgagcaagcattttggagagctccagaaaaacctttccgacaaagattctacatggtaaagccatgtccaaaggagatgaaatgtgacgttgagttgagttcttatgcaattagagatgttgaagagtacaagaatttctgtgaccgaccaaaagatcagaggccgcagccagaagaagtaattgcggatatcgcagagcatttgaccaccatacacttatcacgatgtgaacgtggaaaacgctgcttatatgaaggatcaaccccaccgggaggttttcccaacagttggagcggtgcagcatattgtacatctgatctgtccattcataagaatggtgaaatacacatttgggacaagggttttgacgacgatgggagccaggtttggggaaccaaggctggcccttacgagtttaagcctgctcccaagtccaattatgatgacatgttctcacctttaaatttctctgcccccttgtcactagagaagatggaaagatcatatgcaattgatgaccagtagatgagcattgttaatacattttattgttagagaacaccataagaatatcatgtgtttatatattttgacagtatctctgatcatcaacaaatggtaattctgtgggtgaacacttgcaatgcctgacaacatagtgagatataacaattgtcatattgcagctaacatgagttatgtaagcagacggagcattaattctaatgttcgttagatggagatgcttgttg

SEQ ID NO: 62909 - protein, 269 aa, Triticum aestivum
  peptide (1)..(269): Ceres Seq. ID no. 13598456
MGSGEDNPGGTGGGVGGIVRGAVLKALVVFGGVILIRRLRRSTTRWDHARAVADALSGEKFSREQARQDPGNYFNLRMLTCPATEMVDGSGVLYFEQAFWRAPEKPFRQRFYMVKPCPKEMKCDVELSSYAIRDVEEYKNFCDRPKDQRPQPEEVIADIAEHLTTIHLSRCERGKRCLYEGSTPPGGFPNSWSGAAYCTSDLSIHKNGEIHIWDKGFDDDGSQVWGTKAGPYEFKPAPKSNYDDMFSPLNFSAPLSLEKMERSYAIDDQ

SEQ ID NO: 62910 - protein, 192 aa, Triticum aestivum
  peptide (1)..(192): Ceres Seq. ID no. 13598457
MLTCPATEMVDGSGVLYFEQAFWRAPEKPFRQRFYMVKPCPKEMKCDVELSSYAIRDVEEYKNFCDRPKDQRPQPEEVIADIAEHLTTIHLSRCERGKRCLYEGSTPPGGFPNSWSGAAYCTSDLSIHKNGEIHIWDKGFDDDGSQVWGTKAGPYEFKPAPKSNYDDMFSPLNFSAPLSLEKMERSYAIDDQ

SEQ ID NO: 62911 - protein, 184 aa, Triticum aestivum
  peptide (1)..(184): Ceres Seq. ID no. 13598458
MVDGSGVLYFEQAFWRAPEKPFRQRFYMVKPCPKEMKCDVELSSYAIRDVEEYKNFCDRPKDQRPQPEEVIADIAEHLTTIHLSRCERGKRCLYEGSTPPGGFPNSWSGAAYCTSDLSIHKNGEIHIWDKGFDDDGSQVWGTKAGPYEFKPAPKSNYDDMFSPLNFSAPLSLEKMERSYAIDDQ

SEQ ID NO: 62912 - DNA, 1073 bp, Triticum aestivum
  misc_feature (1)..(1073): Ceres Seq. ID no. 12585331
aagaccgcgtcccaaccgaaaatccccaattccccaccaccgacagcgtcggtgagagagatggcgtcggcgacggagatgcagccgctggcaccgtcgggctaccgccgggcgccggagatgaaggagaaggtggaggcgtcgtcgatcgacctggaggcggggaacggggagacgctctacccggggatctcgcgcggggagaacgccctccgctggggcttcatccgcaaggtctacggcatcctctgcgcgcagctggtcctcaccaccgtcgtctccgccatcaccgtcttctaccccaccctcaacgccacgctctccaactcgcccgtcctcgcgctcgtgctcgccgtcctccccttcatcctgatgatcccattgtacatctatcagcacagacaccctcacaatcttgctatcttgggtttgttcactctgtgcttgagcttcagcattggtgtggcttgtgcaaacactgaaggaactattgtgcttcaagcattggtactgacctcagctgtggttgtctctctgactgcatacacattctgggccgcaaagaagggcaaggaatttagttaccttggaccgtttctgttttctgctctcaccatcctggtcgtgataagctttacccagatcttcttcccatttggacctgcatcgaatgctgtgatcggtgggtttggagctctagtcttctcaggcttcatcgtctacgacactgagaacttgataaagcgccacacttatgacgagtacatctgggcgtctgttgagctttacctcgacatcctcaacctgttcctgaccatcctacagatgctcaggcagaatgacaactgatgggtcctgtctgaaccaccaggaccttgtgccaacccaggcatatgtccaacatttatcaagtcttttgaattgctatctacataacttggaagacatggtagtaagtttttgccatcatccagagatgaggccaaagtacaaccatatgtataggtgttctattgtgagtttatgtgcctgagtgttgttaaactgccaacaatcagtgatcgtatgaacgt

SEQ ID NO: 62913 - protein, 282 aa, Triticum aestivum
  peptide (1)..(282): Ceres Seq. ID no. 12585332
KTASQPKIPNSPPPTASVREMASATEMQPLAPSGYRRAPEMKEKVEASSIDLEAGNGETLYPGISRGENALRWGFIRKVYGILCAQLVLTTVVSAITVFYPTLNATLSNSPVLALVLAVLPFILMIPLYIYQHRHPHNLAILGLFTLCLSFSIGVACANTEGTIVLQALVLTSAVVVSLTAYTFWAAKKGKEFSYLGPFLFSALTILVVISFTQIFFPFGPASNAVIGGFGALVFSGFIVYDTENLIKRHTYDEYIWASVELYLDILNLFLTILQMLRQNDN

SEQ ID NO: 62914 - protein, 262 aa, Triticum aestivum
  peptide (1)..(262): Ceres Seq. ID no. 12585333
MASATEMQPLAPSGYRRAPEMKEKVEASSIDLEAGNGETLYPGISRGENALRWGFIRKVYGILCAQLVLTTVVSAITVFYPTLNATLSNSPVLALVLAVLPFILMIPLYIYQHRHPHNLAILGLFTLCLSFSIGVACANTEGTIVLQALVLTSAVVVSLTAYTFWAAKKGKEFSYLGPFLFSALTILVVISFTQIFFPFGPASNAVIGGFGALVFSGFIVYDTENLIKRHTYDEYIWASVELYLDILNLFLTILQMLRQNDN

SEQ ID NO: 62915 - protein, 256 aa, Triticum aestivum
  peptide (1)..(256): Ceres Seq. ID no. 12585334
MQPLAPSGYRRAPEMKEKVEASSIDLEAGNGETLYPGISRGENALRWGFIRKVYGILCAQLVLTTVVSAITVFYPTLNATLSNSPVLALVLAVLPFILMIPLYIYQHRHPHNLAILGLFTLCLSFSIGVACANTEGTIVLQALVLTSAVVVSLTAYTFWAAKKGKEFSYLGPFLFSALTILVVISFTQIFFPFGPASNAVIGGFGALVFSGFIVYDTENLIKRHTYDEYIWASVELYLDILNLFLTILQMLRQNDN

SEQ ID NO: 62916 - DNA, 1374 bp, Triticum aestivum
  misc_feature (1)..(1374): Ceres Seq. ID no. 15226831
tagaacatcctaatcgaaaaaaaagaaagctctagctagctagctacttcgcaaattttgcgtgcatcgatcgacgatggctgacttctcgtccagcaacggcgtcccgccggggttccggttccaccctaccgacgaggagctgctgctctactacctcaagaagaagatcggcttcgaaaagttcgacctcgaggtcatcagggaggtcgacctcaacaagatcgagccatgggacctccaagagagatgccggatcgggtctgcgccgcagaacgagtggtacttcttcagccacaaggaccgcaagtacccgacggggtcgcggacgaaccgcgcgacgacggccgggttctggaaggcaacggggagggacaagtgcatccgcaccagctaccgcaagatcgggatgcgcaagacgctcgtcttctaccgcggccgcgccccacacggccagaagtccgactggatcatgcacgagtaccgcctcgaggaaatcgacgaagcccagggcggcaccagcgaggatggatgggtggtgtgccgcgtgttcaagaagaagtgtttcttcaagatcgccggaggcggcgaggggagctcgagccagagcgcggacgccggcggcggccacatggccgtgtcctcgccgctgggtggccacgaccacgctgacagggccgccatggcatcccactacatgcacgggatgcacccgcagtaccacccccagcacgcctcttccttctactactcccagatgcaaccaccggaggcggcctactcgcaccacgtgcaggtccaggacctcctcaccaaccaccggccggccgccgacgcagctggcggcgggtatgatttctccagcctgccggtcgagcaccctggcctggacgtcggcagcagcgacggcgtcgcggcggatgggctggccgaaggaagagatcagacaaacggtgcagccgatcagcagtggcagccgatggacgggttcagcaacggcgggggcgccgctgcagtacagcagatgagcgccatgaactccgggcaacgaggtggggagatggatttgtggggatatgggaggtaaattcaacatcaccaagacatgagaaagtgcatccgcatgcatgaatgttgcatgcaagtgggaaggaggatcctgaaaatactggtaatgttgttggagagttatcattggtttttggtgtactgtatatgttgtgttattaatttatcccaatttattgttgtctaatgtaataagaactacggatacatatcggtatgtaagattgtaagtggtgatttgtgcgtgtacatgtgtttgcaaagagaaaaacacaagaatttaagtttgtgattttcttgccatgt

SEQ ID NO: 62917 - protein, 336 aa, Triticum aestivum
  peptide (1)..(336): Ceres Seq. ID no. 15226832
MADFSSSNGVPPGFRFHPTDEELLLYYLKKKIGFEKFDLEVIREVDLNKIEPWDLQERCRIGSAPQNEWYFFSHKDRKYPTGSRTNRATTAGFWKATGRDKCIRTSYRKIGMRKTLVFYRGRAPHGQKSDWIMHEYRLEEIDEAQGGTSEDGWVVCRVFKKKCFFKIAGGGEGSSSQSADAGGGHMAVSSPLGGHDHADRAAMASHYMHGMHPQYHPQHASSFYYSQMQPPEAAYSHHVQVQDLLTNHRPAADAAGGGYDFSSLPVEHPGLDVGSSDGVAADGLAEGRDQTNGAADQQWQPMDGFSNGGGAAAVQQMSAMNSGQRGGEMDLWGYGR

SEQ ID NO: 62918 - protein, 225 aa, Triticum aestivum
  peptide (1)..(225): Ceres Seq. ID no. 15226833
MRKTLVFYRGRAPHGQKSDWIMHEYRLEEIDEAQGGTSEDGWVVCRVFKKKCFFKIAGGGEGSSSQSADAGGGHMAVSSPLGGHDHADRAAMASHYMHGMHPQYHPQHASSFYYSQMQPPEAAYSHHVQVQDLLTNHRPAADAAGGGYDFSSLPVEHPGLDVGSSDGVAADGLAEGRDQTNGAADQQWQPMDGFSNGGGAAAVQQMSAMNSGQRGGEMDLWGYGR

SEQ ID NO: 62919 - protein, 204 aa, Triticum aestivum
  peptide (1)..(204): Ceres Seq. ID no. 15226834
MHEYRLEEIDEAQGGTSEDGWVVCRVFKKKCFFKIAGGGEGSSSQSADAGGGHMAVSSPLGGHDHADRAAMASHYMHGMHPQYHPQHASSFYYSQMQPPEAAYSHHVQVQDLLTNHRPAADAAGGGYDFSSLPVEHPGLDVGSSDGVAADGLAEGRDQTNGAADQQWQPMDGFSNGGGAAAVQQMSAMNSGQRGGEMDLWGYGR

SEQ ID NO: 62920 - DNA, 1425 bp, Triticum aestivum
  misc_feature (1)..(1425): Ceres Seq. ID no. 15226041
acatccttacctgtagttttcctcactcccttgacccccgcccgtccctaactaaagccactagcggtagtaatccttgtcaagccgggtgacaccgcggagggagcggagcatggaggccatggacgtcaagtaccggccggccctctaccccaacggctccgtcaagaagctccggcaggcggccgcgccgccgccgccgccggtggaggccgtgcccacgtacaaggagtgcctcaagaaccacgcggcggccatcggcgcgcacgccgtcgacggctgcggcgagtggatgcccgtggtggagctcaacaccgccgacccggcctcgtataagtgcgcggcctgcggctgccaccgcaacttccaccgcctcgtgatggtggagggctcgccgccgcccccgcccccgcccccgccggccctgctgccggcgccgcccgtgcccatgcccatgccggccaccgtgctccatggcctgcggcagcgcgcgcacgggcatgagacgccggaggaccggctcccgggcgtcgacggcgacgactctgactccgactcggatggctccgagtacgacgacgagcgctccgtctccccgccccagcaccctccgcccgcgcacctcccggccccggtggcgcagcagccgccgccgtacatctcttccgcgccacacccgcacatgctgctctctctcaactccagcgcgccgggggcgccgcagggccagagcaggctccccgcccagctctcgccggcgacggcgccgccgccccacgggatgatgccggccaggaagcggttccgcaccaagttcaccgcggagcagaagcagcggatgcaggagctgtcggagcggctggggtggcggctgcagaagcgcgacgagggcgtggtcgacgagtggtgccgcgacatcggcgtcagcaagggcgtcttcaaggtctggatgcacaacaacaagcacaactacctcggcggccacagcgcccgccgcagcgcctcagccgcggcctcctccgccgcgaccacccccaccgcccctgccgccggcgggccattccgtctcgccccggccagccccgcaccaggagcgccattcaacccctccgccagccacagctccccggcccccacgggcacgggcttcaacatgaacggtaccgcctcctccgcctccaccgccaccaccaccgccacgcccacccccatcttcgccgccggccgcaagctgaacggagcctcatcgccgcagtcggcgtgagctagggagagcagaggcagagaagaaggagagggaaggagaaaggcaaagacatttagctttcatttcagttatcattgcattacttttctttctttctgtagtttggatcgatcgttggttctactaagaaattaaccccaagaaagggtgccgtctgg

SEQ ID NO: 62921 - protein, 383 aa, Triticum aestivum
  peptide (1)..(383): Ceres Seq. ID no. 15226042
MEAMDVKYRPALYPNGSVKKLRQAAAPPPPPVEAVPTYKECLKNHAAAIGAHAVDGCGEWMPVVELNTADPASYKCAACGCHRNFHRLVMVEGSPPPPPPPPPALLPAPPVPMPMPATVLHGLRQRAHGHETPEDRLPGVDGDDSDSDSDGSEYDDERSVSPPQHPPPAHLPAPVAQQPPPYISSAPHPHMLLSLNSSAPGAPQGQSRLPAQLSPATAPPPHGMMPARKRFRTKFTAEQKQRMQELSERLGWRLQKRDEGVVDEWCRDIGVSKGVFKVWMHNNKHNYLGGHSARRSASAAASSAATTPTAPAAGGPFRLAPASPAPGAPFNPSASHSSPAPTGTGFNMNGTASSASTATTTATPTPIFAAGRKLNGASSPQSA

SEQ ID NO: 62922 - protein, 380 aa, Triticum aestivum
  peptide (1)..(380): Ceres Seq. ID no. 15226043
MDVKYRPALYPNGSVKKLRQAAAPPPPPVEAVPTYKECLKNHAAAIGAHAVDGCGEWMPVVELNTADPASYKCAACGCHRNFHRLVMVEGSPPPPPPPPPALLPAPPVPMPMPATVLHGLRQRAHGHETPEDRLPGVDGDDSDSDSDGSEYDDERSVSPPQHPPPAHLPAPVAQQPPPYISSAPHPHMLLSLNSSAPGAPQGQSRLPAQLSPATAPPPHGMMPARKRFRTKFTAEQKQRMQELSERLGWRLQKRDEGVVDEWCRDIGVSKGVFKVWMHNNKHNYLGGHSARRSASAAASSAATTPTAPAAGGPFRLAPASPAPGAPFNPSASHSSPAPTGTGFNMNGTASSASTATTTATPTPIFAAGRKLNGASSPQSA

SEQ ID NO: 62923 - protein, 323 aa, Triticum aestivum
  peptide (1)..(323): Ceres Seq. ID no. 15226044
MPVVELNTADPASYKCAACGCHRNFHRLVMVEGSPPPPPPPPPALLPAPPVPMPMPATVLHGLRQRAHGHETPEDRLPGVDGDDSDSDSDGSEYDDERSVSPPQHPPPAHLPAPVAQQPPPYISSAPHPHMLLSLNSSAPGAPQGQSRLPAQLSPATAPPPHGMMPARKRFRTKFTAEQKQRMQELSERLGWRLQKRDEGVVDEWCRDIGVSKGVFKVWMHNNKHNYLGGHSARRSASAAASSAATTPTAPAAGGPFRLAPASPAPGAPFNPSASHSSPAPTGTGFNMNGTASSASTATTTATPTPIFAAGRKLNGASSPQSA

SEQ ID NO: 62924 - DNA, 1852 bp, Triticum aestivum
  misc_feature (1)..(1852): Ceres Seq. ID no. 13596857
aggattggttgagttcgtctccgcgccgccgccgccgccgtcaatctcctcggtatatcaagccactccagatggcaacctatgagcccaagaacatcctcataaccggtgccgcaggtttcatcgcgtcccacgtggcaaaccgtctggtcaggaattacccgcgctacaacatcgtcattctcgacagggtcgactattgctccagccttagaaacctcgacccttctcgtggatccccgaatttcaagtttgtcaggggcgacatcgccagtgccgacttggtgaaccacctcctggtcaccgagtcgatcgataccgtcatgcactttgctgcccagactcacgtcgacaactccttcagctgttcctttgagttcaccaaaaacaatgtgtacggtacccacatcctcctcgaggcatgcaagcaggttaagatcagaaggttcattcatgtcagcaccgatgaagtctacggagaaactgatgtcaatgctgttgttggtaaccatgaggaatctcggctgcttccgacgaacccgtattcggctacgaaagccggggcagagatgctggtgatggcctacgcaaggtcctataatcttccggtgatcaccacacgaggtaacaatgtgtatgggccaaaccagttccccgagaagctcatccccaaatttgctctcctggcaatgagaggcctgccactcccggtttatgggaatggctcgaatgccaggagctacttgtactgtgaggatgtcgcagaagcctttgatgttgttcttcacagaggagaggttgggcatgtgtataacatcgccgcggctaaggagaggggagtggtggatgtggccagggacatatgtgagattcttggggtggaccctgagaaggccatcaagttcgtggaggacaggccgttcaatgaccaaaggtactttgtggacggtgagaagatgaggaggctggggtggttggagcgcacaacgtgggaggagggactgaggaagacggtggagtggtacgccagcaatgctgattactggggagatgttggcgttgtcttgcgagggcagcatcgtaactggacatatgctgcctcatcaccgcaagctgatgaagcagttgaggatcctaagttgaaaagcgcaagatcgaagtgcagggcaatgttataaactttacacccatgcatccataggcacaggaggcaacaacacgattcaagcctcaaataagagtgagtttcctaagctactactgccattgtgtcttgcacacaactgttacgagtgcacagattttgcctaaaggttcagtctattttaatggaggcatgcctttcttttcctgatgaattaatggaggcagtctagtggtgatttgcttacatcttaaatcttcataattcttttacatggatgaattacaaatgcctttttccatctccaagatctagtgcatcaccttgagttgtagagaaaatctcctttgtatcagtgaattacgctagttggactcgaggatatagccaagattaattatctccaagatcagttgtcagccataagtgctggcctgctgggagcttcttaatcttgatgcagtaagtagtctttttaaggccggtaatactttcaggtatagcatgaactagtaatgtgagcgcgctttgctgcgccgctcttcactgggacgtctatcttccagaaaatctgttcacttgttctcaaataacaacttaacgatctgaagagaactgtgagattgatgtgaatctgttttcttgttttttagttgaaatcttatttcttgttggcatgaaagaaatcatggactcttttctagtgac

SEQ ID NO: 62925 - protein, 391 aa, Triticum aestivum
  peptide (1)..(391): Ceres Seq. ID no. 13596858
DWLSSSPRRRRRRQSPRYIKPLQMATYEPKNILITGAAGFIASHVANRLVRNYPRYNIVILDRVDYCSSLRNLDPSRGSPNFKFVRGDIASADLVNHLLVTESIDTVMHFAAQTHVDNSFSCSFEFTKNNVYGTHILLEACKQVKIRRFIHVSTDEVYGETDVNAVVGNHEESRLLPTNPYSATKAGAEMLVMAYARSYNLPVITTRGNNVYGPNQFPEKLIPKFALLAMRGLPLPVYGNGSNARSYLYCEDVAEAFDVVLHRGEVGHVYNIAAAKERGVVDVARDICEILGVDPEKAIKFVEDRPFNDQRYFVDGEKMRRLGWLERTTWEEGLRKTVEWYASNADYWGDVGVVLRGQHRNWTYAASSPQADEAVEDPKLKSARSKCRAML

SEQ ID NO: 62926 - protein, 368 aa, Triticum aestivum
  peptide (1)..(368): Ceres Seq. ID no. 13596859
MATYEPKNILITGAAGFIASHVANRLVRNYPRYNIVILDRVDYCSSLRNLDPSRGSPNFKFVRGDIASADLVNHLLVTESIDTVMHFAAQTHVDNSFSCSFEFTKNNVYGTHILLEACKQVKIRRFIHVSTDEVYGETDVNAVVGNHEESRLLPTNPYSATKAGAEMLVMAYARSYNLPVITTRGNNVYGPNQFPEKLIPKFALLAMRGLPLPVYGNGSNARSYLYCEDVAEAFDVVLHRGEVGHVYNIAAAKERGVVDVARDICEILGVDPEKAIKFVEDRPFNDQRYFVDGEKMRRLGWLERTTWEEGLRKTVEWYASNADYWGDVGVVLRGQHRNWTYAASSPQADEAVEDPKLKSARSKCRAML

SEQ ID NO: 62927 - protein, 284 aa, Triticum aestivum
  peptide (1)..(284): Ceres Seq. ID no. 13596860
MHFAAQTHVDNSFSCSFEFTKNNVYGTHILLEACKQVKIRRFIHVSTDEVYGETDVNAVVGNHEESRLLPTNPYSATKAGAEMLVMAYARSYNLPVITTRGNNVYGPNQFPEKLIPKFALLAMRGLPLPVYGNGSNARSYLYCEDVAEAFDVVLHRGEVGHVYNIAAAKERGVVDVARDICEILGVDPEKAIKFVEDRPFNDQRYFVDGEKMRRLGWLERTTWEEGLRKTVEWYASNADYWGDVGVVLRGQHRNWTYAASSPQADEAVEDPKLKSARSKCRAML

SEQ ID NO: 62928 - DNA, 1058 bp, Triticum aestivum
  misc_feature (1)..(1058): Ceres Seq. ID no. 12625361
cctaaacccgagagtaacaaaatccttatcccaagcttagcatccccggtctcctcggtttctcctcctccccgaaccctcgctccatcactctctccctctcccactccggcgcgcgctcagctgaatctcgccgcaggagcaatggcgtcggtgcatctgtgcggcccgaaggtggcgtcggcggcgatggcgaagccggcgctggcggacgggctccgcatccccacttcgtcgtcggcgcgtcccgtgccgacggggcgcaggctccggggcctcgtcgtcagggccgccacggtcgtgtcgcccaagtatacttctgtgaaaccattgggagatagggtactagtgaagaccaagactactgaggataaaactgctggagggatattgcttccaacaacagctcagtcaagaccacaagcaggggaggttgttgcagttggagaggggagaagcttaggcagcaacatcgttgagatcagtgttccggttggtgccaaagttatttactctaaatacgctggcaccgagctggaattcaatgataccacccacctcattatgaaagaagatgacatcattggtattcttgacactgatgacgtgaaagatctgaagccactgagtgaccgtattctcattaaggttgcagagtctgaagaggaaactgctggcggtttgctattgacacaggcgtcgaaagagaagccttccgttggaacagtggtcgctgttggccccgggccattgggcgatgatggcagcaggacaccattgtcaatcactcctggaagcagcgtgctgtactccaagtatgcaggaagcgagttcaagggttcggaaggcgagtacattgttctcaggtcatccgacgtgatagcggtgctgtcatcataagcttgccctgccctacgtgaactaggaattttgatatttagtccaaaaccttgtttggttattgctctttgcttgtgattggtgaactgtgaattgcttcttcgctctatcgtggaaatgctgcttgatagttttaataagatgacggcttagactcc

SEQ ID NO: 62929 - protein, 299 aa, Triticum aestivum
  peptide (1)..(299): Ceres Seq. ID no. 12625362
PKPESNKILIPSLASPVSSVSPPPRTLAPSLSPSPTPARAQLNLAAGAMASVHLCGPKVASAAMAKPALADGLRIPTSSSARPVPTGRRLRGLVVRAATVVSPKYTSVKPLGDRVLVKTKTTEDKTAGGILLPTTAQSRPQAGEVVAVGEGRSLGSNIVEISVPVGAKVIYSKYAGTELEFNDTTHLIMKEDDIIGILDTDDVKDLKPLSDRILIKVAESEEETAGGLLLTQASKEKPSVGTVVAVGPGPLGDDGSRTPLSITPGSSVLYSKYAGSEFKGSEGEYIVLRSSDVIAVLSS

SEQ ID NO: 62930 - protein, 251 aa, Triticum aestivum
  peptide (1)..(251): Ceres Seq. ID no. 12625363
MASVHLCGPKVASAAMAKPALADGLRIPTSSSARPVPTGRRLRGLVVRAATVVSPKYTSVKPLGDRVLVKTKTTEDKTAGGILLPTTAQSRPQAGEVVAVGEGRSLGSNIVEISVPVGAKVIYSKYAGTELEFNDTTHLIMKEDDIIGILDTDDVKDLKPLSDRILIKVAESEEETAGGLLLTQASKEKPSVGTVVAVGPGPLGDDGSRTPLSITPGSSVLYSKYAGSEFKGSEGEYIVLRSSDVIAVLSS

SEQ ID NO: 62931 - protein, 236 aa, Triticum aestivum
  peptide (1)..(236): Ceres Seq. ID no. 12625364
MAKPALADGLRIPTSSSARPVPTGRRLRGLVVRAATVVSPKYTSVKPLGDRVLVKTKTTEDKTAGGILLPTTAQSRPQAGEVVAVGEGRSLGSNIVEISVPVGAKVIYSKYAGTELEFNDTTHLIMKEDDIIGILDTDDVKDLKPLSDRILIKVAESEEETAGGLLLTQASKEKPSVGTVVAVGPGPLGDDGSRTPLSITPGSSVLYSKYAGSEFKGSEGEYIVLRSSDVIAVLSS

SEQ ID NO: 62932 - DNA, 1578 bp, Triticum aestivum
  misc_feature (1)..(1578): Ceres Seq. ID no. 13596893
accaagcacaccggcacctaccatcgctctactccgcttcgagtccacagcacctcgcgcgcgctctacccaccataagccttcgggccttccgggagcccaagccatggcgcgcaagaagatccgggagtacgactccaagcgcctcctcaaggagcacctcaagcgcctggccggcatcgacctgcacatcctctccgcccaggtcacacaattgacggactttgcggagcttgtgaaccagcatccatggctgtcgaccaccaaactggttgtgaagcctgacatgctgttcgggaagcgtgggaagagtggccttgtggcactcaacctggatgtagcccaagtcaaggagtttgtgaaggagcggttgggagtcgaggtcgagatgggtggctgcaaagctccaattaccactttcatagttgagccgtttgtcccccacgatcaagagtactacctttcagttgtgtccgaaaggttgggtagcaccattagcttctcggaatgtggaggcattgaaatcgaggagaactgggacaaggttaagacagtctttcttccgaccgagaagccaatgacacctgatgcttgtgctcccttgattgcaacccttccactggaggcacgcggaaagattggtgatttcattaaaggagtgtttgctgtcttccaagacttagatttctcatttattgagatgaacccattcaccatggtgaatggggagccatatccgctggacatgagaggagaattggatgacactgcatctttcaagaacttcaagaagtggggaaatttagaattccctctaccattcggcagagttctcagttctacagaaagttttatccatgagctggacgacaagaccagcgcgtctttgaagttcacagttttgaacccaaagggacgcatctggacaatggttgctggaggtggtgccagtgtcatatatgctgacacggttggagatttgggatatgcttcagagttaggaaattatgcagaatacagtggtgctcccaaccaggaggaggttctgcagtatgctagagtagtacttgattgtgcgactgcggaccctgatggccgcaagagagcccttctcattggaggtggtatagccaacttcactgatgtcgctgccacttttagtggcatcattcaggcattaagagagaaggaatccaagttaaaggcatccaggatgcacctctatgttcgacgaggcggtccaaattaccaaactggactggcgaaaatgcgcaagcttggtgcagaaatcggtgttccgattgaggtgtatggaccggaagagacaatgactggcatctgcaagcaagcaattgaatgcattatggcggcatcataaatcaggatacagttgagaagtagtttgagatctacaaacaagaaactggctgccgcataaatgagagcatagtggcactaggttcacatcacatggttgattagtttcttcagaagttatttggacaaagacacatatattattgtcgtaaaggaacctgtactgttgtaatgtgacaaacaaaagatttattaccatgc

SEQ ID NO: 62933 - protein, 458 aa, Triticum aestivum
  peptide (1)..(458): Ceres Seq. ID no. 13596894
PSTPAPTIALLRFESTAPRARSTHHKPSGLPGAQAMARKKIREYDSKRLLKEHLKRLAGIDLHILSAQVTQLTDFAELVNQHPWLSTTKLVVKPDMLFGKRGKSGLVALNLDVAQVKEFVKERLGVEVEMGGCKAPITTFIVEPFVPHDQEYYLSVVSERLGSTISFSECGGIEIEENWDKVKTVFLPTEKPMTPDACAPLIATLPLEARGKIGDFIKGVFAVFQDLDFSFIEMNPFTMVNGEPYPLDMRGELDDTASFKNFKKWGNLEFPLPFGRVLSSTESFIHELDDKTSASLKFTVLNPKGRIWTMVAGGGASVIYADTVGDLGYASELGNYAEYSGAPNQEEVLQYARVVLDCATADPDGRKRALLIGGGIANFTDVAATFSGIIQALREKESKLKASRMHLYVRRGGPNYQTGLAKMRKLGAEIGVPIEVYGPEETMTGICKQAIECIMAAS

SEQ ID NO: 62934 - protein, 423 aa, Triticum aestivum
  peptide (1)..(423): Ceres Seq. ID no. 13596895
MARKKIREYDSKRLLKEHLKRLAGIDLHILSAQVTQLTDFAELVNQHPWLSTTKLVVKPDMLFGKRGKSGLVALNLDVAQVKEFVKERLGVEVEMGGCKAPITTFIVEPFVPHDQEYYLSVVSERLGSTISFSECGGIEIEENWDKVKTVFLPTEKPMTPDACAPLIATLPLEARGKIGDFIKGVFAVFQDLDFSFIEMNPFTMVNGEPYPLDMRGELDDTASFKNFKKWGNLEFPLPFGRVLSSTESFIHELDDKTSASLKFTVLNPKGRIWTMVAGGGASVIYADTVGDLGYASELGNYAEYSGAPNQEEVLQYARVVLDCATADPDGRKRALLIGGGIANFTDVAATFSGIIQALREKESKLKASRMHLYVRRGGPNYQTGLAKMRKLGAEIGVPIEVYGPEETMTGICKQAIECIMAAS

SEQ ID NO: 62935 - protein, 363 aa, Triticum aestivum
  peptide (1)..(363): Ceres Seq. ID no. 13596896
MLFGKRGKSGLVALNLDVAQVKEFVKERLGVEVEMGGCKAPITTFIVEPFVPHDQEYYLSVVSERLGSTISFSECGGIEIEENWDKVKTVFLPTEKPMTPDACAPLIATLPLEARGKIGDFIKGVFAVFQDLDFSFIEMNPFTMVNGEPYPLDMRGELDDTASFKNFKKWGNLEFPLPFGRVLSSTESFIHELDDKTSASLKFTVLNPKGRIWTMVAGGGASVIYADTVGDLGYASELGNYAEYSGAPNQEEVLQYARVVLDCATADPDGRKRALLIGGGIANFTDVAATFSGIIQALREKESKLKASRMHLYVRRGGPNYQTGLAKMRKLGAEIGVPIEVYGPEETMTGICKQAIECIMAAS

SEQ ID NO: 62936 - DNA, 1561 bp, Triticum aestivum
  misc_feature (1)..(1561): Ceres Seq. ID no. 14301475
aagaccagctacagaccagctacagcctagagctgagcattgcatttggtgttagactagcgcttgcccaccctgccatgacgtccaaggtagccaacagctccggcagcaacaatgcggatgccaagctatcgccgtcggggctccccgtccgggaggtcccgggcggctacggcgttcccttcttgtcgccgctgcgcgaccgccttgactactactacttccagggcgcggaggagtacttccgctcccgcatcgcccggaacggcggcgccaccgtgctgcgcgtcaacatgccccccgggccgttcatcaccaccgacttccgcgtcgtcgccttcctcgacgcgcgcagcttcagcgtgctcctcgacgacgccaaggtcgacaagaccgacacgctcgacgggaccttcatgccctccctcgcgctcttcggcggctaccgcccgctcgccttcctcgacgctgccgacccccaccacgccgcgctcaagcgcgtcatgatcagcctcgccgccgcgcggatgcaccacgtcgcgccggccttccgcaccgctttcggcgccgtgttcgacgccgccgacgccggcctcggcgacggccccgtccagttcaacaagctcaacgagcaccacatgttcgacttcacctgctccgcgctgttcggcggcacgccgccgagcaaggccatgggcgacggcgccgtgaccaaggccatcaagtggctcggcgtgcagctgcacccgctcgccagtaagatcatcaagccgtggctgctcgaggatctccttctccacaccttccgcctgccgccgttgctggttcgccgggactacgccgacctgacagcctacttcgccgaagccaccatcgacaccgaggtcgacgtcttcgcctccaagatgatcaccgttgacagaaagcccatcaagctccagatctgggacacgccaggcgaagacagattcagatcgatcactagatcatactacgatgaagttgatggagctcttctagtttatgacatcaccaggagggaaacatttaatcatctcgcgaactggttaagggacgtgaggcaatttgcaaaggacaacatgacaataatgctagttggaaacaaatgtgatctatctcagaggcgtaccgtgagctatgaggaaggtaggaagtttgcaaatgagcatggtctgatctttgtggaggcatctgccaaaactgcacaaaatgttgaggagggtttcgttcagactgctggagtcatatacaagaaaatccaggatggcgccttctaataataagctgaaattgcaaaagtctatcatcaatttggtctgcttagtgaataatgagcacctggtgaacaagtgctggtaggcctggcctacttcctgcgtggatatttatgtagctgtgtgtttactacaaatcaagcagggacacctttaggctgattcaagagtgctatctgctatgttttttttttttgagggtgtgctatctgctatgtgatcactatgttgcgctgttcaataatcaacaatttcagtccagttct

SEQ ID NO: 62937 - protein, 431 aa, Triticum aestivum
  peptide (1)..(431): Ceres Seq. ID no. 14301476
DQLQTSYSLELSIAFGVRLALAHPAMTSKVANSSGSNNADAKLSPSGLPVREVPGGYGVPFLSPLRDRLDYYYFQGAEEYFRSRIARNGGATVLRVNMPPGPFITTDFRVVAFLDARSFSVLLDDAKVDKTDTLDGTFMPSLALFGGYRPLAFLDAADPHHAALKRVMISLAAARMHHVAPAFRTAFGAVFDAADAGLGDGPVQFNKLNEHHMFDFTCSALFGGTPPSKAMGDGAVTKAIKWLGVQLHPLASKIIKPWLLEDLLLHTFRLPPLLVRRDYADLTAYFAEATIDTEVDVFASKMITVDRKPIKLQIWDTPGEDRFRSITRSYYDEVDGALLVYDITRRETFNHLANWLRDVRQFAKDNMTIMLVGNKCDLSQRRTVSYEEGRKFANEHGLIFVEASAKTAQNVEEGFVQTAGVIYKKIQDGAF

SEQ ID NO: 62938 - protein, 406 aa, Triticum aestivum
  peptide (1)..(406): Ceres Seq. ID no. 14301477
MTSKVANSSGSNNADAKLSPSGLPVREVPGGYGVPFLSPLRDRLDYYYFQGAEEYFRSRIARNGGATVLRVNMPPGPFITTDFRVVAFLDARSFSVLLDDAKVDKTDTLDGTFMPSLALFGGYRPLAFLDAADPHHAALKRVMISLAAARMHHVAPAFRTAFGAVFDAADAGLGDGPVQFNKLNEHHMFDFTCSALFGGTPPSKAMGDGAVTKAIKWLGVQLHPLASKIIKPWLLEDLLLHTFRLPPLLVRRDYADLTAYFAEATIDTEVDVFASKMITVDRKPIKLQIWDTPGEDRFRSITRSYYDEVDGALLVYDITRRETFNHLANWLRDVRQFAKDNMTIMLVGNKCDLSQRRTVSYEEGRKFANEHGLIFVEASAKTAQNVEEGFVQTAGVIYKKIQDGAF

SEQ ID NO: 62939 - protein, 334 aa, Triticum aestivum
  peptide (1)..(334): Ceres Seq. ID no. 14301478
MPPGPFITTDFRVVAFLDARSFSVLLDDAKVDKTDTLDGTFMPSLALFGGYRPLAFLDAADPHHAALKRVMISLAAARMHHVAPAFRTAFGAVFDAADAGLGDGPVQFNKLNEHHMFDFTCSALFGGTPPSKAMGDGAVTKAIKWLGVQLHPLASKIIKPWLLEDLLLHTFRLPPLLVRRDYADLTAYFAEATIDTEVDVFASKMITVDRKPIKLQIWDTPGEDRFRSITRSYYDEVDGALLVYDITRRETFNHLANWLRDVRQFAKDNMTIMLVGNKCDLSQRRTVSYEEGRKFANEHGLIFVEASAKTAQNVEEGFVQTAGVIYKKIQDGAF

SEQ ID NO: 62940 - DNA, 864 bp, Triticum aestivum
  misc_feature (1)..(864): Ceres Seq. ID no. 12585335
attactcccccgcagctcacggggcgaggcatccatcgattagccgttcccgactcggcgaaaggactgtctcgccgccgccgccggccgacgaggaggaggccaagatgttcttccacatcgtgctggagcggaacatgcagctgcacccgcggcacttcggccctcacctccgcgacaagctcgtcgccaagctcatgaaggacgtcgagggcacctgcagcgggcggcacggcttcgtcgtggcgatcacgggggtggaggacatcggcaaggggctcatccgggagggcacgggcttcgtcacgttccccgtcaagtaccagtgcgtcgtcttccgccccttcaaaggcgagatcctcgaggccgtcgtcaccatggtcaacaagatggggttcttcgcagaggctgggcctgtgcagatctttgtgtcaaaccatttgattcctgacgatatggagttccaatctggtgatgtgccaaactacacgacttctgatggatcggtgaaaattcaaaaagaaagtgaggttcgtctgaagattataggcactcgtgttgacgcaacagaaattttttgcatcggcacgataaaagacgactttctgggtgttatcagtgatcctggtggagcgctgtaaatgatccaaagaagactcggcatgctctccaacttccgcatcatcatatatctgggaagagtccccaaggaaggttgcgactgatctgtaatttgtgtcctgatgtaaaatgtgatgtcatgcctatctaatggaagtcagggtactgctagtgttaaaaaaaagtaactggcacctgtattatcgtaactatgatcttttctaattgtggtggttgatatgt

SEQ ID NO: 62941 - protein, 212 aa, Triticum aestivum
  peptide (1)..(212): Ceres Seq. ID no. 12585336
YSPAAHGARHPSISRSRLGERTVSPPPPADEEEAKMFFHIVLERNMQLHPRHFGPHLRDKLVAKLMKDVEGTCSGRHGFVVAITGVEDIGKGLIREGTGFVTFPVKYQCVVFRPFKGEILEAVVTMVNKMGFFAEAGPVQIFVSNHLIPDDMEFQSGDVPNYTTSDGSVKIQKESEVRLKIIGTRVDATEIFCIGTIKDDFLGVISDPGGAL

SEQ ID NO: 62942 - protein, 177 aa, Triticum aestivum
  peptide (1)..(177): Ceres Seq. ID no. 12585337
MFFHIVLERNMQLHPRHFGPHLRDKLVAKLMKDVEGTCSGRHGFVVAITGVEDIGKGLIREGTGFVTFPVKYQCVVFRPFKGEILEAVVTMVNKMGFFAEAGPVQIFVSNHLIPDDMEFQSGDVPNYTTSDGSVKIQKESEVRLKIIGTRVDATEIFCIGTIKDDFLGVISDPGGAL

SEQ ID NO: 62943 - protein, 167 aa, Triticum aestivum
  peptide (1)..(167): Ceres Seq. ID no. 12585338
MQLHPRHFGPHLRDKLVAKLMKDVEGTCSGRHGFVVAITGVEDIGKGLIREGTGFVTFPVKYQCVVFRPFKGEILEAVVTMVNKMGFFAEAGPVQIFVSNHLIPDDMEFQSGDVPNYTTSDGSVKIQKESEVRLKIIGTRVDATEIFCIGTIKDDFLGVISDPGGAL

SEQ ID NO: 62944 - DNA, 836 bp, Triticum aestivum
  misc_feature (1)..(836): Ceres Seq. ID no. 13655262
aacatcctaatcgaaaaaaaaagaatactagtcgctggacctcatcgatggccgtccggtgtcacgctgctgctaccttggtctcgtcccgagcgcacctgtcctcgtacctcccgcccctcctcccctccgcgcgaccccgacccaggacgacccgcagcggcggcggcagctacaggcgggccgccgttcgcgccatgggcgccgcgccgtcttcgccctcgccgtccggacaagccccagggaaagcggataacgcgtctctgagtgatgaggagttgaagaagcgcctcacaaaagaacagtattacgtcactcggcagaagggaactgagagggcattcacaggggaatactggaacactaaaaccccaggcatctaccattgcatctgctgtgacacccctctgtttgagtcatcaaccaagtttgatagtggtactggatggccgtcctattaccagccggttggcgacaatgtgaaaagcaagcttgatatgtcgatcttcttcatgcctcggaccgagtccctgtgtgccgtctgcgacgctcacctggggcatgttttcgacgacgggccaccgccgactgggaagagatattgcatcaacagcgcgtctctgaagtttaagccccagtagtccctggaagaagaatcaagatgcaagcaccagtgcgtcccatgtaaattttggttttggtatgaactatttccagtgtagtagcctagtccgcccggtctgcgcatgtaaattgataatttccaggtttgtaatttgtaaagccatttgtccgaaacatctgcatgttcctccatgagcagtaccgtttggccc

SEQ ID NO: 62945 - protein, 212 aa, Triticum aestivum
  peptide (1)..(212): Ceres Seq. ID no. 15219722
HPNRKKKNTSRWTSSMAVRCHAAATLVSSRAHLSSYLPPLLPSARPRPRTTRSGGGSYRRAAVRAMGAAPSSPSPSGQAPGKADNASLSDEELKKRLTKEQYYVTRQKGTERAFTGEYWNTKTPGIYHCICCDTPLFESSTKFDSGTGWPSYYQPVGDNVKSKLDMSIFFMPRTESLCAVCDAHLGHVFDDGPPPTGKRYCINSASLKFKPQ

SEQ ID NO: 62946 - protein, 197 aa, Triticum aestivum
  peptide (1)..(197): Ceres Seq. ID no. 15219723
MAVRCHAAATLVSSRAHLSSYLPPLLPSARPRPRTTRSGGGSYRRAAVRAMGAAPSSPSPSGQAPGKADNASLSDEELKKRLTKEQYYVTRQKGTERAFTGEYWNTKTPGIYHCICCDTPLFESSTKFDSGTGWPSYYQPVGDNVKSKLDMSIFFMPRTESLCAVCDAHLGHVFDDGPPPTGKRYCINSASLKFKPQ

SEQ ID NO: 62947 - protein, 147 aa, Triticum aestivum
  peptide (1)..(147): Ceres Seq. ID no. 15219724
MGAAPSSPSPSGQAPGKADNASLSDEELKKRLTKEQYYVTRQKGTERAFTGEYWNTKTPGIYHCICCDTPLFESSTKFDSGTGWPSYYQPVGDNVKSKLDMSIFFMPRTESLCAVCDAHLGHVFDDGPPPTGKRYCINSASLKFKPQ

SEQ ID NO: 62948 - DNA, 816 bp, Triticum aestivum
  misc_feature (1)..(816): Ceres Seq. ID no. 12615300
aacccaaacccccgctaagcatcagcagcagtgcagcacctcccttctacctcctctgctctgcattcctccttccagctccagccgcaatcaatggccgccatgaagatcaccctcctcgccgtggccgcgatggccgtcttactaggcagcgcgtcagcggtaacctacaacgtcggcgatcagggcggttgggccctcagcaccgactacagcaactgggtgtccggcaagaagttcaacgtgggtgatgacatcgtcttcaagtactcgaccccgacgcacgacgtggtcgaggtcagcaaggccggctacgactcctgcagcaccgacggcgccatcaacaccttaacctccggcaacgacgtcatctccctcaacgccaccggcacccgctacttcatctgtggcgtccctaaccattgcagccccgccgccgccgccagcatgaaggtcgtgatcgacgtcgcctcgggctcctcctcgccgtcgtcacccatgccagctgcaggtcctggcgcgagcaactctcccccggcgccgccctccaacgccgctacctccgtcggtgccacagcaggatttggcctcgtcgccctcctggcggccggtctcatggcttgaacgcatatattgatcagctgccgcgcgcacatacgactttatcttttgttattaactactatactgtagttattatcacgggtgaatacatgtattcttttttagagcgagaatgtgatagttacttgtatctatcacgtctatatgtaatctgcaggccttcatgtctttttatataatgattctagactg

SEQ ID NO: 62949 - protein, 176 aa, Triticum aestivum; identical to SEQ ID NO: 55741
  peptide (1)..(176): Ceres Seq. ID no. 12615301

SEQ ID NO: 62950 - protein, 173 aa, Triticum aestivum; identical to SEQ ID NO: 55742
  peptide (1)..(173): Ceres Seq. ID no. 12615302

SEQ ID NO: 62951 - protein, 163 aa, Triticum aestivum; identical to SEQ ID NO: 55743
  peptide (1)..(163): Ceres Seq. ID no. 12615303

SEQ ID NO: 62952 - DNA, 924 bp, Triticum aestivum
  misc_feature (1)..(924): Ceres Seq. ID no. 15173118
gtaacaaatttgtttttttaggggttggtaacaagtaaacagggcacattcccggctgtctctactcccgggcggcgtgggcccgagatgcaggcgtggttctccggctctgggccctcgccctcctcgtcggcggcgtcttcgcagccgccgccatctctgctcgcggagtggaactcctacgccgccgcccgctccgccgaggaggatgtcggcggaggattcgggatcgacatcgaggccgccgtccgttccgccaacgaccgcgtcaccggcaccttcggcgtggtatctaaaggagttagagggttccctggcagcttccagtcctcaacaagcagtgttccatctggcaaatctctcatgtatttcggtctttttcttgccagtggcattttcctagttttcatcgcgttcacaatattcctgccagtcatggtaataatgcctcaaaagtttgcgatctgtttcacgatgggatgtgccttcatcattggatctttctttgcattgaaaggaccgaagaatcagctctatcatatgatttccagagagaggttacctttcaccattggatttgttggcagcatgtttgctaccatctatgtgtcaatggtgctccatagctacatactttctgttttcttctcttgtcttcagatccttgcgctagtatactatgccatctcatacttccctggtgggtctgctggaatgaagtttctgtcatctacccttgtggcctcagtgttgagatgcttcgggcgatgagttcacccgttagttgctctcacccatctgtctcgccctgtgttcagctcagtgacaattttttttcttttgctttgacatggagagtgtgtgtcaaagatgaccttggagcttgtgttcacagatatacatgcatgtccaacttaccgatac

SEQ ID NO: 62953 - protein, 227 aa, Triticum aestivum
  peptide (1)..(227): Ceres Seq. ID no. 15173119
MQAWFSGSGPSPSSSAASSQPPPSLLAEWNSYAAARSAEEDVGGGFGIDIEAAVRSANDRVTGTFGVVSKGVRGFPGSFQSSTSSVPSGKSLMYFGLFLASGIFLVFIAFTIFLPVMVIMPQKFAICFTMGCAFIIGSFFALKGPKNQLYHMISRERLPFTIGFVGSMFATIYVSMVLHSYILSVFFSCLQILALVYYAISYFPGGSAGMKFLSSTLVASVLRCFGR

SEQ ID NO: 62954 - protein, 135 aa, Triticum aestivum
  peptide (1)..(135): Ceres Seq. ID no. 15173120
MYFGLFLASGIFLVFIAFTIFLPVMVIMPQKFAICFTMGCAFIIGSFFALKGPKNQLYHMISRERLPFTIGFVGSMFATIYVSMVLHSYILSVFFSCLQILALVYYAISYFPGGSAGMKFLSSTLVASVLRCFGR

SEQ ID NO: 62955 - DNA, 813 bp, Triticum aestivum
  misc_feature (1)..(813): Ceres Seq. ID no. 12584972
caattttcattccgaagtccctttcaacgagagagagggagagagagaggagcagttagttgagacccgagacggagatggatctgctggagaggagcgcagccactattaaggcggagcagggggaggcccagcgcaaggaagccgagaggaaggagcaggagcacaaggagcaggagacccagcagccagggctcancggccgacccccgctcgccaacggcaggtctggaatgttgccaatgtcgagccctccagcaaatccgggacagcttaccattttttatggtgggtcagtatgtgtgtatgactcagtgccaccagagaaggctcaagcaatcatgctcattgcagcagcagcagctgcggcctcaaaaagcaatggcaccactgctgttaagcctccagcgatgtctgcgaccaatgctatccaagccatgcttacgcggtcgctctcactccagagcacttctgtagcaaatggacaacctcaggctgtcgcggatcctggctcgatttgcaagcttcaggctgatcttcccatcgccaggagacactcccttcagcgcttcctggagaagcgccgtgacaggttagcatgaatgaagagtacaagtagcagtctacgttcttctggagcgtattatgagtattatgacccccttacatttgttgttttgtgtttccacatgctgtgtatggtgtaccacagcatttagaaatgcatttgtatgaggccaagtcttcaaaaccaagtcttgtacttctgtgccccgttcatgatcaatccaaattatgataaccgttctattt

SEQ ID NO: 62956 - protein, 174 aa, Triticum aestivum
  peptide (1)..(174): Ceres Seq. ID no. 12584973
  misc_feature (41)..(41): Xaa is any aa, unknown or other
MDLLERSAATIKAEQGEAQRKEAERKEQEHKEQETQQPGLXGRPPLANGRSGMLPMSSPPANPGQLTIFYGGSVCVYDSVPPEKAQAIMLIAAAAAAASKSNGTTAVKPPAMSATNAIQAMLTRSLSLQSTSVANGQPQAVADPGSICKLQADLPIARRHSLQRFLEKRRDRLA

SEQ ID NO: 62957 - protein, 122 aa, Triticum aestivum
  peptide (1)..(122): Ceres Seq. ID no. 12584974
MLPMSSPPANPGQLTIFYGGSVCVYDSVPPEKAQAIMLIAAAAAAASKSNGTTAVKPPAMSATNAIQAMLTRSLSLQSTSVANGQPQAVADPGSICKLQADLPIARRHSLQRFLEKRRDRLA

SEQ ID NO: 62958 - protein, 119 aa, Triticum aestivum
  peptide (1)..(119): Ceres Seq. ID no. 12584975
MSSPPANPGQLTIFYGGSVCVYDSVPPEKAQAIMLIAAAAAAASKSNGTTAVKPPAMSATNAIQAMLTRSLSLQSTSVANGQPQAVADPGSICKLQADLPIARRHSLQRFLEKRRDRLA

SEQ ID NO: 62959 - DNA, 688 bp, Triticum aestivum
  misc_feature (1)..(688): Ceres Seq. ID no. 12597253
acacaaactcagagcattccgatacagcgcaaccgccgccaacaccactcctagcgagtcctcgccgccggagaagcagcaagaagatggccggaaggaagggtggcgacaggaagaaggcggtgacccgctccgtgaaggctgggctccagttccccgtcggccgcatcgggcgctacctcaagaagggccgctacgcccagcgcgtcggctccggcgcccccgtctacctcgccgccgtcctcgagtacctcgccgccgaggtcctggagcttgccggcaacgcggccaaggacaacaagaagacccgcatcatcccgcgccacctgctgctggccgtccgcaacgaccaggagctcggcaggctgctggccggcgtcaccatcgcccacggcggcgtgatccccaacatcaactccgtgctgctccccaagaagtccgccgccgccgccgagaaggaggccaagtcgcccaagaagaagacctccactaagtcccccaagaagaagaccgcggccaccaaagagtagcaggccccatagcttagccagtgttgcttagatccatttctcatggactaagatgagatcctgtatgtaatgcctgctagtctgtagtgcccgtcagatttgacgagcaaggttgacattgtgatatcagtgagaatggctaaagatgcaatcatttt

SEQ ID NO: 62960 - protein, 175 aa, Triticum aestivum
  peptide (1)..(175): Ceres Seq. ID no. 12597254
TNSEHSDTAQPPPTPLLASPRRRRSSKKMAGRKGGDRKKAVTRSVKAGLQFPVGRIGRYLKKGRYAQRVGSGAPVYLAAVLEYLAAEVLELAGNAAKDNKKTRIIPRHLLLAVRNDQELGRLLAGVTIAHGGVIPNINSVLLPKKSAAAAEKEAKSPKKKTSTKSPKKKTAATKE

SEQ ID NO: 62961 - protein, 163 aa, Triticum aestivum
  peptide (1)..(163): Ceres Seq. ID no. 12597255
HKLRAFRYSATAANTTPSESSPPEKQQEDGRKEGWRQEEGGDPLREGWAPVPRRPHRALPQEGPLRPARRLRRPRLPRRRPRVPRRRGPGACRQRGQGQQEDPHHPAPPAAGRPQRPGARQAAGRRHHRPRRRDPQHQLRAAPQEVRRRRREGGQVAQEEDLH

SEQ ID NO: 62962 - protein, 147 aa, Triticum aestivum
  peptide (1)..(147): Ceres Seq. ID no. 12597256
MAGRKGGDRKKAVTRSVKAGLQFPVGRIGRYLKKGRYAQRVGSGAPVYLAAVLEYLAAEVLELAGNAAKDNKKTRIIPRHLLLAVRNDQELGRLLAGVTIAHGGVIPNINSVLLPKKSAAAAEKEAKSPKKKTSTKSPKKKTAATKE

SEQ ID NO: 62963 - DNA, 831 bp, Triticum aestivum
  misc_feature (1)..(831): Ceres Seq. ID no. 13583556
cctaattccagaaccatcccctccgacctaggctatggctttcatcgtgtccaagctcgcgcgggcagccctcgcatcccgccccgttggagatattgctggtggcatctccccgtgtctctcccggctctatctggcggctggtaccagccgtcgcatgtttgcagctgcaggcggtcccaagtcaaaagaagcaccccgaatatttccccttgttgatgagaattccattaagtcgaaggaatccctatgggccttgtatgaatgctggtgcaagtattggggggtatcccgtgaccgtgaagagatggtccgccggttcaagtcatttgaggctactgcacagtgggtttacaaaatgaacaactctgggtgttcgcaagtgtctcaactgggcccgcatgcagatttttcagagagtgagtttgctgaggtggtgtttcctccacttcctgatgatgatgatgaagacataaaagagatggtgccaggtcaagatttgggccaggagcttgaggagcccttaaataattaattcgagaaattatgaacttgtcttactccatccgttcccaaatataagtctttctagagattcaacaagtgactacatacggagcaaaatgagtgaatctgcactctaaaatatgtctacatgcatacgtatgttgtagtccatttgaaatgtctaaaaagacttatatgtaggaacggatgagtatttggttgtggtaatactgtggtactgggattattgttgttgtctggttgttctcatggaaccaaattagaattgaaataactttgtgttattgctcaaaaaaaaaaaaa

SEQ ID NO: 62964 - protein, 166 aa, Triticum aestivum; identical to SEQ ID NO: 55769
  peptide (1)..(166): Ceres Seq. ID no. 13583557

SEQ ID NO: 62965 - protein, 125 aa, Triticum aestivum; identical to SEQ ID NO: 55770
  peptide (1)..(125): Ceres Seq. ID no. 13583558

SEQ ID NO: 62966 - DNA, 1112 bp, Triticum aestivum
  misc_feature (1)..(1112): Ceres Seq. ID no. 13654956
tccccgtgcactcgtccctccccttccccctttctcttttcgctccggcgagggcgacggcagatctgcgccgggcctaggatggtgaacgtcaactgggagctgcagggctgctgccagcacaaccaggtcgtcttcatcgccgccgtcggcgtctccaccgtcgtcatcctcgccctgtggaggacgttcctgctcacgcctttcaagctcatcaccgtcttcctccacgagaccagccacgccctcgcctgcaagctcacctgcggagatgttgagggcatgcaggtccatgctaatgagggtggtgttacacaaactcgcggtggcatttactggataatcttgcctgctggatatctgggttcatcattttggggaatggtgttcatactttcatctacacatctcctagctacaagaattgcggctggttgcttcatacttgcattaattattgttctctttgttgccaaaaattggtttctgcgctggctctgcattggtttcatcatattcattgctgttgtctgggttatacaagaatttacaactttccatgttctgaagtatgttattctattcataggtgttatgaatagcttattttcagtttacgatatctatgatgacaccatatcccgaagagtgaattcaagtgatgctgagaaatttgctgaaatctgcccttgcccttgcaatggcgttggatggggtgttatatggggattcatctcatttatttttctctgtgcgtcgatatatcttggactggttatattgtcctgagggcttgcacctcccatatattagcattttgacctgacagcgcaggcggtgcttgttgtttgtttccattggtccggacattggctgcagcttgtattgatccatgggggacaggttgttccaaatgtatacatagggcaatgagtttatgccataattaaggttgattgaaattggataggggcggttattgatgcgattcttccttgcgtttatagctcatgtagatggcatttgatatgcacagctgatatagtattatgttgttgttgagatggtattcatggaccaactggaatttattcagcaatgcctgcagtctc

SEQ ID NO: 62967 - protein, 262 aa, Triticum aestivum
  peptide (1)..(262): Ceres Seq. ID no. 13654957
SPCTRPSPSPFLFSLRRGRRQICAGPRMVNVNWELQGCCQHNQVVFIAAVGVSTVVILALWRTFLLTPFKLITVFLHETSHALACKLTCGDVEGMQVHANEGGVTQTRGGIYWIILPAGYLGSSFWGMVFILSSTHLLATRIAAGCFILALIIVLFVAKNWFLRWLCIGFIIFIAVVWVIQEFTTFHVLKYVILFIGVMNSLFSVYDIYDDTISRRVNSSDAEKFAEICPCPCNGVGWGVIWGFISFIFLCASIYLGLVILS

SEQ ID NO: 62968 - protein, 235 aa, Triticum aestivum
  peptide (1)..(235): Ceres Seq. ID no. 13654958
MVNVNWELQGCCQHNQVVFIAAVGVSTVVILALWRTFLLTPFKLITVFLHETSHALACKLTCGDVEGMQVHANEGGVTQTRGGIYWIILPAGYLGSSFWGMVFILSSTHLLATRIAAGCFILALIIVLFVAKNWFLRWLCIGFIIFIAVVWVIQEFTTFHVLKYVILFIGVMNSLFSVYDIYDDTISRRVNSSDAEKFAEICPCPCNGVGWGVIWGFISFIFLCASIYLGLVILS

SEQ ID NO: 62969 - protein, 168 aa, Triticum aestivum
  peptide (1)..(168): Ceres Seq. ID no. 13654959
MQVHANEGGVTQTRGGIYWIILPAGYLGSSFWGMVFILSSTHLLATRIAAGCFILALIIVLFVAKNWFLRWLCIGFIIFIAVVWVIQEFTTFHVLKYVILFIGVMNSLFSVYDIYDDTISRRVNSSDAEKFAEICPCPCNGVGWGVIWGFISFIFLCASIYLGLVILS

SEQ ID NO: 62970 - DNA, 563 bp, Triticum aestivum
  misc_feature (1)..(563): Ceres Seq. ID no. 12585220
aaggctagctctctcgctccttcgtcctcgcaagcatcacaccagatccaccgtaggagcaaggaagggagatccacctaacccaccaatggcggccgctgcttcctccagcgcgtggaaggcgaggtggctccgccccgaggcgtaccctatctttgcggcgacgggcgtggccgtggggatctgcgtcatgcagctggtgcgcaacatcaccaccaaccccgaggtccgggtgaccaaggagaacagggcggccggggtgctggacaaccacgacgagggccgccgctacgcgcgccaccccttccggaggttcatcgacggcaagtccgccgagatcatgcccggcatcaacagcttcttcaccgccccaccaaagaactagacgtcgttgtcgtcgccgtcggagagctctttcttcaacttgaagggtggaatcaatcccttcgcgagaattacattcttttttccgcatgaattcaagtactattcgccatgattgattgtcaggcgctgtactatattgatttttgtgatcatatataagtataaaacttgatctg

SEQ ID NO: 62971 - protein, 127 aa, Triticum aestivum
  peptide (1)..(127): Ceres Seq. ID no. 12585221
RLALSLLRPRKHHTRSTVGARKGDPPNPPMAAAASSSAWKARWLRPEAYPIFAATGVAVGICVMQLVRNITTNPEVRVTKENRAAGVLDNHDEGRRYARHPFRRFIDGKSAEIMPGINSFFTAPPKN

SEQ ID NO: 62972 - protein, 98 aa, Triticum aestivum
  peptide (1)..(98): Ceres Seq. ID no. 12585222
MAAAASSSAWKARWLRPEAYPIFAATGVAVGICVMQLVRNITTNPEVRVTKENRAAGVLDNHDEGRRYARHPFRRFIDGKSAEIMPGINSFFTAPPKN

SEQ ID NO: 62973 - protein, 64 aa, Triticum aestivum
  peptide (1)..(64): Ceres Seq. ID no. 12585223
MQLVRNITTNPEVRVTKENRAAGVLDNHDEGRRYARHPFRRFIDGKSAEIMPGINSFFTAPPKN

SEQ ID NO: 62974 - DNA, 1031 bp, Triticum aestivum
  misc_feature (1)..(1031): Ceres Seq. ID no. 15175015
accaacggcagggagagacccgaccagcgtcccacccaacgacccagcgtcgacctacctcctaccctcatccatccacccattgatccatcgattgatttggttggattaattgatccgcccccgccactcacgcgtcgccgcaatcgccgtccccgctcttcctcgtcgggacaccgcgttccccgtccgcagtctctgaccgcctctgccgcgcggatcgctggtccacgggcgggatggacaagctggtgcagttcgggaagaggcatggttcgtggtgcgggtcatgtccggctacgaggagaggaggatccggtcctacaggctgcagctgcagcagcgcctccagcaggctcaggctaagaagaaggagattgagaaacaaccagagcaagttattctgtcagaggttcgtcaagtggttcagcagatgcaagctctcaatcagcacctcgaagaagctgaaactgccatagatgagtatttcaaaccgatcgacaagaatgctcagatcttaatagacatgcaaatggagaaagaagagaagcaaatgaaggagatgctccaagtaatgcgaggccaaatacaaatgcaaagagaaatcgagacgatgaaagccgaggccagtgccgtggagcctgtcgacacccaagcgagtgcaacaacggctgagattcctccgaaacaagaaaacactaaatagatactgtccgctgttacgttttccataagctagttattatgtgcgcatggatggactctttacatgggctcttgctgggctaggtaataagtagggatctacggcaacacaactgccaattttgtacctcgggtggtattctttttcgctgggcagagtttctcgtcttcctgacccgtgttgtttcctgttcgagacggtaaatcatggaagctttgtgcaatttgatgtgggctgtgagttgtggaaactgcaccgtgtgcgtaaccaaaatttgagtcctgtcctaagtaggaagcacaattttaagtacttgggaagcttt

SEQ ID NO: 62975 - protein, 138 aa, Triticum aestivum
  peptide (1)..(138): Ceres Seq. ID no. 15175016
MSGYEERRIRSYRLQLQQRLQQAQAKKKEIEKQPEQVILSEVRQVVQQMQALNQHLEEAETAIDEYFKPIDKNAQILIDMQMEKEEKQMKEMLQVMRGQIQMQREIETMKAEASAVEPVDTQASATTAEIPPKQENTK

SEQ ID NO: 62976 - protein, 121 aa, Triticum aestivum
  peptide (1)..(121): Ceres Seq. ID no. 15175017
TNGRERPDQRPTQRPSVDLPPTLIHPPIDPSIDLVGLIDPPPPLTRRRNRRPRSSSSGHRVPRPQSLTASAARIAGPRAGWTSWCSSGRGMVRGAGHVRLRGEEDPVLQAAAAAAPPAGSG

SEQ ID NO: 62977 - protein, 90 aa, Triticum aestivum
  peptide (1)..(90): Ceres Seq. ID no. 15175018
MQALNQHLEEAETAIDEYFKPIDKNAQILIDMQMEKEEKQMKEMLQVMRGQIQMQREIETMKAEASAVEPVDTQASATTAEIPPKQENTK

SEQ ID NO: 62978 - DNA, 600 bp, Triticum aestivum
  misc_feature (1)..(600): Ceres Seq. ID no. 13596853
atttagagtccaccccctccccttcctcctctgttccacctcaccaaccgaaaccaaaccaaccaatctaccacccctctccaatggcaaccgcgcccacgtcgcaccagctcgccgccggggcgccctggagctccctcccccgcggcgggttccgggcgctcacggactccgcccccgcctccgtccgcttctccgtcggtcgccgccgcgccgcccgcctagaggtgaaagcagctggaaacatcttcggggactacttccaggttgcaacttatggagagtctcatggaggcggtgttggctgcgttatcagtggttgtccacccagaatcccactcacggaggaagacatgcaaggagaccttgatcgaaggcggccgggtcagagcagaataacaaccccaaggaaggagaccgatacttgtaaaatcctttcagggacatacgaaggaatgaccactgggacaccaattcatgttcttgtcccaaacacggatcaaagagggggtgattacactgaaatggctaaggcgtacagaccttcccatgcggatttaacttatgaccctcaaatacgtgttagatctgtgcagggag

SEQ ID NO: 62979 - protein, 199 aa, Triticum aestivum
  peptide (1)..(199): Ceres Seq. ID no. 13596854
LESTPSPSSSVPPHQPKPNQPIYHPSPMATAPTSHQLAAGAPWSSLPRGGFRALTDSAPASVRFSVGRRRAARLEVKAAGNIFGDYFQVATYGESHGGGVGCVISGCPPRIPLTEEDMQGDLDRRRPGQSRITTPRKETDTCKILSGTYEGMTTGTPIHVLVPNTDQRGGDYTEMAKAYRPSHADLTYDPQIRVRSVQG

SEQ ID NO: 62980 - protein, 172 aa, Triticum aestivum
  peptide (1)..(172): Ceres Seq. ID no. 13596855
MATAPTSHQLAAGAPWSSLPRGGFRALTDSAPASVRFSVGRRRAARLEVKAAGNIFGDYFQVATYGESHGGGVGCVISGCPPRIPLTEEDMQGDLDRRRPGQSRITTPRKETDTCKILSGTYEGMTTGTPIHVLVPNTDQRGGDYTEMAKAYRPSHADLTYDPQIRVRSVQG

SEQ ID NO: 62981 - protein, 122 aa, Triticum aestivum
  peptide (1)..(122): Ceres Seq. ID no. 13596856
FRVHPLPFLLCSTSPTETKPTNLPPLSNGNRAHVAPARRRGALELPPPRRVPGAHGLRPRLRPLLRRSPPRRPPRGESSWKHLRGLLPGCNLWRVSWRRCWLRYQWLSTQNPTHGGRHARRP

SEQ ID NO: 62982 - DNA, 1724 bp, Triticum aestivum
  misc_feature (1)..(1724): Ceres Seq. ID no. 14302438
aaaactgaacccaagggttcgctacccgcccccctcccatcctcgcgatggcggctgcgacggcgacggcggcaggagcagccgctgcggccgcctccatatccttgtttgcgtactacttcctcttcggcaggagcggctccaagttcctatgggcccgcaccaccagcgcggacgaccggaggacgcggcggaagggcctcgtggaggccgtcggcaacacgcccctcatccgcatcaacagcctctccgacgccaccgggtgtgagattctggggaaggccgaatttctgaacccgggaggcagcgtgaaggaccgtgtggcggttaagattatcgaggaggctctgaaatctggggatcttgtctgtggtggtgtagtaacagaagggagtgccggaagcacggctattagcttggccactgttgctcctgcttatggctgtaggtgccatgttgttattcctgatgatgctgccgttgagaagtctcaaataattgaagcgcttggagctactgtggaacgagtgcgtcctgtttcaatcactcacagagaccattttgtcaatattgcaagaagaagggcattggaagccaatatagcatcagcacaaagggaacctaatcacatacaaactaatggttcagcctatgttgatactaaaacgctgaactccaaacaaactaacgggtcagcacatgccagttctgaagtgcctgacactggcaaatgttaccctaattctgattcaaagggaggtttctttgctgaccagtttgagaatatggcaaactatcgagcgcattacgaatggactggtcctgagatatggaagcaaactaaagggactgttcatgcctttgttgctgccgctggtactggcggtacgattgctggagtttcacgatatcttaaggaaatgaacagaaatgtccaatgctttttaatggatccacctggatctggtctgtttaataaggtaactagaggggttatgtacacaaaagaggaggctgagggcaaaaggctgaaaaatccttttgacactattactgaaggaattggaatcaacagggtcacagcaaattttatgatggcagaactggatggcgcttaccggggaacagatagagaagctgtcgagatgtcaaggtttctgctgagaagagatggactatttgttgggagttcttcagccatgaattgtgtcggggctgtaagagttgcccgggatttaggtccaggacatacaattgtgacaattctctgcgacagtgggatgaggcatctaagtaagttcttcaatgatgaatatttggccaatcatgggttgacaccaactgctactggtctggagtttctcgatcaataaaaacttcacaggggaatgcatgatttcagcaattttgtcattcctcgttgtctgtcctgaaaacagttgatgagtgaacaccgaggcgccgaaacattccatctaacaagggaactgttggctccagataatggacctcaaattttatgtcaccctaattgaaggttcccctggaagatatagttatgtactttagagtagttgtcatagccatttagtaggggttgggatagccaaccattcagactgttgtacactgcaaatcttcttgtttttctttagcctgttgtacactgctcaagtcaccaattcatctatgtatacgcagttatttatacaatcatctatgcg

SEQ ID NO: 62983 - protein, 441 aa, Triticum aestivum
  peptide (1)..(441): Ceres Seq. ID no. 14302439
MAAATATAAGAAAAAASISLFAYYFLFGRSGSKFLWARTTSADDRRTRRKGLVEAVGNTPLIRINSLSDATGCEILGKAEFLNPGGSVKDRVAVKIIEEALKSGDLVCGGVVTEGSAGSTAISLATVAPAYGCRCHVVIPDDAAVEKSQIIEALGATVERVRPVSITHRDHFVNIARRRALEANIASAQREPNHIQTNGSAYVDTKTLNSKQTNGSAHASSEVPDTGKCYPNSDSKGGFFADQFENMANYRAHYEWTGPEIWKQTKGTVHAFVAAAGTGGTIAGVSRYLKEMNRNVQCFLMDPPGSGLFNKVTRGVMYTKEEAEGKRLKNPFDTITEGIGINRVTANFMMAELDGAYRGTDREAVEMSRFLLRRDGLFVGSSSAMNCVGAVRVARDLGPGHTIVTILCDSGMRHLSKFFNDEYLANHGLTPTATGLEFLDQ

SEQ ID NO: 62984 - DNA, 869 bp, Triticum aestivum
  misc_feature (1)..(869): Ceres Seq. ID no. 13596932
cactagacgctcctccctatttagcaaatatgccatcctttgtggcgcgtcggaaaaaaccagagctcgtgctaccggcgcaagcaacaccgcacgagactctggctctctccgacgttgacgacgccatagacctgcgatttctgcagcctgccatcgagttctttcgtgctgtcgacatcgacattgatgaccacgggctggggcggcctgccacagctgccaaggtagtcaaggcggccctcgcgaaggctctggtgcactactacccgctggcaggccgtctccgggaggctgctgggggaaaactagccgtcgagtgcacaggggaaggcgtcgtgttcgtggaggcggaggcagacgtgtccatggatgagctcggcaagccgtcgcctctgccaccatacccgtgcgtggaagaactgttgtgcgaggtgggcgaccctagggttgttcttggagttcccttgttcttcatgcaggaggcactggacttccgatgggcgaagcgagttggcggcggcttacccatggtgggggacatctccttcgactctgtgagttgccacatgaggtgtaagaatggcaagggtcaggacgtgatcgtgataaacatgatattgccaggacctgcaatggacaagtttgagaaggagattgctgtttgggtgtgcaatggacaagacgaaaagtagtggtccggctcaattcgatcagcctcatacacccctactaaaataaaccccagcgagcaagtgcttaatcaccatgtcgttttgagtttgcgactatgtaggtgaggtcgtcgtaaatttgtaaacttctaaataaagtgccccctctcaataaattatgtttatgttaaacac

SEQ ID NO: 62985 - protein, 230 aa, Triticum aestivum
  peptide (1)..(230): Ceres Seq. ID no. 13596933
LDAPPYLANMPSFVARRKKPELVLPAQATPHETLALSDVDDAIDLRFLQPAIEFFRAVDIDIDDHGLGRPATAAKVVKAALAKALVHYYPLAGRLREAAGGKLAVECTGEGVVFVEAEADVSMDELGKPSPLPPYPCVEELLCEVGDPRVVLGVPLFFMQEALDFRWAKRVGGGLPMVGDISFDSVSCHMRCKNGKGQDVIVINMILPGPAMDKFEKEIAVWVCNGQDEK

SEQ ID NO: 62986 - protein, 221 aa, Triticum aestivum
  peptide (1)..(221): Ceres Seq. ID no. 13596934
MPSFVARRKKPELVLPAQATPHETLALSDVDDAIDLRFLQPAIEFFRAVDIDIDDHGLGRPATAAKVVKAALAKALVHYYPLAGRLREAAGGKLAVECTGEGVVFVEAEADVSMDELGKPSPLPPYPCVEELLCEVGDPRVVLGVPLFFMQEALDFRWAKRVGGGLPMVGDISFDSVSCHMRCKNGKGQDVIVINMILPGPAMDKFEKEIAVWVCNGQDEK

SEQ ID NO: 62987 - DNA, 473 bp, Triticum aestivum
  misc_feature (1)..(473): Ceres Seq. ID no. 12585230
acgtcgaaaccacgaccaagccaaaccaagcaagcaaccaagaagagattggtggatgagcctgaggtacatgatgagcatgagccgggtgggcgcgcgggcggcgctggccgtgcgggacaccgtcggcaggtccgccggcaaggccgacagggcgcaggcgccagcgcagcagcaggccatggccagggccggcagggcgccggcggagtcggcgcgggccaaggcaccgctggccaggagggccgccgaggagcggcggaggcgggcggcgcaggaggagtcgctccgcaccgtcatgttcctctccatgtggggccccaacgcctagcaccaaattagtattaccgattagcagtgtgcgtgcacatggtttacgtgccgtgtggttaagtgactctaagtttgcaaatctgtgcgtacaagccgaatgtaaagtaatacagttttgctaaagcacgtctaaatgtgcc

SEQ ID NO: 62988 - protein, 113 aa, Triticum aestivum
  peptide (1)..(113): Ceres Seq. ID no. 12585231
TSKPRPSQTKQATKKRLVDEPEVHDEHEPGGRAGGAGRAGHRRQVRRQGRQGAGASAAAGHGQGRQGAGGVGAGQGTAGQEGRRGAAEAGGAGGVAPHRHVPLHVGPQRLAPN

SEQ ID NO: 62989 - protein, 109 aa, Triticum aestivum
  peptide (1)..(109): Ceres Seq. ID no. 12585232
RRNHDQAKPSKQPRRDWWMSLRYMMSMSRVGARAALAVRDTVGRSAGKADRAQAPAQQQAMARAGRAPAESARAKAPLARRAAEERRRRAAQEESLRTVMFLSMWGPNA

SEQ ID NO: 62990 - protein, 91 aa, Triticum aestivum
  peptide (1)..(91): Ceres Seq. ID no. 12585233
MSLRYMMSMSRVGARAALAVRDTVGRSAGKADRAQAPAQQQAMARAGRAPAESARAKAPLARRAAEERRRRAAQEESLRTVMFLSMWGPNA

SEQ ID NO: 62991 - DNA, 1162 bp, Triticum aestivum
  misc_feature (1)..(1162): Ceres Seq. ID no. 12585528
aatatctgctcatttatccccacaaagtcgagaggaagaaccctaggtacacctcatggagaacgccaaccaaggtgtggatccgcacgtgcttgatatagtcaattgcccggattgtggaaggcgggtggtgacgtttgtggcgaggcgcagccagtttgcgggcaagaggttctacaagtgccgcaaccacaacctggggagaggcgggtgtgatttctattggtggcaacaagcatatgcggagcacttggctgggcttggaccagtcgtgcctccattggcgcagatcaatcagggagaaaatggcatcggaggagcagatcaaggtggtcagatgcagccggcggatctagcaggaggccagtagatcggagggctggatgcctccaacatggcatccacggcggcccgatgttgcaaggtcttcgatccacgtggtggctgttggtcggcgtcaggaagccacaactcttgatcccgcatttatcaatatggtcatgtctgtcgggcaatatggctatttgcgttgccatcctttactggttgtggctgcaaatccgtgatcgatgcgcttgatgagtcgatccaatattagcagcttatggatgcttagtaggtgtcaagggttaagtagtattagcggtgtgcgcgtgttagccatatgcttttggcttggtaaccttgttgcttgtatgtttggacctatggctaacacgcgctccgcgagatccgcaagtaccagaagagcacggagctgctcatccgcaagctccccttccagcgcctcgtccgcgagatcgcccaggacttcaagaccgacctccgcttccagtcctccgccgtctccgcactgcaggaggccgccgaggcctacctcgtcggcctcttcgaggacaccaacctctgcgccatccacgccaagcgcgtcaccatcatgcccaaggacatccagctcgcccgccgcatccgtggcgagagggcctaggctgctccgtgcgcgtcgtcgtgtgttagatccaccttagccgttgttcagcggtcgagatgtgcgtgctcgtagtgtttgtttgtgccatggtggatgtagtgtgcctgatctgatgtcaccatcttgctgtcatcagtaatttaaatgaaaatgttggcggtctgttctaag

SEQ ID NO: 62992 - protein, 152 aa, Triticum aestivum
  peptide (1)..(152): Ceres Seq. ID no. 12585529
MRLMSRSNISSLWMLSRCQGLSSISGVRVLAICFWLGNLVACMFGPMANTRSARSASTRRARSCSSASSPSSASSARSPRTSRPTSASSPPPSPHCRRPPRPTSSASSRTPTSAPSTPSASPSCPRTSSSPAASVARGPRLLRARRRVLDPP

SEQ ID NO: 62993 - protein, 149 aa, Triticum aestivum
  peptide (1)..(149): Ceres Seq. ID no. 12585530
MSRSNISSLWMLSRCQGLSSISGVRVLAICFWLGNLVACMFGPMANTRSARSASTRRARSCSSASSPSSASSARSPRTSRPTSASSPPPSPHCRRPPRPTSSASSRTPTSAPSTPSASPSCPRTSSSPAASVARGPRLLRARRRVLDPP

SEQ ID NO: 62994 - protein, 139 aa, Triticum aestivum
  peptide (1)..(139): Ceres Seq. ID no. 12585531
MLSRCQGLSSISGVRVLAICFWLGNLVACMFGPMANTRSARSASTRRARSCSSASSPSSASSARSPRTSRPTSASSPPPSPHCRRPPRPTSSASSRTPTSAPSTPSASPSCPRTSSSPAASVARGPRLLRARRRVLDPP

SEQ ID NO: 62995 - protein, 104 aa, Triticum aestivum
  peptide (1)..(104): Ceres Seq. ID no. 12585532
MENANQGVDPHVLDIVNCPDCGRRVVTFVARRSQFAGKRFYKCRNHNLGRGGCDFYWWQQAYAEHLAGLGPVVPPLAQINQGENGIGGADQGGQMQPADLAGGQ

SEQ ID NO: 62996 - DNA, 789 bp, Triticum aestivum
  misc_feature (1)..(789): Ceres Seq. ID no. 13655108
acacaagtccggcgagcttctctctgatagtcctactcctgcagccccaagtctccgtcgcagcagcatccccatggccagcctcaacaacgcttcctggtccagcggcctctgcggctgcttcgacgacgtcggcggctgctgcctgacgttcttctgcccgtgcgtcgtcttcgggaggatcgccgagatcgtcgacatgggcgccacatcttgctgtgcgagcgggacggtgtacaccgcgctggcgtcgatgacggggatgggctgcttctactcctgcggctaccgctccaggctgcgggagcagtaccggctcaaggagacgccctgcggcgactgctgcgtccactggttctgcgaggcctgcgcgctctgccaggagtaccgcgagctcaagtcccgcggcttcgacatggccctcggatggcaggccaacatggagaagatggggaagaccacggcgccgcagacgcacgcggggatgactcgctagagcatccatgcggccaccgacgatgaatccattccatggtcgtcaatgtcagcttccagctcaagatgaagaatgccaccagtgtacggcgtctacttatgtcttgtcgcgagtcggtttgtgtttgtgatcgatgtgtagtgtgcctttctgttgttgtaaatcgtcgtttcccatccgtccacctccaccatctgtgatgtttatgtggacatttgaataaaagatgtatcggtcgggtctgtctgtggaagcagagtccatcatcgccctataattatgctttgaatttt

SEQ ID NO: 62997 - protein, 164 aa, Triticum aestivum
  peptide (1)..(164): Ceres Seq. ID no. 13655109
HKSGELLSDSPTPAAPSLRRSSIPMASLNNASWSSGLCGCFDDVGGCCLTFFCPCVVFGRIAEIVDMGATSCCASGTVYTALASMTGMGCFYSCGYRSRLREQYRLKETPCGDCCVHWFCEACALCQEYRELKSRGFDMALGWQANMEKMGKTTAPQTHAGMTR

SEQ ID NO: 62998 - protein, 140 aa, Triticum aestivum
  peptide (1)..(140): Ceres Seq. ID no. 13655110
MASLNNASWSSGLCGCFDDVGGCCLTFFCPCVVFGRIAEIVDMGATSCCASGTVYTALASMTGMGCFYSCGYRSRLREQYRLKETPCGDCCVHWFCEACALCQEYRELKSRGFDMALGWQANMEKMGKTTAPQTHAGMTR

SEQ ID NO: 62999 - protein, 98 aa, Triticum aestivum
  peptide (1)..(98): Ceres Seq. ID no. 13655111
MGATSCCASGTVYTALASMTGMGCFYSCGYRSRLREQYRLKETPCGDCCVHWFCEACALCQEYRELKSRGFDMALGWQANMEKMGKTTAPQTHAGMTR

SEQ ID NO: 63000 - DNA, 1061 bp, Triticum aestivum
  misc_feature (1)..(1061): Ceres Seq. ID no. 13596727
tacctagaacatcctaatcgaaaaaatagtccttcgcctgagccgctgaacccgaaccgaaccattttcactctctaaaccctacgccctcctccgccgccgcatccggccacccttcgccgccgcatccgaccatgggtagcaggctgggccgccgcgtgctccacttcgccaacctccccatcaagctcatgctccccccggcccccctatcctccgtccaggagttcgctgtcaggaccgtcccctccgcctccaaggtcgacatccgccgctgcctcgagtccgtctacggcttctccatcgccgaagtccgcaccctcaacatggagggaaagaagcaccgccgaggacccttcctcgccgccaagccagactacaagaaggcctacgtcactcttcaggccccgctctccgtttcccccgacatcttccccatcggcgcgatcctcggggagagggaacggaaggccagcgcagccgcggcgaggaggaaggttgtggaaggggcagaggtcgagggggagagggaggggaaggggaaacattggatggaggacgagagggagggcttctccagggccggatgcggcaagatcgtgtatgggaaccctgggaggctggggaacaagaggaggggacgtgccagggcgaatgagcaagctgacgaaaaggggggaaacttcccgtggaacgggatgcagctggctaccgagaaacctgctaggaaaagacactatcctcccaaggcacagggaggcatggtcttgaagcagagatcacacaggggatcagcgctgcgtggaaagagttgagttgtcgtcgcctcaaccatgagagagcaccgcgccatgaaacgcgatgcagtacgtgcatccatgactaatccgccagatccatgccgttttgcagtcacacaataaagatgcgttgatttagtatttataattggctttggttcccttttactttgctattaaagcgtgtagtgatttcagtctctcatgcacatggctggttacaatgtaacagcatttccttatctaaatttgattgtcttc

SEQ ID NO: 63001 - protein, 226 aa, Triticum aestivum
  peptide (1)..(226): Ceres Seq. ID no. 13596728
MGSRLGRRVLHFANLPIKLMLPPAPLSSVQEFAVRTVPSASKVDIRRCLESVYGFSIAEVRTLNMEGKKHRRGPFLAAKPDYKKAYVTLQAPLSVSPDIFPIGAILGERERKASAAAARRKVVEGAEVEGEREGKGKHWMEDEREGFSRAGCGKIVYGNPGRLGNKRRGRARANEQADEKGGNFPWNGMQLATEKPARKRHYPPKAQGGMVLKQRSHRGSALRGKS

SEQ ID NO: 63002 - protein, 207 aa, Triticum aestivum
  peptide (1)..(207): Ceres Seq. ID no. 13596729
MLPPAPLSSVQEFAVRTVPSASKVDIRRCLESVYGFSIAEVRTLNMEGKKHRRGPFLAAKPDYKKAYVTLQAPLSVSPDIFPIGAILGERERKASAAAARRKVVEGAEVEGEREGKGKHWMEDEREGFSRAGCGKIVYGNPGRLGNKRRGRARANEQADEKGGNFPWNGMQLATEKPARKRHYPPKAQGGMVLKQRSHRGSALRGKS

SEQ ID NO: 63003 - protein, 162 aa, Triticum aestivum
  peptide (1)..(162): Ceres Seq. ID no. 13596730
MEGKKHRRGPFLAAKPDYKKAYVTLQAPLSVSPDIFPIGAILGERERKASAAAARRKVVEGAEVEGEREGKGKHWMEDEREGFSRAGCGKIVYGNPGRLGNKRRGRARANEQADEKGGNFPWNGMQLATEKPARKRHYPPKAQGGMVLKQRSHRGSALRGKS

SEQ ID NO: 63004 - DNA, 977 bp, Triticum aestivum
  misc_feature (1)..(977): Ceres Seq. ID no. 13655287
ctccactcccgcaacccgctgctcctctcctggtgcgccgctcgacctcctcctttctcccactcaggtgcgccgccggccggccctcttcctctctccctccctctcaggatacaagtggaacaaggcatgggtgtaggtgctactcaggcgaagcacaccctcctctcctaaggaaatcatcgagcgagcaaggcccacttctaatgctcgttgcgtcctccccgattcccacccgtctcttcttcatagcgagcaccggtggcggctggtagagaggcgagccgagaggtgcagcgggctacaagtggagagatcaagcgagcgatgggccggaggatcctcaacgacgcgctgcgcacgatggtgaacgcggagcggcgggggaaggctacggcgcaactccagcccatctccggcgtcatgatctcgttcctcaatatcatgaagcaccgaggttacataaaaaatttcgacgtattcgatccacatagggttggaaaaatcaccgtggaacttcagggaaggattaaagattgcaaagctctcacttacaggcaggacctcagagccacggaaatagaaaaatacagaactaggatgcttccaacacggcagtggggctatgttgtggtgaccaccccaaatggcgttttagatcacgaggaagcaattaggcagaatgtgggcggccaggtcctcggttacttccattgaggaggaaacacagttatcccatgccgaatcagccctgggctgcattgtttatctttctgttatgactgaggtcattttatttggacatttagagcttgctgcttttgttcatggccaacagaaaatgggattacatgtcaaaagtagtatgtctggcgacactgacataaatattgtaatccttctttgggacagatatttctgtaggcgtaatacacccatgtactttgagatacacgagtaacattctagttcgagct

SEQ ID NO: 63005 - protein, 129 aa, Triticum aestivum
  peptide (1)..(129): Ceres Seq. ID no. 13655288
MGRRILNDALRTMVNAERRGKATAQLQPISGVMISFLNIMKHRGYIKNFDVFDPHRVGKITVELQGRIKDCKALTYRQDLRATEIEKYRTRMLPTRQWGYVVVTTPNGVLDHEEAIRQNVGGQVLGYFH

SEQ ID NO: 63006 - protein, 117 aa, Triticum aestivum
  peptide (1)..(117): Ceres Seq. ID no. 13655289
MVNAERRGKATAQLQPISGVMISFLNIMKHRGYIKNFDVFDPHRVGKITVELQGRIKDCKALTYRQDLRATEIEKYRTRMLPTRQWGYVVVTTPNGVLDHEEAIRQNVGGQVLGYFH

SEQ ID NO: 63007 - protein, 97 aa, Triticum aestivum
  peptide (1)..(97): Ceres Seq. ID no. 13655290
MISFLNIMKHRGYIKNFDVFDPHRVGKITVELQGRIKDCKALTYRQDLRATEIEKYRTRMLPTRQWGYVVVTTPNGVLDHEEAIRQNVGGQVLGYFH

SEQ ID NO: 63008 - DNA, 1031 bp, Triticum aestivum
  misc_feature (1)..(1031): Ceres Seq. ID no. 13598257
ttttttcaaccagacaccgcccctcttcttgctctctgctctcctctcctctcctcttctctcctctcccacacgcgtcctaaagcaagcaagctcggacgccatgagcaaggactgcggcaaccacggcgaggacgacatccggcgcacgtgccggcgcttcctggccttcctcttcttcctggccctggtggtggccgtcatcgccctcatcgtctacctcgtcctccgccccacgcacccgcgcttctatctccaggacgcctcgctccggcagctggacgtgctcaccgccaacgcctccgccgcggcgggcgtgctctccaccgtgctccaggtcaccgtcgcctcccgcaaccccaacgaccgcgtcggcgtctactacgaccgcctcgacgtctacgcctcctacaagtaccagcagatcacgctggcctccgcgctcccgccggtgtaccagggccacggcgacgtcgaggtgtggtccccggtgctctccggcccgaacgtccccttcgcgccctacctcgccgacgcgctcgccaaggacgtccaggccgggtacctcatcctccaggtgaagatcgacggccgcgtccggtggaaggtgggcagctggatctccggccactaccacatcttcgtgacctgccccgccttcctcatcggcaccggcggcaacggcgcgcccggggccaacgggctcaggttccagaccgccacctactgccacgtcgaggtctagccgtccgtccgtacgtgctctgcttcctcttcttcttcgtcatcttcctctgctccgtcggcggcggcgaggtaggtttcttgcgggtggcgcgcgcgcgtgcgcgtagccaagaagatcatcaaggctgaaggccaagggggtggtacatggtggtaataagtgttagcgtcgaggggtataggtgtaaaaaggaaaagagaatttagtgttggttactcctactaaattgtgttttgctcgtttttaattgttggtaaggtatttattccacgtttaattgtcg

SEQ ID NO: 63009 - protein, 291 aa, Triticum aestivum
  peptide (1)..(291): Ceres Seq. ID no. 13598258
FFQPDTAPLLALCSPLLSSSLLSHTRPKASKLGRHEQGLRQPRRGRHPAHVPALPGLPLLPGPGGGRHRPHRLPRPPPHAPALLSPGRLAPAAGRAHRQRLRRGGRALHRAPGHRRLPQPQRPRRRLLRPPRRLRLLQVPADHAGLRAPAGVPGPRRRRGVVPGALRPERPLRALPRRRARQGRPGRVPHPPGEDRRPRPVEGGQLDLRPLPHLRDLPRLPHRHRRQRRARGQRAQVPDRHLLPRRGLAVRPYVLCFLFFFVIFLCSVGGGEVGFLRVARARARSQEDHQG

SEQ ID NO: 63010 - protein, 247 aa, Triticum aestivum
  peptide (1)..(247): Ceres Seq. ID no. 13598259
FFNQTPPLFLLSALLSSPLLSSPTRVLKQASSDAMSKDCGNHGEDDIRRTCRRFLAFLFFLALVVAVIALIVYLVLRPTHPRFYLQDASLRQLDVLTANASAAAGVLSTVLQVTVASRNPNDRVGVYYDRLDVYASYKYQQITLASALPPVYQGHGDVEVWSPVLSGPNVPFAPYLADALAKDVQAGYLILQVKIDGRVRWKVGSWISGHYHIFVTCPAFLIGTGGNGAPGANGLRFQTATYCHVEV

SEQ ID NO: 63011 - protein, 213 aa, Triticum aestivum
  peptide (1)..(213): Ceres Seq. ID no. 13598260
MSKDCGNHGEDDIRRTCRRFLAFLFFLALVVAVIALIVYLVLRPTHPRFYLQDASLRQLDVLTANASAAAGVLSTVLQVTVASRNPNDRVGVYYDRLDVYASYKYQQITLASALPPVYQGHGDVEVWSPVLSGPNVPFAPYLADALAKDVQAGYLILQVKIDGRVRWKVGSWISGHYHIFVTCPAFLIGTGGNGAPGANGLRFQTATYCHVEV

SEQ ID NO: 63012 - DNA, 1058 bp, Triticum aestivum
  misc_feature (1)..(1058): Ceres Seq. ID no. 13596742
gaatactcctaaattagtttagtgatttcgggtcccacgcccgtatcgctgctcctctcctgcgccgctggatctcctccttcctcccactcaggatacaaggggaagaaggcaggggtctaggtgctactccggcgcggcggcagagccaagcacacccatctctcttcaagcttggcccgcccagcaatttgtttgtagctccgccactgctgagacccctagtgttcccagccacgcctcgcccactcgcgctgtgtgtgcctcggagatggccggcgcgtcattttttgataggatggtttcccagcttcggtcgacatccaagtactacactggatatcccaaggatctagggccatcaagaatcataccgttcacatcagagcgtcagtttgtgcagctattacatgaaggacggcctgtagttgtggcctttaccattaagtgcacttatacacagcatcttgacaaagtactggagaaagctgctgctacattttatcctcatataaagtttgttcgggtggaatgcccaaagtatcctgggttttgcctcacgaggcaaaagaccgagtatccatttcttgaagtattttacaacccagaacaggctgctaacccaggtaagattgtggatccgagcatcacgaaatactccgcaaaagtcctacctttcaactatgaccagagcgtgtatggatttcgagagtattttaagaagtatgggttcaagtattccgaagcaaactaactaggtttgtcatggtgaagccctgcagagtcagccagtccaactggcatgatgaggcctagtatttgaatttactttcagcctgtactaacaaacagtgatactgcattcttaagaatcagcaccccctgcatactgggctggctctgccttggcaaatggttggaaaaatggcaaagctgttagctaggtttccagtattctcaatcaagattgtagtagaatttctggatgttgcatgttgttctttgtcgaatctctgaactgcattttcagactcgctattaataaaattctgcggccc

SEQ ID NO: 63013 - protein, 160 aa, Triticum aestivum
  peptide (1)..(160): Ceres Seq. ID no. 15221964
MAGASFFDRMVSQLRSTSKYYTGYPKDLGPSRIIPFTSERQFVQLLHEGRPVVVAFTIKCTYTQHLDKVLEKAAATFYPHIKFVRVECPKYPGFCLTRQKTEYPFLEVFYNPEQAANPGKIVDPSITKYSAKVLPFNYDQSVYGFREYFKKYGFKYSEAN

SEQ ID NO: 63014 - protein, 151 aa, Triticum aestivum
  peptide (1)..(151): Ceres Seq. ID no. 15221965
MVSQLRSTSKYYTGYPKDLGPSRIIPFTSERQFVQLLHEGRPVVVAFTIKCTYTQHLDKVLEKAAATFYPHIKFVRVECPKYPGFCLTRQKTEYPFLEVFYNPEQAANPGKIVDPSITKYSAKVLPFNYDQSVYGFREYFKKYGFKYSEAN

SEQ ID NO: 63015 - DNA, 1078 bp, Triticum aestivum
  misc_feature (1)..(1078): Ceres Seq. ID no. 12615764
attattccttcccctgtcgcctcgatcgaagccgacgagctcagccggcgccggagcagggacggggacgcccgtcgcaggccgcctcgccgcccgagtcgccgccgtccggggcccttctcgcctggaggcaaagatggagcctggaaggaaacctctgagtctgctggacctatgcatccggagcgccgtcgacaacctcaggaccctcaacagcgtcgacatcgtgcctgacgagctgctcaagagaatcctgccccactgcaccttggagcagctgaggcacatcgagagttgcacacatgcggaccttaccgacgttacagatgtgctgtggaagagattcttccagcgcgagttcggtgaggaaaatatgaaccttgccatcaagagaatgaaggagaacagggtgcgttacaaatggaagaaactctttgaggcaagaacagaaaagcaaaagcaagttgaagcaagaatgtcggctgggctgaaaaacaaatatcaagcagcaaacgctgcgaaacagagcaaacaaattaaagtttgtacgaagatcccaccgaacagcaaaagaagtttttggggaggaagtggatccagcagcctagccaactccagctacaagagccctatattgaaaaaggcaaggatggaggttgacagtcgggcgaaaatgcaagctgctatccaaaggaacactgttgcaaggtcatcacagccagcaaggctgacctttcctagcgaacagacatcgaggacgacgacaattcatcgacctaattcaacgataaccatcaccaaaccagttggtccgaacaggcccattcaaaagcagaacaccagacccaaattttagaggccactgccatgacatcatgcttgtgaccgtggagttcgccatgattgcgcggaaatcgtagttcctgtggacattcaacaagtctttgtgagacagggaagagtcttgtttgtagttgccccagctgagcacttgtatctttaggggagcaaacaatatctgcaccaaacattttttcaaaattagattcaatcaaatcattgaaatgcatgagcttcg

SEQ ID NO: 63016 - protein, 284 aa, Triticum aestivum
  peptide (1)..(284): Ceres Seq. ID no. 12615765
LFLPLSPRSKPTSSAGAGAGTGTPVAGRLAARVAAVRGPSRLEAKMEPGRKPLSLLDLCIRSAVDNLRTLNSVDIVPDELLKRILPHCTLEQLRHIESCTHADLTDVTDVLWKRFFQREFGEENMNLAIKRMKENRVRYKWKKLFEARTEKQKQVEARMSAGLKNKYQAANAAKQSKQIKVCTKIPPNSKRSFWGGSGSSSLANSSYKSPILKKARMEVDSRAKMQAAIQRNTVARSSQPARLTFPSEQTSRTTTIHRPNSTITITKPVGPNRPIQKQNTRPKF

SEQ ID NO: 63017 - protein, 239 aa, Triticum aestivum
  peptide (1)..(239): Ceres Seq. ID no. 12615766
MEPGRKPLSLLDLCIRSAVDNLRTLNSVDIVPDELLKRILPHCTLEQLRHIESCTHADLTDVTDVLWKRFFQREFGEENMNLAIKRMKENRVRYKWKKLFEARTEKQKQVEARMSAGLKNKYQAANAAKQSKQIKVCTKIPPNSKRSFWGGSGSSSLANSSYKSPILKKARMEVDSRAKMQAAIQRNTVARSSQPARLTFPSEQTSRTTTIHRPNSTITITKPVGPNRPIQKQNTRPKF

SEQ ID NO: 63018 - protein, 160 aa, Triticum aestivum
  peptide (1)..(160): Ceres Seq. ID no. 12615767
MNLAIKRMKENRVRYKWKKLFEARTEKQKQVEARMSAGLKNKYQAANAAKQSKQIKVCTKIPPNSKRSFWGGSGSSSLANSSYKSPILKKARMEVDSRAKMQAAIQRNTVARSSQPARLTFPSEQTSRTTTIHRPNSTITITKPVGPNRPIQKQNTRPKF

SEQ ID NO: 63019 - DNA, 1214 bp, Triticum aestivum
  misc_feature (1)..(1214): Ceres Seq. ID no. 13596762
agagagagagaggtagccaagaacgccatggcctccgctgcttgctagctagccagccagtagtatataaggagcggcaccgcctgtgcgacccggccccgtatcccaagtcagtcgtctcatgctccggtccacgcacccgctcagccccagcagcagcagctcggccccggcgtccagctccggcgagacgatggtggggggcgcgccgagcggggcgaagctgctgcagatcctgaacgtgcgcgtggtgggcaccggcgagcgcgtggtggtgctgtcgcacggcttcggcacggaccagtcggcgtggagccgcgtgctgccgtacctcatccgtgagcaccgcgtggtgctctacgacctcgtctgcgccggcagcgtcaacccggaccacttcgacttccgccgctacaacaacctggacgcctacgtggacgacctcctctccatcctcgacgcgctccgcatcccgcgctgcgccttcgtcggccactccgtctccgccatgatcggcatcctcgcctccatccgccgccccgacctcttcgccaagctcgtcctcatcggcgcctcgcctaggttcttgaacgacagcgactaccacggcgggttcgagctggaggagatccagcaggtgttccaggcgatgtcggccaactacgaggcgtgggccaaggggtacgcgccgctggcggtgggcgcggacgtgccggcggcggtgcaggagttcagccggacgctgttcaacatgcggccggacatctcgctccacgtctgccagagcgtgttcaagacggacctccgcggcgtgctgggcatggtgcaggcgccgtgcgtggtggtgcagaccacccgcgacgtctccgtgccggccaacgtggcggcgtacctcagggcccacctcggcgggcgcaccaccatcgagcccctgccgacggagggccacctcccccacctcagcgcccccagcctcctcgcccaggtgctccgccgcgcgctcgcccggttctagcacgagaaaaaagtgagagagaagaaattactgcagctgcctgctggtttcaccgacccgcgcgtacgtacggggtctaccccgtatttcttctctgtatttttaccgcatccgcatgaatttgtacttgcctcatagactcggaagaaaatgccaggagtgtgtcctgtagcacgtatgagcactcgaaatatttctc

SEQ ID NO: 63020 - protein, 297 aa, Triticum aestivum
  peptide (1)..(297): Ceres Seq. ID no. 13596763
MLRSTHPLSPSSSSSAPASSSGETMVGGAPSGAKLLQILNVRVVGTGERVVVLSHGFGTDQSAWSRVLPYLIREHRVVLYDLVCAGSVNPDHFDFRRYNNLDAYVDDLLSILDALRIPRCAFVGHSVSAMIGILASIRRPDLFAKLVLIGASPRFLNDSDYHGGFELEEIQQVFQAMSANYEAWAKGYAPLAVGADVPAAVQEFSRTLFNMRPDISLHVCQSVFKTDLRGVLGMVQAPCVVVQTTRDVSVPANVAAYLRAHLGGRTTIEPLPTEGHLPHLSAPSLLAQVLRRALARF

SEQ ID NO: 63021 - protein, 273 aa, Triticum aestivum
  peptide (1)..(273): Ceres Seq. ID no. 13596764
MVGGAPSGAKLLQILNVRVVGTGERVVVLSHGFGTDQSAWSRVLPYLIREHRVVLYDLVCAGSVNPDHFDFRRYNNLDAYVDDLLSILDALRIPRCAFVGHSVSAMIGILASIRRPDLFAKLVLIGASPRFLNDSDYHGGFELEEIQQVFQAMSANYEAWAKGYAPLAVGADVPAAVQEFSRTLFNMRPDISLHVCQSVFKTDLRGVLGMVQAPCVVVQTTRDVSVPANVAAYLRAHLGGRTTIEPLPTEGHLPHLSAPSLLAQVLRRALARF

SEQ ID NO: 63022 - protein, 168 aa, Triticum aestivum
  peptide (1)..(168): Ceres Seq. ID no. 13596765
MIGILASIRRPDLFAKLVLIGASPRFLNDSDYHGGFELEEIQQVFQAMSANYEAWAKGYAPLAVGADVPAAVQEFSRTLFNMRPDISLHVCQSVFKTDLRGVLGMVQAPCVVVQTTRDVSVPANVAAYLRAHLGGRTTIEPLPTEGHLPHLSAPSLLAQVLRRALARF

SEQ ID NO: 63023 - DNA, 1055 bp, Triticum aestivum
  misc_feature (1)..(1055): Ceres Seq. ID no. 12585294
atcccatcccagtcagccaaacgcccaacaccacctcgtgacttcgtccgcagaccttccctcgcgcttcgactcccactccgatctccggccatggccgcggcgcgccccggatcccctgcccccagacggctgcccccctccacgctcctcctcctggccgccgtcctcctcgcggcctcgccgccggcgcgcgccctccggttcgacctcgagtccggccacaccaagtgcatctccgacgagatcaaggtcgactctatggccgtcggcaagtacagcgtggtcgcccccgaccccagctaccccgacgcacagctccccgagtcgcaccgcgtctccctcagggtgacgtcgccgtacgggaacagcatgcactactccgagaacgtgcagtcggggcacttcgccttcacggcggtggaggccggggactacctggcctgcttctgggcgcctgaccacaagccacccgtcaccgtcaccttcgagttcgactggaagagcggcgtcacggccaaggactggtccaacgtcgccaagaagggcaaggtcgatatgatggaactagagctgaagaagctagaggataccatcaaatctattcacgaggaaatgttttatctacgtgaaagggaggagcaaatgcagaacatcaacaggcagacgaactcgaggatggggtggctgagtttcctctcacttggcatctgcttatccgtggcagggctgcagctgtggcatctgaagacctttttcgagagaaagaagttgctgtagtttcccccatgatcacaaacaaatcgttgcgaattagggtatattgtttctgccagctattaacctatgtttccgagcgaatactcgaaccatcagtaagaaagaaaccgtcgatcatcatacttgtgaaatgcctttctgtgccctagcttctctccaatcaaatacagttgtaaaatgttctttttttcttgaacaggggtgaaatgtttctgttgatggtttcaaaaaaaaaaaaaaaagaaaaaagaatgaattnacaaatgctgagaagc

SEQ ID NO: 63024 - protein, 259 aa, Triticum aestivum
  peptide (1)..(259): Ceres Seq. ID no. 12585295
IPSQSAKRPTPPRDFVRRPSLALRLPLRSPAMAAARPGSPAPRRLPPSTLLLLAAVLLAASPPARALRFDLESGHTKCISDEIKVDSMAVGKYSVVAPDPSYPDAQLPESHRVSLRVTSPYGNSMHYSENVQSGHFAFTAVEAGDYLACFWAPDHKPPVTVTFEFDWKSGVTAKDWSNVAKKGKVDMMELELKKLEDTIKSIHEEMFYLREREEQMQNINRQTNSRMGWLSFLSLGICLSVAGLQLWHLKTFFERKKLL

SEQ ID NO: 63025 - protein, 228 aa, Triticum aestivum
  peptide (1)..(228): Ceres Seq. ID no. 12585296
MAAARPGSPAPRRLPPSTLLLLAAVLLAASPPARALRFDLESGHTKCISDEIKVDSMAVGKYSVVAPDPSYPDAQLPESHRVSLRVTSPYGNSMHYSENVQSGHFAFTAVEAGDYLACFWAPDHKPPVTVTFEFDWKSGVTAKDWSNVAKKGKVDMMELELKKLEDTIKSIHEEMFYLREREEQMQNINRQTNSRMGWLSFLSLGICLSVAGLQLWHLKTFFERKKLL

SEQ ID NO: 63026 - protein, 172 aa, Triticum aestivum
  peptide (1)..(172): Ceres Seq. ID no. 12585297
MAVGKYSVVAPDPSYPDAQLPESHRVSLRVTSPYGNSMHYSENVQSGHFAFTAVEAGDYLACFWAPDHKPPVTVTFEFDWKSGVTAKDWSNVAKKGKVDMMELELKKLEDTIKSIHEEMFYLREREEQMQNINRQTNSRMGWLSFLSLGICLSVAGLQLWHLKTFFERKKLL

SEQ ID NO: 63027 - DNA, 1304 bp, Triticum aestivum
  misc_feature (1)..(1304): Ceres Seq. ID no. 12615365
ccaaaccagtatcgacaagacgtcaaaaccctagaccggcgacgcgttcccctctctcgccgccggattcccctccgcccgtgcgtctcgcggacgtcttcgcgctcgccggctgctgttctcggttcgcccaccaccagcaatgtcttctcagatgaataaccgcatccagtccgctggaaagcgcgcgcgcacagacggtagccggcgtgaggacgactggatttgccccagctgtaacaacgtcaacttcgcattccgcaccacctgcaacatgcgcaactgcgaccagtccaggcccgcagatcacacggctatgcagactccaccccactactcggtgccggggcggtacatgccgccggggacgcctccgtccatgtacctcaccggggctcctcccccgtatggctccaacctctataatgggcatcccatgccacgctatggcattcctcagctccctccgggctctggatatccgtatggctatggcgggcgagtcccgatggggagcccctatgggccaatgcatatggcggcaccacccccatattctagtggttctatggttggtgcaggtggaatgtacagcatcagcatgcccatggatagatatggcttgggctcacccgctggtcctggggcaatgggcacaagggctggttcctattctgacgaaggctcacagaagaaatctgctggagctggacgtgataatgattggaagtgccctaattgcaacaacattaacttcgcctttcggacagtctgtaacatgagaaaatgcaacacaccaagacctgacacccagggatccaaacctgacagttcaagagctccaaaaccaaagactccagagggtagctggaagtgtgaaaagtgcaataacataaactatcctttccggacaaaatgcaaccgtccaagttgtggggaagaaaagccattgcaggcaaacagtcctgatgatctggctacagatcaggacaatcagtgagtcctagaacagtaatgaggtcaagaaggttcagcgtcgtcgtcaagtttcagtctgaatgtctggggtccatctgtgtccgtagtcgctgctgtcgtttcaagtttcttccccttgggaccatatagttgagtcacagcctcatggtaaacgttgtgaagttggcaactggagtcatggcttttcatatctctacagattttgatcaagatcatccatttgttaataccctcctgaaatttgtttgcttgtcgtggacactggactcaggggaaattgctatttgttataatggattctagct

SEQ ID NO: 63028 - protein, 285 aa, Triticum aestivum
  peptide (1)..(285): Ceres Seq. ID no. 12615366
MSSQMNNRIQSAGKRARTDGSRREDDWICPSCNNVNFAFRTTCNMRNCDQSRPADHTAMQTPPHYSVPGRYMPPGTPPSMYLTGAPPPYGSNLYNGHPMPRYGIPQLPPGSGYPYGYGGRVPMGSPYGPMHMAAPPPYSSGSMVGAGGMYSISMPMDRYGLGSPAGPGAMGTRAGSYSDEGSQKKSAGAGRDNDWKCPNCNNINFAFRTVCNMRKCNTPRPDTQGSKPDSSRAPKPKTPEGSWKCEKCNNINYPFRTKCNRPSCGEEKPLQANSPDDLATDQDNQ

SEQ ID NO: 63029 - protein, 281 aa, Triticum aestivum
  peptide (1)..(281): Ceres Seq. ID no. 12615367
MNNRIQSAGKRARTDGSRREDDWICPSCNNVNFAFRTTCNMRNCDQSRPADHTAMQTPPHYSVPGRYMPPGTPPSMYLTGAPPPYGSNLYNGHPMPRYGIPQLPPGSGYPYGYGGRVPMGSPYGPMHMAAPPPYSSGSMVGAGGMYSISMPMDRYGLGSPAGPGAMGTRAGSYSDEGSQKKSAGAGRDNDWKCPNCNNINFAFRTVCNMRKCNTPRPDTQGSKPDSSRAPKPKTPEGSWKCEKCNNINYPFRTKCNRPSCGEEKPLQANSPDDLATDQDNQ

SEQ ID NO: 63030 - protein, 241 aa, Triticum aestivum
  peptide (1)..(241): Ceres Seq. ID no. 12615368
MRNCDQSRPADHTAMQTPPHYSVPGRYMPPGTPPSMYLTGAPPPYGSNLYNGHPMPRYGIPQLPPGSGYPYGYGGRVPMGSPYGPMHMAAPPPYSSGSMVGAGGMYSISMPMDRYGLGSPAGPGAMGTRAGSYSDEGSQKKSAGAGRDNDWKCPNCNNINFAFRTVCNMRKCNTPRPDTQGSKPDSSRAPKPKTPEGSWKCEKCNNINYPFRTKCNRPSCGEEKPLQANSPDDLATDQDNQ

SEQ ID NO: 63031 - DNA, 1828 bp, Triticum aestivum
  misc_feature (1)..(1828): Ceres Seq. ID no. 13596935
cattataccacaccaaaccagcaccagcacacggcataccacaagcagcagcagcagccgccgccgtggacttcgacgctcaagtactcgagctctagcgcttcgctctgtagcggctctcgcacggatcaaagccgatggcgacggcggtccaccagctctccttctccgcgccgagcgcgggcgccaggcggcggcagagccgggcgtccgcgtccgcgtccacgacggaccggcacgaggtgctatcgccgaatcgccggctgccgctgcggaaggtgccgggcgagcacggcccgccgctgctgggcgcgctcaaggaccggctcgagtacttctacgggcccggcgggcgcgacggcttcttcgcggcccgcgtccgcgcgcaccgctccacggtggtgcgcctcaacatgccccccggccccttcgtggccaaggacccccgcgtggtggcgctcctcgacgccgcctccttcccggtcctcttcgacacctcgctcgtcgacaagaccgacctcttcaccggcaccttcatgccctccaccgacctcaccggcggctaccgcgtgctctcctacgtcgaccccgccgagcccaaccacgcgccgctcaagtcgctcctcttccacctcctcacccaccgccgccagcacgtcatccccacgttccgcgaggtctacggcggcctcttcggccgcatggagaacgacctcgcccgcgtcggcaaggccgacttcggcaactacaacgacgacgccgccttcggcttcctctgccaggcgctcctcggccgtgaccccgtcgactcgccgctccgcgacgaagggcccaagctggtagccaagtggcttctgttccagatcagcccgctgctcagcctcggcctggcgggcctgcccaccctcgtggaggacggcctcctccacagcttccgcctcccgccggcgctcattaagaaggactacggccgcctcgccgacttcttccgcgacgccggcaaggcggtgatcgacgagggcgagcggctgggcatcgcgcgggaggaggcggtgcacaacatcctcttcgccatgtgcttcaactccttcggcggcatcaagatcctgttcccgtcgctggtgaagtggctgggccgcgccggcgggcgggtgcacggccggctcgcgacggaggtgcgcgccgtcgtgcgcgccaacggcggggaggtgacgatgcgggcgctggccgagatgccgctggtgaagtcagccgtgtacgaggcgctgcggatcgagccgccggtggcgatgcagtacgggcgcgcgaagcgggacatggtggtggagagccacgactacgggtacgaggtgcgggagggggagctgctgttcgggtaccagcccatggccaccaaggacccgcgcgtgttcccgcgcgccgaggactacgtgcccgacaggttcctgggcgaggacggcgagcggctgctccggtacgtggtgtggtccaacggtcccgagtcggcgacgcccacgctgcaggacaagcagtgcgccggcaaggacttcgtggtgctcatcgcgcgcctcctcgtcgccgagctcttcctccggtacgactccttcgacgtccaggtcgggtcctcgccgctcgggtcgtcggtcaccatcacatcgcttaagaaggccaccttctgaggcatcgccacgtgtactcatttttttccctctgcttttctcgatcgatgccagtattacaccatgcatgcgatacgctagcatggagtgatagaggatttgtgcaacaaaaatttcttttcctagcaaagatgagcccgatttttccc

SEQ ID NO: 63032 - protein, 513 aa, Triticum aestivum
  peptide (1)..(513): Ceres Seq. ID no. 13596936
MATAVHQLSFSAPSAGARRRQSRASASASTTDRHEVLSPNRRLPLRKVPGEHGPPLLGALKDRLEYFYGPGGRDGFFAARVRAHRSTVVRLNMPPGPFVAKDPRVVALLDAASFPVLFDTSLVDKTDLFTGTFMPSTDLTGGYRVLSYVDPAEPNHAPLKSLLFHLLTHRRQHVIPTFREVYGGLFGRMENDLARVGKADFGNYNDDAAFGFLCQALLGRDPVDSPLRDEGPKLVAKWLLFQISPLLSLGLAGLPTLVEDGLLHSFRLPPALIKKDYGRLADFFRDAGKAVIDEGERLGIAREEAVHNILFAMCFNSFGGIKILFPSLVKWLGRAGGRVHGRLATEVRAVVRANGGEVTMRALAEMPLVKSAVYEALRIEPPVAMQYGRAKRDMVVESHDYGYEVREGELLFGYQPMATKDPRVFPRAEDYVPDRFLGEDGERLLRYVVWSNGPESATPTLQDKQCAGKDFVVLIARLLVAELFLRYDSFDVQVGSSPLGSSVTITSLKKATF

SEQ ID NO: 63033 - protein, 421 aa, Triticum aestivum
  peptide (1)..(421): Ceres Seq. ID no. 13596937
MPPGPFVAKDPRVVALLDAASFPVLFDTSLVDKTDLFTGTFMPSTDLTGGYRVLSYVDPAEPNHAPLKSLLFHLLTHRRQHVIPTFREVYGGLFGRMENDLARVGKADFGNYNDDAAFGFLCQALLGRDPVDSPLRDEGPKLVAKWLLFQISPLLSLGLAGLPTLVEDGLLHSFRLPPALIKKDYGRLADFFRDAGKAVIDEGERLGIAREEAVHNILFAMCFNSFGGIKILFPSLVKWLGRAGGRVHGRLATEVRAVVRANGGEVTMRALAEMPLVKSAVYEALRIEPPVAMQYGRAKRDMVVESHDYGYEVREGELLFGYQPMATKDPRVFPRAEDYVPDRFLGEDGERLLRYVVWSNGPESATPTLQDKQCAGKDFVVLIARLLVAELFLRYDSFDVQVGSSPLGSSVTITSLKKATF

SEQ ID NO: 63034 - protein, 380 aa, Triticum aestivum
  peptide (1)..(380): Ceres Seq. ID no. 13596938
MPSTDLTGGYRVLSYVDPAEPNHAPLKSLLFHLLTHRRQHVIPTFREVYGGLFGRMENDLARVGKADFGNYNDDAAFGFLCQALLGRDPVDSPLRDEGPKLVAKWLLFQISPLLSLGLAGLPTLVEDGLLHSFRLPPALIKKDYGRLADFFRDAGKAVIDEGERLGIAREEAVHNILFAMCFNSFGGIKILFPSLVKWLGRAGGRVHGRLATEVRAVVRANGGEVTMRALAEMPLVKSAVYEALRIEPPVAMQYGRAKRDMVVESHDYGYEVREGELLFGYQPMATKDPRVFPRAEDYVPDRFLGEDGERLLRYVVWSNGPESATPTLQDKQCAGKDFVVLIARLLVAELFLRYDSFDVQVGSSPLGSSVTITSLKKATF

SEQ ID NO: 63035 - DNA, 2223 bp, Triticum aestivum
  misc_feature (1)..(2223): Ceres Seq. ID no. 12778278
tcacttctccctccctccctccaataattctcttctctcctctccgcctccgcaccaccatcagaggaaagccagcgggaaggggggaaatccccatgcccccacccctcgccggaccagatccccggcgggccggcgcggagccttaggcggggaccggcctgaccgatgggcggggaggccccggagccgcggcggctcagccgcgcgcttagcttggacggcagcggcgtcccggaggaggcgctgcacctggtgctcggctacgtcgacgacccgcgcgaccgcgaggcggcctcgctggcgtgccgccgctggcaccacatcgacgcgctcacgcggaagcacgtcaccgtgcccttctgctacgccgtgtccccggcgcgcctgctcgcgcgcttcccgcgcctcgagtcgctcggggtcaagggcaagccccgcgccgccatgtacggcctcatccccgacgactggggcgcctacgctcggccctgggtggccgagctcgccgccccgctcgagtgcctcaaggcgctccacctgcggcgcatggtcgtcaccgacgacgacctcgccgccctcgtccgcgcccgcggccacatgctgcaggagctcaagctcgacaagtgctccggattctccaccgacgccctccgcctcgtcgcccgctcctgcagatcactgagaactttgtttctggaagagtgtacaattactgataatggcactgtatggctccatgaccttgctgccaacaatcctgttctggtgaccttgaacttctacttgacttacctcagagtggagccagctgacctcgagcttctcgccaggaattgcaagtcactaatttcattgaagattagcgactgcgacctttcagatttaattggatttttccaaatagctacatcattgcaagaatttgctggagcagaaatcagtgagcaaatgtatggaaatgttaagcttccttcaaagctttgctccttcggacttaccttcatggggacaaatgagatgcacataatctttcctttttctgctgtactcaagaagctggatttgcagtacagtttcctcaccactgaagatcattgccagctcattgcaaaatgtccgaacttactagttcttgcggtaaggaatgtgattggggatagaggactgggggttgtcggtgacacatgcaagaagctacaaaggctcagagttgagcgaggggaagatgatcctggtatgcaagaagaggaaggcggaatttctcaagtaggcctaacagctatagccgtaggttgccgtgaactggaaaatatagctgcctatgtgtctgatatcacaaatggggccctggaatccatcggaacgttctgcaaaaatctccatgactttcgccttgtcctgcttgacagacaagagacgataacagatttgccgctggacaatggtgcccgcgcgctgctgaggggctgcaccaagcttcggaggttcgctctatacctgagaccaggggggctttcagatgtaggcctcggctacattggacagcacagtggaaccatccagtacatgcttctgggtaacgttgggcaaacggatggtggattgatcagtttcgcagccgggtgccggaacctgcggaagcttgaactgaggagctgttgcttcagcgagcgggctctggcgctcgccatacggcaaatgccttccctgaggtatgtgtgggtgcagggctacagggcctctcagaccggccgtgacctcatgctcatggcgcggcccttctggaacatcgagtttacgcctcccagcacggagaccgcgggccggctgatggaagatggggagccctgcgttgataggcaagctcaggtgctggcatactactccctttctgggaagaggtccgactacccgcagtctgttgttcctctgtatcctgcgtgactgtaaatacattaagccggtatggtgtctctctgggacggcccctggctggccctctgcgcttctcgggcaataaggatgtttgtatgtgggtattgtatggatctggtagattttctagctgctgtgtactggaataagcgcattggtatttttgcctggtactcctatctaatcttaggaagatgtatactaaagtaacattgtgcgagtgaactgtgacactattgcgcttgcttcgcaggcataagcttgtctggtttccgcggcctgctc

SEQ ID NO: 63036 - protein, 592 aa, Triticum aestivum
  peptide (1)..(592): Ceres Seq. ID no. 12778279
MGGEAPEPRRLSRALSLDGSGVPEEALHLVLGYVDDPRDREAASLACRRWHHIDALTRKHVTVPFCYAVSPARLLARFPRLESLGVKGKPRAAMYGLIPDDWGAYARPWVAELAAPLECLKALHLRRMVVTDDDLAALVRARGHMLQELKLDKCSGFSTDALRLVARSCRSLRTLFLEECTITDNGTVWLHDLAANNPVLVTLNFYLTYLRVEPADLELLARNCKSLISLKISDCDLSDLIGFFQIATSLQEFAGAEISEQMYGNVKLPSKLCSFGLTFMGTNEMHIIFPFSAVLKKLDLQYSFLTTEDHCQLIAKCPNLLVLAVRNVIGDRGLGVVGDTCKKLQRLRVERGEDDPGMQEEEGGISQVGLTAIAVGCRELENIAAYVSDITNGALESIGTFCKNLHDFRLVLLDRQETITDLPLDNGARALLRGCTKLRRFALYLRPGGLSDVGLGYIGQHSGTIQYMLLGNVGQTDGGLISFAAGCRNLRKLELRSCCFSERALALAIRQMPSLRYVWVQGYRASQTGRDLMLMARPFWNIEFTPPSTETAGRLMEDGEPCVDRQAQVLAYYSLSGKRSDYPQSVVPLYPA

SEQ ID NO: 63037 - protein, 499 aa, Triticum aestivum
  peptide (1)..(499): Ceres Seq. ID no. 12778280
MYGLIPDDWGAYARPWVAELAAPLECLKALHLRRMVVTDDDLAALVRARGHMLQELKLDKCSGFSTDALRLVARSCRSLRTLFLEECTITDNGTVWLHDLAANNPVLVTLNFYLTYLRVEPADLELLARNCKSLISLKISDCDLSDLIGFFQIATSLQEFAGAEISEQMYGNVKLPSKLCSFGLTFMGTNEMHIIFPFSAVLKKLDLQYSFLTTEDHCQLIAKCPNLLVLAVRNVIGDRGLGVVGDTCKKLQRLRVERGEDDPGMQEEEGGISQVGLTAIAVGCRELENIAAYVSDITNGALESIGTFCKNLHDFRLVLLDRQETITDLPLDNGARALLRGCTKLRRFALYLRPGGLSDVGLGYIGQHSGTIQYMLLGNVGQTDGGLISFAAGCRNLRKLELRSCCFSERALALAIRQMPSLRYVWVQGYRASQTGRDLMLMARPFWNIEFTPPSTETAGRLMEDGEPCVDRQAQVLAYYSLSGKRSDYPQSVVPLYPA

SEQ ID NO: 63038 - protein, 465 aa, Triticum aestivum
  peptide (1)..(465): Ceres Seq. ID no. 12778281
MVVTDDDLAALVRARGHMLQELKLDKCSGFSTDALRLVARSCRSLRTLFLEECTITDNGTVWLHDLAANNPVLVTLNFYLTYLRVEPADLELLARNCKSLISLKISDCDLSDLIGFFQIATSLQEFAGAEISEQMYGNVKLPSKLCSFGLTFMGTNEMHIIFPFSAVLKKLDLQYSFLTTEDHCQLIAKCPNLLVLAVRNVIGDRGLGVVGDTCKKLQRLRVERGEDDPGMQEEEGGISQVGLTAIAVGCRELENIAAYVSDITNGALESIGTFCKNLHDFRLVLLDRQETITDLPLDNGARALLRGCTKLRRFALYLRPGGLSDVGLGYIGQHSGTIQYMLLGNVGQTDGGLISFAAGCRNLRKLELRSCCFSERALALAIRQMPSLRYVWVQGYRASQTGRDLMLMARPFWNIEFTPPSTETAGRLMEDGEPCVDRQAQVLAYYSLSGKRSDYPQSVVPLYPA

SEQ ID NO: 63039 - DNA, 718 bp, Triticum aestivum
  misc_feature (1)..(718): Ceres Seq. ID no. 13662276
agaacatcctaatcgaaaaaagtgttcacatctcatcctgcatctccatctccattattagtcttggttgctgtgtccacaacacaatggctccgcgttcaggtgctcttgctctcaaggcggccgccgttgctgccgttctggccatgctggtagtgccttccttggggcgctgtcatggctctccctcgccagcactgccaccgacaacctccacaccaccacctccggcgccgttgccaccaactctggcgccggcgccaggacagatatcatgcaatgactgttattcgcagtgctacttgtcctgcgacgcctccattcccttgcagtgcagcctatactgcgaccgtgaagattcctgcaactcctgcaagaccggggccatcgaggaatgcaggaccagcaaaaactgcaccgacagctgcgacgagtgcaacgacgctcccaactttaaatgtgccttctcctgcaccacccgaaactgcatcgggtgtcattacggggcgggccagatgtgcaataaagcgtgcagagaggagtgctccgcacccaaatgcgtaccctagaggcctggaaactagctaaagcatgtgcgtcgcatggtcaatgcgtcttcctgtgatgcatctatgtgcacattgtgtatgagatgctatgacatcgaataatatgggaagttgtatgtttttatctggaagaaaaatcgttgagtatc

SEQ ID NO: 63040 - protein, 188 aa, Triticum aestivum
  peptide (1)..(188): Ceres Seq. ID no. 13662277
NILIEKSVHISSCISISIISLGCCVHNTMAPRSGALALKAAAVAAVLAMLVVPSLGRCHGSPSPALPPTTSTPPPPAPLPPTLAPAPGQISCNDCYSQCYLSCDASIPLQCSLYCDREDSCNSCKTGAIEECRTSKNCTDSCDECNDAPNFKCAFSCTTRNCIGCHYGAGQMCNKACREECSAPKCVP

SEQ ID NO: 63041 - protein, 160 aa, Triticum aestivum
  peptide (1)..(160): Ceres Seq. ID no. 13662278
MAPRSGALALKAAAVAAVLAMLVVPSLGRCHGSPSPALPPTTSTPPPPAPLPPTLAPAPGQISCNDCYSQCYLSCDASIPLQCSLYCDREDSCNSCKTGAIEECRTSKNCTDSCDECNDAPNFKCAFSCTTRNCIGCHYGAGQMCNKACREECSAPKCVP

SEQ ID NO: 63042 - protein, 140 aa, Triticum aestivum
  peptide (1)..(140): Ceres Seq. ID no. 13662279
MLVVPSLGRCHGSPSPALPPTTSTPPPPAPLPPTLAPAPGQISCNDCYSQCYLSCDASIPLQCSLYCDREDSCNSCKTGAIEECRTSKNCTDSCDECNDAPNFKCAFSCTTRNCIGCHYGAGQMCNKACREECSAPKCVP

SEQ ID NO: 63043 - DNA, 528 bp, Triticum aestivum
  misc_feature (1)..(528): Ceres Seq. ID no. 13583869
tcgaaaaaatttcaagggacgttgctaaattcgtggttcaaggtcaccaagaacgaacacttcagctatttagacttgaagacgtggccatgggaatatggatccagcaatacaaagacagtggccagcaagtgaactatgccaacgatgagcgcttctacaacgaaggatgcgactctgattacgtcctcgcccactaccagagcccgaggcttatgatgtgcttgtgggagaagctccagaaggaatctcaagcagtgtgctgtgaataactctgaatcagtgttagcacgagccgtgcaaggacgcggtagatcagttagtcttgttgttgttgttgttgttggtggtggtggtggtggtggtatgcgtccagcatttttatgtgggtgggaagtttgtgtgtaacagttgtaacaaccggcgatcatcgttcttttgttccgatcaacgtttttgtttcacggaagagagtgttgatccatgtatatgaatgttgttctcaaatgagactttgagagagattgc

SEQ ID NO: 63044 - protein, 89 aa, Triticum aestivum
  peptide (1)..(89): Ceres Seq. ID no. 13583870
EKISRDVAKFVVQGHQERTLQLFRLEDVAMGIWIQQYKDSGQQVNYANDERFYNEGCDSDYVLAHYQSPRLMMCLWEKLQKESQAVCCE

SEQ ID NO: 63045 - protein, 60 aa, Triticum aestivum
  peptide (1)..(60): Ceres Seq. ID no. 13583871
MGIWIQQYKDSGQQVNYANDERFYNEGCDSDYVLAHYQSPRLMMCLWEKLQKESQAVCCE

SEQ ID NO: 63046 - protein, 44 aa, Triticum aestivum
  peptide (1)..(44): Ceres Seq. ID no. 13583872
SKKFQGTLLNSWFKVTKNEHFSYLDLKTWPWEYGSSNTKTVASK

SEQ ID NO: 63047 - DNA, 825 bp, Triticum aestivum
  misc_feature (1)..(825): Ceres Seq. ID no. 12585313
aaagcagaaaagaaagatcatcgagcttccaatccaggtcttcactcatcaccggtgcaatacgtgcgcgagtacaaaaccgcacagacatgtcgacggtggaggaggagctgtccgagtgcgaggtgctgtggccggagacgcgccacggcgctccggggagcgcgtgggggccatcgacggcggctcccagggcctccagggcccgccggcagtgctctgcgccggtggacattcccagggccgcgcacctgtccggcgggcgcgctggcctggacgacgacgaggaggaggaggaggacggcgccatggtgccgccgcacctgatggtgtcgcgcaggtggtcggaggggaaggcggcggcggccttctcgctgcggtccgggcccgggcgcgcgcaccgggacctcaaccacctgcgcaactccgtgctgcggatgaccggcttcatcgaagggtgacggacgaggcggacccgtcatctgtgcatatgtgcgagaaaagtcagtcaccacgcgtcttcccgacggtgttggccggtcaattttgttcggctcatcttccccgtggttgccaatcaaattaattaatttgcatccgttggttgatgcaaatcggccagtagtgagttaggattttttttttggaatggaatagtatacatttttctgaataatctacgactgtactactccctccgtccgaatacttgttatcaaaatgaacaaaaaacgatgtatttagaactaaaatacatttagatacatcctcttttattcattttaatgaaaagtatttccagacaaagggagtatgagattcttc

SEQ ID NO: 63048 - protein, 194 aa, Triticum aestivum
  peptide (1)..(194): Ceres Seq. ID no. 12585314
KQKRKIIELPIQVFTHHRCNTCASTKPHRHVDGGGGAVRVRGAVAGDAPRRSGERVGAIDGGSQGLQGPPAVLCAGGHSQGRAPVRRARWPGRRRGGGGGRRHGAAAPDGVAQVVGGEGGGGLLAAVRARARAPGPQPPAQLRAADDRLHRRVTDEADPSSVHMCEKSQSPRVFPTVLAGQFCSAHLPRGCQSN

SEQ ID NO: 63049 - protein, 152 aa, Triticum aestivum
  peptide (1)..(152): Ceres Seq. ID no. 12585315
SRKERSSSFQSRSSLITGAIRARVQNRTDMSTVEEELSECEVLWPETRHGAPGSAWGPSTAAPRASRARRQCSAPVDIPRAAHLSGGRAGLDDDEEEEEDGAMVPPHLMVSRRWSEGKAAAAFSLRSGPGRAHRDLNHLRNSVLRMTGFIEG

SEQ ID NO: 63050 - protein, 123 aa, Triticum aestivum
  peptide (1)..(123): Ceres Seq. ID no. 12585316
MSTVEEELSECEVLWPETRHGAPGSAWGPSTAAPRASRARRQCSAPVDIPRAAHLSGGRAGLDDDEEEEEDGAMVPPHLMVSRRWSEGKAAAAFSLRSGPGRAHRDLNHLRNSVLRMTGFIEG

SEQ ID NO: 63051 - DNA, 1080 bp, Triticum aestivum
  misc_feature (1)..(1080): Ceres Seq. ID no. 13596939
atcatagattacttccaagtagataattgaatattaaataagtaaaaattctgcacaatgtagtactgataacatggtgttagttcctatgttttttttgcttaaagcctatattagtcgaatttaattggtttttacagttacacccacagattacagcattcaatgagttcgatttgtggcagaatcaatgttgttcgttgttctgttccatgattcctagcagttttttgtttcatcataggtggtcacattcagattcagatttttataattacattcagattttttttacttaatgatgatatgtgtagccatcctccctggcgctgcaatctgtgagtatgttggtgcattgccgaggactggagagaaaaggtcagggtctgatatgcatatgccagcacttcatgttgagaacaattccgaggcaccatcggcaccggagtactgtatcgatgctggatccgttggaagtttcgcaaggttcataaaccacagctgcaaccctaacctctttgcccagtgtgtcctaaccaatcaccacgacatcaagctagaaaaggtgatgctttttgctgccgacacggtagcacctaacgtcgacaactgcgatgtcaggaactccctcacaattgccgaatatgtcgctgaaattacaacttctacagacagaccaaggagttgagttgtgaggcccccacctacatgacacaccaaactgatatcaatgagaaaaggcgtagtattcccattgactggttgactgaggtgcaatacaagcttgagctactaggtgaaacactattccttgctgtcaacatcattgatagatcaatgcatagaaaaacatgtctcgagttttctcttgaatgaaacctgcaagtttctcaactatttagtgaagcttaccttgaaaagaactataaatactacaggaaggagagcaagacaatgacagttcgttggaatatggatttttagaggatatttatgggttcaaacctctgtaattacatattactttccttgctgatgctattgctcatgttataaaactgtcctacttcgcaaaaaatg

SEQ ID NO: 63052 - protein, 129 aa, Triticum aestivum
  peptide (1)..(129): Ceres Seq. ID no. 15222006
MMICVAILPGAAICEYVGALPRTGEKRSGSDMHMPALHVENNSEAPSAPEYCIDAGSVGSFARFINHSCNPNLFAQCVLTNHHDIKLEKVMLFAADTVAPNVDNCDVRNSLTIAEYVAEITTSTDRPRS

SEQ ID NO: 63053 - protein, 128 aa, Triticum aestivum
  peptide (1)..(128): Ceres Seq. ID no. 15222007
MICVAILPGAAICEYVGALPRTGEKRSGSDMHMPALHVENNSEAPSAPEYCIDAGSVGSFARFINHSCNPNLFAQCVLTNHHDIKLEKVMLFAADTVAPNVDNCDVRNSLTIAEYVAEITTSTDRPRS

SEQ ID NO: 63054 - protein, 98 aa, Triticum aestivum
  peptide (1)..(98): Ceres Seq. ID no. 15222008
MHMPALHVENNSEAPSAPEYCIDAGSVGSFARFINHSCNPNLFAQCVLTNHHDIKLEKVMLFAADTVAPNVDNCDVRNSLTIAEYVAEITTSTDRPRS

SEQ ID NO: 63055 - DNA, 595 bp, Triticum aestivum
  misc_feature (1)..(595): Ceres Seq. ID no. 15225794
cccaagcatgagctcctctcccccgctctcctccacccctcccatggccgcccccagctcctgggcctccccgttccacgaaaagagagcttagcgctgccgagccctccgtcctctccacttcccggctgctttctccgtccgtccggtcgtcaatcttcgtcgagcagagagagggagggaggaggtcgtcagattcgcgcgagatccatggggaagtacgtggagctgctggacatgggggtgcgcatcgccgcgcggttccactcccactgcccgcagacggcccgcatgtactaccacccccccgcctcctcctccgccgcccccggcgccggcgacggcggccggatggtgcccggagaaggcgccgtggccatggccatgatgaagaggcagcagcgggccgccatcgacgccacggagatcatcctctacaccgtcgtctaggccggccggttgctgctgcgctcatccggatttatcgtaccattgaagggagagagagatgctatcttattttattgttacctttgttttattttcgaatcgaggagagggaaatgaaagacgggagtgaatgttcgattgattg

SEQ ID NO: 63056 - protein, 149 aa, Triticum aestivum
  peptide (1)..(149): Ceres Seq. ID no. 15225795
PKHELLSPALLHPSHGRPQLLGLPVPRKESLALPSPPSSPLPGCFLRPSGRQSSSSREREGGGRQIRARSMGKYVELLDMGVRIAARFHSHCPQTARMYYHPPASSSAAPGAGDGGRMVPGEGAVAMAMMKRQQRAAIDATEIILYTVV

SEQ ID NO: 63057 - protein, 79 aa, Triticum aestivum
  peptide (1)..(79): Ceres Seq. ID no. 15225796
MGKYVELLDMGVRIAARFHSHCPQTARMYYHPPASSSAAPGAGDGGRMVPGEGAVAMAMMKRQQRAAIDATEIILYTVV

SEQ ID NO: 63058 - DNA, 1232 bp, Triticum aestivum
  misc_feature (1)..(1232): Ceres Seq. ID no. 15178699
cattccaatcaagaaaggcatcaagccactccagtattcctcctttgcccgtgagtgtgtcctctcagtacgtgggtgtgtgtgagttcatctgtacgtgagtgagagtgagagcagcttgtgtgcagccgctggttttagctaggcttcctctgattagtacaaagtgagagctagctatttgtagtttcgggctaacaattggcatcagagcctcaggttatgccgaagcatatgccgaaggaaggcgtcgccggcgacggctccaagaccgccgggcagagctcggctgaggacacccgtgcggtggacgcgctcgcgctgcgaggcaggccgggaggtgagctgggtgcgccacgctccgtgcgagacgtgggcatgtccagtacctccttccctctcctcacgcggaccaactaccccagttggtccatcatgacaaatgtcatcatggagacgaggcatatgtggaaagccgtggaaaccgacgatgtcgagtacaaggaggaccggcgggcgatggaagcgatcttgcggtccgtcccagaggagatggtgctcacccttggcgccaaggagacggccaaggaagcatgggagaccatcaagactctgcgcatcggcgtggagcgcgtacgggagtcgaaggcccagaccttgcgcctctagtacgaggaaatccggttcaaggccggtgaacaagtcgacgacttcgccttgtggctgcaaggtctcgtcaacgagctcggaacactcggagatcccatcgacaacaagatggtcattctcaagttcctccgcgtcgtccccaggcagtacaagcaactggcctggtccatcgagagtttggtggatctctccaccatgacgatcgaggagctggtagggcggctgaaggttgtcgaggggcgcggcgacgaagccgacaatcgtgttggcggtgaactactgctcaccaaggagtagtgggacgcgcagcttcagcagtgcggctgcgacggctcttccggcagagggggaggagcccccacaggaagcagaggtcgcggaagaggcggaggccgcacccagagcgctggcggcaaccgcggtgcgcaagccaaggcgggcagggcgaggcgctggcaactactatataattgcatgtgatgtttattatgtttatgcatcttgtttacttagaacgacggtagtaaataagatgatcccttacagcaaaaaaaaaaaaaaaa

SEQ ID NO: 63059 - protein, 148 aa, Triticum aestivum
  peptide (1)..(148): Ceres Seq. ID no. 15178700
MPKHMPKEGVAGDGSKTAGQSSAEDTRAVDALALRGRPGGELGAPRSVRDVGMSSTSFPLLTRTNYPSWSIMTNVIMETRHMWKAVETDDVEYKEDRRAMEAILRSVPEEMVLTLGAKETAKEAWETIKTLRIGVERVRESKAQTLRL

SEQ ID NO: 63060 - protein, 144 aa, Triticum aestivum
  peptide (1)..(144): Ceres Seq. ID no. 15178701
MPKEGVAGDGSKTAGQSSAEDTRAVDALALRGRPGGELGAPRSVRDVGMSSTSFPLLTRTNYPSWSIMTNVIMETRHMWKAVETDDVEYKEDRRAMEAILRSVPEEMVLTLGAKETAKEAWETIKTLRIGVERVRESKAQTLRL

SEQ ID NO: 63061 - protein, 141 aa, Triticum aestivum
  peptide (1)..(141): Ceres Seq. ID no. 15178702
MSSWRRGICGKPWKPTMSSTRRTGGRWKRSCGPSQRRWCSPLAPRRRPRKHGRPSRLCASAWSAYGSRRPRPCASSTRKSGSRPVNKSTTSPCGCKVSSTSSEHSEIPSTTRWSFSSSSASSPGSTSNWPGPSRVWWISPP

SEQ ID NO: 63062 - DNA, 752 bp, Triticum aestivum
  misc_feature (1)..(752): Ceres Seq. ID no. 12585325
atcttcccctccgacttcgccatggacagcaccgccccgaactcttcttccgccgccgccgtcgccgccgcggccgcggccgcttccgcttccggtaacggcgtacaagggggaacgggtggggaccgtcccgaggacccgtcgaagcagaacctggcgcaggtcacgggctcgatccagaagaccctgggcctgctccaccagctcaacctcaacgtctcctccttcagctccgcgtcccagctccccctcctccagcgcctgaacgcgctcgtggcggagctcgacacgatgcagaagctcgccgacgggtgcaacatccaggtgcccatggaggtcgtcaatttgattgatgacgggaagaaccccgatgagttcaccagggacgtgctcaacagctgcatcgccaagaaccagatcaccaagggcaagaccgatgctttcaagagcctgaggaagcatcttcttgaggagctggaagaagcttttccagatgacgttgaagcgtacagacagatacgtgctacctctgctgctgagtcaaagaggttggctcagtcccaaagtgctttgcctaatggagatgccaaagtgaaacctgagcattgacagaataacccaagtgcaaagagcaagatcttgctttatatttcctatagtttttcttaggaaggctttgtgaaccaacaactgatataaccttgtatgtgctgctccctcatatgagtgatcaatatttatgtatattagtc

SEQ ID NO: 63063 - protein, 202 aa, Triticum aestivum
  peptide (1)..(202): Ceres Seq. ID no. 12585326
IFPSDFAMDSTAPNSSSAAAVAAAAAAASASGNGVQGGTGGDRPEDPSKQNLAQVTGSIQKTLGLLHQLNLNVSSFSSASQLPLLQRLNALVAELDTMQKLADGCNIQVPMEVVNLIDDGKNPDEFTRDVLNSCIAKNQITKGKTDAFKSLRKHLLEELEEAFPDDVEAYRQIRATSAAESKRLAQSQSALPNGDAKVKPEH

SEQ ID NO: 63064 - protein, 195 aa, Triticum aestivum
  peptide (1)..(195): Ceres Seq. ID no. 12585327
MDSTAPNSSSAAAVAAAAAAASASGNGVQGGTGGDRPEDPSKQNLAQVTGSIQKTLGLLHQLNLNVSSFSSASQLPLLQRLNALVAELDTMQKLADGCNIQVPMEVVNLIDDGKNPDEFTRDVLNSCIAKNQITKGKTDAFKSLRKHLLEELEEAFPDDVEAYRQIRATSAAESKRLAQSQSALPNGDAKVKPEH

SEQ ID NO: 63065 - protein, 105 aa, Triticum aestivum
  peptide (1)..(105): Ceres Seq. ID no. 12585328
MQKLADGCNIQVPMEVVNLIDDGKNPDEFTRDVLNSCIAKNQITKGKTDAFKSLRKHLLEELEEAFPDDVEAYRQIRATSAAESKRLAQSQSALPNGDAKVKPEH

SEQ ID NO: 63066 - DNA, 431 bp, Triticum aestivum
  misc_feature (1)..(431): Ceres Seq. ID no. 12585579
agcgtcgcctcgactcaaccagagcacataataagaatcaaacaacgcaacctctgcgcgcgagagatcgacacatccatcggaatcacaagacagagatgagctcgtcggcggccaagaagggggcgtcgctggtggcggcgacgagcatggcggccgtggaggcgctcaaggaccaggcggggctgtgccgctgggactacgcgctccgctcgctctaccaccgcgccgtcccggcgtccctatcctcctcctcccagcacgccgggagcggcagcgcggcggccgtcggcagggctgcgcggcccaggcgatccgaggaggagaagctgcacaaggcgtaccacatcgtctgctggggacccaactgaactgattgtaatagccaaactgattagcactaataagcacattcgtgttctgcttctcct

SEQ ID NO: 63067 - protein, 122 aa, Triticum aestivum
  peptide (1)..(122): Ceres Seq. ID no. 12585580
RRLDSTRAHNKNQTTQPLRARDRHIHRNHKTEMSSSAAKKGASLVAATSMAAVEALKDQAGLCRWDYALRSLYHRAVPASLSSSSQHAGSGSAAAVGRAARPRRSEEEKLHKAYHIVCWGPN

SEQ ID NO: 63068 - protein, 90 aa, Triticum aestivum
  peptide (1)..(90): Ceres Seq. ID no. 12585581
MSSSAAKKGASLVAATSMAAVEALKDQAGLCRWDYALRSLYHRAVPASLSSSSQHAGSGSAAAVGRAARPRRSEEEKLHKAYHIVCWGPN

SEQ ID NO: 63069 - protein, 73 aa, Triticum aestivum
  peptide (1)..(73): Ceres Seq. ID no. 12585582
MAAVEALKDQAGLCRWDYALRSLYHRAVPASLSSSSQHAGSGSAAAVGRAARPRRSEEEKLHKAYHIVCWGPN

SEQ ID NO: 63070 - DNA, 1065 bp, Triticum aestivum
  misc_feature (1)..(1065): Ceres Seq. ID no. 13596609
ctagaacatcctaatcgaaaagatttgttcccgtttcatttggtgtctttgctcagcagcgtgtctctgttgagctctagctgtactgcatcgttatccaatactggcgatacttgtggtgggttttgggttttggatgagcacccacaatgacgagtgccggcggtcactcacaatccctgtcatgggtcttggaggagtcatttttctcatgtcgctggcgggatttgtgggtgcttggaagaacatttcttgcttgctttggacatatctaataatgctgttcgtggtcctggtggcaatcatggtcttcacagtgcttgcgtttatcattacaaatactggaactggtcatgctgttcctgggtccagatataaagagtatcgtcttcaggactacagttcttggttcgtcaaacagctcaatgacactgataaatggactcatctgagaagttgccttgtgaagtcggatgattgcaatagcttgtcaaaaagatataagactctaaaacaatacaagctcgctgagctgactcccattgagtctggctgttgccgcccaccagcggagtgtggatatccagctttgaatgcttccaattttgatctgagctaccatccggtgagcacaaacgtcgactgcaaactgtacaaaaatgatcggttcctcaggtgctatgactgtaattcttgcaaagctggtgttgcgcaatacatgaagacagagtggcgagtggttgccatcttcaatgtgatattgtttatcattttgtcattcgtgtactttgttggctgctgcgcacgtcgacatgctggaggtagtgattctaaagttcctcgaagatgactcttactttgaagtgaatcctctctatgattcacgtgtcacagcgagagttagctttaccgtcccttgtaaaacattgttcattcaagttcagctgatgaaatggagtgtcaaggcttctgttctgtgggcgatttctttgtgccagtagcattttggacatctatgaaaatgaacgtcccacaatcttctgaaatacagcctcatgatcttgt

SEQ ID NO: 63071 - protein, 237 aa, Triticum aestivum
  peptide (1)..(237): Ceres Seq. ID no. 13596610
MSTHNDECRRSLTIPVMGLGGVIFLMSLAGFVGAWKNISCLLWTYLIMLFVVLVAIMVFTVLAFIITNTGTGHAVPGSRYKEYRLQDYSSWFVKQLNDTDKWTHLRSCLVKSDDCNSLSKRYKTLKQYKLAELTPIESGCCRPPAECGYPALNASNFDLSYHPVSTNVDCKLYKNDRFLRCYDCNSCKAGVAQYMKTEWRVVAIFNVILFIILSFVYFVGCCARRHAGGSDSKVPRR

SEQ ID NO: 63072 - protein, 221 aa, Triticum aestivum
  peptide (1)..(221): Ceres Seq. ID no. 13596611
MGLGGVIFLMSLAGFVGAWKNISCLLWTYLIMLFVVLVAIMVFTVLAFIITNTGTGHAVPGSRYKEYRLQDYSSWFVKQLNDTDKWTHLRSCLVKSDDCNSLSKRYKTLKQYKLAELTPIESGCCRPPAECGYPALNASNFDLSYHPVSTNVDCKLYKNDRFLRCYDCNSCKAGVAQYMKTEWRVVAIFNVILFIILSFVYFVGCCARRHAGGSDSKVPRR

SEQ ID NO: 63073 - protein, 212 aa, Triticum aestivum
  peptide (1)..(212): Ceres Seq. ID no. 13596612
MSLAGFVGAWKNISCLLWTYLIMLFVVLVAIMVFTVLAFIITNTGTGHAVPGSRYKEYRLQDYSSWFVKQLNDTDKWTHLRSCLVKSDDCNSLSKRYKTLKQYKLAELTPIESGCCRPPAECGYPALNASNFDLSYHPVSTNVDCKLYKNDRFLRCYDCNSCKAGVAQYMKTEWRVVAIFNVILFIILSFVYFVGCCARRHAGGSDSKVPRR

SEQ ID NO: 63074 - DNA, 1035 bp, Triticum aestivum
  misc_feature (1)..(1035): Ceres Seq. ID no. 15179752
gccgcctctccccataccctcgccgtctcctctcccacgaagcgcagctcgtcgaggtaagcaccggtcccccgaacccgccgctgtcccctccccgcttcgatctaagcctgaaggatctgtggttgattgcgtccgcgcagatggcctccgaggcggcgaaggtgccggtgccggagtcggtgaacttcaagaggaagaggggagaggtctgggccgccgcgaagaagcagaaggtcgccgacgagaagaagaaggacgcggagaacaccaaggtcatctacgcccgcgccaaggagtacgccggggagtatgaggctcaggacaaggagctggtgcaacttaagcgtgaggcccggatgaagggtgggttctatgtcagtcctgaggcaaagctgctgtttgtcgtccgtatccgtggtatcaatgctatgcacccaaagaccaagaagatcttgcagcttttgcgtttgaggcagatttttaatggtgtgttccttaaggtcaacaaggccaccattaacatgctgcgtcgggttgagccatatgttgcttacgggtaccctaacctcaagagtgtcagggagctgatctacaagagaggttacggaaagctcaacaagcaaaggatccttctgaccaacaacaaagtcatcgaggagggtttggggaagcacaacatcatttgcattgaggaccttgtgcatgagatcttgaccgtcggcccacacttcaaggaggctaacaacttcctgtggccattcaagctcaaggctccgctcggtggcctgaagaagaagaggaaccactacgtcgagggtggtgatgctggcaaccgcgagaactacatcaaccagctcgttagaaggatgaactaggttgaatgagcatgataatagcctgtgttggaaggataaacttgtttcacattaggaagcggatgatgaatatgcatgcgttttttgtatcgagaactagacatgtttggatgaaatcccacatttcctctagaaatactaagttttttagcttgtt

SEQ ID NO: 63075 - protein, 291 aa, Triticum aestivum
  peptide (1)..(291): Ceres Seq. ID no. 15179753
RLSPYPRRLLSHEAQLVEVSTGPPNPPLSPPRFDLSLKDLWLIASAQMASEAAKVPVPESVNFKRKRGEVWAAAKKQKVADEKKKDAENTKVIYARAKEYAGEYEAQDKELVQLKREARMKGGFYVSPEAKLLFVVRIRGINAMHPKTKKILQLLRLRQIFNGVFLKVNKATINMLRRVEPYVAYGYPNLKSVRELIYKRGYGKLNKQRILLTNNKVIEEGLGKHNIICIEDLVHEILTVGPHFKEANNFLWPFKLKAPLGGLKKKRNHYVEGGDAGNRENYINQLVRRMN

SEQ ID NO: 63076 - protein, 244 aa, Triticum aestivum
  peptide (1)..(244): Ceres Seq. ID no. 15179754
MASEAAKVPVPESVNFKRKRGEVWAAAKKQKVADEKKKDAENTKVIYARAKEYAGEYEAQDKELVQLKREARMKGGFYVSPEAKLLFVVRIRGINAMHPKTKKILQLLRLRQIFNGVFLKVNKATINMLRRVEPYVAYGYPNLKSVRELIYKRGYGKLNKQRILLTNNKVIEEGLGKHNIICIEDLVHEILTVGPHFKEANNFLWPFKLKAPLGGLKKKRNHYVEGGDAGNRENYINQLVRRMN

SEQ ID NO: 63077 - protein, 172 aa, Triticum aestivum
  peptide (1)..(172): Ceres Seq. ID no. 15179755
MKGGFYVSPEAKLLFVVRIRGINAMHPKTKKILQLLRLRQIFNGVFLKVNKATINMLRRVEPYVAYGYPNLKSVRELIYKRGYGKLNKQRILLTNNKVIEEGLGKHNIICIEDLVHEILTVGPHFKEANNFLWPFKLKAPLGGLKKKRNHYVEGGDAGNRENYINQLVRRMN

SEQ ID NO: 63078 - DNA, 798 bp, Triticum aestivum
  misc_feature (1)..(798): Ceres Seq. ID no. 12584967
aggctacggtaaccggcccaaagaccatgggataattcttcttcttcttcttcccctgggcagttgggctcctagggtttgaacgagcacacgagccaccagcccaccaccaccaccactatcacccaccatgaaacggtcgccaccacgcgatgacgcggcggcggcgggcagcagcggaggaggagggttcaacaaggggaaggggaggtggggcgggaagaagcggaacgagcagcggctgggaggcagcggcggggcgctctccctcgcggccttcgccaacgccaagtccaggaccaccggctacaacccggcactcatcaagaagcagaaggagttctacaggaatgctaaattgattagcaagtacaagaagtcgaagaagcaccaaaatcagtcaaactatcctccacaatttccaacccttgaggaaggaggtgctgatgcatcggatgtgccaaaaccacatgataagaggaagaagcgcacttcacaaagcttgaatgtggagtacgagaagaaacgtgtagaggacgagaaggcaaagaaggagcgggatgcgatgatacaggccaagaaggaggagcgagagaagtctgaagcaaagagaaaggagcttagggagaagatgttcaagaggacacgatccgggcagcctgtgatgaaatacaggattgagcatctcttggagactgcactagaaagctcaaacaagtgagttatgatatgttctaagactaatgccacactaattaaaacaaatcagtccagtgcagtgataagtttgtattagtg

SEQ ID NO: 63079 - protein, 196 aa, Triticum aestivum
  peptide (1)..(196): Ceres Seq. ID no. 12584968
MKRSPPRDDAAAAGSSGGGGFNKGKGRWGGKKRNEQRLGGSGGALSLAAFANAKSRTTGYNPALIKKQKEFYRNAKLISKYKKSKKHQNQSNYPPQFPTLEEGGADASDVPKPHDKRKKRTSQSLNVEYEKKRVEDEKAKKERDAMIQAKKEEREKSEAKRKELREKMFKRTRSGQPVMKYRIEHLLETALESSNK

SEQ ID NO: 63080 - DNA, 1209 bp, Triticum aestivum
  misc_feature (1)..(1209): Ceres Seq. ID no. 13596648
agcgccttccccatttccacaaccgcccgtcctcctcctcctccccctcccacgctacagcagagcagcagcagcagccccgtcgatctactccgcgctcctctcccccccagacccggccgctcctcgccgccatggcgcctcgcgtgccctcctccctcctcctcgtcggcgccgcgctgctcctgggcctggcggccggcgcggcgcgggcgtccaacgaggagggggacgcgctgtacgcgctgcggatgcggctgtcggaccccaacggcgtgctccagagctgggatcccaccctcgtcaacccctgcacctggttccacgtcacctgcgacaccgccagccgcgtcgtgcgcctggatttaggcaactccaacgtctccggctccatcggccccgagctcagccgccttgtgaatcttcagtacctggagctgtacaggaacaacctcaacggcgagatcccaaaagagttgggcaagctgaagaatttgatcagcttggatctgtatgccaataagctcaccggaagaatccccaagtcgctttccaagctcagctcgctgagattcatgcgtttgaacaacaacaaacttgctggatcaattccacgggagctggccaaactctccaaccttaaagtcattgatttgtctaacaatgacttatgtgggacgatccctgtcgatggtccattctcaagcttccctcttagaagcttcgagaacaacagcagactgaacggcccggagctgcaaggattggtttcctatgactttggatgctagaaagcgctgatgcacacgacaatgcacgtggaaggaaggcaaaaaattatagtagtacaacaaatagtaggaagcttagcactacaacatgtatggcttgcgatacatgcagcagaagatgaagaaggtatgtgagcatagggtctgcgttcggtactcagaccccagaaggaaaataatgggatgtgagaagtcttagcttgatcgattgttattgccgtattgtaaattgtaataagctgcttagtaccgcagctaagctgaccgcttgggtccattgagtaagcctttgccagttcggaactaaatcccagctgatgaagaatgtatctcaagttttatctacaaacgatccacatctctttgttatgtcaaaaaaaaaaaaaaaaaacctatagtgagtcgtattccaatacgg

SEQ ID NO: 63081 - protein, 262 aa, Triticum aestivum
  peptide (1)..(262): Ceres Seq. ID no. 13596649
RLPHFHNRPSSSSSPSHATAEQQQQPRRSTPRSSPPQTRPLLAAMAPRVPSSLLLVGAALLLGLAAGAARASNEEGDALYALRMRLSDPNGVLQSWDPTLVNPCTWFHVTCDTASRVVRLDLGNSNVSGSIGPELSRLVNLQYLELYRNNLNGEIPKELGKLKNLISLDLYANKLTGRIPKSLSKLSSLRFMRLNNNKLAGSIPRELAKLSNLKVIDLSNNDLCGTIPVDGPFSSFPLRSFENNSRLNGPELQGLVSYDFGC

SEQ ID NO: 63082 - protein, 218 aa, Triticum aestivum
  peptide (1)..(218): Ceres Seq. ID no. 13596650
MAPRVPSSLLLVGAALLLGLAAGAARASNEEGDALYALRMRLSDPNGVLQSWDPTLVNPCTWFHVTCDTASRVVRLDLGNSNVSGSIGPELSRLVNLQYLELYRNNLNGEIPKELGKLKNLISLDLYANKLTGRIPKSLSKLSSLRFMRLNNNKLAGSIPRELAKLSNLKVIDLSNNDLCGTIPVDGPFSSFPLRSFENNSRLNGPELQGLVSYDFGC

SEQ ID NO: 63083 - protein, 179 aa, Triticum aestivum
  peptide (1)..(179): Ceres Seq. ID no. 13596651
MRLSDPNGVLQSWDPTLVNPCTWFHVTCDTASRVVRLDLGNSNVSGSIGPELSRLVNLQYLELYRNNLNGEIPKELGKLKNLISLDLYANKLTGRIPKSLSKLSSLRFMRLNNNKLAGSIPRELAKLSNLKVIDLSNNDLCGTIPVDGPFSSFPLRSFENNSRLNGPELQGLVSYDFGC

SEQ ID NO: 63084 - DNA, 847 bp, Triticum aestivum
  misc_feature (1)..(847): Ceres Seq. ID no. 13583591
aatcgaaaacccctgactccgccgagcgagcatcacctttccgccgctgctcgccgcacgccgccccgccgaccgagaccctcaggcccgccccactctagcccgcccgcccgcatggctgccgatcgccggcccggcgtctgagggagcgggcggctgcgctcgggggccagtccggcggcgcgatggagctgtccgggagccccggcacgtggagcggcctctcgctgcggctcggccagttcctcttcgccgccgcgtccgtctgcgtcatgtcctccgcgatcggcttcgccaactacaccgccttctgctacttgattgcatcaatgggactacaagcactctggagcttgggacttgcgtgtcttgatggctatgctttgagaatgaaaaaggaactcaacagtgctgttctcgtgagcttatttgttgttggagattgggtaacgtcgatcctgtcgttcgccgcttcatgctcagcaggaagcgtcgttgttctcttcgacaaggatgcgtacttctgcagcagggacccgcatctcccctgtgggacatttgagcttgcgaccgcgtttgcattcctttcctgggcgcttagtgccacatctgcccttgtgatgttttggctcctcgcttcatcttgattagatatgtaggagctctgtctgtacctagtgttgtttggtcctgtctggttatataccgactgatgtgtcaagcagactacataggaatagactgctaattccagagaatagatgggcaatggtcgcaagttccatggagtcttaaattttagagccatgcttcagtgtttcgggccaaagataacttggttcctggc

SEQ ID NO: 63085 - protein, 153 aa, Triticum aestivum
  peptide (1)..(153): Ceres Seq. ID no. 13583592
MELSGSPGTWSGLSLRLGQFLFAAASVCVMSSAIGFANYTAFCYLIASMGLQALWSLGLACLDGYALRMKKELNSAVLVSLFVVGDWVTSILSFAASCSAGSVVVLFDKDAYFCSRDPHLPCGTFELATAFAFLSWALSATSALVMFWLLASS

SEQ ID NO: 63086 - protein, 124 aa, Triticum aestivum
  peptide (1)..(124): Ceres Seq. ID no. 13583593
MSSAIGFANYTAFCYLIASMGLQALWSLGLACLDGYALRMKKELNSAVLVSLFVVGDWVTSILSFAASCSAGSVVVLFDKDAYFCSRDPHLPCGTFELATAFAFLSWALSATSALVMFWLLASS

SEQ ID NO: 63087 - protein, 105 aa, Triticum aestivum
  peptide (1)..(105): Ceres Seq. ID no. 13583594
MGLQALWSLGLACLDGYALRMKKELNSAVLVSLFVVGDWVTSILSFAASCSAGSVVVLFDKDAYFCSRDPHLPCGTFELATAFAFLSWALSATSALVMFWLLASS

SEQ ID NO: 63088 - DNA, 1193 bp, Triticum aestivum
  misc_feature (1)..(1193): Ceres Seq. ID no. 13598420
accttcccgtcgtctccctccccaacgccgcggcgaactgacccaccacccccaaaccctcgccgccgatggagcagccgccgtcctcgccgccgccccccgcggcggccacggccacggctgcgcctacacccgctcccgctccctcttccgctcccattatcctctcggactcgcctcccgcggccgcggcgggggagcccgcgctgaccgccgcacagaaggcgctccgctccaagccggcgcgcgcccccgaggaccccgacaagaagaataagaagctcaaggatgtggagatcagttttccaattgtttatgggaccatttcgttttggcttggcaaaaaagcaagcgagtacaactctcacaaatggaccgtgtacatccgttctgcaacaaatgaggatctgagtgtcatagttaagcgtgtggtgtttcagcttcacccaagtttcactaatccaacaagagttgtagagcaaccgccttttgagttgtccgaatctggatggggggagtttgagattgcaataaccctttattttcacagtgatgtctgcgagaagcgcttggacttgtttcatcagcttaagttgtatccggaagaggacgctggacctcaatcaacaaaaaaaccagttgtagtggagacatacgatgaagttgtcttccctgagcccactgaagccttcttcttgcgagtgcaaaatcaccctgctgctactgtgcccaggctacctcctggtataacattgtcttctccaggtcctatggaacttatgccacatgataagaagcgttttgacaccaaggatcattctctgagccagtggttctcaaacttctctgaagcagatgaactattaaaactggctgctgctcgtcaacaggtgcaggctcacattgctaagctgagaaggcagctaagcatgatagagggaatgccccagcaatccagagttatctctggtcctggtcaacagtttgggcacggctaatggaacggtagctgctgtaaggaagatgctgaaacctgataacaactcgctaacagaatgtgatgaatgtgtcttcattgacgtcttaggctcgcaattgatgtttagtgctggccagtgtgcataaagcgcaacctatggattgtaccgcctttgtgcattttgaaatcaacgggagcatggtgtacctgcctc

SEQ ID NO: 63089 - protein, 309 aa, Triticum aestivum
  peptide (1)..(309): Ceres Seq. ID no. 13598421
MEQPPSSPPPPAAATATAAPTPAPAPSSAPIILSDSPPAAAAGEPALTAAQKALRSKPARAPEDPDKKNKKLKDVEISFPIVYGTISFWLGKKASEYNSHKWTVYIRSATNEDLSVIVKRVVFQLHPSFTNPTRVVEQPPFELSESGWGEFEIAITLYFHSDVCEKRLDLFHQLKLYPEEDAGPQSTKKPVVVETYDEVVFPEPTEAFFLRVQNHPAATVPRLPPGITLSSPGPMELMPHDKKRFDTKDHSLSQWFSNFSEADELLKLAAARQQVQAHIAKLRRQLSMIEGMPQQSRVISGPGQQFGHG

SEQ ID NO: 63090 - DNA, 1083 bp, Triticum aestivum
  misc_feature (1)..(1083): Ceres Seq. ID no. 12593058
acaaagccagctcacctcacaccctatcacactcgacactcgtcagtggtcatagttcatcactgcacagctctcccactcggccactctcactcccacgccgacactcgccataatgcgccgcctccacctcgccgccgccgtcctcgccgtcttcctccccctcgccgtctccgcggccgggggcaaagcagcggcagctaaggcgcccgttgccccgccggccccgccgaacatcacggcggccatggcgaagggcgggtgcaaggcgttcgcggccctggtggcggcctcgccggacgcgcactccacgttccagtcggccggggacggcggcgtgacggccttctgccccagcgacgacgccgtgaggtccttcatgcccaggtacaagaacctcagcgccgacggcaaggcgtcgctgctgctgttccacgccgtgcccgtgtactacgcgccgcggagcctcaagtccaacaacggcgtcatgaacacgctcgccaccgacggctccgccaacaacttcaacttcacggtgcagaacgagggcgagcaggtgaccatcaagacggacgcctccgaccacgccgcgcgggtcaagtccaccgtctacgacaaggaccccatcgccatctacgccgtggacacggtgctcgagccggtggagctcttcgagccggcggagtccccggcgccggcgccggctcccgcccctgtcgccgacgcgcccaaggcccccaagaagcaggcgcgccaccggcctgtagcggacgcgcccggaccggccgccgaggacgcggcgcccgccgaccagaggaagaactctaagaagagcgcggcgtccgccgccccgtgtctgccatgggccgcagtcctgcctgtcgtcgtggccgtggccgccgctctggcttagccgcttgtcctccttcgcggtggacctgcacgggaggtagtggtgtgtcggtggattgcgttgcgtgtgtcctttgtgtctgtcggtcagtgcgtgtgctcgtgcagtgaaatttctatctttactctttcttgccacattaatgttgtttagtataataatttgatgtg

SEQ ID NO: 63091 - protein, 265 aa, Triticum aestivum
  peptide (1)..(265): Ceres Seq. ID no. 12593059
MRRLHLAAAVLAVFLPLAVSAAGGKAAAAKAPVAPPAPPNITAAMAKGGCKAFAALVAASPDAHSTFQSAGDGGVTAFCPSDDAVRSFMPRYKNLSADGKASLLLFHAVPVYYAPRSLKSNNGVMNTLATDGSANNFNFTVQNEGEQVTIKTDASDHAARVKSTVYDKDPIAIYAVDTVLEPVELFEPAESPAPAPAPAPVADAPKAPKKQARHRPVADAPGPAAEDAAPADQRKNSKKSAASAAPCLPWAAVLPVVVAVAAALA

SEQ ID NO: 63092 - protein, 221 aa, Triticum aestivum
  peptide (1)..(221): Ceres Seq. ID no. 12593060
MAKGGCKAFAALVAASPDAHSTFQSAGDGGVTAFCPSDDAVRSFMPRYKNLSADGKASLLLFHAVPVYYAPRSLKSNNGVMNTLATDGSANNFNFTVQNEGEQVTIKTDASDHAARVKSTVYDKDPIAIYAVDTVLEPVELFEPAESPAPAPAPAPVADAPKAPKKQARHRPVADAPGPAAEDAAPADQRKNSKKSAASAAPCLPWAAVLPVVVAVAAALA

SEQ ID NO: 63093 - protein, 177 aa, Triticum aestivum
  peptide (1)..(177): Ceres Seq. ID no. 12593061
MPRYKNLSADGKASLLLFHAVPVYYAPRSLKSNNGVMNTLATDGSANNFNFTVQNEGEQVTIKTDASDHAARVKSTVYDKDPIAIYAVDTVLEPVELFEPAESPAPAPAPAPVADAPKAPKKQARHRPVADAPGPAAEDAAPADQRKNSKKSAASAAPCLPWAAVLPVVVAVAAALA

SEQ ID NO: 63094 - DNA, 1091 bp, Triticum aestivum
  misc_feature (1)..(1091): Ceres Seq. ID no. 13654980
ctgttgtaccgaaacggaggagggcgtctctctgctccgtcgccgatctcgcctccgccgcgaatcccccgaaaccgcgagcagattcgcgccggactcgcgacgatttttgatgagataagcccccggccacctcggggttcgcgatgctgcggaaggcggccgtcgggttcctcgcctgcctcgtgctctacctcgccttctcctcctacccccgtagccagagggctgcatatgttcagttaccagcagttactcacagggtatacctggacgtggaaattgatggccaaaatataggtagaattgtcattggtctttatggggaagttgtgccaaagacagttgaaaattttagagccctttgtacaggtgaaaagggtgatgggcccaagggtaaacctcttcactataaaggaacaccatttcatcgaatcatcccaggtttcatgattcagggtggtgacatagttagaggtgatgggaaagcacgcgaatctatatatggaggcaccttcccagatgagaatttcagtgtgaaacatacacatccaggtgttgttgctatggcaaattctggaactgattccaacggatcccagttctacataaccacaatcaagacaggctggttggatggggagcatgtggtctttggcagggtgattcagggaatggattatgtctacgccattgaagggggcgcaggcacttacaacggcaagccgaggaagaaggtgctgatcactgactctggtgagatacccaaggagaaatggggcgaggaagcagactgagtcatagcctagtgctagaaaggggttgatgcctttccacccacccaggttcaaggcatagtgattgcaatttgggttcgttgtaccaattataccgtaggggcctcccttatagtctttctgtcaaaatgaaaacggggcgactgaaattcagtaggctgcttggcctactctgttgcctacggattttgacaccgcgcgctttcgcgaccggttttcttcgcacaccagctgtgcttcgggcagagttctgaatattgtacattgtagccagcgtatcgcatgccaaaaccc

SEQ ID NO: 63095 - protein, 216 aa, Triticum aestivum
  peptide (1)..(216): Ceres Seq. ID no. 13654981
MLRKAAVGFLACLVLYLAFSSYPRSQRAAYVQLPAVTHRVYLDVEIDGQNIGRIVIGLYGEVVPKTVENFRALCTGEKGDGPKGKPLHYKGTPFHRIIPGFMIQGGDIVRGDGKARESIYGGTFPDENFSVKHTHPGVVAMANSGTDSNGSQFYITTIKTGWLDGEHVVFGRVIQGMDYVYAIEGGAGTYNGKPRKKVLITDSGEIPKEKWGEEAD

SEQ ID NO: 63096 - protein, 115 aa, Triticum aestivum
  peptide (1)..(115): Ceres Seq. ID no. 13654982
MIQGGDIVRGDGKARESIYGGTFPDENFSVKHTHPGVVAMANSGTDSNGSQFYITTIKTGWLDGEHVVFGRVIQGMDYVYAIEGGAGTYNGKPRKKVLITDSGEIPKEKWGEEAD

SEQ ID NO: 63097 - DNA, 855 bp, Triticum aestivum
  misc_feature (1)..(855): Ceres Seq. ID no. 13596975
cattacctagaacatcctaatccaaaactctctccccgctgccctctcgcaaaaaccctagctaaccccctcctccgtagtagcagcgccgatgggaggatcgcggcgcaagttcaagcgaacccgcaccaaggtgcgtgtcgggttgccgcgcaagaagccgcgcgagttcaagccggccttcgacctgcccgaggcgctcgccgccgccgccgccgcagaggccggcggccacgtgccgagctgggatgcggaaggcagcgtcgtgaagaactactccgctttcggggtcgtggccaaccccaacctgctcggcgcccactcccgcggcacgcgaggcctcgtccagagcgcctcgctgcaggcgcccgacgtcgacgccttgcgggcccccgtcgacgagttcggccccgtcgacaccggcagtgacctcgagtgcgacgatctaaaatctgcacttgggaagaaaaggagggatggcaaatctgcacctttggagccactgactaaaattcaacgactatgtattggcagattaatagagaagtatggtgacaactacaaggccatgttcatggataccaaactgaactcaatgcagcactcagtgggtacattgaaaaagctctgtgaaagatatcatgttggtggcaagaccatcctctatccgatgtagggtcgtatgaatctagatttcactttcagtctgtatcctgtttctcccactaaatgggacatgcaaattttgcctgtgaacaatgtaacttctgatgactacaatatgagaatgagtttgttttatgttggaagttccaactcaagaaaaaaaaaaaaaaaaaagcttatcgataccgt

SEQ ID NO: 63098 - protein, 194 aa, Triticum aestivum
  peptide (1)..(194): Ceres Seq. ID no. 15222009
MGGSRRKFKRTRTKVRVGLPRKKPREFKPAFDLPEALAAAAAAEAGGHVPSWDAEGSVVKNYSAFGVVANPNLLGAHSRGTRGLVQSASLQAPDVDALRAPVDEFGPVDTGSDLECDDLKSALGKKRRDGKSAPLEPLTKIQRLCIGRLIEKYGDNYKAMFMDTKLNSMQHSVGTLKKLCERYHVGGKTILYPM

SEQ ID NO: 63099 - protein, 142 aa, Triticum aestivum
  peptide (1)..(142): Ceres Seq. ID no. 15222010
HYLEHPNPKLSPRCPLAKTLANPLLRSSSADGRIAAQVQANPHQGACRVAAQEAARVQAGLRPARGARRRRRRRGRRPRAELGCGRQRREELLRFRGRGQPQPARRPLPRHARPRPERLAAGARRRRLAGPRRRVRPRRHRQ

SEQ ID NO: 63100 - DNA, 562 bp, Triticum aestivum
  misc_feature (1)..(562): Ceres Seq. ID no. 13583887
atcctaatcgaaaatatcttgtcagctttaacattttctggtgtattccttgccgagaaaataaacacgttcttaggacaaaactggaagagcttctcaagccagaattactttgatccccaaggcctcttcatctcggtcatgtggtccggtcccttgctcctgattacgatacttattctggtgaacacccttgtgacgctctgcatgctcatggtaaggtggaaaagggccgagctcaagcaccgtgctcgtgaggcccgtagcaagcaggagtgatgatgctgccctgctcttgaaccgtggatctattgtgcagtaggggattaagctgctgatttaacggagaagtttgattggaacagtaaagtggaaggttaattagcccttgattttgattgatggtcccacttatggtctctggtactgaagcacacggttttacacatgtattagctgctgttcgtcaaatttaagggatatgtttgtgtagggagctctgaatgttatttggatggctgcaggagtcaagtgccgtcgtatatgcattgctttgtcatct

SEQ ID NO: 63101 - protein, 92 aa, Triticum aestivum
  peptide (1)..(92): Ceres Seq. ID no. 13583888
ILIENILSALTFSGVFLAEKINTFLGQNWKSFSSQNYFDPQGLFISVMWSGPLLLITILILVNTLVTLCMLMVRWKRAELKHRAREARSKQE

SEQ ID NO: 63102 - protein, 45 aa, Triticum aestivum
  peptide (1)..(45): Ceres Seq. ID no. 13583889
MWSGPLLLITILILVNTLVTLCMLMVRWKRAELKHRAREARSKQE

SEQ ID NO: 63103 - DNA, 1227 bp, Triticum aestivum
  misc_feature (1)..(1227): Ceres Seq. ID no. 12625368
aacacgctcagactcagctagctaacatacaggcaggccatcaggaggagccacgaggaagaaacaaccagcgcatatatccccctcgccccctccctcccgccggcagagctgagctgagctgagccaccgttcgaccaactcgcctctagaacacagagccccccgccgcccggatcccttcttcatccccctctccgctctttgtatcgctcaccaccgccatggctaagcagcagaagaacgcgcacgtcccgaagttcggcaactgggacaacgacggcaacgtcccctacacgctctacttcgacaacgcgcgcaagggcaagggcggcaagcccatcaaccccaacgaccccgtcgagaaccccgaggccttctcctcctctgtcgtcgcgccgtcgccgaaccgctccttcgaccagggcaggccggctctccctcctgcctccccgcctcccgctcaccaccacgagcgccggcccagcgacgcgccggcggtcgccccgccgctgtccccgtaccaccgcaacgccggtggcgagccgccgagaagaggccctggcggcggacgggcaggcggaggcgggtatagcgtggagcagtcgccggggccgtccccgctgcacccgtacggacagtcgagggccgagtactccgatggcagcggctacggcctcgtggccaactccgtggaccggtcccgtgccaggggcgcctcgcggggcaacgaaacgccgacgagggggtcagcggtgcccaagttcggcgactgggactccaacccggcgtcggcggacggctacacgcacatcttcaacaaggtgagggaggagaagagcacccaggccaaggcaccggggttcggcaaggacaacgtcgcctatggcaacggccgcaggcagcacgacgacggctacgtctcctcgagtcgctggtgctttgggtggtgcaagtaggggtggttcgacagatgatgatggggaaaagtaagcgaggatctttgggaatgtaaattgtgtgaaattaagaaggtttttgccattgattcaacttcgaacttctgtaatcccattttttgggacattatttggcattgggcactcagcagagttcatattcttttgattgtgaaatatactcctactatttctttctgatgtggaatgtagagttcagccatggttgttgttaaaaaaaaaaaaaaaaaagcttatcgataccgtc

SEQ ID NO: 63104 - protein, 244 aa, Triticum aestivum
  peptide (1)..(244): Ceres Seq. ID no. 12625369
MAKQQKNAHVPKFGNWDNDGNVPYTLYFDNARKGKGGKPINPNDPVENPEAFSSSVVAPSPNRSFDQGRPALPPASPPPAHHHERRPSDAPAVAPPLSPYHRNAGGEPPRRGPGGGRAGGGGYSVEQSPGPSPLHPYGQSRAEYSDGSGYGLVANSVDRSRARGASRGNETPTRGSAVPKFGDWDSNPASADGYTHIFNKVREEKSTQAKAPGFGKDNVAYGNGRRQHDDGYVSSSRWCFGWCK

SEQ ID NO: 63105 - DNA, 1315 bp, Triticum aestivum
  misc_feature (1)..(1315): Ceres Seq. ID no. 14314080
actgagacaaagacaacttcatcttgcttactgcatcctctttcttcaagagagcacaaccaccaaggagagcaagaccaggatcagcaaagaaacatccaagaaatccaacggctgacgagtcatggaggctgccgagttcagtgcagcaactggctgccagcatacaggagccaccaaggcagtacttgctcagagagcaagaaccgcttggtgggaacctggctggtaccgagatgccggagcccattccaacaatcgatctcggcttgctgtccgcatccaacgatgcggaggaggccgccaagctgcggtcagcgctgcagacctggggattcttcaaggtttctgaccatggaatggagacctctctcatggattctgtgatgaacgcatcaagggattttttccgcctgccgctcgaagagaagagaaagtacagtaacataataggcgggaaacatttccagatggaagggtatggaactgaccaggtgaaaactcaagatcaaaggctggactggtccgatcggctgcatcttaaagtggagccagaggatgagagaaaccttgcccattggcccatacatccaaaatctttcagggatgacctgcatgagtacacatcgaagagcaagagaatcaaagacgacatccttcgggcagtggccaagctattggagctcgatgaagattgcctagttaaccagtttagcaacagggctctcacttatgctagattcaattactatcctccatgtccaagacctgatcctgtcttgggcatcaaacctcattctgatgtctatgctcttacagttcttctaatggacaaggatgtcgctgggctgcagtttgtcagagatggaacgtggtacaatgttccatctgcgtctaactacaccttactgatcaacgttggtgttacaatggagataatgaccaacgggatcttcaagggaccagtacatagggttgtgactaattctgagaaagagaggatgtcagtggccgtgttctatggtctggatcctgaaagagagattggaccgatagctcagatgttgactgaggaccaaccggcgcgatacagggaaatgaaggtcaaggatttcctagtcgcgcaccttgagcatttctctcgaggagaaagagttgtcgattcgttaaggatatgatcaaggtgagtttggtttggtgccgcaatacccatggaataaagaatttgtgacttgccgattcgttaaggatataaaacaaggtgactttacttctataaggcgatgaatctggtgaaaataaagaatttgatccc

SEQ ID NO: 63106 - protein, 313 aa, Triticum aestivum
  peptide (1)..(313): Ceres Seq. ID no. 14314081
MPEPIPTIDLGLLSASNDAEEAAKLRSALQTWGFFKVSDHGMETSLMDSVMNASRDFFRLPLEEKRKYSNIIGGKHFQMEGYGTDQVKTQDQRLDWSDRLHLKVEPEDERNLAHWPIHPKSFRDDLHEYTSKSKRIKDDILRAVAKLLELDEDCLVNQFSNRALTYARFNYYPPCPRPDPVLGIKPHSDVYALTVLLMDKDVAGLQFVRDGTWYNVPSASNYTLLINVGVTMEIMTNGIFKGPVHRVVTNSEKERMSVAVFYGLDPEREIGPIAQMLTEDQPARYREMKVKDFLVAHLEHFSRGERVVDSLRI

SEQ ID NO: 63107 - protein, 272 aa, Triticum aestivum
  peptide (1)..(272): Ceres Seq. ID no. 14314082
METSLMDSVMNASRDFFRLPLEEKRKYSNIIGGKHFQMEGYGTDQVKTQDQRLDWSDRLHLKVEPEDERNLAHWPIHPKSFRDDLHEYTSKSKRIKDDILRAVAKLLELDEDCLVNQFSNRALTYARFNYYPPCPRPDPVLGIKPHSDVYALTVLLMDKDVAGLQFVRDGTWYNVPSASNYTLLINVGVTMEIMTNGIFKGPVHRVVTNSEKERMSVAVFYGLDPEREIGPIAQMLTEDQPARYREMKVKDFLVAHLEHFSRGERVVDSLRI

SEQ ID NO: 63108 - protein, 267 aa, Triticum aestivum
  peptide (1)..(267): Ceres Seq. ID no. 14314083
MDSVMNASRDFFRLPLEEKRKYSNIIGGKHFQMEGYGTDQVKTQDQRLDWSDRLHLKVEPEDERNLAHWPIHPKSFRDDLHEYTSKSKRIKDDILRAVAKLLELDEDCLVNQFSNRALTYARFNYYPPCPRPDPVLGIKPHSDVYALTVLLMDKDVAGLQFVRDGTWYNVPSASNYTLLINVGVTMEIMTNGIFKGPVHRVVTNSEKERMSVAVFYGLDPEREIGPIAQMLTEDQPARYREMKVKDFLVAHLEHFSRGERVVDSLRI

SEQ ID NO: 63109 - DNA, 1244 bp, Triticum aestivum
  misc_feature (1)..(1244): Ceres Seq. ID no. 14314104
acgttagcgagaggtaaaaatccgactgcccaggggacgaaccggaacaagggttccgggcccgtctcttcttcgtttcgtttccatccacagctcgtcctccccccaaaccttaccccatgtccgacggcggcggcgagcccggggccggcggctcggcgccggtgtgcaacttcgttcagaagccgccgaagaatattcggaagcgtcccgccgcctccgtcggctctgatgacgaagaaggtagcggcggcgacgattccggggccatcgcggcggcgcgatctaagaagccgccgcctactaccagcaagctcttcttctcctccgccgacaactcacacgagccccgccgtttccagttcgagtcgtcccggactattcagtcctctaccgacaaccgcgccactgcgacgcttgagacggagacggcgtacgaccgtgatgcgcgcgccatccgcgagcgacagctcaagcaggctgaggaatccctcaagaagaacccctctgcctcctcctcctccggggagctctacaaggggatccacggctacacggatcacaaggccggcttccggcgggagcacacggtttccggagagaaggccggcggcgctcacggccccctgcgggcgtcagcgcacatacgcctctccacgcggttcgactaccaacccgacatctgcaaggattataaggagaccggctattgtggctatggcgattcctgcaagttcatgcacgacagaggtgactacaagtccggatggcagctcgagagggagtgggacgaggccgagaaagcccgcaaacggcgcatagcgatgcgtgagttgggtggtagtgatggcgaggcagaggaggaagacagcgacgacgaggaggcactgccctttgcctgcttcatatgcagggagccctttgttgacccggtggtcacaaagtgtaagcattatttctgcgagcattgcgcattaaagcatcactcgaagaacaagaagtgctttgtctgcaataaaccgacgcttggcatcttcaatgcagcgcaggagatccggaagaagattgcccaggacaagaagcagcaggacctttgatgactgctgcacaatgtagcttgtatcatggaggattacttctcttctgtaattgtattgtttgaaaatgagggggaaatgtccaggaatcagttttgtttctttagctctgtactagctcctacttaccattagccattttgccgc

SEQ ID NO: 63110 - protein, 325 aa, Triticum aestivum; identical to SEQ ID NO: 56491
  peptide (1)..(325): Ceres Seq. ID no. 14314105

SEQ ID NO: 63111 - protein, 273 aa, Triticum aestivum; identical to SEQ ID NO: 56492
  peptide (1)..(273): Ceres Seq. ID no. 14314106

SEQ ID NO: 63112 - protein, 196 aa, Triticum aestivum; identical to SEQ ID NO: 56493
  peptide (1)..(196): Ceres Seq. ID no. 14314107

SEQ ID NO: 63113 - DNA, 938 bp, Triticum aestivum
  misc_feature (1)..(938): Ceres Seq. ID no. 12587429
agacaaatggagaaaaacagacggagaacgaaacaatggctgccgaaggaagtctgaagctgctcggcttgacggtgagcccgttcgtcatccgtgtacgcatggcgctgcagctgaaaggcatcggctacgagtacatagagcaggacctgttcaccaagggcgagctcctccgcaagtccaacccggtgtacatgaaggtcccggtgctcatccacgacggcaaacccatctgcgagtcgctggccatcgtgctgtacgtcgacgaggtctgggcggccacgggcccctcgatcctccccgccgacccctacgatcgcgccgccgctcgcatctgggccgcctacgccgacagcaagctcttgccggcctgggtaggcatcatgtgggcggcgacggaggaggagagagcggaaaaggtcgaggacacgctagcggctatcggccaattggaggaggcgttcggcaagtgctcgaagggaaaggccttcttcgccggcgattccgtcgggtacctcgacctcgtcgtcggctcgcagttgctctggttcgaagcgctgcagaagatgttcggcgtcgtggtcgttgaggtgggtagggctccgctcttggccgcgtgggtgaagcagtttggggagactgatacggccaaggaggtggtgccggacgttgacacggcggtggagtacctgacgaagcttcagtctcgtcgggctggttccacggttgcccagttgctgtcgtgacaaaagtagagtggaatttgtcgacccagctagcaagtacagcgaattttctctttaggccagctttatagtcatgtcttgtaaggatgcaaagaatggactggtttccctcctgacaccacgtagctacttctccaaagaggataacaaatcgtttgtaagaaatcataagtatattctttttttttgcgc

SEQ ID NO: 63114 - protein, 247 aa, Triticum aestivum
  peptide (1)..(247): Ceres Seq. ID no. 12587430
TNGEKQTENETMAAEGSLKLLGLTVSPFVIRVRMALQLKGIGYEYIEQDLFTKGELLRKSNPVYMKVPVLIHDGKPICESLAIVLYVDEVWAATGPSILPADPYDRAAARIWAAYADSKLLPAWVGIMWAATEEERAEKVEDTLAAIGQLEEAFGKCSKGKAFFAGDSVGYLDLVVGSQLLWFEALQKMFGVVVVEVGRAPLLAAWVKQFGETDTAKEVVPDVDTAVEYLTKLQSRRAGSTVAQLLS

SEQ ID NO: 63115 - protein, 236 aa, Triticum aestivum
  peptide (1)..(236): Ceres Seq. ID no. 12587431
MAAEGSLKLLGLTVSPFVIRVRMALQLKGIGYEYIEQDLFTKGELLRKSNPVYMKVPVLIHDGKPICESLAIVLYVDEVWAATGPSILPADPYDRAAARIWAAYADSKLLPAWVGIMWAATEEERAEKVEDTLAAIGQLEEAFGKCSKGKAFFAGDSVGYLDLVVGSQLLWFEALQKMFGVVVVEVGRAPLLAAWVKQFGETDTAKEVVPDVDTAVEYLTKLQSRRAGSTVAQLLS

SEQ ID NO: 63116 - protein, 214 aa, Triticum aestivum
  peptide (1)..(214): Ceres Seq. ID no. 12587432
MALQLKGIGYEYIEQDLFTKGELLRKSNPVYMKVPVLIHDGKPICESLAIVLYVDEVWAATGPSILPADPYDRAAARIWAAYADSKLLPAWVGIMWAATEEERAEKVEDTLAAIGQLEEAFGKCSKGKAFFAGDSVGYLDLVVGSQLLWFEALQKMFGVVVVEVGRAPLLAAWVKQFGETDTAKEVVPDVDTAVEYLTKLQSRRAGSTVAQLLS

SEQ ID NO: 63117 - DNA, 1550 bp, Triticum aestivum
  misc_feature (1)..(1550): Ceres Seq. ID no. 13654989
aagaagggaaagaatgacaccgctacccaaagcagccagccaagccaaagccaaccccagtcctagccactagccacaacgaacgaactcagacccagccagcctcgtggctccggttggactggccagtaccgttgccggacgctcctgatggggaactgcgccggcgtgcaggggaacgccgagatcaacccgaccttcagtgctcccaacacctcaggtaacaattccaagagcagcaacagcagcaatgcgactgatacaagcacttttggcaagagttcttcgtcgtcggtgccgccgactcctcggaccgagaaggagatcttgcagtcgtccaacctccgcaagttcaccttcagtgaactgagaagctccacaaggaacttccggactgacagcctgctcggggaggggggctttggctccgtcttcaaggggtggatcgacgagcgcacgtttacgccggtcaagcccggcaccgggatgatcgtcgccgtgaagaagctcaagctggacagtttccaggggcacaaagaatggctggctgaggtcaattacctggggcagctatcacaccccaatcttgtgaagctcatcgggtattgcttggaggacgagcagcggcttctcgtctacgaattcatgccgaagggtagcttggagcaccatcttttcaggagagctccacatttccagcccctctcatggagtttacggatgaaggttgctcttgaggctgccaggggacttgctttcctgcatagcgatgaagctaaagttatataccgtgatttcaagacctccaatgttcttcttgactcggaatataatgcaaaactctctgattttggcttggcaaaagatggcccgagtggcgataaaagtcatgtttctactagggtcatggggactcaaggatatgctgcccctgaatatctcgcaacaggccacttgaccacgaagagcgatgtctacacctatggtgttgttcttctagagttgctgaccgggcaacgagctctggacaagaaccgcccgcctggacagcataacctggtggagtgggcaagaccttacatcaacagcaagaggagggtcatccatgtcctggacccacgattggggtcgcaatattcgctccctgcggcgcagaaggcagcggcgcttgcgatgcagtgcctgtcaatggacgcccggtgcaggccggacatggatcaggtcgtgaccgcgctggaaaagcttccggaggtgaagaaaacatacaagtagggagggttgctgggttccatgtgtactcctttacctctctggagcatcgcctactccttgtaagcaacacttcagggagtagaaacagtgaagagaagccggacttgaggggaagactagcctttgaatctgtcaagagaatgtagaatatatatcgtcatgtgtacagctagctgttagactgttgttactttgctgtcagcctgacgcctgttttatatatttgcagtacaccggctttgtaaaacaagttgggaaacagttgtgtcttggtcttg

SEQ ID NO: 63118 - protein, 373 aa, Triticum aestivum
  peptide (1)..(373): Ceres Seq. ID no. 13654990
MGNCAGVQGNAEINPTFSAPNTSGNNSKSSNSSNATDTSTFGKSSSSSVPPTPRTEKEILQSSNLRKFTFSELRSSTRNFRTDSLLGEGGFGSVFKGWIDERTFTPVKPGTGMIVAVKKLKLDSFQGHKEWLAEVNYLGQLSHPNLVKLIGYCLEDEQRLLVYEFMPKGSLEHHLFRRAPHFQPLSWSLRMKVALEAARGLAFLHSDEAKVIYRDFKTSNVLLDSEYNAKLSDFGLAKDGPSGDKSHVSTRVMGTQGYAAPEYLATGHLTTKSDVYTYGVVLLELLTGQRALDKNRPPGQHNLVEWARPYINSKRRVIHVLDPRLGSQYSLPAAQKAAALAMQCLSMDARCRPDMDQVVTALEKLPEVKKTYK

SEQ ID NO: 63119 - protein, 261 aa, Triticum aestivum
  peptide (1)..(261): Ceres Seq. ID no. 13654991
MIVAVKKLKLDSFQGHKEWLAEVNYLGQLSHPNLVKLIGYCLEDEQRLLVYEFMPKGSLEHHLFRRAPHFQPLSWSLRMKVALEAARGLAFLHSDEAKVIYRDFKTSNVLLDSEYNAKLSDFGLAKDGPSGDKSHVSTRVMGTQGYAAPEYLATGHLTTKSDVYTYGVVLLELLTGQRALDKNRPPGQHNLVEWARPYINSKRRVIHVLDPRLGSQYSLPAAQKAAALAMQCLSMDARCRPDMDQVVTALEKLPEVKKTYK

SEQ ID NO: 63120 - protein, 208 aa, Triticum aestivum
  peptide (1)..(208): Ceres Seq. ID no. 13654992
MPKGSLEHHLFRRAPHFQPLSWSLRMKVALEAARGLAFLHSDEAKVIYRDFKTSNVLLDSEYNAKLSDFGLAKDGPSGDKSHVSTRVMGTQGYAAPEYLATGHLTTKSDVYTYGVVLLELLTGQRALDKNRPPGQHNLVEWARPYINSKRRVIHVLDPRLGSQYSLPAAQKAAALAMQCLSMDARCRPDMDQVVTALEKLPEVKKTYK

SEQ ID NO: 63121 - DNA, 1342 bp, Triticum aestivum
  misc_feature (1)..(1342): Ceres Seq. ID no. 14302333
gacccccaacaacctccctcccccctcgtgcgcctctactaaaccgagtagtcggcaaggaggggcagcaggggagggagatctgactgacgaggcagggatgatggagagccagccgctgcaggccccgacggccgagccccacggcgccggagccgcggacgaccaggccggagccggagctccccccgccgtcgttcccgggaaggagttcacgcggacctgcaagggcctcgtcgtcgtgctcatcggcggctacgtgctgctgcaactcctcccatcctccctcaactacctcgccatcatccccgccaagacaattccctttgtatggaccgtcttcaccgccggttacatcgagcaagtcctcccaggggctattggcagttcccttggtcttctcttctgcgggaaggatattgagccagtctggggccgcaaggagttcttgaagttcattatcttgatcaactccatctgcggcatccttgcgttctgcattgctgttgcactgtactatgtcaccgggaaagagagcttccttgtaacgccactttctggcttccatggcgcccttgctggctttctggttggcctgaagcagctcttgccaaaccttgagctccccatgtgctttttctggaaaataaaggctaagtggatgccattctttgtcatgtgcttctcaactatcatggccttcattgtgccggattccatcaacttcctgccgactttgttgtctgggatgtacgtcagctggctttacctgagatacttccagaagaacccactgacaggacttaagggcgacccaagtgatgacttctccttccccagcttgttcccagatgccatgcggccagtcacagacccagttgctaatctgttcgaccggatgttgtgtgcgaggtctaagccttcagaaattgccctcccagttaccgatcctaccaaggcatcgagaagaagggagcgtggcgagagggttctcgaggaaaggatggccgcggatcatgcggctgacgccgaagccccagctcactctgcggaagattaagaattttcccctgtgctacgtcgtcatagtggccacggtcgccttgtaactcctcggatttgtgttctggggagcatattcatttttacagtggaccgatgatatgataatactttactgcccctcttttgtttccttgttttgagaatattggttggttaaattgtgttgtagttcctgattacagtgaggaaagaagaaaaagggtggcatccccttgcccccgatgttgtaatgtagaaaaagaatgacttgtcagtaacaatgtgaagtattttttcc

SEQ ID NO: 63122 - protein, 352 aa, Triticum aestivum
  peptide (1)..(352): Ceres Seq. ID no. 14302334
TPNNLPPPSCASTKPSSRQGGAAGEGDLTDEAGMMESQPLQAPTAEPHGAGAADDQAGAGAPPAVVPGKEFTRTCKGLVVVLIGGYVLLQLLPSSLNYLAIIPAKTIPFVWTVFTAGYIEQVLPGAIGSSLGLLFCGKDIEPVWGRKEFLKFIILINSICGILAFCIAVALYYVTGKESFLVTPLSGFHGALAGFLVGLKQLLPNLELPMCFFWKIKAKWMPFFVMCFSTIMAFIVPDSINFLPTLLSGMYVSWLYLRYFQKNPLTGLKGDPSDDFSFPSLFPDAMRPVTDPVANLFDRMLCARSKPSEIALPVTDPTKASRRRERGERVLEERMAADHAADAEAPAHSAED

SEQ ID NO: 63123 - protein, 319 aa, Triticum aestivum
  peptide (1)..(319): Ceres Seq. ID no. 14302335
MMESQPLQAPTAEPHGAGAADDQAGAGAPPAVVPGKEFTRTCKGLVVVLIGGYVLLQLLPSSLNYLAIIPAKTIPFVWTVFTAGYIEQVLPGAIGSSLGLLFCGKDIEPVWGRKEFLKFIILINSICGILAFCIAVALYYVTGKESFLVTPLSGFHGALAGFLVGLKQLLPNLELPMCFFWKIKAKWMPFFVMCFSTIMAFIVPDSINFLPTLLSGMYVSWLYLRYFQKNPLTGLKGDPSDDFSFPSLFPDAMRPVTDPVANLFDRMLCARSKPSEIALPVTDPTKASRRRERGERVLEERMAADHAADAEAPAHSAED

SEQ ID NO: 63124 - protein, 318 aa, Triticum aestivum
  peptide (1)..(318): Ceres Seq. ID no. 14302336
MESQPLQAPTAEPHGAGAADDQAGAGAPPAVVPGKEFTRTCKGLVVVLIGGYVLLQLLPSSLNYLAIIPAKTIPFVWTVFTAGYIEQVLPGAIGSSLGLLFCGKDIEPVWGRKEFLKFIILINSICGILAFCIAVALYYVTGKESFLVTPLSGFHGALAGFLVGLKQLLPNLELPMCFFWKIKAKWMPFFVMCFSTIMAFIVPDSINFLPTLLSGMYVSWLYLRYFQKNPLTGLKGDPSDDFSFPSLFPDAMRPVTDPVANLFDRMLCARSKPSEIALPVTDPTKASRRRERGERVLEERMAADHAADAEAPAHSAED

SEQ ID NO: 63125 - DNA, 1382 bp, Triticum aestivum
  misc_feature (1)..(1382): Ceres Seq. ID no. 13596976
aaagatccccaaacccatcaaacctttgcgtgccccccgctccactcccctctcccctcccctcactgcgtgcgcactgcggccacagcgcgctccggatcggcggatctcgtcgggcggcggccgccacgatgatgagcagcgtctcccctccggcgccgtcgctcccctccgggggtggaagcttcttcagagggtacacgaagctctgcaagggcctcgccgtcatattgcttctcgtgcacctcttggtccagctgttcccatcggccgtcaactatctcgcgcttatccctgcaaggacaatccctttcgcctggaacttgataactgctggctatgtcgagcaaaccattccaggggtgattatcagcatcattggtcttcttttatttgggaaattattagagcctttatggggcacaaaggagttatcaaagttcgtttttattgtcaacttctcaacttcaatgtgtgtcttcgtaactgctattgctgtgtactacgtaacacaacaagagagctacctctacactcctctttctggtttctatggggttctgtcaggattgctggtgggcatcaagcaacttatgccagagttggagcttaatcttttcgtgctgaagattaagggaaagtggatcccatcacttattgcactgatctccgttgttgtaagcttcttcatgaaggacttggtatcttacctcccagttatactgtttggcatttatatgagttggatttacctgcgttacttccaaaagaggctagagacaggcctgaaaggggatccaagcgaggagttctctttctcaagtttcttccctgcaattctgagaccagttctggatccaatagccacaatattccataggcttctttgtggaagatctgatagggcagaccggggtcagacattggaaacgtcatcattgccgggttcagattctactgaggcaaacaggaggagggaaaggggtcaaagggcactggagcaaagattggctgagaagctggccgcggtcaagagtacagagagcacgtctctcgacgcatccgacaaagtttgagccttctacaaagacgacctgccaaatgttgtgaattcccggtgctgcgttacccaagtgacgttgtctggaggacaagggagcatcgttggttcggccgcgagcttctaggggaggtggtgatgcgagaatgtgtgattttactgatttagggaaccatatgccgaactgtgcaatgatagcatcatgtttgttagcacaatttagccgcgcactgactgctgagagtttttcgcttttcatttttgaggcccagccagaggctttccttgagcatgaatgagttgccgcattggtttgtttgtc

SEQ ID NO: 63126 - protein, 357 aa, Triticum aestivum
  peptide (1)..(357): Ceres Seq. ID no. 13596977
RSPNPSNLCVPPAPLPSPLPSLRAHCGHSALRIGGSRRAAAATMMSSVSPPAPSLPSGGGSFFRGYTKLCKGLAVILLLVHLLVQLFPSAVNYLALIPARTIPFAWNLITAGYVEQTIPGVIISIIGLLLFGKLLEPLWGTKELSKFVFIVNFSTSMCVFVTAIAVYYVTQQESYLYTPLSGFYGVLSGLLVGIKQLMPELELNLFVLKIKGKWIPSLIALISVVVSFFMKDLVSYLPVILFGIYMSWIYLRYFQKRLETGLKGDPSEEFSFSSFFPAILRPVLDPIATIFHRLLCGRSDRADRGQTLETSSLPGSDSTEANRRRERGQRALEQRLAEKLAAVKSTESTSLDASDKV

SEQ ID NO: 63127 - protein, 314 aa, Triticum aestivum
  peptide (1)..(314): Ceres Seq. ID no. 13596978
MMSSVSPPAPSLPSGGGSFFRGYTKLCKGLAVILLLVHLLVQLFPSAVNYLALIPARTIPFAWNLITAGYVEQTIPGVIISIIGLLLFGKLLEPLWGTKELSKFVFIVNFSTSMCVFVTAIAVYYVTQQESYLYTPLSGFYGVLSGLLVGIKQLMPELELNLFVLKIKGKWIPSLIALISVVVSFFMKDLVSYLPVILFGIYMSWIYLRYFQKRLETGLKGDPSEEFSFSSFFPAILRPVLDPIATIFHRLLCGRSDRADRGQTLETSSLPGSDSTEANRRRERGQRALEQRLAEKLAAVKSTESTSLDASDKV

SEQ ID NO: 63128 - protein, 313 aa, Triticum aestivum
  peptide (1)..(313): Ceres Seq. ID no. 13596979
MSSVSPPAPSLPSGGGSFFRGYTKLCKGLAVILLLVHLLVQLFPSAVNYLALIPARTIPFAWNLITAGYVEQTIPGVIISIIGLLLFGKLLEPLWGTKELSKFVFIVNFSTSMCVFVTAIAVYYVTQQESYLYTPLSGFYGVLSGLLVGIKQLMPELELNLFVLKIKGKWIPSLIALISVVVSFFMKDLVSYLPVILFGIYMSWIYLRYFQKRLETGLKGDPSEEFSFSSFFPAILRPVLDPIATIFHRLLCGRSDRADRGQTLETSSLPGSDSTEANRRRERGQRALEQRLAEKLAAVKSTESTSLDASDKV

SEQ ID NO: 63129 - DNA, 1137 bp, Triticum aestivum
  misc_feature (1)..(1137): Ceres Seq. ID no. 13662219
aaccatcaccaccgagctacctccagcctccagccatcactcagctcaaagacacaatcaggcaatcagcggcggcgagaacacacacagagtcacagatgaccttcagcgtctcgccggcgacgggggcgagccaggagtacatgatccggttcgacggccacttcgaggacccgagctccgcggccgcgagcgccgagccacccctgccgttcgccggcagggctttctcgccacagcaggagcagagcgccatggtcgccgcgctgctgcacgtcgtctccgggtacaccacgccggcgcctgacctcttcttcccggcgcgcaaggaggcgtgcacggcgtgcgggatggacgggtgcctcgggtgcgagttcttcggcgcggaggccgggcgcgcggtcgcggcatcggacgcgccgagagcgccggcggccggcgggccgcagaggaggcggaggaacaagaagaaccagtaccgcggcgtcaggcagcggccgtggggcaagtgggcggcggagatccgcgacccgcgccgcgccgtgcgggtgtggctcgggaccttcgacacggccgaggacgccgccagggcctacgaccgcgccgccgtcgagttccgcggcccgcgcgccaagctcaacttctccttccccgagcagcagcagcagcagctaggcggcagcggcaatgccgcggccaagtcagacgcgtgctcgccctcgccttcgccccgcagcgcggacgaggacgaaacaggggacctgctctgggacggcttggtggacttgatgaagctggacgagagcgacctctgcttactgctcccggtcgacaacacggataaatttcacatagaggggaagagacgatcaggatcaggggtacccctctgctactagtgttagactattagcgagtaccagatagacaatcagcagtcctaatcctgctcactacgtggttagcacacgtcctagcttcggttgtaattctgcataaataggcacccgatcaatggaaaagttgtgttcaaccatactcatctgccatgttgtatgtagacaaatccaatttggggcttatttgttggaactataatggtttctattaatagaaaccaggggaaaccccttttgc

SEQ ID NO: 63130 - protein, 298 aa, Triticum aestivum
  peptide (1)..(298): Ceres Seq. ID no. 13662220
PSPPSYLQPPAITQLKDTIRQSAAARTHTESQMTFSVSPATGASQEYMIRFDGHFEDPSSAAASAEPPLPFAGRAFSPQQEQSAMVAALLHVVSGYTTPAPDLFFPARKEACTACGMDGCLGCEFFGAEAGRAVAASDAPRAPAAGGPQRRRRNKKNQYRGVRQRPWGKWAAEIRDPRRAVRVWLGTFDTAEDAARAYDRAAVEFRGPRAKLNFSFPEQQQQQLGGSGNAAAKSDACSPSPSPRSADEDETGDLLWDGLVDLMKLDESDLCLLLPVDNTDKFHIEGKRRSGSGVPLCY

SEQ ID NO: 63131 - protein, 266 aa, Triticum aestivum
  peptide (1)..(266): Ceres Seq. ID no. 13662221
MTFSVSPATGASQEYMIRFDGHFEDPSSAAASAEPPLPFAGRAFSPQQEQSAMVAALLHVVSGYTTPAPDLFFPARKEACTACGMDGCLGCEFFGAEAGRAVAASDAPRAPAAGGPQRRRRNKKNQYRGVRQRPWGKWAAEIRDPRRAVRVWLGTFDTAEDAARAYDRAAVEFRGPRAKLNFSFPEQQQQQLGGSGNAAAKSDACSPSPSPRSADEDETGDLLWDGLVDLMKLDESDLCLLLPVDNTDKFHIEGKRRSGSGVPLCY

SEQ ID NO: 63132 - protein, 251 aa, Triticum aestivum
  peptide (1)..(251): Ceres Seq. ID no. 13662222
MIRFDGHFEDPSSAAASAEPPLPFAGRAFSPQQEQSAMVAALLHVVSGYTTPAPDLFFPARKEACTACGMDGCLGCEFFGAEAGRAVAASDAPRAPAAGGPQRRRRNKKNQYRGVRQRPWGKWAAEIRDPRRAVRVWLGTFDTAEDAARAYDRAAVEFRGPRAKLNFSFPEQQQQQLGGSGNAAAKSDACSPSPSPRSADEDETGDLLWDGLVDLMKLDESDLCLLLPVDNTDKFHIEGKRRSGSGVPLCY

SEQ ID NO: 63133 - DNA, 989 bp, Triticum aestivum
  misc_feature (1)..(989): Ceres Seq. ID no. 12615635
acacttgcaaattgagtaaaacttaagagcacatacgtacacagcagagcaatagtatacgagcaacaaatagcaaggaagagatagatccaagacgaagatcggaaacgatggccggccaaggaaatgatgatgtcaaggtactgggcacggcggcgagcatgttcgcgatccgcgtgcgcatggcgctgcacgtcaagggcgtgagctacgagtacctggagcaggacctgttccacaagggcgacctcctcctcgcctccaacccggtgcgcaaggccgtccccgtgctcatccacgccggcaggcccgtctgcgagtcgctcgccatcgtcgagtacgtcgacgaggtctgggccgatgcctcgctcctccctgccgacccctacgaccgcgccgtcgcccgcttctgggccgcctatgtcgacgacaaggctgtccccacgtggataggcatcatgagggcggccacggaggaggacagggcggagagcctggcagctgcgctcgaggcggtcgcgcccttggaggacgccttcgcccaatgctctggcgggaaggccttcttcgccggagactctatcgggtacctcgatctcgcgctcgggtgcaacctcttctggatcgaggcgctgcgccacatgttcggtgtcacggtcatcgacgccggcaggactccgcgcctggccgcctgggctgagaggttcgtggagacggaggctgcaaagaaggcggcaccgcccatggaaagcatgttggaggaggccgggaaactgcgggctatgtgggctgctgcggctgctgcaaagtaattagtggctactcctacctcgcaggagcttcttattttttcggtcgtcacttttgtttggaggttttgcagtcgtcagtcgtcacctttttttttacatcagcgtcagtggtcactgttacctaaaggattataaatttcatttgttctaagtttttttttttgagcattagtacag

SEQ ID NO: 63134 - protein, 233 aa, Triticum aestivum
  peptide (1)..(233): Ceres Seq. ID no. 12615636
MAGQGNDDVKVLGTAASMFAIRVRMALHVKGVSYEYLEQDLFHKGDLLLASNPVRKAVPVLIHAGRPVCESLAIVEYVDEVWADASLLPADPYDRAVARFWAAYVDDKAVPTWIGIMRAATEEDRAESLAAALEAVAPLEDAFAQCSGGKAFFAGDSIGYLDLALGCNLFWIEALRHMFGVTVIDAGRTPRLAAWAERFVETEAAKKAAPPMESMLEEAGKLRAMWAAAAAAK

SEQ ID NO: 63135 - protein, 216 aa, Triticum aestivum
  peptide (1)..(216): Ceres Seq. ID no. 12615637
MFAIRVRMALHVKGVSYEYLEQDLFHKGDLLLASNPVRKAVPVLIHAGRPVCESLAIVEYVDEVWADASLLPADPYDRAVARFWAAYVDDKAVPTWIGIMRAATEEDRAESLAAALEAVAPLEDAFAQCSGGKAFFAGDSIGYLDLALGCNLFWIEALRHMFGVTVIDAGRTPRLAAWAERFVETEAAKKAAPPMESMLEEAGKLRAMWAAAAAAK

SEQ ID NO: 63136 - protein, 209 aa, Triticum aestivum
  peptide (1)..(209): Ceres Seq. ID no. 12615638
MALHVKGVSYEYLEQDLFHKGDLLLASNPVRKAVPVLIHAGRPVCESLAIVEYVDEVWADASLLPADPYDRAVARFWAAYVDDKAVPTWIGIMRAATEEDRAESLAAALEAVAPLEDAFAQCSGGKAFFAGDSIGYLDLALGCNLFWIEALRHMFGVTVIDAGRTPRLAAWAERFVETEAAKKAAPPMESMLEEAGKLRAMWAAAAAAK

SEQ ID NO: 63137 - DNA, 735 bp, Triticum aestivum
  misc_feature (1)..(735): Ceres Seq. ID no. 12585079
gatacacagagcgagaggccgaggaagcgatagctctagcgataaggcactgacagatcaatggctgccacggcgtactccgtggccctcctcggcggagcgcgcctccccgccgccaccggcaacgccgccccccgctcctccgccttcctcccgcggcgcaacctccacccgctccgcctccaagatgcgcccaggccgtccctgctccgcgtgaaggccgcctccgacgacacgtcggcgagcggcgacgagatcatcgaggacctcaaggggaagtgggaggcgattgaggacaagccgaccttcctcctctacagcggcggcgccgtcgtcgcgctctggctcaccaccgtcgtcgtcggcgccatcaactccgtgccgttgctccccaagctcctggagctggttgggctcggctacaccgggtggttcgtgtaccgctacctcctcttcaaggaaagcaggaaagagttggccaccgacatcgaaagcttgaagaagaagattgccggaacagaataaactcaagttctctggaacgttttcgatggctcttttgtctgtccatgtaatggaagaacacctacttgcttagagtaccatccactgcatttgtgcgttacatacatatctgtatgaaaaaagaaatgcgctttggttggtgtgcggtgacaatagtgaaattgtatcagtttctggaagtcttctattgttttatatatcaatgtgttc

SEQ ID NO: 63138 - protein, 154 aa, Triticum aestivum
  peptide (1)..(154): Ceres Seq. ID no. 12585080
MAATAYSVALLGGARLPAATGNAAPRSSAFLPRRNLHPLRLQDAPRPSLLRVKAASDDTSASGDEIIEDLKGKWEAIEDKPTFLLYSGGAVVALWLTTVVVGAINSVPLLPKLLELVGLGYTGWFVYRYLLFKESRKELATDIESLKKKIAGTE

SEQ ID NO: 63139 - DNA, 936 bp, Triticum aestivum
  misc_feature (1)..(936): Ceres Seq. ID no. 13654993
tgtttacctgttgcaatgcattacaacacaatgatgattgggcacatttcatttgttgttcaatgtgatctaatacctgcttgggcaacaaaagggtggttgcgtactctattgagggactatcccaccctaccgttccatgcaagcatcaacaagtcatttggaaaagtaaatgaaaaaagctggacgctttggcgttgggttcattgacccaaataccgttaatgaaaagatatgggaacgtcatggaaaagaaacatagtaaaacttgctaaagtttttggtggatcaaaataccgaaccagaaatactgttttcttacatctacgggtgagtgttactatatatattgtaatacaaattctatttatgcttactagatgttagtaagtgtagttgatgagttatatatgcacatgcctgcttaattatacaaacgtgtgcgcatgcatgcagttgtcattggatcttgctagtcattgaacttgacgagggaaaagctacattattggactcaataaaggaaacaaaataaatatactacttgaacgttattgggatgctcgacagtgcatgaggcaggcgcaggggactaatttatgtggctacgtagtttgcgagaacattcgcatgaagacgtccgaaaggaagctagcggacaaaaactttcagttgctccagatgcgcgatcagctcctagaagatgaccgcatgaaagcacttcaagaggaaatagtggaatttttcctcgagcaggtcatagatcccaatggagaatactattacccgctgtaatgcctgcattgtaatggtctgcaaattgtaggagaaattttatgtaccaagttgcatgtgaatgcatgcatggtcgaattcgatgatgtgatatatatatatatatatttgatcggttctatgagaaattttttttttttt

SEQ ID NO: 63140 - protein, 73 aa, Triticum aestivum
  peptide (1)..(73): Ceres Seq. ID no. 13654994
MRQAQGTNLCGYVVCENIRMKTSERKLADKNFQLLQMRDQLLEDDRMKALQEEIVEFFLEQVIDPNGEYYYPL

SEQ ID NO: 63141 - protein, 69 aa, Triticum aestivum
  peptide (1)..(69): Ceres Seq. ID no. 13654995
CLPVAMHYNTMMIGHISFVVQCDLIPAWATKGWLRTLLRDYPTLPFHASINKSFGKVNEKSWTLWRWVH

SEQ ID NO: 63142 - protein, 64 aa, Triticum aestivum
  peptide (1)..(64): Ceres Seq. ID no. 13654996
MHYNTMMIGHISFVVQCDLIPAWATKGWLRTLLRDYPTLPFHASINKSFGKVNEKSWTLWRWVH

SEQ ID NO: 63143 - DNA, 932 bp, Triticum aestivum
  misc_feature (1)..(932): Ceres Seq. ID no. 14303722
gcaaccctagctgtagtgcagcgtatcccacttcccacctaacccctacccctatccctccgaaccccgcaccaagatggcggcgccgacgaccttctccggcgaggtgtgggcggagctgcgcctggcggacgcgcgcgacgtgccgcacatccacagcctcatccaccagatggcggagttcgagctcctcaccgacctcttcgccgccacccacgagctcctggcctccacgctcttccccacgccccagccggcccccttcacctccttcaccgccctcatcctcgacctctctccgtcccccgccccggcctccgccgacaccgtcggctcccgccgcctcgacctctcggcgtccccgctcgccgacccggaggcggccgccttcccgtccccgcgcggcggcgggcgcgtcacggccgggttcgtcatctgctttcccaactactccaccttcctcgccaagcccgggctgtacgtggaggacatcttcgtgcgcgcgccctggcgccgccgcgggctcggccggatgatgctgtccgccgtcgccggcagggccgcggagatcggaatgggccgcgtggagtggtgcgtgctcgactggaaccagaacgccatcgacttctacgaggggatgggcgccgaggtgttcaagcagtggcgcatctgccggctcaccggtcccgccctcgacaagtacaagggcaccggcagccaggaggaggaggacgccggcgggaaggcccagtaggcctgtaggagaggagagatcggggctccggtgactggtaataataaaggtggtagattttgcctccacttggtgatgtattcttccttgctagtactgatagtgatttagtgcattggtatgttcttcatggagatgcattatggacctgttcttgccttccttggaaggagtattg

SEQ ID NO: 63144 - protein, 225 aa, Triticum aestivum
  peptide (1)..(225): Ceres Seq. ID no. 14303723
MAAPTTFSGEVWAELRLADARDVPHIHSLIHQMAEFELLTDLFAATHELLASTLFPTPQPAPFTSFTALILDLSPSPAPASADTVGSRRLDLSASPLADPEAAAFPSPRGGGRVTAGFVICFPNYSTFLAKPGLYVEDIFVRAPWRRRGLGRMMLSAVAGRAAEIGMGRVEWCVLDWNQNAIDFYEGMGAEVFKQWRICRLTGPALDKYKGTGSQEEEDAGGKAQ

SEQ ID NO: 63145 - protein, 193 aa, Triticum aestivum
  peptide (1)..(193): Ceres Seq. ID no. 14303724
MAEFELLTDLFAATHELLASTLFPTPQPAPFTSFTALILDLSPSPAPASADTVGSRRLDLSASPLADPEAAAFPSPRGGGRVTAGFVICFPNYSTFLAKPGLYVEDIFVRAPWRRRGLGRMMLSAVAGRAAEIGMGRVEWCVLDWNQNAIDFYEGMGAEVFKQWRICRLTGPALDKYKGTGSQEEEDAGGKAQ

SEQ ID NO: 63146 - protein, 177 aa, Triticum aestivum
  peptide (1)..(177): Ceres Seq. ID no. 14303725
NPSCSAAYPTSHLTPTPIPPNPAPRWRRRRPSPARCGRSCAWRTRATCRTSTASSTRWRSSSSSPTSSPPPTSSWPPRSSPRPSRPPSPPSPPSSSTSLRPPPRPPPTPSAPAASTSRRPRSPTRRRPPSRPRAAAGASRPGSSSAFPTTPPSSPSPGCTWRTSSCARPGAAAGSAG

SEQ ID NO: 63147 - DNA, 925 bp, Triticum aestivum
  misc_feature (1)..(925): Ceres Seq. ID no. 13583898
caccatcccaaattcgtccgtccattcgtcgaaaggggattacggctccacgccagcgcgccccggcaccgccgatccagccgcgccgctgccgccggccccctcgatcggaggcctcggaaggagagcaggcgcgccaggaggggggagatccgggacgccccggcgtaatcctgccgtgcaaggctcttcctgccgagacgaatcgtacgtgcctgccgccgcgccggcgaaccatgtcgtcgtccgcgttgagggccgcggggcagagggcgggggccgcggcccgtaagcaggcgctcaccctgacggaggccgcggcggccagggtgcgccacctcctcgacctcaggcagcggccctacctgcgccttggcgtcaaggcgcgcggctgcaacggcctgtcctacacgctcaattacgccgaaaaagggaagttcgatgagcttgttgaagagaagggtgtgaaagtgctgattgaccccaaggccctgatgcatgtgatcggcaccaagatggacttcgtcgacgatccactgaggtcagagtttgtgttcataaacccgaactcgaaaggggagtgtggatgcggtgaatctttcatgactacgggcagcaaaggatctacgtcatgatgcgtcatgcgatgatgtaaatagagcgaagcatgtgcagtggtggctctagttactgatataattttgtcttggaaagcaacggccattgtaagcttgttgcgcttgcatccaggtagtgaacactgcagtggatttaatcacgtgatggatgaaccagcttgttaccggtactcttacattcatcttggccccgtgttgttgatacgttcactaattcttgtttgggaacataccgagtgcatgataatcaaaataaacacagcaacatttcttcttttgctgttttg

SEQ ID NO: 63148 - protein, 210 aa, Triticum aestivum
  peptide (1)..(210): Ceres Seq. ID no. 13583899
PSQIRPSIRRKGITAPRQRAPAPPIQPRRCRRPPRSEASEGEQARQEGGDPGRPGVILPCKALPAETNRTCLPPRRRTMSSSALRAAGQRAGAAARKQALTLTEAAAARVRHLLDLRQRPYLRLGVKARGCNGLSYTLNYAEKGKFDELVEEKGVKVLIDPKALMHVIGTKMDFVDDPLRSEFVFINPNSKGECGCGESFMTTGSKGSTS

SEQ ID NO: 63149 - protein, 132 aa, Triticum aestivum
  peptide (1)..(132): Ceres Seq. ID no. 13583900
MSSSALRAAGQRAGAAARKQALTLTEAAAARVRHLLDLRQRPYLRLGVKARGCNGLSYTLNYAEKGKFDELVEEKGVKVLIDPKALMHVIGTKMDFVDDPLRSEFVFINPNSKGECGCGESFMTTGSKGSTS

SEQ ID NO: 63150 - DNA, 1134 bp, Triticum aestivum
  misc_feature (1)..(1134): Ceres Seq. ID no. 14302204
accccaaacaccaaccaaaatccacccccaaactaggtcatccatgtctggcggcgggcaagcagcggtctcgttcctgacgaagctcgcaaaggtggctgccgggttgggcttgacggcatctgccgtctccacgtccctctacacggtggacggcggccaacgcgcggtcatcttcgaccgcttccagggcgttctcccggcggtcgtctcggagggcacccacttcctcgtcccctggctccagaagcccttcctcttcgacatccgcacgcgcccgcacagcttctcctccacctccggaaccaaggatctccagatggtcagcctcacgctccgcgtcctcgcccgccccgacgtggaacgccttcctgaaatcttcaccaacctcggcctcgactacgacgacaaggtgctcccctccatcggcaacgaggtgctcaaggccgtcgtcgcccagttcaacgcagaccagctcctcaccgaccgtccccacgtctctgccctcgtccgtgaagccctcgtccgccgcgccggcgagttcaacatcgtgctcgatgacgtcgccatcacccacctcgcctacgggcacgacttcgcccaggccgttgagaagaagcaggtcgcgcagcaggaggctgagcgctccaggttcctcgttgcgcgtgcagagcaggagaggcgtgctgctatcgttcgcgcggagggagagagcgagtccgcacggctcatctcagatgccaccgctcttgtaggcaatggcctgatcgagctcaggaggatcgaggctgccaaggagatagctggggtgattgcgcgctcacccaatgtttcctacatcccttctggcaacaacggccagatgctgcttgggctcagcactgcccggtgaatgaattgccacttatcttccagttggtcacagtactttcgtcacttcagatgcccaattatccttcacttgattacaatacttgaataacttcagatgcttcgacatagtagttatgattttatcgtagaatggagacttctattatggaggagtcattgaacaaatgttgtattttggttgccaacctatgctatatttgtgcttatgatgcgttcttgaattacatgaacctttttatc

SEQ ID NO: 63151 - protein, 296 aa, Triticum aestivum
  peptide (1)..(296): Ceres Seq. ID no. 14302205
PQTPTKIHPQTRSSMSGGGQAAVSFLTKLAKVAAGLGLTASAVSTSLYTVDGGQRAVIFDRFQGVLPAVVSEGTHFLVPWLQKPFLFDIRTRPHSFSSTSGTKDLQMVSLTLRVLARPDVERLPEIFTNLGLDYDDKVLPSIGNEVLKAVVAQFNADQLLTDRPHVSALVREALVRRAGEFNIVLDDVAITHLAYGHDFAQAVEKKQVAQQEAERSRFLVARAEQERRAAIVRAEGESESARLISDATALVGNGLIELRRIEAAKEIAGVIARSPNVSYIPSGNNGQMLLGLSTAR

SEQ ID NO: 63152 - protein, 282 aa, Triticum aestivum
  peptide (1)..(282): Ceres Seq. ID no. 14302206
MSGGGQAAVSFLTKLAKVAAGLGLTASAVSTSLYTVDGGQRAVIFDRFQGVLPAVVSEGTHFLVPWLQKPFLFDIRTRPHSFSSTSGTKDLQMVSLTLRVLARPDVERLPEIFTNLGLDYDDKVLPSIGNEVLKAVVAQFNADQLLTDRPHVSALVREALVRRAGEFNIVLDDVAITHLAYGHDFAQAVEKKQVAQQEAERSRFLVARAEQERRAAIVRAEGESESARLISDATALVGNGLIELRRIEAAKEIAGVIARSPNVSYIPSGNNGQMLLGLSTAR

SEQ ID NO: 63153 - protein, 190 aa, Triticum aestivum
  peptide (1)..(190): Ceres Seq. ID no. 14302207
MVSLTLRVLARPDVERLPEIFTNLGLDYDDKVLPSIGNEVLKAVVAQFNADQLLTDRPHVSALVREALVRRAGEFNIVLDDVAITHLAYGHDFAQAVEKKQVAQQEAERSRFLVARAEQERRAAIVRAEGESESARLISDATALVGNGLIELRRIEAAKEIAGVIARSPNVSYIPSGNNGQMLLGLSTAR

SEQ ID NO: 63154 - DNA, 854 bp, Triticum aestivum
  misc_feature (1)..(854): Ceres Seq. ID no. 12625545
accaaaaagtaggaacccctaagaaaaaaggttaccaaaacataggaaagcaagaacacactgagcaaaggaaaacaatagggttctctcactcacgaacagaaaggaggaggcggcggcggcggcggcggctgggagatctcgcatcggcggcggcgcgcgtgaaggtttctttccttgctgttagggcatcacaaggaaaatggcaagcagagcaggtggcgatggcaaagaacccataaatgagcaagtagttgcaaatacctatgccaacatgcgcactgaaatgaaccagctctacaccaagatcacggagctggaaatggaagtcagtgagcacgcccttgtgattggcgcaatagagcccctggaccccacaaggcgttgctacaggatgattggcggagtcttggttgagaggaccatcagggaagtcttgcccgccgtgcaccgcaacaaggagggccttgaagaggtcgtcgctcgcatgaaggaggctctggagaggaagaagcaagagatcaccgagtttgagctcaagtacaagatcaggatcaggaagggcgacaacagcgccaacgaagaaggcagcatgaaggaagcctctgcccagggtgttcttgttggccttgcgggccagtagagcagaatggcagggcaaggagacttgcacagttctttatcgaagccagattgcttgttaccggatgccaacctgacagtgattgtgtgtttctgggtgcagtttatcatgctacacctatgcagtactgttgaatcctcgcgtgtaaaactagagattatggtagatcaggactctgttcgtaaactgcagattttgcgctggttgtgcc

SEQ ID NO: 63155 - protein, 146 aa, Triticum aestivum
  peptide (1)..(146): Ceres Seq. ID no. 12625546
MASRAGGDGKEPINEQVVANTYANMRTEMNQLYTKITELEMEVSEHALVIGAIEPLDPTRRCYRMIGGVLVERTIREVLPAVHRNKEGLEEVVARMKEALERKKQEITEFELKYKIRIRKGDNSANEEGSMKEASAQGVLVGLAGQ

SEQ ID NO: 63156 - protein, 122 aa, Triticum aestivum
  peptide (1)..(122): Ceres Seq. ID no. 12625547
MRTEMNQLYTKITELEMEVSEHALVIGAIEPLDPTRRCYRMIGGVLVERTIREVLPAVHRNKEGLEEVVARMKEALERKKQEITEFELKYKIRIRKGDNSANEEGSMKEASAQGVLVGLAGQ

SEQ ID NO: 63157 - protein, 118 aa, Triticum aestivum
  peptide (1)..(118): Ceres Seq. ID no. 12625548
MNQLYTKITELEMEVSEHALVIGAIEPLDPTRRCYRMIGGVLVERTIREVLPAVHRNKEGLEEVVARMKEALERKKQEITEFELKYKIRIRKGDNSANEEGSMKEASAQGVLVGLAGQ

SEQ ID NO: 63158 - DNA, 807 bp, Triticum aestivum
  misc_feature (1)..(807): Ceres Seq. ID no. 12585638
attaacaccgccaagaacacgaacgccaacacgacgaggatcgatcgacacggcaacgcgagggcgcacgccgatcggtcgagctgattacgatcgattcgagcttcggccatgcggaggtcggactgggaggaccggtgccggcggcacccggagcaccggctgtccaagggcgtgtgcccgagctgcctccgcgaccgcctcgcccgcctctccgccaactcctcggccaccaccaccctgacgcgcgcctcaaactcggccagcacctccccctactcctccaccgactcccctccgctccaccgcgccgccctctccgccgacgccacctccgtccacgtcgtcggcgccggggcgggctcctccttcgtcaacgtctccgccttctcgcagccgctcatgccgacggcctcgaagaaaccagcagaatccaagggaaaggagggcgaggcgaagaagaagaagagcagcagcaagaagaagatcgggaggttcttgtcgaggctggtcgggacggagaagcggcggaaaacaggggaagcaggcgatggcggcgagctcttccattccagcaccatgaaggagaagtcgtcgaccaagtgggttttcttttgatcagaccggccggcaccggccaccaaccatacgaacaaaccatgcttggcctttctcggttctcgatcgatcgggtattgtttttctttattttctctgttattttttacaagtactcttcttgagcttgatttgatatttttctcaagcgccgtgtatatacacgagatcaagtagctgaccgtaagg

SEQ ID NO: 63159 - protein, 168 aa, Triticum aestivum
  peptide (1)..(168): Ceres Seq. ID no. 12585639
MRRSDWEDRCRRHPEHRLSKGVCPSCLRDRLARLSANSSATTTLTRASNSASTSPYSSTDSPPLHRAALSADATSVHVVGAGAGSSFVNVSAFSQPLMPTASKKPAESKGKEGEAKKKKSSSKKKIGRFLSRLVGTEKRRKTGEAGDGGELFHSSTMKEKSSTKWVFF

SEQ ID NO: 63160 - DNA, 741 bp, Triticum aestivum
  misc_feature (1)..(741): Ceres Seq. ID no. 13596897
cttcctccgcttccgcctcgtcccgtctccctccctcccctccctcggcggccgccgccgcccccatcgcggcgagtcccctcgcccgcagccgacctaagctgctgccgccgcgtgcgcccggggtcaccgaggaggcggcgccatgaggttggagaagtgctggttctgctcctccaccgtctaccccggccacggcatccagttcgtccgcaacgacgccaagatctttcggttctgccgatcaaaatgccacaagaacttcaagatgaagaggaaccctcgcaaggttaagtggaccaaggcgtacaggcgcctgcgtggaaaggacatgacacaggatgccacgtttgagttcgagaggaagaggaacaggccggagcgctacgaccgtaacgtcactgagcagactctgaaggccatcccgcttatcacgaagatcagacatgaacggcagaagaaacacattacagagagacagaaggctggtaagagcatggtgcgaaagagcgacgccaaggagctggatcaggatattggcatggttcccaagaaggagaccgagaactatgtagccaagcagaaggttctagtttctcagctgaagaccgaagagaatcttatggaagagtaatggaaccaaacagttttgtgtgtgcgcgcatktvatcmttttcwatawagtggagtactttgtgtttcatcagattgtagacgacagtgaacatttgttttgtactt

SEQ ID NO: 63161 - protein, 162 aa, Triticum aestivum
  peptide (1)..(162): Ceres Seq. ID no. 15221997
MRLEKCWFCSSTVYPGHGIQFVRNDAKIFRFCRSKCHKNFKMKRNPRKVKWTKAYRRLRGKDMTQDATFEFERKRNRPERYDRNVTEQTLKAIPLITKIRHERQKKHITERQKAGKSMVRKSDAKELDQDIGMVPKKETENYVAKQKVLVSQLKTEENLMEE

SEQ ID NO: 63162 - protein, 121 aa, Triticum aestivum
  peptide (1)..(121): Ceres Seq. ID no. 15221998
MKRNPRKVKWTKAYRRLRGKDMTQDATFEFERKRNRPERYDRNVTEQTLKAIPLITKIRHERQKKHITERQKAGKSMVRKSDAKELDQDIGMVPKKETENYVAKQKVLVSQLKTEENLMEE

SEQ ID NO: 63163 - protein, 100 aa, Triticum aestivum
  peptide (1)..(100): Ceres Seq. ID no. 15221999
MTQDATFEFERKRNRPERYDRNVTEQTLKAIPLITKIRHERQKKHITERQKAGKSMVRKSDAKELDQDIGMVPKKETENYVAKQKVLVSQLKTEENLMEE

SEQ ID NO: 63164 - DNA, 883 bp, Triticum aestivum
  misc_feature (1)..(883): Ceres Seq. ID no. 12585640
cctttcccagtcaccgatccaaaccatcgcgagaaaaaaaaaagatccccgatccagcaacgagcgcgcaccggtgaagatcgtggtgggaggatgtcgtcggactactcgtcgtcgtgggcgcgcgcgctcgtgcatatctcgccctacaccttctccgccatcggcatcgccgtctccatcggtgtctctgtcctcggcgcagcatgggggatcttcatcacggggagcagcctcatcggggccgccatcaaggcgcccaggatcacctccaagaacctcatcagtgtcatcttctgtgaggccgttgcaatttatggtgtaatcgtggcgatcatcctccaaacaaagcttgaaagtgtgccaacatcccgaatgcatgatccagagtctatgcgagctggttatgcaatctttgcctcaggtcttattgtcggctttgctaatcttgtttgcggggtatgcgtgggaataatcggaagcagctgtgcactgtctgatgcccagaattcaacactctttgtaaagatcctggtgattgagatctttggcagtgctttgggcctctttggagtgatcgtgggcataatcatgtcagctcaagcaacatggccaacaaaagtctaattccatccatctgggaatctctgtaaattattttgggtgaagccctttggaatgtcaacatgtgttcaactgtttcttatctattcttttttcttttgcacgtttttggtaaatcacgtattttggtgcttgatgcatctgatcgtagagatactgttcctactgtaaagactccatatgcctgccaggtatcatcttgtaggtgctattgcttttgcagaacgtggactgcctgttgaataaaagtattgaactt

SEQ ID NO: 63165 - protein, 208 aa, Triticum aestivum
  peptide (1)..(208): Ceres Seq. ID no. 12585641
PFPVTDPNHREKKKRSPIQQRARTGEDRGGRMSSDYSSSWARALVHISPYTFSAIGIAVSIGVSVLGAAWGIFITGSSLIGAAIKAPRITSKNLISVIFCEAVAIYGVIVAIILQTKLESVPTSRMHDPESMRAGYAIFASGLIVGFANLVCGVCVGIIGSSCALSDAQNSTLFVKILVIEIFGSALGLFGVIVGIIMSAQATWPTKV

SEQ ID NO: 63166 - protein, 177 aa, Triticum aestivum
  peptide (1)..(177): Ceres Seq. ID no. 12585642
MSSDYSSSWARALVHISPYTFSAIGIAVSIGVSVLGAAWGIFITGSSLIGAAIKAPRITSKNLISVIFCEAVAIYGVIVAIILQTKLESVPTSRMHDPESMRAGYAIFASGLIVGFANLVCGVCVGIIGSSCALSDAQNSTLFVKILVIEIFGSALGLFGVIVGIIMSAQATWPTKV

SEQ ID NO: 63167 - protein, 107 aa, Triticum aestivum
  peptide (1)..(107): Ceres Seq. ID no. 12585643
LSQSPIQTIARKKKDPRSSNERAPVKIVVGGCRRTTRRRGRARSCISRPTPSPPSASPSPSVSLSSAQHGGSSSRGAASSGPPSRRPGSPPRTSSVSSSVRPLQFMV

SEQ ID NO: 63168 - DNA, 854 bp, Triticum aestivum
  misc_feature (1)..(854): Ceres Seq. ID no. 12593564
gctcatccccacagtcctgtccccgtccactccgccgccgccgccgcgaattccgccggcgtccgcccccgcgcgcgtgctctgcgcccacgcggactccagcgcctccggatcggagcccctgaacatggcggccgccgcgctcagggttcagctcgaggcgctcctcgagaacatgttcgccacgggtatggtggacgagcagttccggcagctgcagtcgctgcaggaggggggcagcgcgtcgggcttcgtcgccgaggtcgccaccctcttcatcgacgacgccgaccggatcatcgccgacatcgggagcctgctggaccagcccgtggtggatttcgacaaggtggacgcccacgtgcaccagctcaaggggagcagctcgagtgttggtgctcagaaagtgaagctcgcctgcatgcacttccgccagttctatgaggcaaaaagcaaagaagggtgcctcatggcgttggctcttgttaggagtgagttctgtgatgtgcgcaacaagttccagaccatgatgcagctggagcagcagatcgaggcctgcagtcccaagtagagtagcagtcactgaagcaaaaggagcttagctccatgtgacccccgtgtatgtatctcttatgcttgtaggcagtgtaacgggtgtcgggggctctggaaggcgtgtgtgcggaaccggaccgaccgattcccacgtcggagctccggactcgtgaccctttgaaacgcaacttgcttgccctgcgtcaatgtacgtgtcaacgctatgcttgtttgtgtcgtgtccgcccccaggctgcgtgtaaactcttaccttgttgttgtatgttgttggggtcccg

SEQ ID NO: 63169 - protein, 189 aa, Triticum aestivum
  peptide (1)..(189): Ceres Seq. ID no. 12593565
LIPTVLSPSTPPPPPRIPPASAPARVLCAHADSSASGSEPLNMAAAALRVQLEALLENMFATGMVDEQFRQLQSLQEGGSASGFVAEVATLFIDDADRIIADIGSLLDQPVVDFDKVDAHVHQLKGSSSSVGAQKVKLACMHFRQFYEAKSKEGCLMALALVRSEFCDVRNKFQTMMQLEQQIEACSPK

SEQ ID NO: 63170 - protein, 147 aa, Triticum aestivum
  peptide (1)..(147): Ceres Seq. ID no. 12593566
AHPHSPVPVHSAAAAANSAGVRPRARALRPRGLQRLRIGAPEHGGRRAQGSARGAPREHVRHGYGGRAVPAAAVAAGGGQRVGLRRRGRHPLHRRRRPDHRRHREPAGPARGGFRQGGRPRAPAQGEQLECWCSESEARLHALPPVL

SEQ ID NO: 63171 - protein, 147 aa, Triticum aestivum
  peptide (1)..(147): Ceres Seq. ID no. 12593567
MAAAALRVQLEALLENMFATGMVDEQFRQLQSLQEGGSASGFVAEVATLFIDDADRIIADIGSLLDQPVVDFDKVDAHVHQLKGSSSSVGAQKVKLACMHFRQFYEAKSKEGCLMALALVRSEFCDVRNKFQTMMQLEQQIEACSPK

SEQ ID NO: 63172 - DNA, 724 bp, Triticum aestivum
  misc_feature (1)..(724): Ceres Seq. ID no. 12625405
caccgcgcatttggctatcgcatttctcaggtgaggctcaggttccggagtagcgaagcttcaagtgcgcatctgggtaccggcatggctggagagcaggcgttccaccggggaggcgtgcacggaggcggcagcgccatcgggccggactacatgcgggccatccgcggcgacgacgactactacggcgggcacggccagggccacagccagccggcggccgtcaccctcgcgaagggggtggccgcggcggcggcggcggggtcgatgctgctcctgtcggccctgacgctgacgggcacggtgctggcgctgatcgtggcgacgccgctgctggtgctcttcagccccgtgctggtgcccgcggccatcgccgccacgatgctgacgaccgggttcgtctcgtcgggggcgttcggcgcggcggcggtgggggtgctggcgtggatgtacaagtacctgtcgcacggggcgtcctcgccgccgggggccgacacggtggaccacgcgggcgcgaagctggactccaaggcgcacgaggtgaagaactgggcgcagcatcgcctcgaccaggcacgaacgccgtagacgtgtcgtcatttgccctcctatgcgtcaccagtgtgtgtggatcgacgcctctatatgtacggacgtgcccgcgagcggtgctacttaccaccgatgaataataagctgcatatctcctctggaagagggagtt

SEQ ID NO: 63173 - protein, 195 aa, Triticum aestivum
  peptide (1)..(195): Ceres Seq. ID no. 12625406
HRAFGYRISQVRLRFRSSEASSAHLGTGMAGEQAFHRGGVHGGGSAIGPDYMRAIRGDDDYYGGHGQGHSQPAAVTLAKGVAAAAAAGSMLLLSALTLTGTVLALIVATPLLVLFSPVLVPAAIAATMLTTGFVSSGAFGAAAVGVLAWMYKYLSHGASSPPGADTVDHAGAKLDSKAHEVKNWAQHRLDQARTP

SEQ ID NO: 63174 - protein, 167 aa, Triticum aestivum
  peptide (1)..(167): Ceres Seq. ID no. 12625407
MAGEQAFHRGGVHGGGSAIGPDYMRAIRGDDDYYGGHGQGHSQPAAVTLAKGVAAAAAAGSMLLLSALTLTGTVLALIVATPLLVLFSPVLVPAAIAATMLTTGFVSSGAFGAAAVGVLAWMYKYLSHGASSPPGADTVDHAGAKLDSKAHEVKNWAQHRLDQARTP

SEQ ID NO: 63175 - protein, 144 aa, Triticum aestivum
  peptide (1)..(144): Ceres Seq. ID no. 12625408
MRAIRGDDDYYGGHGQGHSQPAAVTLAKGVAAAAAAGSMLLLSALTLTGTVLALIVATPLLVLFSPVLVPAAIAATMLTTGFVSSGAFGAAAVGVLAWMYKYLSHGASSPPGADTVDHAGAKLDSKAHEVKNWAQHRLDQARTP

SEQ ID NO: 63176 - DNA, 1084 bp, Triticum aestivum
  misc_feature (1)..(1084): Ceres Seq. ID no. 13654964
ctaatcgaaaaacgattacgaagcgtgcccaactccatctgcttccttttcctcttccccccgtccccgacgacccccggccgaaaccctagcgaggcgcgatgttcgggtaccggaaggcgccggacctcgacctcgaggcgggcggctcggcggcgctctacccggggatgacggaggacgtggagctgcgctgggccttcatccgcaagatctacgtcatcctctcggtccagctcgccatgaccgccgccgtcgcggggttcgtcgtcaaggtccccgccgtctccgagttcttcgtctcctccaacgctggcctgggcctctacatcttcctcctcgtcctgcccctcatcgtgctctgccccctgcgctactaccaccagaagcaccccgtcaacctcatcctgctcggcgtcttcaccgtctccatcagcttcgccgtcggcatgacgtgcgccttcaccagcggaaaaatcatcttggaagctgcaattctgacagcagtggtggtgatcagcttgactgcctacactttctgggctgcaaagagaggccatgatttcaacttcctgggcccgttcctgtttggagctcttatggtgctgctggtgttctcacttatccagatctttttcccactgggcaagatctccaccatgatatatggggccgtggcgtcgatcatcttctgtggctacatcatcttcgacacggacaacatcatcaagcgccacacgtatgacgagtacatctgggctgccgtgtccctctacctcgacatcatcaacctgttcctgaatctgatgcaaattctgcgggcagctgatagctgagcgcaccttgcccaacatcgcatgatttaagtccactagcttgtgcatatcagaaaattcatgaatgcccgcagatacctgtaggcatgtacaatcgttatcagtaaattctgccgtcctagactccatcacatgtcttgtttcctagcttcctggagtatgcaatgtgtgattgaaccaagctgcacgatgaaaatatactcactggtgctttgtgattgcaaggcacgtgaatttaattccctgcc

SEQ ID NO: 63177 - protein, 244 aa, Triticum aestivum
  peptide (1)..(244): Ceres Seq. ID no. 15219707
MFGYRKAPDLDLEAGGSAALYPGMTEDVELRWAFIRKIYVILSVQLAMTAAVAGFVVKVPAVSEFFVSSNAGLGLYIFLLVLPLIVLCPLRYYHQKHPVNLILLGVFTVSISFAVGMTCAFTSGKIILEAAILTAVVVISLTAYTFWAAKRGHDFNFLGPFLFGALMVLLVFSLIQIFFPLGKISTMIYGAVASIIFCGYIIFDTDNIIKRHTYDEYIWAAVSLYLDIINLFLNLMQILRAADS

SEQ ID NO: 63178 - protein, 221 aa, Triticum aestivum
  peptide (1)..(221): Ceres Seq. ID no. 15219708
MTEDVELRWAFIRKIYVILSVQLAMTAAVAGFVVKVPAVSEFFVSSNAGLGLYIFLLVLPLIVLCPLRYYHQKHPVNLILLGVFTVSISFAVGMTCAFTSGKIILEAAILTAVVVISLTAYTFWAAKRGHDFNFLGPFLFGALMVLLVFSLIQIFFPLGKISTMIYGAVASIIFCGYIIFDTDNIIKRHTYDEYIWAAVSLYLDIINLFLNLMQILRAADS

SEQ ID NO: 63179 - protein, 197 aa, Triticum aestivum
  peptide (1)..(197): Ceres Seq. ID no. 15219709
MTAAVAGFVVKVPAVSEFFVSSNAGLGLYIFLLVLPLIVLCPLRYYHQKHPVNLILLGVFTVSISFAVGMTCAFTSGKIILEAAILTAVVVISLTAYTFWAAKRGHDFNFLGPFLFGALMVLLVFSLIQIFFPLGKISTMIYGAVASIIFCGYIIFDTDNIIKRHTYDEYIWAAVSLYLDIINLFLNLMQILRAADS

SEQ ID NO: 63180 - DNA, 1216 bp, Triticum aestivum
  misc_feature (1)..(1216): Ceres Seq. ID no. 13596660
ctctgcctccctatcccgcctcgggccgctgcctctgcctcatcgtcctcctcgcgctcgcactccttcgccgctgccggacgggtttccctccgccgtcgccgccgccgcgcttccttcaccgactgccgctgctcctcctcctcctccccagaaatggaggccggcgctggcacggctctgtaccccgcgcaccgatgcaaaaccatatacctggtgaggcatgcccagggtattcacaatgtggaaggcgagaaggattttgcagcatacaagtcacatgcgctgcttgatgctcaacttacccctttgggctggagccaagttgataccctgcgagatcatgtgacaaaatgtggactagcaaaaaagattgagttggttattgtttcccctctactcaggactatacaaactgcagtgggggtctttggtggtgggaactatattgatggagcaagtgcatcaccattgatggtagagggtgctggaaacagtgaacgtcagccgatttcaagtttgaactgcccaccgtttctcgcagttgaggcttgcagagagcacctgggtgttcatccctgtgacaagaggagcagcataacaaaataccgtactctctttcctgccattgatttttccttgatcgagaatgatgaagatgttctctgggaacccgatgtcagagaaacaaatgagtctgttgctctcaggggcatgaagttctttgactggttatggacgagagaagagaaagagatagctattgtcagccatagtggtttcttgtatcacaccttgaacatgtatggtaaagagtgtcatccaacaatagcagaggaactgggaaagcacttcgccaactgtgagctccggtcgatggtcttggtcgacagaagtaaccttggatcggatgcctctaaatacaacttcgctgggaagataccgaccgggcttgatatgcccagcgatgtcgcagacgagaagcaggctgaagaagctagcaagaactgaggctgtcgagcatgtggatgtctttgattcttttgtcaaaccttggttctggctgacaatgaactgagaatagatactaagcgacatctaaggataggacttgccgtctgttgttccggtgtatgatgggcacgattggttatgtttatctgatttgttgtttgaacagatacccaaattcatgggaaataaggacttatacact

SEQ ID NO: 63181 - protein, 336 aa, Triticum aestivum
  peptide (1)..(336): Ceres Seq. ID no. 15221943
LCLPIPPRAAASASSSSSRSHSFAAAGRVSLRRRRRRASFTDCRCSSSSSPEMEAGAGTALYPAHRCKTIYLVRHAQGIHNVEGEKDFAAYKSHALLDAQLTPLGWSQVDTLRDHVTKCGLAKKIELVIVSPLLRTIQTAVGVFGGGNYIDGASASPLMVEGAGNSERQPISSLNCPPFLAVEACREHLGVHPCDKRSSITKYRTLFPAIDFSLIENDEDVLWEPDVRETNESVALRGMKFFDWLWTREEKEIAIVSHSGFLYHTLNMYGKECHPTIAEELGKHFANCELRSMVLVDRSNLGSDASKYNFAGKIPTGLDMPSDVADEKQAEEASKN

SEQ ID NO: 63182 - protein, 284 aa, Triticum aestivum
  peptide (1)..(284): Ceres Seq. ID no. 15221944
MEAGAGTALYPAHRCKTIYLVRHAQGIHNVEGEKDFAAYKSHALLDAQLTPLGWSQVDTLRDHVTKCGLAKKIELVIVSPLLRTIQTAVGVFGGGNYIDGASASPLMVEGAGNSERQPISSLNCPPFLAVEACREHLGVHPCDKRSSITKYRTLFPAIDFSLIENDEDVLWEPDVRETNESVALRGMKFFDWLWTREEKEIAIVSHSGFLYHTLNMYGKECHPTIAEELGKHFANCELRSMVLVDRSNLGSDASKYNFAGKIPTGLDMPSDVADEKQAEEASKN

SEQ ID NO: 63183 - protein, 178 aa, Triticum aestivum
  peptide (1)..(178): Ceres Seq. ID no. 15221945
MVEGAGNSERQPISSLNCPPFLAVEACREHLGVHPCDKRSSITKYRTLFPAIDFSLIENDEDVLWEPDVRETNESVALRGMKFFDWLWTREEKEIAIVSHSGFLYHTLNMYGKECHPTIAEELGKHFANCELRSMVLVDRSNLGSDASKYNFAGKIPTGLDMPSDVADEKQAEEASKN

SEQ ID NO: 63184 - DNA, 1602 bp, Triticum aestivum
  misc_feature (1)..(1602): Ceres Seq. ID no. 14314108
accaaacaatggcggcgtgcaacggcctgttcgtgtaccacatcctcggcctggcctccctggtggccgtcttctacttctccctcctcggcgaggtggacctccgcttccccggcctcctcccgtcctccggcgcgtcccagcactcccacgacgcgtccctgccgttcgtggagcggcgcggcgcgcagctcttcctggagggccgcccgttctacatcaacgggtggaactcgtactggctcatggaccaggcggtggagccggccagccgccaccgtgtgtccgacatgttccgcgccgccaccgggatggggctcacggtgtgccgcacctgggccttcaacgacggcgcctacaacgcgctccagctctccccgggacacttcgacgagcgcgtcttcagggcgctggacctggtggtcgtggaggcccggcggcacggcgtgcggctcgtcctcagcctggccaacaacctggaggcgtacggcgggaagacgcagtacgtgcggtgggcgtgggacgaaggcgtcggcctcaccgcctccaacgactccttcttcttcgaccccgccatccgtgactacttcaaagtctacctcaaggcattgttgacgaggacgaaccacttgacgggggtgcagtacaaggacgaccctaccatcttggcgtgggagctgatgaacgagcccagatgcatctccgatccgtctggtaacactctgcagcgctggatcgaggagatggcggggtacgtgaaatcgatcgaccgtcggcatctgctgaccgtcggcacggaggggttctacggccccacgagccctccggagaagctgagcgtgaatccggggcactggttcaacaactacggcctcgacttcatccgcaactccaagatctccgacatcgacttcgcctccgtccacctttacccggacacctggctgctgcacgcggatctggaagagaagctcaagttcgtgacgcagtgggtgagctcccacttcgaggacggcgacacggagctcggcggcaagcccgtggtgctgacggagttcgggctgtcgcatttggtcaagggcttcgagcagtcgcagcgcgacgccttctacaagtcggtgtacgacatcgtccacgcgtcggccaagaggggcggcgccggcgccggcgcgatagtgtggcagctcgccgccgaggacatggaggagtaccacgacggcttcgccatcgtgcccagcgagacgccgtcgatgcagaagctgctgacggagcagtcgtgccggctggccgcgctgaggcacggggaggaggaggccaagaggatcctcaaggcggtgtgcggctgacccgtgatctgtcttgcgaggtgtggcttttttgcgtgctcatgtcatgtactgttactgtgtgtccgtaggaaatcgacacgaaatggaccgaagggatccatgaaaggtggcgtgctcggcgccgacgtcggcagatctgcctctgtattttccttgctgtgttgttgtactcgtacgtgcccttgacctttggtgtttaagtcattgtcgagtggcagcggaggctagttatattctatagtcctcgaatagc

SEQ ID NO: 63185 - protein, 447 aa, Triticum aestivum
  peptide (1)..(447): Ceres Seq. ID no. 14314109
QTMAACNGLFVYHILGLASLVAVFYFSLLGEVDLRFPGLLPSSGASQHSHDASLPFVERRGAQLFLEGRPFYINGWNSYWLMDQAVEPASRHRVSDMFRAATGMGLTVCRTWAFNDGAYNALQLSPGHFDERVFRALDLVVVEARRHGVRLVLSLANNLEAYGGKTQYVRWAWDEGVGLTASNDSFFFDPAIRDYFKVYLKALLTRTNHLTGVQYKDDPTILAWELMNEPRCISDPSGNTLQRWIEEMAGYVKSIDRRHLLTVGTEGFYGPTSPPEKLSVNPGHWFNNYGLDFIRNSKISDIDFASVHLYPDTWLLHADLEEKLKFVTQWVSSHFEDGDTELGGKPVVLTEFGLSHLVKGFEQSQRDAFYKSVYDIVHASAKRGGAGAGAIVWQLAAEDMEEYHDGFAIVPSETPSMQKLLTEQSCRLAALRHGEEEAKRILKAVCG

SEQ ID NO: 63186 - protein, 445 aa, Triticum aestivum
  peptide (1)..(445): Ceres Seq. ID no. 14314110
MAACNGLFVYHILGLASLVAVFYFSLLGEVDLRFPGLLPSSGASQHSHDASLPFVERRGAQLFLEGRPFYINGWNSYWLMDQAVEPASRHRVSDMFRAATGMGLTVCRTWAFNDGAYNALQLSPGHFDERVFRALDLVVVEARRHGVRLVLSLANNLEAYGGKTQYVRWAWDEGVGLTASNDSFFFDPAIRDYFKVYLKALLTRTNHLTGVQYKDDPTILAWELMNEPRCISDPSGNTLQRWIEEMAGYVKSIDRRHLLTVGTEGFYGPTSPPEKLSVNPGHWFNNYGLDFIRNSKISDIDFASVHLYPDTWLLHADLEEKLKFVTQWVSSHFEDGDTELGGKPVVLTEFGLSHLVKGFEQSQRDAFYKSVYDIVHASAKRGGAGAGAIVWQLAAEDMEEYHDGFAIVPSETPSMQKLLTEQSCRLAALRHGEEEAKRILKAVCG

SEQ ID NO: 63187 - protein, 366 aa, Triticum aestivum
  peptide (1)..(366): Ceres Seq. ID no. 14314111
MDQAVEPASRHRVSDMFRAATGMGLTVCRTWAFNDGAYNALQLSPGHFDERVFRALDLVVVEARRHGVRLVLSLANNLEAYGGKTQYVRWAWDEGVGLTASNDSFFFDPAIRDYFKVYLKALLTRTNHLTGVQYKDDPTILAWELMNEPRCISDPSGNTLQRWIEEMAGYVKSIDRRHLLTVGTEGFYGPTSPPEKLSVNPGHWFNNYGLDFIRNSKISDIDFASVHLYPDTWLLHADLEEKLKFVTQWVSSHFEDGDTELGGKPVVLTEFGLSHLVKGFEQSQRDAFYKSVYDIVHASAKRGGAGAGAIVWQLAAEDMEEYHDGFAIVPSETPSMQKLLTEQSCRLAALRHGEEEAKRILKAVCG

SEQ ID NO: 63188 - DNA, 1318 bp, Triticum aestivum
  misc_feature (1)..(1318): Ceres Seq. ID no. 14314112
aaggacagagaagccaggcggcagcaacccctttcctccaatctccgtccattcgagacgtctgcggggccgggcaaggcatggtcgccatgctgcccgccgcgaggggggacgccgccccagccgccagcgccggcgccgccgacaagctcgtccacgggcctgtcaccgacggcaagtgcaagaagaaggccccgaggatgatccacaaggccgagagggagaagcacaagcgcgacctgctcaacgatctcttcagcgagcttgacgaaatgctagaagcagacaggcagaccaatgggaaggcatgtatattgactgacaccactcgaatccttcgagacctgctttcgcaattagaatctctccgaaaggagaatagcaccctgcagaatgaatcccattatgttacgatggagaggaatgagctgcaggatgagaacggtgtgctccgcaatgaaattctggagctacaaaatgagctggcgacgcttcccgcaggcaacccaggttggggccatgctactgctggatcgcctcaccctgcgggcacagttttcccgtcacagcaaccaatgcagccgaccaccatcgcaagcgcagtattccccttgcagcagcctctgcaacagacaacaatcctggagcacccttatgcaccaccaccaccaccacgggaacttaagctcttcccagatgctgcgtctgatatcgaaggccttgaaccatcagaagatcaggaggccgccaaccatattgcgcgaccgctggcgaggtacccaacacagtcagcgttgtggcctgtaagcctgggtctcccgaggatggaagacgaacagtgtagcagtggcacaaccggcagtagcaaggaaggtagtagctctgcctctagtagagattgagtagatcagctccaaccagtcaggaagtttctctttgagcgtagcgaatatacacagatgagcatgtggcatgtaaataccagactccatcttggatctgggaatgttatgttagatgagaagatgacactccaatgggaatcagaatagcagcatttctcatcctttgtgttgcaccgtatcatatatatgaactgatctagatttgatatttgcaaagaaaaactacagcaataagcaatggattatatttatcggtgggggtaaccagaagcggaactgaagaggaaattgcaggcgactctcttcaaccatgtagagggttgcgtagagggtttcctttccttgcattggggccaatctcttcaaccgtgtacttccctgatccaaacccaaagagaaaatatatgagtttc

SEQ ID NO: 63189 - protein, 299 aa, Triticum aestivum
  peptide (1)..(299): Ceres Seq. ID no. 14314113
GQRSQAAATPFLQSPSIRDVCGAGQGMVAMLPAARGDAAPAASAGAADKLVHGPVTDGKCKKKAPRMIHKAEREKHKRDLLNDLFSELDEMLEADRQTNGKACILTDTTRILRDLLSQLESLRKENSTLQNESHYVTMERNELQDENGVLRNEILELQNELATLPAGNPGWGHATAGSPHPAGTVFPSQQPMQPTTIASAVFPLQQPLQQTTILEHPYAPPPPPRELKLFPDAASDIEGLEPSEDQEAANHIARPLARYPTQSALWPVSLGLPRMEDEQCSSGTTGSSKEGSSSASSRD

SEQ ID NO: 63190 - protein, 273 aa, Triticum aestivum
  peptide (1)..(273): Ceres Seq. ID no. 14314114
MVAMLPAARGDAAPAASAGAADKLVHGPVTDGKCKKKAPRMIHKAEREKHKRDLLNDLFSELDEMLEADRQTNGKACILTDTTRILRDLLSQLESLRKENSTLQNESHYVTMERNELQDENGVLRNEILELQNELATLPAGNPGWGHATAGSPHPAGTVFPSQQPMQPTTIASAVFPLQQPLQQTTILEHPYAPPPPPRELKLFPDAASDIEGLEPSEDQEAANHIARPLARYPTQSALWPVSLGLPRMEDEQCSSGTTGSSKEGSSSASSRD

SEQ ID NO: 63191 - protein, 270 aa, Triticum aestivum
  peptide (1)..(270): Ceres Seq. ID no. 14314115
MLPAARGDAAPAASAGAADKLVHGPVTDGKCKKKAPRMIHKAEREKHKRDLLNDLFSELDEMLEADRQTNGKACILTDTTRILRDLLSQLESLRKENSTLQNESHYVTMERNELQDENGVLRNEILELQNELATLPAGNPGWGHATAGSPHPAGTVFPSQQPMQPTTIASAVFPLQQPLQQTTILEHPYAPPPPPRELKLFPDAASDIEGLEPSEDQEAANHIARPLARYPTQSALWPVSLGLPRMEDEQCSSGTTGSSKEGSSSASSRD

SEQ ID NO: 63192 - DNA, 1687 bp, Triticum aestivum
  misc_feature (1)..(1687): Ceres Seq. ID no. 15178681
aatcgaataatccgtcgactgttctggagagtgagcaggatcggattgttattctattgttgtccgcggcggccatggcgttcttcgaggagacggagtcgtactacgtcccctacctccgcgcccacctgcaccaattcgcagcgtcggtctccgcggcgagctgcgaggagggggcgggcgacgacgaggagtgccgcgacgaggcggccgcgctcaggctcaagatggtggccgtcgccgccatcctcatcgccggcgcggtcggcgtcgccatcccgctcgtcggccggaggcggcgcggcgggggcggcggcggcgagggcgggtcctccggcggcgggatgttcgtgctcgccaaggcgttcgcggcgggggtcatcctcgccacggggttcgtgcacatgatgcacgacgccgaggagaagttcgccgacccgtgcctcccggccatgccgtggcgccggttccccttcccgggcttcatcgccatgctcgccgcgctgggcacgctcgtcatggagttcgtcggcacccgcttctacgagcgcaggcacggcgaggaggccgctgcagccgcggccacagccgcgcgtgacgacaccacggcgctgctcgaggacggctccctgtcagggatggctgccgccgcgatgagcggcgacgatgagaagcaggacgccatgcacatcgtgggcatgcgcgcgcacgcggcggcgcaccagcacagccatgcgcatggccatgacgcgtgcgatggtggagccgtgtacgacgcccatgcacacgcccacgcccagggccatggccatgaccatgggcatgggagcgaggagaggccgtcccaagctcatcatgtggttgtctcgcagattctggagacggggattgtatctcattcggtgatcatcgggctatccttgggcgtttcgcaaagcccatgtaccattaaacctcttgttgccgccctctccttccaccagttcttcgagggttttgccttgggtggctgcatttctgaggcgcagttcaagaatttctctgcactcctgatggctttcttctttgctatcacaacacctgctgggatcaccgtgggggcggggatcgcgtcattctacaatgccaacagccccagggcattggtggtggaaggcattctggattcaatgtcatctggtatactggtctatatggcattagtggatctcattgctgctgatttcctgagccggaggatgagctgcaatccgaggctgcaagtgtgctcatacgttgccttgtttgtcggggctattgccatgtcatcactggctatctgggcttagtgccagtgaggattattgaagcttgggacgggctgcttggtgatcaatgcactacgacttgttgcctagctaccattaactgagtaagatgggaggcttttcctttcgctgtccattcttttgtttgttcttccatggtgctgggccgtgtaacgtcctcttttggtcatagaaaaggaagtccctctttgggtacattgtggtggtacagaattgggacaagttagttagggaataaagagtttaggagtcccaccagtctttgcagatgtacagttcatcctcggtgttagataagaggccttgtctgttctcaagtataatcttgcacgtacatcaatgtggatctcctgaaagcc

SEQ ID NO: 63193 - protein, 441 aa, Triticum aestivum
  peptide (1)..(441): Ceres Seq. ID no. 15178682
SNNPSTVLESEQDRIVILLLSAAAMAFFEETESYYVPYLRAHLHQFAASVSAASCEEGAGDDEECRDEAAALRLKMVAVAAILIAGAVGVAIPLVGRRRRGGGGGGEGGSSGGGMFVLAKAFAAGVILATGFVHMMHDAEEKFADPCLPAMPWRRFPFPGFIAMLAALGTLVMEFVGTRFYERRHGEEAAAAAATAARDDTTALLEDGSLSGMAAAAMSGDDEKQDAMHIVGMRAHAAAHQHSHAHGHDACDGGAVYDAHAHAHAQGHGHDHGHGSEERPSQAHHVVVSQILETGIVSHSVIIGLSLGVSQSPCTIKPLVAALSFHQFFEGFALGGCISEAQFKNFSALLMAFFFAITTPAGITVGAGIASFYNANSPRALVVEGILDSMSSGILVYMALVDLIAADFLSRRMSCNPRLQVCSYVALFVGAIAMSSLAIWA

SEQ ID NO: 63194 - protein, 417 aa, Triticum aestivum
  peptide (1)..(417): Ceres Seq. ID no. 15178683
MAFFEETESYYVPYLRAHLHQFAASVSAASCEEGAGDDEECRDEAAALRLKMVAVAAILIAGAVGVAIPLVGRRRRGGGGGGEGGSSGGGMFVLAKAFAAGVILATGFVHMMHDAEEKFADPCLPAMPWRRFPFPGFIAMLAALGTLVMEFVGTRFYERRHGEEAAAAAATAARDDTTALLEDGSLSGMAAAAMSGDDEKQDAMHIVGMRAHAAAHQHSHAHGHDACDGGAVYDAHAHAHAQGHGHDHGHGSEERPSQAHHVVVSQILETGIVSHSVIIGLSLGVSQSPCTIKPLVAALSFHQFFEGFALGGCISEAQFKNFSALLMAFFFAITTPAGITVGAGIASFYNANSPRALVVEGILDSMSSGILVYMALVDLIAADFLSRRMSCNPRLQVCSYVALFVGAIAMSSLAIWA

SEQ ID NO: 63195 - protein, 366 aa, Triticum aestivum
  peptide (1)..(366): Ceres Seq. ID no. 15178684
MVAVAAILIAGAVGVAIPLVGRRRRGGGGGGEGGSSGGGMFVLAKAFAAGVILATGFVHMMHDAEEKFADPCLPAMPWRRFPFPGFIAMLAALGTLVMEFVGTRFYERRHGEEAAAAAATAARDDTTALLEDGSLSGMAAAAMSGDDEKQDAMHIVGMRAHAAAHQHSHAHGHDACDGGAVYDAHAHAHAQGHGHDHGHGSEERPSQAHHVVVSQILETGIVSHSVIIGLSLGVSQSPCTIKPLVAALSFHQFFEGFALGGCISEAQFKNFSALLMAFFFAITTPAGITVGAGIASFYNANSPRALVVEGILDSMSSGILVYMALVDLIAADFLSRRMSCNPRLQVCSYVALFVGAIAMSSLAIWA

SEQ ID NO: 63196 - DNA, 1655 bp, Triticum aestivum
  misc_feature (1)..(1655): Ceres Seq. ID no. 13596984
ctagaacatcctaatcaaaaattgttccttctcccttgcttccatcttcctttgtatgcagccttcatgcatgactgactgtctaactagctcgagcagtagagctagtgcatgacgtgatggctccaacctccctgcagaggccgaggaagccgaggtgcccctcccaccccatgctctctctctcccctgccctcctctccctcctcctcgtccccttcctctacctcctcatccaccgttccgcgtgctccccgcccttcagcaacctcacgaccgccaggcgctcatcctcgagcgtgagcggcttcgccggagaccttcgtgacatcgagttctcgtggaaccacctgccgttcatgtcgtcgaagccaccccccgccaagctcaagatcgccgtgttctcgcggaagtggcccgtggccacggcccctggcggcatggagcggcacgcgcacacgctgcacacggcgctcgccgcgcggggccaccgcgtccacgtgttcacctcacctccgccgcataccgaggccgcgccctcgcccaccgccgatgggcctcagctgcatttccttgacggcacccccggccagtggcggtgcgacgaggcatggaagctgtacgaggccgagggcgacaacgatccgttcgacgtcatccactccgagagcgtggcggtgttccaccggtacgcgcgcggcgtgcccaacctggtcgtgtcgtggcacggaatctccctggaggcgctgcactcgggcatctaccaggacctcgcccgcggcgaggacgagcccatgtcgccggcgttcaaccagagcctgtcgcagtcggtgcaccgggtgctgtccgaggtgcgcttcttccggagctacgcgcaccaggtggccatcagcgactccaccagggagatgctccgcgacgtgtaccagatccccggccgccgcgtgcacgtaatcctgaacggcgtggacgaggcgcagttcactccggacacggagctcggccgcgccttccgggaagagatcgggctccccaagagcgccgacctcgtgctcggcgtgtccgggaggctcgtcaaggacaagggccaccctctgctctacgaggccttctccaagctcgccctccgccacccgaacgtgtacctcctggtcgccggcaaggggccgtgggagtcgaggtacatggacctgggacgcaacgccaaggtgcttggcgcggtgccgcccgggaagctcagggcgttctacaacgcgctggacgtgttcgtggacccgacgctgcggccgcagggcctggacctgacgctcatggaggcgatgcaatgcggcaagccggtggtggccacgcggttcccgagcatcaagggaagcatcgtggtggacgaggagttcggccacatgttcgcgcccaacgtggagtcgctgctagagagtctggaggcggtggtgcaggatggcgcccggcgcgccgcggagcgcggccgcgcgtgcagggagtacgccaggtccatgttcgcggccaccaagatggcactagcgtacgagaggctcttcctttgtgtcaaaaacgagaccttctgcatgtacccctctgaatttgattagttttctcgggagcctgtgcacttgcttagtgatttatggcacactaat

SEQ ID NO: 63197 - protein, 495 aa, Triticum aestivum
  peptide (1)..(495): Ceres Seq. ID no. 13596985
MAPTSLQRPRKPRCPSHPMLSLSPALLSLLLVPFLYLLIHRSACSPPFSNLTTARRSSSSVSGFAGDLRDIEFSWNHLPFMSSKPPPAKLKIAVFSRKWPVATAPGGMERHAHTLHTALAARGHRVHVFTSPPPHTEAAPSPTADGPQLHFLDGTPGQWRCDEAWKLYEAEGDNDPFDVIHSESVAVFHRYARGVPNLVVSWHGISLEALHSGIYQDLARGEDEPMSPAFNQSLSQSVHRVLSEVRFFRSYAHQVAISDSTREMLRDVYQIPGRRVHVILNGVDEAQFTPDTELGRAFREEIGLPKSADLVLGVSGRLVKDKGHPLLYEAFSKLALRHPNVYLLVAGKGPWESRYMDLGRNAKVLGAVPPGKLRAFYNALDVFVDPTLRPQGLDLTLMEAMQCGKPVVATRFPSIKGSIVVDEEFGHMFAPNVESLLESLEAVVQDGARRAAERGRACREYARSMFAATKMALAYERLFLCVKNETFCMYPSEFD

SEQ ID NO: 63198 - protein, 477 aa, Triticum aestivum
  peptide (1)..(477): Ceres Seq. ID no. 13596986
MLSLSPALLSLLLVPFLYLLIHRSACSPPFSNLTTARRSSSSVSGFAGDLRDIEFSWNHLPFMSSKPPPAKLKIAVFSRKWPVATAPGGMERHAHTLHTALAARGHRVHVFTSPPPHTEAAPSPTADGPQLHFLDGTPGQWRCDEAWKLYEAEGDNDPFDVIHSESVAVFHRYARGVPNLVVSWHGISLEALHSGIYQDLARGEDEPMSPAFNQSLSQSVHRVLSEVRFFRSYAHQVAISDSTREMLRDVYQIPGRRVHVILNGVDEAQFTPDTELGRAFREEIGLPKSADLVLGVSGRLVKDKGHPLLYEAFSKLALRHPNVYLLVAGKGPWESRYMDLGRNAKVLGAVPPGKLRAFYNALDVFVDPTLRPQGLDLTLMEAMQCGKPVVATRFPSIKGSIVVDEEFGHMFAPNVESLLESLEAVVQDGARRAAERGRACREYARSMFAATKMALAYERLFLCVKNETFCMYPSEFD

SEQ ID NO: 63199 - protein, 415 aa, Triticum aestivum
  peptide (1)..(415): Ceres Seq. ID no. 13596987
MSSKPPPAKLKIAVFSRKWPVATAPGGMERHAHTLHTALAARGHRVHVFTSPPPHTEAAPSPTADGPQLHFLDGTPGQWRCDEAWKLYEAEGDNDPFDVIHSESVAVFHRYARGVPNLVVSWHGISLEALHSGIYQDLARGEDEPMSPAFNQSLSQSVHRVLSEVRFFRSYAHQVAISDSTREMLRDVYQIPGRRVHVILNGVDEAQFTPDTELGRAFREEIGLPKSADLVLGVSGRLVKDKGHPLLYEAFSKLALRHPNVYLLVAGKGPWESRYMDLGRNAKVLGAVPPGKLRAFYNALDVFVDPTLRPQGLDLTLMEAMQCGKPVVATRFPSIKGSIVVDEEFGHMFAPNVESLLESLEAVVQDGARRAAERGRACREYARSMFAATKMALAYERLFLCVKNETFCMYPSEFD

SEQ ID NO: 63200 - DNA, 801 bp, Triticum aestivum
  misc_feature (1)..(801): Ceres Seq. ID no. 13655330
gtatttcggtttcctcgattgcccccaatccgtggctgcgcgtccgccggtggccgggggttctaatccgagcgattcccaatcccaaccgccgctggaagaccccgcagctccacgacagcgcgggcagacatggcgcccgtactacctgcgccggcggcggcggcggctcctcccaccttctgccgcgtctctctcccggcccgcagcgccttcccctcctcccccgccaaaagccttcgcaggtttgcggccaggagcagcggcggcggcggccgtcccgagcccaaagcaggtgatgacgagagcaaggccgtccttgacgccttcttcctcgggaaggccttggcggaggcgctgacggagagggccgagtcggtggtgggcgaggtattcagcgtcgtcgggcagtggcaggcggagcagcagaagcaggtccaggaattccaggaggaagtagttcagagagcccaaaaggctaaggaaagagctgctgaggaggtcgttgatgataagggaccaaagactctaaagggaccttcaacaacaatcgtgacgcctgcacctatgtctcctccttctcctaatattcccacacaggcagaacagttataagcggcgatgaagagttagtgctgcatgtagactcacttttgtgctccaagaaagtgatgaaattctcctatgagatatgtattgatcaagttgtcctttctttgatagtgaatatccagaatatcaactagaaaaatctatggtacaagttccgagatgagtggaataaaaatctgttagtttgcc

SEQ ID NO: 63201 - protein, 160 aa, Triticum aestivum
  peptide (1)..(160): Ceres Seq. ID no. 13655331
MAPVLPAPAAAAAPPTFCRVSLPARSAFPSSPAKSLRRFAARSSGGGGRPEPKAGDDESKAVLDAFFLGKALAEALTERAESVVGEVFSVVGQWQAEQQKQVQEFQEEVVQRAQKAKERAAEEVVDDKGPKTLKGPSTTIVTPAPMSPPSPNIPTQAEQL

SEQ ID NO: 63202 - protein, 119 aa, Triticum aestivum
  peptide (1)..(119): Ceres Seq. ID no. 13655332
YFGFLDCPQSVAARPPVAGGSNPSDSQSQPPLEDPAAPRQRGQTWRPYYLRRRRRRLLPPSAASLSRPAAPSPPPPPKAFAGLRPGAAAAAAVPSPKQVMTRARPSLTPSSSGRPWRRR

SEQ ID NO: 63203 - protein, 98 aa, Triticum aestivum
  peptide (1)..(98): Ceres Seq. ID no. 13655333
ISVSSIAPNPWLRVRRWPGVLIRAIPNPNRRWKTPQLHDSAGRHGARTTCAGGGGGSSHLLPRLSPGPQRLPLLPRQKPSQVCGQEQRRRRPSRAQSR

SEQ ID NO: 63204 - DNA, 948 bp, Triticum aestivum
  misc_feature (1)..(948): Ceres Seq. ID no. 12587066
attcaataccatctcccagtcaagtaaggggagagaagcagaggagcagcagccaatagccgcccacggagatagccagagccagagagcaaggcgtggaattcgagagatcggagggaggaggatgatggagcggcaggacgaggcgtggtgctcgtgctcgccgaggcagtgcaggatttgccacgaggaggaaagggacgacggctgcgtaaccgcaaccgcaaccgcaaccgccatggagtctccctgcggatgctctggctccctcaagtatgctcacagggggtgcgtgcagagatggtgcgacgagaaggggagcaccgtctgcgagatttgcctccagaattacgagcctggatacaccgctgctcccaagaaaactcaagttgctcatgtcgcagtcaccatcagagggagcctggaggtcccaaggcaggattatgaggcaccggagcatgccccgttgatcgggctcgacgcggcggcgggcgacccggcctacgctgagtgcgcgagtgccgccggcagaagtgctgcctggtgccggtcggtgacggtgacgttcactgttgtgttgctgctgaggcatctcattgccctggtgaccgtcggcgccgcgaatcaatacgccttcagcctgctgacgatatacttgctgagggcgagtgggatcttgctgccgttctacgtcctcatgcggcttatctccgcggtgcagcacggccagatgcagtaccggctgcagatgctccaggagcaaagaaggaacgcatcaagaatgcaacacagggtgcctggtcagggacaacggcagcatgtgattcttgttgtgtgaggagaacagtgaagtggatgttgtcctctggaatagtcttaaatgtattattattgatgttgatcaaggagcaattaggaaaaaagaaaagagaaagttcataagctttc

SEQ ID NO: 63205 - protein, 278 aa, Triticum aestivum
  peptide (1)..(278): Ceres Seq. ID no. 12587067
FNTISQSSKGREAEEQQPIAAHGDSQSQRARRGIREIGGRRMMERQDEAWCSCSPRQCRICHEEERDDGCVTATATATAMESPCGCSGSLKYAHRGCVQRWCDEKGSTVCEICLQNYEPGYTAAPKKTQVAHVAVTIRGSLEVPRQDYEAPEHAPLIGLDAAAGDPAYAECASAAGRSAAWCRSVTVTFTVVLLLRHLIALVTVGAANQYAFSLLTIYLLRASGILLPFYVLMRLISAVQHGQMQYRLQMLQEQRRNASRMQHRVPGQGQRQHVILVV

SEQ ID NO: 63206 - protein, 237 aa, Triticum aestivum
  peptide (1)..(237): Ceres Seq. ID no. 12587068
MMERQDEAWCSCSPRQCRICHEEERDDGCVTATATATAMESPCGCSGSLKYAHRGCVQRWCDEKGSTVCEICLQNYEPGYTAAPKKTQVAHVAVTIRGSLEVPRQDYEAPEHAPLIGLDAAAGDPAYAECASAAGRSAAWCRSVTVTFTVVLLLRHLIALVTVGAANQYAFSLLTIYLLRASGILLPFYVLMRLISAVQHGQMQYRLQMLQEQRRNASRMQHRVPGQGQRQHVILVV

SEQ ID NO: 63207 - protein, 236 aa, Triticum aestivum
  peptide (1)..(236): Ceres Seq. ID no. 12587069
MERQDEAWCSCSPRQCRICHEEERDDGCVTATATATAMESPCGCSGSLKYAHRGCVQRWCDEKGSTVCEICLQNYEPGYTAAPKKTQVAHVAVTIRGSLEVPRQDYEAPEHAPLIGLDAAAGDPAYAECASAAGRSAAWCRSVTVTFTVVLLLRHLIALVTVGAANQYAFSLLTIYLLRASGILLPFYVLMRLISAVQHGQMQYRLQMLQEQRRNASRMQHRVPGQGQRQHVILVV

SEQ ID NO: 63208 - DNA, 1289 bp, Triticum aestivum
  misc_feature (1)..(1289): Ceres Seq. ID no. 14303612
ttcccctctcgcgcgcccgcccacgggatttcctcctccgccgccgccctccctccctccatcgtcagatctatccatccgtaagcaccccacctgctttccactcgatccgcgcgcccctcccgccgccgtcgccggcccttcatctgactccccccctcccctctccgcctcctcgccgctgcaggtgattccgtcgggggcgggccacatggcgtccacggctgcggcggcgctcgcggtgacggacgagctggccctgccgctccgcgcggtgggggacctggcggcggccgccggggtctcgcgggaggaggtcgtcgtcatcacgcagtgcgcctcgctcggtgggaagttgccttttgatgatgcatcggtgggtgctgttctatatgtcataaaaaatgtggagagctttggggataagttggttgctgaaattagccgagtgctgaaagctggtggaattgtgctggtacagagcttcacaccctctgctgatcagaagccaaacaattatatcgagcgccagctactcatgggaggttttgttgaagtgcaagcttctgccacaagctcgcaggatagtgtgcaatctgttactatcaaggcaaagaagccctcgtggagtatgggttcttccttccccctgaagaaagcagtaaaggctcttccaaagattgaaattgacgacgatgatgaactgattgacgaagacagcctcttgactgaggaggacttgaagaagccacagcttccagttgtaggagattgtgaggtgggagctacaaagaaggcatgcaagaactgcagttgtggcagggccgaggctgagcaggtggagaagctggggctcactgcagaacagattgataaccctgtctcagcttgtggcagttgtgggttgggcgacgccttccgatgcagcacctgcccatacagaggcctggcgccgttcaagttgggcgagaaggttaccttgtctgacaacttcctctcggccgacatatgatgacggacagcagctgcggatatgaaatgtgccttgttggatttgttggttcgttaggaagatatatctgcgtacgtttttttcgtggtgatggtggttacagcaaaagaagagtgcgtttggagtagcagctcgtgttagcatgtcgtgcgtgtccttgctctcccacctaggctgaagcgagaattggatcgtgtgtgcgcctctgtattcggcaagaagattacatgcatgtaatttgacgaagaaacatatgatggaaagactttgatctgcc

SEQ ID NO: 63209 - protein, 336 aa, Triticum aestivum
  peptide (1)..(336): Ceres Seq. ID no. 14303613
SPLARPPTGFPPPPPPSLPPSSDLSIRKHPTCFPLDPRAPPAAVAGPSSDSPPPLSASSPLQVIPSGAGHMASTAAAALAVTDELALPLRAVGDLAAAAGVSREEVVVITQCASLGGKLPFDDASVGAVLYVIKNVESFGDKLVAEISRVLKAGGIVLVQSFTPSADQKPNNYIERQLLMGGFVEVQASATSSQDSVQSVTIKAKKPSWSMGSSFPLKKAVKALPKIEIDDDDELIDEDSLLTEEDLKKPQLPVVGDCEVGATKKACKNCSCGRAEAEQVEKLGLTAEQIDNPVSACGSCGLGDAFRCSTCPYRGLAPFKLGEKVTLSDNFLSADI

SEQ ID NO: 63210 - protein, 266 aa, Triticum aestivum
  peptide (1)..(266): Ceres Seq. ID no. 14303614
MASTAAAALAVTDELALPLRAVGDLAAAAGVSREEVVVITQCASLGGKLPFDDASVGAVLYVIKNVESFGDKLVAEISRVLKAGGIVLVQSFTPSADQKPNNYIERQLLMGGFVEVQASATSSQDSVQSVTIKAKKPSWSMGSSFPLKKAVKALPKIEIDDDDELIDEDSLLTEEDLKKPQLPVVGDCEVGATKKACKNCSCGRAEAEQVEKLGLTAEQIDNPVSACGSCGLGDAFRCSTCPYRGLAPFKLGEKVTLSDNFLSADI

SEQ ID NO: 63211 - DNA, 1027 bp, Triticum aestivum
  misc_feature (1)..(1027): Ceres Seq. ID no. 12564952
gtacaggtaacatcaaattccctcttcgtagtctggaggcgggagattcggaagccatggcggaggagcagttcctggccgcagctgtgggcgccgccaagagcgccggcgagattatccgcaagagcttttacctaaccaagaatgtggagcacaagggccaggtggatttggtgacggagacggacaaggcctgcgaggatctcatcttcaaccacctccggatgctctacccggaccacaagttcatcggcgaggagacgtctgcagccctcggttccaccgatgacctcacctacgaccccacctggatagtcgaccccctcgatggcaccaccaatttcgttcatggctttccttttgtgtgcgtctcgattggcctcaccattgggaagattcccaccgttgcagttgtgtacaaccccatcatgaatgagcttttcacagctgttcgtggaaaaggtgcttttctcaatggttctccaattaaaacatcgcctcaaaatgagttggtgaaggctcttatggtgacagaggtagggaccaaaagagacaagtccactttggatgatacaaccaacagaattaataagttactattcaagattagatctatacgtatgtgtggctctttggctctaaacatgtgtggagttgcttgtggtaggctagatttgtgttatgagatcggttttggtggcccctgggatgtggctgctggagctttgattctaaaggaagctgggggttttgtttttgatccgagcggtgatgagtttgatctgatggcgcaaagaatggcaggatcaaatggccacctcaaggatcagttcatcaaagcattgggagatgcaagctgaataacttatttctcttttcaagtagaatgaaagaatgtaagatggccccaccaataagtaattaagggctaatttttgtgtagttttaagtggacactatatgcatattttgcaaacatggcggatgtaatgacatgtggatatattgctcgttttattgaccatgc

SEQ ID NO: 63212 - protein, 285 aa, Triticum aestivum
  peptide (1)..(285): Ceres Seq. ID no. 12564953
TGNIKFPLRSLEAGDSEAMAEEQFLAAAVGAAKSAGEIIRKSFYLTKNVEHKGQVDLVTETDKACEDLIFNHLRMLYPDHKFIGEETSAALGSTDDLTYDPTWIVDPLDGTTNFVHGFPFVCVSIGLTIGKIPTVAVVYNPIMNELFTAVRGKGAFLNGSPIKTSPQNELVKALMVTEVGTKRDKSTLDDTTNRINKLLFKIRSIRMCGSLALNMCGVACGRLDLCYEIGFGGPWDVAAGALILKEAGGFVFDPSGDEFDLMAQRMAGSNGHLKDQFIKALGDAS

SEQ ID NO: 63213 - protein, 267 aa, Triticum aestivum
  peptide (1)..(267): Ceres Seq. ID no. 12564954
MAEEQFLAAAVGAAKSAGEIIRKSFYLTKNVEHKGQVDLVTETDKACEDLIFNHLRMLYPDHKFIGEETSAALGSTDDLTYDPTWIVDPLDGTTNFVHGFPFVCVSIGLTIGKIPTVAVVYNPIMNELFTAVRGKGAFLNGSPIKTSPQNELVKALMVTEVGTKRDKSTLDDTTNRINKLLFKIRSIRMCGSLALNMCGVACGRLDLCYEIGFGGPWDVAAGALILKEAGGFVFDPSGDEFDLMAQRMAGSNGHLKDQFIKALGDAS

SEQ ID NO: 63214 - protein, 211 aa, Triticum aestivum
  peptide (1)..(211): Ceres Seq. ID no. 12564955
MLYPDHKFIGEETSAALGSTDDLTYDPTWIVDPLDGTTNFVHGFPFVCVSIGLTIGKIPTVAVVYNPIMNELFTAVRGKGAFLNGSPIKTSPQNELVKALMVTEVGTKRDKSTLDDTTNRINKLLFKIRSIRMCGSLALNMCGVACGRLDLCYEIGFGGPWDVAAGALILKEAGGFVFDPSGDEFDLMAQRMAGSNGHLKDQFIKALGDAS

SEQ ID NO: 63215 - DNA, 1208 bp, Triticum aestivum
  misc_feature (1)..(1208): Ceres Seq. ID no. 12778054
acccgtccaccccctcgcgtattccgccgccacgccgccgcggcgcccttcccgccgtcgcgagccgtatctttcggcaacacacacacacaaagccgcccacacgccatggaggagaccgaggctaagaagcccacccccgcatcccccctcttctccttctccaaccccagcgcctccttcggcttcgggttcggcgccgcgcccggccctccccctccgcctccgccgccagctgtcgaggtcctcctctccgaggaatcacccgtcgcggccggcaacttggagcctgtggtggttgacgactccctatcgatctacaaggggagagttaacacctctgatgttttgggggtaaaaaactctgatttggttccaggaaaatatgaaggggggttgaaactgtgggaaggatcattggacttggtgaaaaccctaaattcagacatcaaagatgatcgattgcttatggaaggcaaacacgtactagagctaggatgtggacatggcctccctggcatctttgcaggtctgaagggtgctgctctagttcacttccaagatttcaatgctgaggtccttaggtgccttaccatcccaaatgtaaaagctaatctgttcaaggaatcatctgaaacatctaggagtgttggtttttatgctggtgattggagtgaaatcgacaagttacttcttcgcggagatgctgtccaggataaaacaaccaatcttcacacagaaaatgaagggcatagaggctacaatatcatcctgatggctgagactgtgtatgcattggattcacttcctagtctctacaggctcatcaagaagtgcttacactaccctagtggtgtagtttatatggcagggaaaaagcattactttggtgtaggtggcggcacaaggcaatttctacgcttggttacagaagatggtgccatgcagtcggacctgcttgctgaagttactgacggatcatccaatgttagggaggtttggaaattctcattcaagtagacaagcatggcctctgtgattgctgtatcagatacaaaacgtgtaccgggctccatattggtagagtgtgagccttggtttagccgtatcatggtgttttaatgcactgttagttccaagttgattgttcatgaactcttgagaagtcatacaagtacttgagtcctatctctgaattactgactctt

SEQ ID NO: 63216 - protein, 339 aa, Triticum aestivum
  peptide (1)..(339): Ceres Seq. ID no. 12778055
TRPPPRVFRRHAAAAPFPPSRAVSFGNTHTQSRPHAMEETEAKKPTPASPLFSFSNPSASFGFGFGAAPGPPPPPPPPAVEVLLSEESPVAAGNLEPVVVDDSLSIYKGRVNTSDVLGVKNSDLVPGKYEGGLKLWEGSLDLVKTLNSDIKDDRLLMEGKHVLELGCGHGLPGIFAGLKGAALVHFQDFNAEVLRCLTIPNVKANLFKESSETSRSVGFYAGDWSEIDKLLLRGDAVQDKTTNLHTENEGHRGYNIILMAETVYALDSLPSLYRLIKKCLHYPSGVVYMAGKKHYFGVGGGTRQFLRLVTEDGAMQSDLLAEVTDGSSNVREVWKFSFK

SEQ ID NO: 63217 - protein, 303 aa, Triticum aestivum
  peptide (1)..(303): Ceres Seq. ID no. 12778056
MEETEAKKPTPASPLFSFSNPSASFGFGFGAAPGPPPPPPPPAVEVLLSEESPVAAGNLEPVVVDDSLSIYKGRVNTSDVLGVKNSDLVPGKYEGGLKLWEGSLDLVKTLNSDIKDDRLLMEGKHVLELGCGHGLPGIFAGLKGAALVHFQDFNAEVLRCLTIPNVKANLFKESSETSRSVGFYAGDWSEIDKLLLRGDAVQDKTTNLHTENEGHRGYNIILMAETVYALDSLPSLYRLIKKCLHYPSGVVYMAGKKHYFGVGGGTRQFLRLVTEDGAMQSDLLAEVTDGSSNVREVWKFSFK

SEQ ID NO: 63218 - protein, 183 aa, Triticum aestivum
  peptide (1)..(183): Ceres Seq. ID no. 12778057
MEGKHVLELGCGHGLPGIFAGLKGAALVHFQDFNAEVLRCLTIPNVKANLFKESSETSRSVGFYAGDWSEIDKLLLRGDAVQDKTTNLHTENEGHRGYNIILMAETVYALDSLPSLYRLIKKCLHYPSGVVYMAGKKHYFGVGGGTRQFLRLVTEDGAMQSDLLAEVTDGSSNVREVWKFSFK

SEQ ID NO: 63219 - DNA, 821 bp, Triticum aestivum
  misc_feature (1)..(821): Ceres Seq. ID no. 13655082
agaacatcctaatcgaaaaacaagaggaaacgagctagctagatagcatttggtacacagctacatacatatccggcacgagaggatgtcgttggtgaggttcttcgacaccctggccatggactcgtggaaccccttcggcaccatcttcggcaccacggcgtccagcggcaccgacgcctggctggccagcgacaccacggcgttcgccgacacctacatcgagacccgggagacggcggacgcctacgtcttcagcgccaggctccccgccggtgtcaccaaggaggaggtcaaggtggaggtggaggaggacggcaaggtgctggtcatcgccggcgagcggtgcctgcggagggaggccaagagcgaggcgcgccaccacatcgagcgcagcgtcgccaccttcttcggcaggttccacctccccgacgacgccgccttgggccaggtcagggccgccatggacgacgggggcgcgcagctcaccgtcactgtgcccagggtcggcgccgccgttgccgccgtgaccatgcccgagcctgccggggccatcgaggtcgtcgaggccagcccgtgctgattggctgattgcggcgtactccggtgccgactgcagacagagtgcagacatacgtgcggtaagttgccgctcgtatgatctgctcgatcgggtcctttgggtgtgattccacaaattgtggtgttcgatgtacgtaactacgtacttgagtcggtatgtggcttgctgttgtgacttgtgagtgaggtgcttgcatggttgcctgtactgttacttgttagttctcgtgttcacgctc

SEQ ID NO: 63220 - protein, 165 aa, Triticum aestivum
  peptide (1)..(165): Ceres Seq. ID no. 13655083
MSLVRFFDTLAMDSWNPFGTIFGTTASSGTDAWLASDTTAFADTYIETRETADAYVFSARLPAGVTKEEVKVEVEEDGKVLVIAGERCLRREAKSEARHHIERSVATFFGRFHLPDDAALGQVRAAMDDGGAQLTVTVPRVGAAVAAVTMPEPAGAIEVVEASPC

SEQ ID NO: 63221 - protein, 154 aa, Triticum aestivum
  peptide (1)..(154): Ceres Seq. ID no. 13655084
MDSWNPFGTIFGTTASSGTDAWLASDTTAFADTYIETRETADAYVFSARLPAGVTKEEVKVEVEEDGKVLVIAGERCLRREAKSEARHHIERSVATFFGRFHLPDDAALGQVRAAMDDGGAQLTVTVPRVGAAVAAVTMPEPAGAIEVVEASPC

SEQ ID NO: 63222 - DNA, 1139 bp, Triticum aestivum
  misc_feature (1)..(1139): Ceres Seq. ID no. 13655345
atcggatctccgaaccggaactctgactctctctgtctcctccccgtgccggacggcgaggtccccctcttcctccggccgcctctcccccccgttcccgtcgcttctcggttccacgggcgccgcggccgccggtctccgacgccatggggttcctcgaggacttccaggccagtgttgaaacattgccagctatgctgcacaagaactattcattaatgcgagagctcgataaaagcttgcaaggtgtgcagctggaaaatgagcagcgatgtcaacaagaaatagaggacattaagcatggacttgaatctggaagtattacaacatatgagccagcaaaacttaaattttctgatgaggcaatcgaggagcagaaacattgtgttaggattgctgatgagaaggtggctttagccacacaaacatatgacctggtcgacgctcatatccaacagcttgatcaatacatgaggaagcttgaagaacttcgactagaaaaggaggcagtggcagctgcagctgcagctgcggcagatacagctgttgctgctacttcagctgctcctgctggtgctggtagcttaaggtccgcagctgctgatcctgctccaaaaactggacgagctggcgaaagaagcagaggagggcggaagaaggctaaggtgcccacggagatgcctacagagatgcccatggagcagccagctatagatttagaattgcctgtcgatcctaatgaaccgacgtattgtttctgcaaccaagtcagctacggtgagatggtcgcgtgcgacaaccctgattgcaagatagagtggttccactttggatgcgtgggcttgaaagagcagccgaggggaaagtggtattgcctgagttgcagcgcgttccaaaagaagcgcaagggaaggtgagatacatatggtccttgtgctaggaggtatgcagtcagtcatccgtgatcgtctgattccgttgtgctgagcagcgccttgtttgtctgggaagcaactgttgaatgtagcttgagtgatcttgcacatgttgtgacagtcttgaggagtgttgtacatgtgtggccccgtttagaacatgggaatttcttctgttcttgtgggtgatgaactggtgactgc

SEQ ID NO: 63223 - protein, 256 aa, Triticum aestivum
  peptide (1)..(256): Ceres Seq. ID no. 13655346
MGFLEDFQASVETLPAMLHKNYSLMRELDKSLQGVQLENEQRCQQEIEDIKHGLESGSITTYEPAKLKFSDEAIEEQKHCVRIADEKVALATQTYDLVDAHIQQLDQYMRKLEELRLEKEAVAAAAAAAADTAVAATSAAPAGAGSLRSAAADPAPKTGRAGERSRGGRKKAKVPTEMPTEMPMEQPAIDLELPVDPNEPTYCFCNQVSYGEMVACDNPDCKIEWFHFGCVGLKEQPRGKWYCLSCSAFQKKRKGR

SEQ ID NO: 63224 - protein, 240 aa, Triticum aestivum
  peptide (1)..(240): Ceres Seq. ID no. 13655347
MLHKNYSLMRELDKSLQGVQLENEQRCQQEIEDIKHGLESGSITTYEPAKLKFSDEAIEEQKHCVRIADEKVALATQTYDLVDAHIQQLDQYMRKLEELRLEKEAVAAAAAAAADTAVAATSAAPAGAGSLRSAAADPAPKTGRAGERSRGGRKKAKVPTEMPTEMPMEQPAIDLELPVDPNEPTYCFCNQVSYGEMVACDNPDCKIEWFHFGCVGLKEQPRGKWYCLSCSAFQKKRKGR

SEQ ID NO: 63225 - protein, 232 aa, Triticum aestivum
  peptide (1)..(232): Ceres Seq. ID no. 13655348
MRELDKSLQGVQLENEQRCQQEIEDIKHGLESGSITTYEPAKLKFSDEAIEEQKHCVRIADEKVALATQTYDLVDAHIQQLDQYMRKLEELRLEKEAVAAAAAAAADTAVAATSAAPAGAGSLRSAAADPAPKTGRAGERSRGGRKKAKVPTEMPTEMPMEQPAIDLELPVDPNEPTYCFCNQVSYGEMVACDNPDCKIEWFHFGCVGLKEQPRGKWYCLSCSAFQKKRKGR

SEQ ID NO: 63226 - DNA, 836 bp, Triticum aestivum
  misc_feature (1)..(836): Ceres Seq. ID no. 12585210
tctcctcttcttccccctcacgtctccatcaccttcttccacttctcccgcatttacacaccaccgcacgcagctagctagccacactcacactcccatccctctcacagcaccaccgcactagctagccacaccacaccgcactgcactcccgtcgctctcggccatggcgtcctacaggctgctcgtgatcctggtcttctccgcgctcctcctcggcgtcgcagtcggcgacacctacccggccgactgcccgtacccgtgcctgctgccgccgcccacgcccccggcctccagcgccgactgcccgccgccaccctcctcgccatccggctccggctacgtgtacccgcccccgtcctcctccgggaactccccgccgacgccgtcgtcctggagctacccgccaccgtctgggggctacattcccggcttctaccagcctcccgccggcgggggcggtggtggtggcggaggcggaggaggggctggcggcaacttcgggcctgcgccaccgccgccgaaccccatcctgccgtggtacccctggtactaccggtccccgccgtcctcgtccgcgaccaggcctggtcgcgcctcggcggtcgtgctctgcctggtggccgccgtgactgccgctgctgctctggtcggttactagtacgatcatcgatcaatcagttactagctaagctagcactcccatcacatttttcatttccgttcgtagtcgattcttgatatatactactccatgtacaatggggcaccattactatttagctatcctactcatcaactcctctgtattgattcattgctcagttggcttttgg

SEQ ID NO: 63227 - protein, 164 aa, Triticum aestivum
  peptide (1)..(164): Ceres Seq. ID no. 12585211
MASYRLLVILVFSALLLGVAVGDTYPADCPYPCLLPPPTPPASSADCPPPPSSPSGSGYVYPPPSSSGNSPPTPSSWSYPPPSGGYIPGFYQPPAGGGGGGGGGGGGAGGNFGPAPPPPNPILPWYPWYYRSPPSSSATRPGRASAVVLCLVAAVTAAAALVGY

SEQ ID NO: 63228 - DNA, 620 bp, Triticum aestivum
  misc_feature (1)..(620): Ceres Seq. ID no. 12585212
cagatagcagagcgtccaggcccagggaagccacccctaatctcgaacagcacccaaagcagagccgccggggaggctgcggcgagctgccggagggagggaaggggagatggcgagccggctgtggaggtggtacgcggaccggcagttccacaagtgggagaagacggtgctgtgggacatggtggagccctaccgcccgccgcgctccttcgcgccgctcgtcggcacctacgtcgccgccttctacaccgccatcgtcggcgccgccgtcaccgagcagctctacaaggagaagtactgggaggatcacccgggcgaggcggtgccgatcatgccgcccatgttctactgggggccatggagggtggtgaacggagaggttccccgcttcatccagacgcccgaggaagctaagccggcatagaactgcttggagatcgctggggatgctgtgaaatgtttgctgttcactgtctgctgtgtagctatggcattcctgcatttcttgcaatttgcattctggtgattgcgcactgccgtgaatcataatggtctttctatgtatccttgtttgcacaaataaattgatatttctatcacggagcagattgtttgcc

SEQ ID NO: 63229 - protein, 138 aa, Triticum aestivum
  peptide (1)..(138): Ceres Seq. ID no. 12585213
QIAERPGPGKPPLISNSTQSRAAGEAAASCRREGRGDGEPAVEVVRGPAVPQVGEDGAVGHGGALPPAALLRAARRHLRRRLLHRHRRRRRHRAALQGEVLGGSPGRGGADHAAHVLLGAMEGGERRGSPLHPDARGS

SEQ ID NO: 63230 - protein, 123 aa, Triticum aestivum
  peptide (1)..(123): Ceres Seq. ID no. 12585214
DSRASRPREATPNLEQHPKQSRRGGCGELPEGGKGRWRAGCGGGTRTGSSTSGRRRCCGTWWSPTARRAPSRRSSAPTSPPSTPPSSAPPSPSSSTRRSTGRITRARRCRSCRPCSTGGHGGW

SEQ ID NO: 63231 - protein, 105 aa, Triticum aestivum
  peptide (1)..(105): Ceres Seq. ID no. 12585215
MASRLWRWYADRQFHKWEKTVLWDMVEPYRPPRSFAPLVGTYVAAFYTAIVGAAVTEQLYKEKYWEDHPGEAVPIMPPMFYWGPWRVVNGEVPRFIQTPEEAKPA

SEQ ID NO: 63232 - DNA, 839 bp, Triticum aestivum
  misc_feature (1)..(839): Ceres Seq. ID no. 13583909
acacactgaactgcttcagcttgttcttgttggttcacagacacttcccttctcacagtccattaagtccatggcgatgaggaagaacaaggttcacgagttcgaggccgatgtgcccgccgccgacctatgggggctctatggcacgctccgtgcagcggagctgctgcccgagcttctcccgcaggtgctcgccaagatacagctcgtgagcggcgacggcgacgtcggcaccatcttggagctcacattcgctccagggatccctggcctggagacatacagggagaaattcatcaaggtcgacaatgagaactacatcaaggaagcgcagacgattgacggagacatcctgaagctcgggttcctctattacatggtcaggttcgagatcatcgccaaaggacccagttcttcagtgataagatcgaccattgtgtatgagataaattatgaaactcaccccgggcttgaagctatggtcagcaccggacctctggctgcaactgctgagaaatttgcagggtacctcaaggagcagaagatcgctcagagcagttaattcttgcaacagctcagagcaaaagtgtatcaatgctttgagaaaaataatgtctgattccacgttgtgtgttttccctgaaaaaataaatgaccaatgatcaaacatattaggatagtatgtttgatcatatgaatatcacatagttgatatatagatatttcacggtccatgtaccttaactttattagtttcatgaaaatgaagttgggagccttgatgctccttttctcgaagaaatgtaccttaacttgttttggttaatgaaggtttgatt

SEQ ID NO: 63233 - protein, 186 aa, Triticum aestivum
  peptide (1)..(186): Ceres Seq. ID no. 13583910
HTELLQLVLVGSQTLPFSQSIKSMAMRKNKVHEFEADVPAADLWGLYGTLRAAELLPELLPQVLAKIQLVSGDGDVGTILELTFAPGIPGLETYREKFIKVDNENYIKEAQTIDGDILKLGFLYYMVRFEIIAKGPSSSVIRSTIVYEINYETHPGLEAMVSTGPLAATAEKFAGYLKEQKIAQSS

SEQ ID NO: 63234 - protein, 163 aa, Triticum aestivum
  peptide (1)..(163): Ceres Seq. ID no. 13583911
MAMRKNKVHEFEADVPAADLWGLYGTLRAAELLPELLPQVLAKIQLVSGDGDVGTILELTFAPGIPGLETYREKFIKVDNENYIKEAQTIDGDILKLGFLYYMVRFEIIAKGPSSSVIRSTIVYEINYETHPGLEAMVSTGPLAATAEKFAGYLKEQKIAQSS

SEQ ID NO: 63235 - protein, 161 aa, Triticum aestivum
  peptide (1)..(161): Ceres Seq. ID no. 13583912
MRKNKVHEFEADVPAADLWGLYGTLRAAELLPELLPQVLAKIQLVSGDGDVGTILELTFAPGIPGLETYREKFIKVDNENYIKEAQTIDGDILKLGFLYYMVRFEIIAKGPSSSVIRSTIVYEINYETHPGLEAMVSTGPLAATAEKFAGYLKEQKIAQSS

SEQ ID NO: 63236 - DNA, 614 bp, Triticum aestivum
  misc_feature (1)..(614): Ceres Seq. ID no. 13590229
cctcgttgaaatgcttagaagaggagaaacgccccctcgtggcacccagaacccagagcggaaaaactgtggtcctgctggagggatgaccaccttgctaggcgagccaaagcctcccccatgcagggacctggatgcctgctaggtttgctttgagttgcaagcacacaaataagtaggcccggtcgcactgtatgttgcggaaaccgcgaaagcgatttgatctcctgttgttctcaaagctttcttgtggccaacaatggacattcgatttgattgatcttgttgttgtcgaagctttcttttgtctgacaattggatgcgtctacctgtcacacaccatctcttcttttttccttatcatcagctagactgcccactgataagatagtgctattctgaagctgcagctttgtatccggcataagaatctggggcactagatcgattgctgttatgctactcctgcagtgttatattcctgttgttcatgcattaatgtttgaatgaacacggacctggtacattgccgattttcggggagaaactttttgatatactaattttcttattctgtcattgtattaaacatcaatttatgtggtgtgtactgc

SEQ ID NO: 63237 - protein, 58 aa, Triticum aestivum
  peptide (1)..(58): Ceres Seq. ID no. 13590230
MLRKPRKRFDLLLFSKLSCGQQWTFDLIDLVVVEAFFCLTIGCVYLSHTISSFFLIIS

SEQ ID NO: 63238 - protein, 47 aa, Triticum aestivum
  peptide (1)..(47): Ceres Seq. ID no. 13590231
LVEMLRRGETPPRGTQNPERKNCGPAGGMTTLLGEPKPPPCRDLDAC

SEQ ID NO: 63239 - protein, 44 aa, Triticum aestivum
  peptide (1)..(44): Ceres Seq. ID no. 13590232
MLRRGETPPRGTQNPERKNCGPAGGMTTLLGEPKPPPCRDLDAC

SEQ ID NO: 63240 - DNA, 875 bp, Triticum aestivum
  misc_feature (1)..(875): Ceres Seq. ID no. 13583760
atcccgtcgctactcgcccatccccttcgccgcagcgccgccgcctctgatctccaccctcctcgacgcggcgactctgctttacgcccttacgcggcggaggcaaacagatcaaggataacacaaaatcatactttgaagaggtgtcttgtgccaatcactggaataatgactccgtcggcatctgttggaaaggaagtcaacttgaaggaagtcaacttcaacttgaaggaggataagaacataccctgtgctattcagtttgtaacgacgatgttggggacgtcttcaacattgacgatcggggaccggaacaagaagttcagggtgagccgttcttcgacttggataacggttgtcttcacacagtctatgttcattgccaccacagcaggttggatctacgacatgtataataaacctatctggaatgccggcttcccatggtggctgccagttgctgtgttgttgggcgcctacctggcagtggtagacctggcgcgtgggtatttgaccctcttcgtgccacaggcacccttggcggcatggaatgcacttgacgaagttggcttcaaggtgattggattttctgtcatcttaatctctgtccctgttttcttgtttgaccaggcgtggctgcacatcacctttgcttgccttcttagtgtcctcattgctaccatacttgccttctgtgtctgtcttgttcgcacgtaccggcaatagccctcttggcacctagcggctttgtttatggtttggatgtcgtttgctagtagacgaataagcttgtctctccaagccaaagtcgccccttttgtgtaaacagtcggtgccactcatgtgttgttgttgttattattattattattatt

SEQ ID NO: 63241 - protein, 241 aa, Triticum aestivum
  peptide (1)..(241): Ceres Seq. ID no. 13583761
IPSLLAHPLRRSAAASDLHPPRRGDSALRPYAAEANRSRITQNHTLKRCLVPITGIMTPSASVGKEVNLKEVNFNLKEDKNIPCAIQFVTTMLGTSSTLTIGDRNKKFRVSRSSTWITVVFTQSMFIATTAGWIYDMYNKPIWNAGFPWWLPVAVLLGAYLAVVDLARGYLTLFVPQAPLAAWNALDEVGFKVIGFSVILISVPVFLFDQAWLHITFACLLSVLIATILAFCVCLVRTYRQ

SEQ ID NO: 63242 - protein, 185 aa, Triticum aestivum
  peptide (1)..(185): Ceres Seq. ID no. 13583762
MTPSASVGKEVNLKEVNFNLKEDKNIPCAIQFVTTMLGTSSTLTIGDRNKKFRVSRSSTWITVVFTQSMFIATTAGWIYDMYNKPIWNAGFPWWLPVAVLLGAYLAVVDLARGYLTLFVPQAPLAAWNALDEVGFKVIGFSVILISVPVFLFDQAWLHITFACLLSVLIATILAFCVCLVRTYRQ

SEQ ID NO: 63243 - protein, 150 aa, Triticum aestivum
  peptide (1)..(150): Ceres Seq. ID no. 13583763
MLGTSSTLTIGDRNKKFRVSRSSTWITVVFTQSMFIATTAGWIYDMYNKPIWNAGFPWWLPVAVLLGAYLAVVDLARGYLTLFVPQAPLAAWNALDEVGFKVIGFSVILISVPVFLFDQAWLHITFACLLSVLIATILAFCVCLVRTYRQ

SEQ ID NO: 63244 - DNA, 1403 bp, Triticum aestivum
  misc_feature (1)..(1403): Ceres Seq. ID no. 14302317
atcaattattgtatccaaacagatctagaagagaagctgatcttctccttccttcggcaccctctccttccctgatccacctactactccttctctcttcctcctagatcctgatcgggtacgttacagacgcgctggccatggcttcccctcgccatcgccaggacggagacggaccacacgacggcgcgccgacgtacgccggcatggcgaagctggtgccggcgctcccgctcgagacgcggtgcccgccgttcgcgctgcggcgctacggcggcttctggctgccggaggcggccctgcggcgcggcctcccggcgttgcacgccgggttcgcgcccaggcgcgcagacgtgctcctcgccagctaccccaagtccggcaccacctggctcaaggccctcgccttcgccaccgtccgccgcgccgtgcacccgccttcttccatcgaccacccgctccgccgtcgcaacccgcaggactgcgtcccgttcctcgagttcgacttcgaccacggggacatggccgagctcgaggcgctcccttccccgcgggtgctcgccacgcacctcccctactcgctcctccccgaccgcgtcgtcgccgacgacggcgcgcggatcgtgtacgtctgccgggaccccaaggacgcgctggtctcctcgtggctcttcaccaggaaagcgtcgccgagtgtcggagtggactccgactcctactcgctgcaggaggcggccgagcttttccgcgagggccggtgcttctacggccctcagtgccggcacgtgctcgagtactgggacgcgagccgccgtcccttcggcggcggcgaggtgctgttcctgaggtacgaggagatgctgcgcgacccggcggggagtctgaagacgatggcggagttcatgggatgcggcttctccgaggaggaggtggcgcgaggggtggtggacgagatcgtggacctgtgcagcctggagaagctgaagaacatggaggccaacagggacgggcggcggaacgcgtcgggcatcaggagcgactctttcttccggaagggggtcgccggggactggagcagccacatgtcgccggagatggggaagatgctggacgaggccgtcgaggaggcactccaggggtctgggttcagcttctctggctgagctccggcgagcactggccagggcggtagtgcggggcaaacaacaatgtcattgcaaagcacggcttggaacacatgttttgtggcgatccatggatttaaggcgcgagtttgattccagtttcttgctcgaaagttgattgtcttgtaagttcaaacagtagtttgataactcattccaaatgtttctttcccaaagttccgaatcattccagttctacaatttcagtcctcattcagc

SEQ ID NO: 63245 - protein, 340 aa, Triticum aestivum
  peptide (1)..(340): Ceres Seq. ID no. 14302318
MASPRHRQDGDGPHDGAPTYAGMAKLVPALPLETRCPPFALRRYGGFWLPEAALRRGLPALHAGFAPRRADVLLASYPKSGTTWLKALAFATVRRAVHPPSSIDHPLRRRNPQDCVPFLEFDFDHGDMAELEALPSPRVLATHLPYSLLPDRVVADDGARIVYVCRDPKDALVSSWLFTRKASPSVGVDSDSYSLQEAAELFREGRCFYGPQCRHVLEYWDASRRPFGGGEVLFLRYEEMLRDPAGSLKTMAEFMGCGFSEEEVARGVVDEIVDLCSLEKLKNMEANRDGRRNASGIRSDSFFRKGVAGDWSSHMSPEMGKMLDEAVEEALQGSGFSFSG

SEQ ID NO: 63246 - protein, 318 aa, Triticum aestivum
  peptide (1)..(318): Ceres Seq. ID no. 14302319
MAKLVPALPLETRCPPFALRRYGGFWLPEAALRRGLPALHAGFAPRRADVLLASYPKSGTTWLKALAFATVRRAVHPPSSIDHPLRRRNPQDCVPFLEFDFDHGDMAELEALPSPRVLATHLPYSLLPDRVVADDGARIVYVCRDPKDALVSSWLFTRKASPSVGVDSDSYSLQEAAELFREGRCFYGPQCRHVLEYWDASRRPFGGGEVLFLRYEEMLRDPAGSLKTMAEFMGCGFSEEEVARGVVDEIVDLCSLEKLKNMEANRDGRRNASGIRSDSFFRKGVAGDWSSHMSPEMGKMLDEAVEEALQGSGFSFSG

SEQ ID NO: 63247 - protein, 213 aa, Triticum aestivum
  peptide (1)..(213): Ceres Seq. ID no. 14302320
MAELEALPSPRVLATHLPYSLLPDRVVADDGARIVYVCRDPKDALVSSWLFTRKASPSVGVDSDSYSLQEAAELFREGRCFYGPQCRHVLEYWDASRRPFGGGEVLFLRYEEMLRDPAGSLKTMAEFMGCGFSEEEVARGVVDEIVDLCSLEKLKNMEANRDGRRNASGIRSDSFFRKGVAGDWSSHMSPEMGKMLDEAVEEALQGSGFSFSG

SEQ ID NO: 63248 - DNA, 1475 bp, Triticum aestivum
  misc_feature (1)..(1475): Ceres Seq. ID no. 12615552
actgccagtccccacgcgagcgacctagggcgagatgagtagccgccgccgccgccgccacgccggctcgccggcgtccgcgccgctggacgacgacgacctcctctgcgagatcctgctccgccttcccccggagccctcctccctcccgcgcgcatccctcgtctgcaagcgctggcgccgcctcgtctcctaccccggcttcttccgccgcttccgcctccaccaccgccgcaacccttccctcctcggcttcttcgacaggtttaatggcctctccttcctacccactctgggggcccccaatcgcgtcccccacgggcgcttctctttccactgcgatgacttcgacagctgctctatgtcccttggatgtcgccatggcctcatgctcatcttccttcgtaagcgtctccaggtcctggtgtgggaccccgtcaccggcgaccagcaccgcattgccattcccgcagcgtttgatacggagaaaacccttatcaacggggcggttcttcgcgctgccggagatgtcgaaaacttccaggtggtgttggtagctgcagatggcgacgacgaacaacacatacaggcgctcgcctgtgtttactcgtcaaagaccggcttatggggaaatcttgtctcaacaccgattccataccaggcttctgatagtccataccgtatccccaccatggttaatacagatgacgctgtgctagctggagattccctttactggaagcttactgggaatatggttggaattcttgagtttgatttggaaaagcagagtctagctgtgataaggatgccactggatatgtatggccagggcaagtgcttcacggttatgcgggccgagggtggtgggctgggtctcctcgttgtgttgaactctgactacaccgcccagttatggaagaggaagatcgattgtgatggtggtgcttcatgggggcttgcacgaactattgaactggacaagctacttcccataaaaccggaggagaaagggcttctagtgatactagggtttgctgagcagaataatgtggtgtttctgtggacagttatcggtgtattgatgatccagcttgagtcattggagttcaagaatctttataaaaccatgatcttttcttactaccatccatttgaaagtgtctacagtgcaggaacatctgtttctggtggacgcgacagggctgagcttttggtcaataaataagatgattgtccgttggatatgctgtttgatctactaattgagcaggtatctagagctacattctggtgactgagatgaagaagaaatgggttgttggctgtaggcagggatcaggctcttgtattttgtatgttggaccttcagattgactctctatgtagcatgcaccggtctgtactctgctgtgaagtgcacctgtaggaattaattgcttaatttgacaacctgcgtcgatcatctagtttct

SEQ ID NO: 63249 - protein, 397 aa, Triticum aestivum
  peptide (1)..(397): Ceres Seq. ID no. 12615553
MSSRRRRRHAGSPASAPLDDDDLLCEILLRLPPEPSSLPRASLVCKRWRRLVSYPGFFRRFRLHHRRNPSLLGFFDRFNGLSFLPTLGAPNRVPHGRFSFHCDDFDSCSMSLGCRHGLMLIFLRKRLQVLVWDPVTGDQHRIAIPAAFDTEKTLINGAVLRAAGDVENFQVVLVAADGDDEQHIQALACVYSSKTGLWGNLVSTPIPYQASDSPYRIPTMVNTDDAVLAGDSLYWKLTGNMVGILEFDLEKQSLAVIRMPLDMYGQGKCFTVMRAEGGGLGLLVVLNSDYTAQLWKRKIDCDGGASWGLARTIELDKLLPIKPEEKGLLVILGFAEQNNVVFLWTVIGVLMIQLESLEFKNLYKTMIFSYYHPFESVYSAGTSVSGGRDRAELLVNK

SEQ ID NO: 63250 - protein, 288 aa, Triticum aestivum
  peptide (1)..(288): Ceres Seq. ID no. 12615554
MSLGCRHGLMLIFLRKRLQVLVWDPVTGDQHRIAIPAAFDTEKTLINGAVLRAAGDVENFQVVLVAADGDDEQHIQALACVYSSKTGLWGNLVSTPIPYQASDSPYRIPTMVNTDDAVLAGDSLYWKLTGNMVGILEFDLEKQSLAVIRMPLDMYGQGKCFTVMRAEGGGLGLLVVLNSDYTAQLWKRKIDCDGGASWGLARTIELDKLLPIKPEEKGLLVILGFAEQNNVVFLWTVIGVLMIQLESLEFKNLYKTMIFSYYHPFESVYSAGTSVSGGRDRAELLVNK

SEQ ID NO: 63251 - protein, 279 aa, Triticum aestivum
  peptide (1)..(279): Ceres Seq. ID no. 12615555
MLIFLRKRLQVLVWDPVTGDQHRIAIPAAFDTEKTLINGAVLRAAGDVENFQVVLVAADGDDEQHIQALACVYSSKTGLWGNLVSTPIPYQASDSPYRIPTMVNTDDAVLAGDSLYWKLTGNMVGILEFDLEKQSLAVIRMPLDMYGQGKCFTVMRAEGGGLGLLVVLNSDYTAQLWKRKIDCDGGASWGLARTIELDKLLPIKPEEKGLLVILGFAEQNNVVFLWTVIGVLMIQLESLEFKNLYKTMIFSYYHPFESVYSAGTSVSGGRDRAELLVNK

SEQ ID NO: 63252 - DNA, 760 bp, Triticum aestivum
  misc_feature (1)..(760): Ceres Seq. ID no. 13583718
gaagagccgaacacccaccccaatccactaacctagcgatgcctcccaagcgcaagtccccggttgcgacggcggcggcccccgcaatgccgcctaggatgacccggagcatggccgccgggaagcggggcgccgacgctccggctaaaaaggaggaagcagaggcggcgccggcggcggccggggggaagggcaggaagaaggccaagaaggaggtgtctgcggtggagacggtactgtcgcctcctgcagcggccaagcagaaggtgaagaaaaatgccaagaaggaggtggtggcggccgcggtagatgatggcggtgctggcgctgaaagcgggaagcgcgtcatcgtcgaggcctgcacccagtgccaacagttcaagagaagagctttaaaggtgaaggaggatcttgaaagtgctgtccctggggtttctgtgacaatcaaccctgagaagccacgccgtggatgccttgagatacgggaggaaggtggtgatgtgttcatttcactgcagaacatgccccggcccttcaaaaagatgagggagctcgacatggacaaggttatcaaggacattgcccagaaaattgcttgaatctgacgtggcattaatgtatggatgcgctccttttgcaattgatgtttagggcttattttgtgtgggaacttggtattgcagtggccgtagaatgtgggatcagtgtttcgttattgtgccctatgtgggctaagacatgctgaaattatcgcattagc

SEQ ID NO: 63253 - protein, 198 aa, Triticum aestivum
  peptide (1)..(198): Ceres Seq. ID no. 13583719
RAEHPPQSTNLAMPPKRKSPVATAAAPAMPPRMTRSMAAGKRGADAPAKKEEAEAAPAAAGGKGRKKAKKEVSAVETVLSPPAAAKQKVKKNAKKEVVAAAVDDGGAGAESGKRVIVEACTQCQQFKRRALKVKEDLESAVPGVSVTINPEKPRRGCLEIREEGGDVFISLQNMPRPFKKMRELDMDKVIKDIAQKIA

SEQ ID NO: 63254 - protein, 186 aa, Triticum aestivum
  peptide (1)..(186): Ceres Seq. ID no. 13583720
MPPKRKSPVATAAAPAMPPRMTRSMAAGKRGADAPAKKEEAEAAPAAAGGKGRKKAKKEVSAVETVLSPPAAAKQKVKKNAKKEVVAAAVDDGGAGAESGKRVIVEACTQCQQFKRRALKVKEDLESAVPGVSVTINPEKPRRGCLEIREEGGDVFISLQNMPRPFKKMRELDMDKVIKDIAQKIA

SEQ ID NO: 63255 - protein, 170 aa, Triticum aestivum
  peptide (1)..(170): Ceres Seq. ID no. 13583721
MPPRMTRSMAAGKRGADAPAKKEEAEAAPAAAGGKGRKKAKKEVSAVETVLSPPAAAKQKVKKNAKKEVVAAAVDDGGAGAESGKRVIVEACTQCQQFKRRALKVKEDLESAVPGVSVTINPEKPRRGCLEIREEGGDVFISLQNMPRPFKKMRELDMDKVIKDIAQKIA

SEQ ID NO: 63256 - DNA, 1429 bp, Triticum aestivum
  misc_feature (1)..(1429): Ceres Seq. ID no. 14314084
cttttttcgcttcactccattctcaaaccatggcggagcacaagcgtacagtttccaccctcgttctcctcctcctcttcttctcggcgccgacgaatgccacacggccaccagcaacgctccgcatccccgtcgtccaccgcgacgcggtcttcccgccgccgccgggcgccagccgtggtagcctcctaagccgccgcgcggctgccgacgccgcgcggctgccgacgccgcgcgctacgcctccctcaaggcgtccctcgggcctcggcctccgctcctcctccgcgcacgacgaccgcctccactccccggtcatgtccgggctccccttcgacagcggcgagtacttcgcgtccgtcggcgtgggcaccccgtccaccagcgcgctgctggtcatcgacaccgggagcgacctcatctggctccagtgcaaaccctgccgccgctgccaccgccagatgagcccgctctacgaccccaagggctccagcacctaccgccagatcccctgctcgtcgccgcggtgcttccctcgccatggctgcgacaccagcaccggggcctgcgggtacgccatggtctacggcgacggctccggcagcaggggcaacctcgccaccgacaggctcgtcttctccaacgacacgtccgtggacagcgtcgtcatcgggtgcggccacgacaacgcggagctgttcgactcgtcggccggggtgctgggcgtcggccgcggcgccggctccctggcgacgcaggtggcgccgacctacgggcgctacttcgcctactgcctcggcgaccgcacgtccgtcgcgcggagcagcgcctcgtacctcgccttcggccgcacgccggagccgccgtccacggccttcaccccgctgctgtccaacccgcggcgccccaacctgtactacgtgaacatggccggcttcagcgtcggcggcgagcgtgtcgccggcgggttctgcagctccagcctctggctcgacccggcgaccgggcggggcggcgtggtggtggactcgggcacgtccatatcgcggctccccagggatgtgtacgcggcgctgcgcgacgccttcgacgcgcgcgcggccgcggccgggatgcggaggctggcgcggggcatctcggtgttcgacgcgtgctacgagctccgaggcgccagcgtgccggcggtggtgctgcacttcgctggcggcgcggacgtggcgctgcccccggagaactacttcatacccgagcagggcgggaagtaccactgcctggcgctggaggcgacggacgacgggctcagcgtgctcggcaacgtcctgcagcagggattccgggtcgtgttcgatgtcgagaaagaacgtgtcgggttcgcgccaaatggctgctaagcttgatcaacatttatttacacggttgtttaacctgc

SEQ ID NO: 63257 - protein, 462 aa, Triticum aestivum
  peptide (1)..(462): Ceres Seq. ID no. 14314085
FFASLHSQTMAEHKRTVSTLVLLLLFFSAPTNATRPPATLRIPVVHRDAVFPPPPGASRGSLLSRRAAADAARLPTPRATPPSRRPSGLGLRSSSAHDDRLHSPVMSGLPFDSGEYFASVGVGTPSTSALLVIDTGSDLIWLQCKPCRRCHRQMSPLYDPKGSSTYRQIPCSSPRCFPRHGCDTSTGACGYAMVYGDGSGSRGNLATDRLVFSNDTSVDSVVIGCGHDNAELFDSSAGVLGVGRGAGSLATQVAPTYGRYFAYCLGDRTSVARSSASYLAFGRTPEPPSTAFTPLLSNPRRPNLYYVNMAGFSVGGERVAGGFCSSSLWLDPATGRGGVVVDSGTSISRLPRDVYAALRDAFDARAAAAGMRRLARGISVFDACYELRGASVPAVVLHFAGGADVALPPENYFIPEQGGKYHCLALEATDDGLSVLGNVLQQGFRVVFDVEKERVGFAPNGC

SEQ ID NO: 63258 - protein, 453 aa, Triticum aestivum
  peptide (1)..(453): Ceres Seq. ID no. 14314086
MAEHKRTVSTLVLLLLFFSAPTNATRPPATLRIPVVHRDAVFPPPPGASRGSLLSRRAAADAARLPTPRATPPSRRPSGLGLRSSSAHDDRLHSPVMSGLPFDSGEYFASVGVGTPSTSALLVIDTGSDLIWLQCKPCRRCHRQMSPLYDPKGSSTYRQIPCSSPRCFPRHGCDTSTGACGYAMVYGDGSGSRGNLATDRLVFSNDTSVDSVVIGCGHDNAELFDSSAGVLGVGRGAGSLATQVAPTYGRYFAYCLGDRTSVARSSASYLAFGRTPEPPSTAFTPLLSNPRRPNLYYVNMAGFSVGGERVAGGFCSSSLWLDPATGRGGVVVDSGTSISRLPRDVYAALRDAFDARAAAAGMRRLARGISVFDACYELRGASVPAVVLHFAGGADVALPPENYFIPEQGGKYHCLALEATDDGLSVLGNVLQQGFRVVFDVEKERVGFAPNGC

SEQ ID NO: 63259 - protein, 357 aa, Triticum aestivum
  peptide (1)..(357): Ceres Seq. ID no. 14314087
MSGLPFDSGEYFASVGVGTPSTSALLVIDTGSDLIWLQCKPCRRCHRQMSPLYDPKGSSTYRQIPCSSPRCFPRHGCDTSTGACGYAMVYGDGSGSRGNLATDRLVFSNDTSVDSVVIGCGHDNAELFDSSAGVLGVGRGAGSLATQVAPTYGRYFAYCLGDRTSVARSSASYLAFGRTPEPPSTAFTPLLSNPRRPNLYYVNMAGFSVGGERVAGGFCSSSLWLDPATGRGGVVVDSGTSISRLPRDVYAALRDAFDARAAAAGMRRLARGISVFDACYELRGASVPAVVLHFAGGADVALPPENYFIPEQGGKYHCLALEATDDGLSVLGNVLQQGFRVVFDVEKERVGFAPNGC

SEQ ID NO: 63260 - DNA, 1262 bp, Triticum aestivum
  misc_feature (1)..(1262): Ceres Seq. ID no. 12616162
gaagaaagcatggcacgtattttccatgaaagcacgtccacgccgaagctctctataaagtacgtgcagtgcacagaaagtatcatcatatcatagaaaaacaagcatccatctcctcggttcagcccacagccaacgaacacacgcgagcgcacgagtgagcgagcgagagagagaaagatggcgaatctgttcctgaagcaggcgaagcactacgcggcggcgcggccggactacccggcggagctcttccacttcatcgcgtccaagacggcccgccacgacctcgcgtgggacgtcggcaccggcagcggccaggccgcagtctcgctggcgaagctgtacaagaacgtggtgggcacggacacgagcgcgcagcagctgggctacgcgcgggagctccccaacgtgcgctacgcccataccccggcggacctgccgctcgacggcatccacgcggccgtcgcgccgccgggctcggttgacgtggtcaccgtggcgcaggccttccactggctcgacctgccgcgcttctacgcgcaggtccgctccctcctgcgcccgcacggcgtcctcgccgcatggtgctacacggagccccgcatgggggccgccgtcgacgccgtcttctggcgcctctacgacggctcgcagccccactgggcgcccaaccggaagatggtcgacgacgagtaccgcagcgccgacttccccttcgaccccgtcgacggcgagacccacacgggccccttcgagttctccacggagcgatgcatgaacctcgacgactacttcacctacatcaagtcctggtccgcgtaccagaccgccaaggacaatggcgtcgagctgctcgacgccgagactgtgctggacttcgccgacgcgtggggcggcgaccgcgaggaggtcaagacggtgaggtaccccatcttcctcaggatcggcaaggtgaggccttaagaatcagatgcagcatgatgcaatgcaagtggccttgagaaagggacgctttcatgtctgcacgtcacgatcgaagtgacgatggtgcaaaatgccgagcagcgtacgtgtgccgccgctggaccattttatttgtattcccctcctattcctattccaaattcagcgtgtaacaaatggtattcctagtatccatcccattttagacaaataattgtaagttgtggatgttacctttgtctatcatatatgaatgttatttttgcggtgttgctaaaactgagtccgttgtgttagtc

SEQ ID NO: 63261 - protein, 260 aa, Triticum aestivum
  peptide (1)..(260): Ceres Seq. ID no. 12616163
MANLFLKQAKHYAAARPDYPAELFHFIASKTARHDLAWDVGTGSGQAAVSLAKLYKNVVGTDTSAQQLGYARELPNVRYAHTPADLPLDGIHAAVAPPGSVDVVTVAQAFHWLDLPRFYAQVRSLLRPHGVLAAWCYTEPRMGAAVDAVFWRLYDGSQPHWAPNRKMVDDEYRSADFPFDPVDGETHTGPFEFSTERCMNLDDYFTYIKSWSAYQTAKDNGVELLDAETVLDFADAWGGDREEVKTVRYPIFLRIGKVRP

SEQ ID NO: 63262 - protein, 139 aa, Triticum aestivum
  peptide (1)..(139): Ceres Seq. ID no. 12616164
MVLHGAPHGGRRRRRLLAPLRRLAAPLGAQPEDGRRRVPQRRLPLRPRRRRDPHGPLRVLHGAMHEPRRLLHLHQVLVRVPDRQGQWRRAARRRDCAGLRRRVGRRPRGGQDGEVPHLPQDRQGEALRIRCSMMQCKWP

SEQ ID NO: 63263 - DNA, 1186 bp, Triticum aestivum
  misc_feature (1)..(1186): Ceres Seq. ID no. 12593170
ttggactggaagcgacccgcgtccaccaccgccgctttccccgtctccccctcaccgcgcggcgacgccgagcgacccagcggcgagcccggcatgcatcacgaccccaaccccttcgacgagggcaccgccggcgacgagaaccccttctcgaatggaggaggccgcggcgggaagcagcagcacggcttccggcccaccgagcccgtcggcttcggcggcggcggcagcaggggcgacgccaccgtcgacgtgccgctcggcaacatgggcgactcgaatggcaaggcgagggagctctcgtcgtgggaatcagatctgaggcgccgtgaggcggatatcaaaaggagggaggaatcactgaagaatgctggagtgcccatggaggagaagaattggccgccttttttcccgattatccaccatgacatcgccaatgagatacctgccaacgtgcagaagctacagtatctggcgttcgcaagctggcttggaattgtgctctgcctctcctggacttattttgctgtcatagtctgctggatcaaggagggagattcaaagctgttcttccttgctacaatctatgctttgcttggaattcccctctcttacttgatgtggtatagacccctctatcgtgcaatgagaactaacagtgcattcagttttggatggtttttcctgtgttacctgatccacattggtttttgcataattgctgccattgctccgccaatcgtattccaagggaaatcattaacgggcatattggctgcgatcgacactttctctgagcatgtgataattgggatcttttacttcgtggggtttgcactattttgcttggagacactgctgagcatcggggttcttcagaaagtatacatgtacttccgagggcataagtgaagctagtcgtgatggaaatttttcagaagcctacaagcagtagtgattctgtccatatgtgttagtacaccttgagtctatgtttgttgagcgaagggttatcgaagaatgcttctgagactgagtggagtatggcatgtagcgctgctactataggatcttctctaagatgggggtgctgaggttctttatatgctgtgcttcgtgtgtcatctggtagttcgtttgggagtctggcatgtcggcgaacattacagtagtcagtatttattat

SEQ ID NO: 63264 - protein, 303 aa, Triticum aestivum
  peptide (1)..(303): Ceres Seq. ID no. 12593171
LDWKRPASTTAAFPVSPSPRGDAERPSGEPGMHHDPNPFDEGTAGDENPFSNGGGRGGKQQHGFRPTEPVGFGGGGSRGDATVDVPLGNMGDSNGKARELSSWESDLRRREADIKRREESLKNAGVPMEEKNWPPFFPIIHHDIANEIPANVQKLQYLAFASWLGIVLCLSWTYFAVIVCWIKEGDSKLFFLATIYALLGIPLSYLMWYRPLYRAMRTNSAFSFGWFFLCYLIHIGFCIIAAIAPPIVFQGKSLTGILAAIDTFSEHVIIGIFYFVGFALFCLETLLSIGVLQKVYMYFRGHK

SEQ ID NO: 63265 - protein, 272 aa, Triticum aestivum
  peptide (1)..(272): Ceres Seq. ID no. 12593172
MHHDPNPFDEGTAGDENPFSNGGGRGGKQQHGFRPTEPVGFGGGGSRGDATVDVPLGNMGDSNGKARELSSWESDLRRREADIKRREESLKNAGVPMEEKNWPPFFPIIHHDIANEIPANVQKLQYLAFASWLGIVLCLSWTYFAVIVCWIKEGDSKLFFLATIYALLGIPLSYLMWYRPLYRAMRTNSAFSFGWFFLCYLIHIGFCIIAAIAPPIVFQGKSLTGILAAIDTFSEHVIIGIFYFVGFALFCLETLLSIGVLQKVYMYFRGHK

SEQ ID NO: 63266 - protein, 214 aa, Triticum aestivum
  peptide (1)..(214): Ceres Seq. ID no. 12593173
MGDSNGKARELSSWESDLRRREADIKRREESLKNAGVPMEEKNWPPFFPIIHHDIANEIPANVQKLQYLAFASWLGIVLCLSWTYFAVIVCWIKEGDSKLFFLATIYALLGIPLSYLMWYRPLYRAMRTNSAFSFGWFFLCYLIHIGFCIIAAIAPPIVFQGKSLTGILAAIDTFSEHVIIGIFYFVGFALFCLETLLSIGVLQKVYMYFRGHK

SEQ ID NO: 63267 - DNA, 1013 bp, Triticum aestivum
  misc_feature (1)..(1013): Ceres Seq. ID no. 15173596
cgaaaacatccaccacagcttagcagcaaccaccagtgccttacacactatccatcaacaaactctagctgatcagttgcatagcaagcaatggggtgctctaaaaccctagtagctgccctcttcgccatgctgttcctagcttcgaccgtcctagccaccgaccctgatcctctccaggacttctgcgtcgccgacctcgacggcaaggcggtctcggtgaacgggcacacgtgcaagcccatgtcggaggccggcgacgacttcctcttctcatccaagctggccaaggccggcaacacgtccactccgaacggctcggctgtgacggagctggacgtggctgagtggcccggtaccaacacactgggtgtgtccatgaaccgcgtggacttcgcgccagggggcaccaacccgccgcacatccacccgcgtgccaccgagatcggcatcgtgatgaaaggtgagctcctcgttggaatcctcggcagccttgactccgggaacaagctctactcgagggtggtgcgcgccggagagacgttcctcatcccacggggccttatgcacttccagttcaatgtcggtaagaccgaggcctccatggtcgtctccttcaacagccagaaccccggaatcgtcttcgtgcccctcacgcttttcggctccaacccgcccatcccaacgccggtgctcaccaaggcactccgggtggaggccggggtcgtggaacttctcaagtccaagttcgccgctgggttttaatttctgggagccttccctgaaatgatcaatatataattccatatatgcatgctagcaaaatttaataattctcaccagaagacatgtattcaagtttcaggttaatctcgcatgcagttgtaataagattgaataagttagcctcatggtgtagccttcaatcagaaccaatatgaggaattgaatgtactactttttactgtcgtctttgttcttttcactgaacggaatatataataagcattttc

SEQ ID NO: 63268 - protein, 224 aa, Triticum aestivum
  peptide (1)..(224): Ceres Seq. ID no. 15173597
MGCSKTLVAALFAMLFLASTVLATDPDPLQDFCVADLDGKAVSVNGHTCKPMSEAGDDFLFSSKLAKAGNTSTPNGSAVTELDVAEWPGTNTLGVSMNRVDFAPGGTNPPHIHPRATEIGIVMKGELLVGILGSLDSGNKLYSRVVRAGETFLIPRGLMHFQFNVGKTEASMVVSFNSQNPGIVFVPLTLFGSNPPIPTPVLTKALRVEAGVVELLKSKFAAGF

SEQ ID NO: 63269 - protein, 211 aa, Triticum aestivum
  peptide (1)..(211): Ceres Seq. ID no. 15173598
MLFLASTVLATDPDPLQDFCVADLDGKAVSVNGHTCKPMSEAGDDFLFSSKLAKAGNTSTPNGSAVTELDVAEWPGTNTLGVSMNRVDFAPGGTNPPHIHPRATEIGIVMKGELLVGILGSLDSGNKLYSRVVRAGETFLIPRGLMHFQFNVGKTEASMVVSFNSQNPGIVFVPLTLFGSNPPIPTPVLTKALRVEAGVVELLKSKFAAGF

SEQ ID NO: 63270 - protein, 173 aa, Triticum aestivum
  peptide (1)..(173): Ceres Seq. ID no. 15173599
MSEAGDDFLFSSKLAKAGNTSTPNGSAVTELDVAEWPGTNTLGVSMNRVDFAPGGTNPPHIHPRATEIGIVMKGELLVGILGSLDSGNKLYSRVVRAGETFLIPRGLMHFQFNVGKTEASMVVSFNSQNPGIVFVPLTLFGSNPPIPTPVLTKALRVEAGVVELLKSKFAAGF

SEQ ID NO: 63271 - DNA, 1585 bp, Triticum aestivum
  misc_feature (1)..(1585): Ceres Seq. ID no. 13503468
gactgcaagtagttttaggagagcgccgaggacgcacccgcgtactgccaaatacaagccgcggtgcacccgtgccgccgttcgtccgctcccgtcgtccgcacacgcgcacgctcggctcgataatcctcaccggcgagcgcgcagctcacgatctatcatcccgatgtcgccggtgaggattaccgactcgacctatgtcggcgtgccggagaccgccgcgccaccgccggggccgatcaggttcaccgcgatggaggcgctctgggtcgtcttcccggtgctgcagcacgtgctgctctacgagggcgacgacgacatgccgcccttcgacgccattctcgagtccctccgctcctccctcgcggccactctgggcagcttcgcgccgctcgccggcaagctggtccacctcgaggagacgggggacgtgggcatcagctgctccgcctccgacggcgtcaggttcgtcgtcgccgagtgcgacgccgacatccgccgcctcgccggcgacgaggagcacgacctgcgcgtcctcgaggcgctcgtgccggaggtggacatgggccggctgccgaccgccctgctggccgtgcaggccacgcgtttcgagggcggcgtggcgctcgggctgacggtgcaccacggcgccgccgacgggcgggcgctgtggacgttcgtcgaggcgtgggcgacggcgtgccggggcgagacgccggccaccacgccgtgcttcgaccgctcgctcgtcaagatgcccgccggcgacgagctggccaggagtgttctgcggaagttcgctcccaatttgccctcggcggcactagcgtcatcagtcttcgaagaccgaaagcggctcactcgccgaaccttcaccttggaccaaggagacatccaacgcctgaagctgcgcattgtccacctcaatgagtcgggcggcacgcccctgcctcgcccgccgtctgctttcgccgccgtggtcgcgctcgcgtggacgtgcttcgcccggtgcaagtcgttctccttggacgacgacgtgtggctcttcttcttcgccgacatccgcgagcgccttgaccctcccgtcggcgcggggtacatcggctcgtgcctcaccaagtgtttggcaaggctccctgcccgggagcttcatggtgagcgtgccctggcggctgcggcgtcggcggtccaggacgagatcaacaagatgaaggaagaccctatcgctggttggaacttcttctcattcgatcccatgcccgccatggaccggttgatgaacatatcaggctcgtcgggctttagtgcatacaagatcgccgacttcgggtggggaaagccgacacggacagagccgattaggatgaacacagacggtcaggtggcattgatgggcagcagggacgaccggggtgtgcaggtctcagtggcactgctccaagcggcacaaatggacgagttcaaatctaactttctggcgctacttgagtgacaatttttgttctcaaagagacctagttaggtcaattcaaaacagtacacccagatgttttataaagattaatacattataattgaattgttt

SEQ ID NO: 63272 - protein, 496 aa, Triticum aestivum
  peptide (1)..(496): Ceres Seq. ID no. 13503469
TASSFRRAPRTHPRTAKYKPRCTRAAVRPLPSSAHAHARLDNPHRRARSSRSIIPMSPVRITDSTYVGVPETAAPPPGPIRFTAMEALWVVFPVLQHVLLYEGDDDMPPFDAILESLRSSLAATLGSFAPLAGKLVHLEETGDVGISCSASDGVRFVVAECDADIRRLAGDEEHDLRVLEALVPEVDMGRLPTALLAVQATRFEGGVALGLTVHHGAADGRALWTFVEAWATACRGETPATTPCFDRSLVKMPAGDELARSVLRKFAPNLPSAALASSVFEDRKRLTRRTFTLDQGDIQRLKLRIVHLNESGGTPLPRPPSAFAAVVALAWTCFARCKSFSLDDDVWLFFFADIRERLDPPVGAGYIGSCLTKCLARLPARELHGERALAAAASAVQDEINKMKEDPIAGWNFFSFDPMPAMDRLMNISGSSGFSAYKIADFGWGKPTRTEPIRMNTDGQVALMGSRDDRGVQVSVALLQAAQMDEFKSNFLALLE

SEQ ID NO: 63273 - protein, 441 aa, Triticum aestivum
  peptide (1)..(441): Ceres Seq. ID no. 13503470
MSPVRITDSTYVGVPETAAPPPGPIRFTAMEALWVVFPVLQHVLLYEGDDDMPPFDAILESLRSSLAATLGSFAPLAGKLVHLEETGDVGISCSASDGVRFVVAECDADIRRLAGDEEHDLRVLEALVPEVDMGRLPTALLAVQATRFEGGVALGLTVHHGAADGRALWTFVEAWATACRGETPATTPCFDRSLVKMPAGDELARSVLRKFAPNLPSAALASSVFEDRKRLTRRTFTLDQGDIQRLKLRIVHLNESGGTPLPRPPSAFAAVVALAWTCFARCKSFSLDDDVWLFFFADIRERLDPPVGAGYIGSCLTKCLARLPARELHGERALAAAASAVQDEINKMKEDPIAGWNFFSFDPMPAMDRLMNISGSSGFSAYKIADFGWGKPTRTEPIRMNTDGQVALMGSRDDRGVQVSVALLQAAQMDEFKSNFLALLE

SEQ ID NO: 63274 - protein, 412 aa, Triticum aestivum
  peptide (1)..(412): Ceres Seq. ID no. 13503471
MEALWVVFPVLQHVLLYEGDDDMPPFDAILESLRSSLAATLGSFAPLAGKLVHLEETGDVGISCSASDGVRFVVAECDADIRRLAGDEEHDLRVLEALVPEVDMGRLPTALLAVQATRFEGGVALGLTVHHGAADGRALWTFVEAWATACRGETPATTPCFDRSLVKMPAGDELARSVLRKFAPNLPSAALASSVFEDRKRLTRRTFTLDQGDIQRLKLRIVHLNESGGTPLPRPPSAFAAVVALAWTCFARCKSFSLDDDVWLFFFADIRERLDPPVGAGYIGSCLTKCLARLPARELHGERALAAAASAVQDEINKMKEDPIAGWNFFSFDPMPAMDRLMNISGSSGFSAYKIADFGWGKPTRTEPIRMNTDGQVALMGSRDDRGVQVSVALLQAAQMDEFKSNFLALLE

SEQ ID NO: 63275 - DNA, 937 bp, Triticum aestivum
  misc_feature (1)..(937): Ceres Seq. ID no. 13662587
gattaagcaagcatctgccttcaatatctcctgtattttctcatctaattagccacgcttgaagttcatacttgaaccatatttcctgctcttcttcgtgctaatcggctggccacttccagaaaccaatttctgtcctcagttttagtattgtgattctagattagaaaaaagagaaccaggtgatcgagcgaggtgaggcaatgggaggcaccctgcggttcctgtcggatgtgctgctaggtagcagcagccagaggcagcacagcaagaagcggaggcagttcaacacggtggagctcaaggtgaagatggactgcgacggctgcgagctcaagatccggaacaccctcgccaacatgagaggagctcagtcggtggagatcaaccggaagcagcacaaggtgacggtgaaggggttcgtggagccgcagcgtgtgctgaggagagtccagtcgacggggaagcgggccgagctctggccgtacgtgccttacacaaacccctacatggcgccggtgtacgacaagcgggctcccgccggccacgtgcgcaaggtggaaggtgtcatgccggtctccaccgggcaggaggagcgcctcgccacgatcttcagcgacgacaacccaaacgcctgctccgtcatgtagtcatgctcatgcaagtcactgcgccaaaagaccctttgcttcttcttcctttttcgggggtgattcctaccaaacgaccctctgctgaactttctccaccgacagactataaaatagcccattagtagaactactattacaaaactcgtcaacgatgcttgtaacaaaagactcatatttttaataatttaacaaagtactgtaatatatggtgaacgctatggtgaagctgatgctagcaagatttcatcgtatttcagaaatttaaaattatttgaagctagccc

SEQ ID NO: 63276 - protein, 148 aa, Triticum aestivum
  peptide (1)..(148): Ceres Seq. ID no. 13662588
MGGTLRFLSDVLLGSSSQRQHSKKRRQFNTVELKVKMDCDGCELKIRNTLANMRGAQSVEINRKQHKVTVKGFVEPQRVLRRVQSTGKRAELWPYVPYTNPYMAPVYDKRAPAGHVRKVEGVMPVSTGQEERLATIFSDDNPNACSVM

SEQ ID NO: 63277 - protein, 112 aa, Triticum aestivum
  peptide (1)..(112): Ceres Seq. ID no. 13662589
MDCDGCELKIRNTLANMRGAQSVEINRKQHKVTVKGFVEPQRVLRRVQSTGKRAELWPYVPYTNPYMAPVYDKRAPAGHVRKVEGVMPVSTGQEERLATIFSDDNPNACSVM

SEQ ID NO: 63278 - protein, 96 aa, Triticum aestivum
  peptide (1)..(96): Ceres Seq. ID no. 13662590
MRGAQSVEINRKQHKVTVKGFVEPQRVLRRVQSTGKRAELWPYVPYTNPYMAPVYDKRAPAGHVRKVEGVMPVSTGQEERLATIFSDDNPNACSVM

SEQ ID NO: 63279 - DNA, 2140 bp, Triticum aestivum
  misc_feature (1)..(2140): Ceres Seq. ID no. 14314096
gtctccttccccacatcgtcgtcaatccccaattcccaaatcacgcgctccgacgaccaaaccctaacctcggatccccggaagcacgccaaattcgccaaccctcccctcagattgggcatgccagccccccgaaactccagcccgtgacctcgccggagacgatggcctcgctgccgccgcatccccgccggattcggcccatcgccgtggcctccctggtgctcttcctcctcttcctctacacccgctcggatgggaaccctccgcggctcccgggctccgattcgcgcccgctccaccggaggctcctctccggtgccgatcccgccagccccgccgcgtccagaggcgggaacctttcggaggtcaccgggctgaacggcgagcagctggagaacccctccaccgcgtgcgccggcatcgaccgccacgagggtttcgggtcccagtgcgagttcctccgggctcacccgcagtgcagctccggcgggttcgtcgactacctggacttcttctactgcaggtgcgagagattcaggctgcttggatatgccgtgcttgcagtgtgcctcgcggcgctgttctacatgctcggtaacacggccgcggactacttctgttgcagcctagagaagatgtctgcgctgctgcggctaccgccgacagtggctggtgttaccctgctcccctttggtaatggtgctcctgatgtgtttgccagcattgcagcgtttatggggtctggcgccggggatgtcgggctgaacagcgtgctgggcggagcggtgtttgttacctgcgtcgttgttggggcagtatcattgtccgtcgcggagaagaatgtgcagattgattggaggtgctttgtgagggatgttggattcttcctgatcactttggtggcactgtctattatgttgattgtcgggaaggtgaccgtttggggagctatgctgtttgtatcgatttatgtggtttatgcatttgtggtggctgcaaatgagttattaaggaagcatgcacggatgctgaagtttgatgtagtcacaccattgcttccggtgaggggaagtatcttctcacacggactagaggatgatgattctgtgtacagttcacttcttgaggaggatacaagtgatgacgcggcccaggtaaacacatcattgccgcagtggatgtgggcttctcatgtggctatctactcaaatcaagggagagatggttcacctgacaggcctttgtggggttggaatgaagaaggaagagtggatacctccacgcttaactactccaaactgtttctgtttttggagctacccttgacaataccaagaaagttgacgattccaatagttgaggaagaccgctggtcacaagaatatgctgttgccagtgctggcttggcacctctactcttagcatttctgtggaacagccaggatggagtatccacgggtgccagcgtagcagcatatgtgattgctggtatttttgggattgcacttgcaggtcttgcttttacattcaccagtcccgaccgccctccaaggagatacttactcccatgggtgtttggagggtttgtgatgagcatcgtttggttctacatcattgccaatgagctggttgcactgttggttgcatttggagtgatacttgggattaatccttcaattctcggtttaacggtgttagcatggggcaattcgatgggtgacttaatgtcaaatgtggccttggcaatgaatggtggagatggtgtacagattgctatgtctggctgttatgcaggacctatgtttaatacacttgctggcctaggaatatcgatgctacttggagcttggtcgacggcacccaactcttatgttcttccgcaggaccgctctcttatttacacgatgagcttcctggttgctgggttgatctgggcgcttgttacgctgccacgaagcggcatgcgacctaacaagacgcttggagttggcctcattgctctctactcagttttccttttcattagagtaagcagtgctatggggatattgccactcccgggcttgaattagttgtttgtgtctattgtacatgactgtcctttatacagatgaaatggagttgtacattgttcctc

SEQ ID NO: 63280 - protein, 690 aa, Triticum aestivum
  peptide (1)..(690): Ceres Seq. ID no. 14314097
LLPHIVVNPQFPNHALRRPNPNLGSPEARQIRQPSPQIGHASPPKLQPVTSPETMASLPPHPRRIRPIAVASLVLFLLFLYTRSDGNPPRLPGSDSRPLHRRLLSGADPASPAASRGGNLSEVTGLNGEQLENPSTACAGIDRHEGFGSQCEFLRAHPQCSSGGFVDYLDFFYCRCERFRLLGYAVLAVCLAALFYMLGNTAADYFCCSLEKMSALLRLPPTVAGVTLLPFGNGAPDVFASIAAFMGSGAGDVGLNSVLGGAVFVTCVVVGAVSLSVAEKNVQIDWRCFVRDVGFFLITLVALSIMLIVGKVTVWGAMLFVSIYVVYAFVVAANELLRKHARMLKFDVVTPLLPVRGSIFSHGLEDDDSVYSSLLEEDTSDDAAQVNTSLPQWMWASHVAIYSNQGRDGSPDRPLWGWNEEGRVDTSTLNYSKLFLFLELPLTIPRKLTIPIVEEDRWSQEYAVASAGLAPLLLAFLWNSQDGVSTGASVAAYVIAGIFGIALAGLAFTFTSPDRPPRRYLLPWVFGGFVMSIVWFYIIANELVALLVAFGVILGINPSILGLTVLAWGNSMGDLMSNVALAMNGGDGVQIAMSGCYAGPMFNTLAGLGISMLLGAWSTAPNSYVLPQDRSLIYTMSFLVAGLIWALVTLPRSGMRPNKTLGVGLIALYSVFLFIRVSSAMGILPLPGLN

SEQ ID NO: 63281 - protein, 636 aa, Triticum aestivum
  peptide (1)..(636): Ceres Seq. ID no. 14314098
MASLPPHPRRIRPIAVASLVLFLLFLYTRSDGNPPRLPGSDSRPLHRRLLSGADPASPAASRGGNLSEVTGLNGEQLENPSTACAGIDRHEGFGSQCEFLRAHPQCSSGGFVDYLDFFYCRCERFRLLGYAVLAVCLAALFYMLGNTAADYFCCSLEKMSALLRLPPTVAGVTLLPFGNGAPDVFASIAAFMGSGAGDVGLNSVLGGAVFVTCVVVGAVSLSVAEKNVQIDWRCFVRDVGFFLITLVALSIMLIVGKVTVWGAMLFVSIYVVYAFVVAANELLRKHARMLKFDVVTPLLPVRGSIFSHGLEDDDSVYSSLLEEDTSDDAAQVNTSLPQWMWASHVAIYSNQGRDGSPDRPLWGWNEEGRVDTSTLNYSKLFLFLELPLTIPRKLTIPIVEEDRWSQEYAVASAGLAPLLLAFLWNSQDGVSTGASVAAYVIAGIFGIALAGLAFTFTSPDRPPRRYLLPWVFGGFVMSIVWFYIIANELVALLVAFGVILGINPSILGLTVLAWGNSMGDLMSNVALAMNGGDGVQIAMSGCYAGPMFNTLAGLGISMLLGAWSTAPNSYVLPQDRSLIYTMSFLVAGLIWALVTLPRSGMRPNKTLGVGLIALYSVFLFIRVSSAMGILPLPGLN

SEQ ID NO: 63282 - protein, 494 aa, Triticum aestivum
  peptide (1)..(494): Ceres Seq. ID no. 14314099
MLGNTAADYFCCSLEKMSALLRLPPTVAGVTLLPFGNGAPDVFASIAAFMGSGAGDVGLNSVLGGAVFVTCVVVGAVSLSVAEKNVQIDWRCFVRDVGFFLITLVALSIMLIVGKVTVWGAMLFVSIYVVYAFVVAANELLRKHARMLKFDVVTPLLPVRGSIFSHGLEDDDSVYSSLLEEDTSDDAAQVNTSLPQWMWASHVAIYSNQGRDGSPDRPLWGWNEEGRVDTSTLNYSKLFLFLELPLTIPRKLTIPIVEEDRWSQEYAVASAGLAPLLLAFLWNSQDGVSTGASVAAYVIAGIFGIALAGLAFTFTSPDRPPRRYLLPWVFGGFVMSIVWFYIIANELVALLVAFGVILGINPSILGLTVLAWGNSMGDLMSNVALAMNGGDGVQIAMSGCYAGPMFNTLAGLGISMLLGAWSTAPNSYVLPQDRSLIYTMSFLVAGLIWALVTLPRSGMRPNKTLGVGLIALYSVFLFIRVSSAMGILPLPGLN

SEQ ID NO: 63283 - DNA, 1169 bp, Triticum aestivum
  misc_feature (1)..(1169): Ceres Seq. ID no. 13655404
ccagctctagcagtcccggctttccctgctcgcctcgcagtcgccgccgccgccgccagccatgggtcgcaccaaggacgagctcctcgcgcgcctcgaggagcttaagattgatttcaagcgctacgaccacccggttgtgctgacggtcgaggaacaggccaaacatgtgggaagttttggaggtgctttgaccaagaatctgcttctgaaggacaagaagcatcgcttgtacattgtttctgcacttgctgacaccaaagttgacatgaaaattctgtcccagcgtcttggcttgggaaaaggtggtgtgcgaatggctcctgaggagaatttgcgtcaagtgcttcaggtaccgttaggatgtgttactccgtttgcgctattcaatgagtccgcgagtgccgtctcattattactggaccaagggttcaagtctaaacagagctgctacttccatccactgacaaatgatgtgactattgccctcagttcaagcaacctggacaagtttctcctctccattgggaagcaaccagcttatgtagacttggaggcctcaccagtggtaggtaaagataatccccctgatctagcagatcttgtgccttctggtgcactctgttcctcagaagaatcagttgagaatccgactcctaaagatgctcctcaagtcaacgtacccaaacagaaaacgtgtctaccagaagtgaaggctaagcccaaagttcagaacaagggtgcagaaagttcagagagtaaagttcctactaataatggcgcaaatgttgagatatttgcaagtgatgtgcttgaggtcatcttcccattgttcctgtctgagacatcaaagaaattgaatattaaacaggaagagcttactcaaattttaaaattagatgactttaaacgacgagctgctccagatctggagagtgcaacgaatatgttcaaaaacatggcatacagtgcaggatttcacgctggcttcgataccatgctcaagtcgggtttaggtgggatgccctctcggaaatagtgggttaattcgatatagaagactgtgagttgattcagtcaatttttgtatgccccttggtgtaaaatcaaatcataccatatagtacttattatgttgaatgattcgattgaatgtatcaccttaagcc

SEQ ID NO: 63284 - protein, 325 aa, Triticum aestivum
  peptide (1)..(325): Ceres Seq. ID no. 13655405
MGRTKDELLARLEELKIDFKRYDHPVVLTVEEQAKHVGSFGGALTKNLLLKDKKHRLYIVSALADTKVDMKILSQRLGLGKGGVRMAPEENLRQVLQVPLGCVTPFALFNESASAVSLLLDQGFKSKQSCYFHPLTNDVTIALSSSNLDKFLLSIGKQPAYVDLEASPVVGKDNPPDLADLVPSGALCSSEESVENPTPKDAPQVNVPKQKTCLPEVKAKPKVQNKGAESSESKVPTNNGANVEIFASDVLEVIFPLFLSETSKKLNIKQEELTQILKLDDFKRRAAPDLESATNMFKNMAYSAGFHAGFDTMLKSGLGGMPSRK

SEQ ID NO: 63285 - protein, 256 aa, Triticum aestivum
  peptide (1)..(256): Ceres Seq. ID no. 13655406
MKILSQRLGLGKGGVRMAPEENLRQVLQVPLGCVTPFALFNESASAVSLLLDQGFKSKQSCYFHPLTNDVTIALSSSNLDKFLLSIGKQPAYVDLEASPVVGKDNPPDLADLVPSGALCSSEESVENPTPKDAPQVNVPKQKTCLPEVKAKPKVQNKGAESSESKVPTNNGANVEIFASDVLEVIFPLFLSETSKKLNIKQEELTQILKLDDFKRRAAPDLESATNMFKNMAYSAGFHAGFDTMLKSGLGGMPSRK

SEQ ID NO: 63286 - protein, 240 aa, Triticum aestivum
  peptide (1)..(240): Ceres Seq. ID no. 13655407
MAPEENLRQVLQVPLGCVTPFALFNESASAVSLLLDQGFKSKQSCYFHPLTNDVTIALSSSNLDKFLLSIGKQPAYVDLEASPVVGKDNPPDLADLVPSGALCSSEESVENPTPKDAPQVNVPKQKTCLPEVKAKPKVQNKGAESSESKVPTNNGANVEIFASDVLEVIFPLFLSETSKKLNIKQEELTQILKLDDFKRRAAPDLESATNMFKNMAYSAGFHAGFDTMLKSGLGGMPSRK

SEQ ID NO: 63287 - DNA, 1439 bp, Triticum aestivum
  misc_feature (1)..(1439): Ceres Seq. ID no. 14302820
gaaaagcaaatcgtgcccaaccaaaccctagccccctccccagcccatggcgaagttcggcgagggcgacgctcggtggatcgtgcaggagcgcgccgacggtgccaacgtccacaactggcactgggcggagcgcgactgtctcgactggtctcgcgcgcttctctccaagctcctcgcgggcctccccgtcctctccggagagggcggcctcaccctccgcaccaccaccctcgacaagctcgatggcgaggcctacgtcaacatccgcaagggcaaggtcatcccagggtacgagctttccctcacgctcgcctgggaggccgatgccacaaccgagtcgggggtcgtcaaggtcaccggcaccgctgaggtaccctacctcgctgacgagaacgccgacgaggaccccgaactccgcatcactgttcgcggtgacgacggccccctcgcgcgccgggccaaggatgccttcatcgcccatggcaagcctctggttattacgaagatccgggattatgtcgccgccatggcgaatggtggccccgccaaggacgagatagattctaagaagatttccaccaaggctgccccagcggccggtggcgcagctgttgctcctgctccttcagtgaaggtaacagcagcgccagtgcaggcgccagcagctaaggagaagaaggcgaatggcaaggataaggaaggattcaagactatcgagatgacagagaagttcaactgccgctccaaggacatctatgagatcttgatggatgacaacaggtggaagggtttcacacagagcaatgcgaggatcagcaaggatgttggtgggcagtttagcctctttgatgggtccatcacaggtgttaatgaggagctgcaggaagggaagctgatcgtgcagaaatggcggtttgggagctgggctgatggcgtccattctacagtcaggttggtgtttgatgagcctgagtcaggagtgacaacaataaagctcaaacaaactgatgtgccagaggaagacaggtatgggaactcaaccgtggtggagaacactgagagaggctggaaagagctcatcttccagaggatacgtgcagtgttcggttttggggtctgaaaaagcatctttgacatccagcttcaatgaagtcgatcctgccttttcatggctatccatgttttgctgtcttagtttattcgatgctgatcgacacacaaaacttcgtgaacttccgggaattgaaaaatactccgtgttaccttgtattcatcacgctgggttgtgctttgaagtcgtcactcatgaaagtttgagcttgtgactcatgtagaggccggcgaaagatggtcgctgagtgactattatttttattccttgcgtctgtatgacatggtaccagataaattgtattgaagtttctagttctacaagc

SEQ ID NO: 63288 - protein, 358 aa, Triticum aestivum
  peptide (1)..(358): Ceres Seq. ID no. 14302821
MAKFGEGDARWIVQERADGANVHNWHWAERDCLDWSRALLSKLLAGLPVLSGEGGLTLRTTTLDKLDGEAYVNIRKGKVIPGYELSLTLAWEADATTESGVVKVTGTAEVPYLADENADEDPELRITVRGDDGPLARRAKDAFIAHGKPLVITKIRDYVAAMANGGPAKDEIDSKKISTKAAPAAGGAAVAPAPSVKVTAAPVQAPAAKEKKANGKDKEGFKTIEMTEKFNCRSKDIYEILMDDNRWKGFTQSNARISKDVGGQFSLFDGSITGVNEELQEGKLIVQKWRFGSWADGVHSTVRLVFDEPESGVTTIKLKQTDVPEEDRYGNSTVVENTERGWKELIFQRIRAVFGFGV

SEQ ID NO: 63289 - protein, 197 aa, Triticum aestivum
  peptide (1)..(197): Ceres Seq. ID no. 14302822
MANGGPAKDEIDSKKISTKAAPAAGGAAVAPAPSVKVTAAPVQAPAAKEKKANGKDKEGFKTIEMTEKFNCRSKDIYEILMDDNRWKGFTQSNARISKDVGGQFSLFDGSITGVNEELQEGKLIVQKWRFGSWADGVHSTVRLVFDEPESGVTTIKLKQTDVPEEDRYGNSTVVENTERGWKELIFQRIRAVFGFGV

SEQ ID NO: 63290 - protein, 186 aa, Triticum aestivum
  peptide (1)..(186): Ceres Seq. ID no. 14302823
KANRAQPNPSPLPSPWRSSARATLGGSCRSAPTVPTSTTGTGRSATVSTGLARFSPSSSRASPSSPERAASPSAPPPSTSSMARPTSTSARARSSQGTSFPSRSPGRPMPQPSRGSSRSPAPLRYPTSLTRTPTRTPNSASLFAVTTAPSRAGPRMPSSPMASLWLLRRSGIMSPPWRMVAPPRTR

SEQ ID NO: 63291 - DNA, 1203 bp, Triticum aestivum
  misc_feature (1)..(1203): Ceres Seq. ID no. 12616221
gatatccctctcggtagacggtacaatcataccgatcaggagccagctgctgcttcttgtgttgtgttggtcccactgccgagatcggcagcagaagcagccgtcggtcctctgtacctctcgttgatcgcttgatccgaggggatccgaggggatccaaggcgagctgcgtgcgtggtggcggcgatgagttcgctgagcatggtggaggcgaggctgccgccgggcttcaggttccacccacgggacgacgagctcgtgctcgactacctgtccaggaagctcggcggcggtggcgccggaggggcggcggccgcggtggcgagcatctacggctgccccgccatggtcgacgtcgacctcaacaagatcgagccctgggacctccccgaaatcgcatgcattggcggcaaggagtggtacttctacagcttaagggacaagaagtacgctacaggccagcgaacaaatagagcaactgaatcaggctactggaaggccacagggaaagaccgtgcgataagccggaaagggttgctagttggcatgagaaaaaccctggtgttttatgaaggtagagcccctaaagggaagaagactgaatgggtcatgcacgaattccgcaaggaagggcaaggcgatctgatgaagttgccactcaaggaggactgggtcttgtgtagggttttttacaagaccaggacaaccattgccaaaccatccacagggagcaactacaacattgacagtgcagccgcaacctcactgcctcctctcattgacaactacattgcctttgaccatcctggaatgtccacggtgcaaaacctagagggttatgagcaagtgccctgcttctccaatggcccctcctctcacccgtcgtcgtcggcctcgatgaacatcccggtgatggcgatggcgcccatggctgccgatcaggagcagcagcacatggggaaggcgatcaaggacgcgctgagccagctcaccaggtttgagcaaggcaacgtgaaaagggaggcgcctgcccagggtggtgtgtttgctcaagatgggttcgagtacttagctgagagtggcttttcacagatgtggaactcactcagttgattttctagctaggggtattattgctagtgctaccaatcaaagatctacattttctccacccgcaaaaataaagatctacattttcttgcg

SEQ ID NO: 63292 - protein, 308 aa, Triticum aestivum
  peptide (1)..(308): Ceres Seq. ID no. 12616222
MSSLSMVEARLPPGFRFHPRDDELVLDYLSRKLGGGGAGGAAAAVASIYGCPAMVDVDLNKIEPWDLPEIACIGGKEWYFYSLRDKKYATGQRTNRATESGYWKATGKDRAISRKGLLVGMRKTLVFYEGRAPKGKKTEWVMHEFRKEGQGDLMKLPLKEDWVLCRVFYKTRTTIAKPSTGSNYNIDSAAATSLPPLIDNYIAFDHPGMSTVQNLEGYEQVPCFSNGPSSHPSSSASMNIPVMAMAPMAADQEQQHMGKAIKDALSQLTRFEQGNVKREAPAQGGVFAQDGFEYLAESGFSQMWNSLS

SEQ ID NO: 63293 - protein, 303 aa, Triticum aestivum
  peptide (1)..(303): Ceres Seq. ID no. 12616223
MVEARLPPGFRFHPRDDELVLDYLSRKLGGGGAGGAAAAVASIYGCPAMVDVDLNKIEPWDLPEIACIGGKEWYFYSLRDKKYATGQRTNRATESGYWKATGKDRAISRKGLLVGMRKTLVFYEGRAPKGKKTEWVMHEFRKEGQGDLMKLPLKEDWVLCRVFYKTRTTIAKPSTGSNYNIDSAAATSLPPLIDNYIAFDHPGMSTVQNLEGYEQVPCFSNGPSSHPSSSASMNIPVMAMAPMAADQEQQHMGKAIKDALSQLTRFEQGNVKREAPAQGGVFAQDGFEYLAESGFSQMWNSLS

SEQ ID NO: 63294 - protein, 255 aa, Triticum aestivum
  peptide (1)..(255): Ceres Seq. ID no. 12616224
MVDVDLNKIEPWDLPEIACIGGKEWYFYSLRDKKYATGQRTNRATESGYWKATGKDRAISRKGLLVGMRKTLVFYEGRAPKGKKTEWVMHEFRKEGQGDLMKLPLKEDWVLCRVFYKTRTTIAKPSTGSNYNIDSAAATSLPPLIDNYIAFDHPGMSTVQNLEGYEQVPCFSNGPSSHPSSSASMNIPVMAMAPMAADQEQQHMGKAIKDALSQLTRFEQGNVKREAPAQGGVFAQDGFEYLAESGFSQMWNSLS

SEQ ID NO: 63295 - DNA, 1539 bp, Triticum aestivum
  misc_feature (1)..(1539): Ceres Seq. ID no. 15226382
ttcctccgtccggccgtccccctttcccctttcacaccgcaagaaaaccctcgcccaaatctacagcaaccaacgcccccgtttcatctacgagagctgcgagctcacaattccgcggagcagctcggccatggcgtcctccgtcgccggcgggttgccgtcgaggtccgccatcgtggccgacacgaccagcgggcaccaccttctcaccatccacggctactcccgcaccaaggacatacccaccggagagcgcgtcaagtctcaccctttcatcatcggcggccatcgctggcggatcgactactaccccggcggcgtgcgcccggaggtcgcggactacgtgtccctctccctgatactagaggaagatggcccggcgccggtgaaggcccagtacgacatctgcctcgttaccaaggaggaggaggcggagcaagccgcgtcgatggcgtcggcaccggtcgacgagttcgctccccggaagggctgggagtactccaagttcgtcaggagggtggagctggagagctcaaagtatctcaccaacgattcgttcaccgtccggtgcgatatcgttgtcgtccatggttaccgcgccgcggccggcatggcggccttggtctctgtgcccccatgtgacctgcgtgagaaccttggcaggctcctcgacaccgggatgggcgccgacgtggtgtttgaggtcggcggcgagaccgtcgcggcacaccggtgcgtgctcgcggcctgctctccggtgtttgccgcccaactctttggacccatgaaggagggtaatgccggcgtcgtgcgcgtggaagacatggacgcggaggtgttcaaggcgttgctccgtttcacatacgccggcttgctgccggagacgttcaaggaagacgcagtcgtatgccagcatctgctcgttgctgcggacaggtatggcatggggcggctaaagctgatctgcgagcagaagctgtgcgagtacatcgacatcggcacggcagcaaccatcctgacgctggccgagcagcaccgctgtgaggggctgaagaaggcctgcttcgattttctcgccgctccaccaaatctgagggaagtcgtggccaccgacggcttccagcatctgatcgcgagctgcccttctcttatggtcgagctcatggctatgtcccctacacattagccaagtgatggatatgcatgcctctgagtgttgtagcaatggtgaaacatggtttctaggctcatgtactaatctgggtacctctcttggtgtatccgtggctctacctagttaacaaccgagatgcaaaaattagcctcatttcgcccctgttttatcagttcattgcatctctaactgtgcctattaaccaggacgtgcgttggaatcagaggtgataaaatgctcaggtttttaggcaatggtagcttgtggtttcaggtctttgttatctgatattgcgcttgtggttccatggtttctgaaccttattgagataatactattatgttcttattatcacctactgtgct

SEQ ID NO: 63296 - protein, 394 aa, Triticum aestivum
  peptide (1)..(394): Ceres Seq. ID no. 15226383
SSVRPSPFPLSHRKKTLAQIYSNQRPRFIYESCELTIPRSSSAMASSVAGGLPSRSAIVADTTSGHHLLTIHGYSRTKDIPTGERVKSHPFIIGGHRWRIDYYPGGVRPEVADYVSLSLILEEDGPAPVKAQYDICLVTKEEEAEQAASMASAPVDEFAPRKGWEYSKFVRRVELESSKYLTNDSFTVRCDIVVVHGYRAAAGMAALVSVPPCDLRENLGRLLDTGMGADVVFEVGGETVAAHRCVLAACSPVFAAQLFGPMKEGNAGVVRVEDMDAEVFKALLRFTYAGLLPETFKEDAVVCQHLLVAADRYGMGRLKLICEQKLCEYIDIGTAATILTLAEQHRCEGLKKACFDFLAAPPNLREVVATDGFQHLIASCPSLMVELMAMSPTH

SEQ ID NO: 63297 - protein, 351 aa, Triticum aestivum
  peptide (1)..(351): Ceres Seq. ID no. 15226384
MASSVAGGLPSRSAIVADTTSGHHLLTIHGYSRTKDIPTGERVKSHPFIIGGHRWRIDYYPGGVRPEVADYVSLSLILEEDGPAPVKAQYDICLVTKEEEAEQAASMASAPVDEFAPRKGWEYSKFVRRVELESSKYLTNDSFTVRCDIVVVHGYRAAAGMAALVSVPPCDLRENLGRLLDTGMGADVVFEVGGETVAAHRCVLAACSPVFAAQLFGPMKEGNAGVVRVEDMDAEVFKALLRFTYAGLLPETFKEDAVVCQHLLVAADRYGMGRLKLICEQKLCEYIDIGTAATILTLAEQHRCEGLKKACFDFLAAPPNLREVVATDGFQHLIASCPSLMVELMAMSPTH

SEQ ID NO: 63298 - protein, 245 aa, Triticum aestivum
  peptide (1)..(245): Ceres Seq. ID no. 15226385
MASAPVDEFAPRKGWEYSKFVRRVELESSKYLTNDSFTVRCDIVVVHGYRAAAGMAALVSVPPCDLRENLGRLLDTGMGADVVFEVGGETVAAHRCVLAACSPVFAAQLFGPMKEGNAGVVRVEDMDAEVFKALLRFTYAGLLPETFKEDAVVCQHLLVAADRYGMGRLKLICEQKLCEYIDIGTAATILTLAEQHRCEGLKKACFDFLAAPPNLREVVATDGFQHLIASCPSLMVELMAMSPTH

SEQ ID NO: 63299 - DNA, 1667 bp, Triticum aestivum
  misc_feature (1)..(1667): Ceres Seq. ID no. 12625388
gcacaaggccccagtacagaacaacatagcggcacgcaacacgccagccgcagcaaagcaccggtgccgcgccgcttcctcaggacccaagtcacctgccatctcctccccagcagcggcaaactcgccaccgcacgcagcgacggcatggcgatgtctcgcgccgcggcagcggtcgggcggcgccggtgcgggccgcgcctgcccgcggcgaggtccatggcgtcgtggttcggccacgtggagccggccgccaaggaccccatcctcggcgtcaccgaggccttcctcgccgacccctcgccggacaaagtgaacgtcggcgtcggtgcgtaccgggacgacgacgggaagcccgtggtgctcgagtgcgtgcgcgaggcggagcggcgcatcgccgggagcaccaacatggagtaccttccaatgggaggaagcgtgaagatgatcgaggagtcgctgaagctggcatacggggaggattctgagttcatcaaggacaagaggattgcggcagtgcaggctctttcagggactggtgcatgtcgcctctttgcagatttccagaaacgcttcttgccggattcacagatctacatacctacgcctacatggtcaaaccatcacaacatttggagggatgcccaggtaccacaaagaacatttgcctactaccacccggaatcaagaggactggactttgcaggcctaatggatgatatcaagaacgctccagagggttccttctttttgcttcatgcatgtgctcacaatcccactggggtcgatccttctgaggaacagtggagagagatatctcaacaattcaaggtgaagaaccatttcccatttttcgacatggcataccaaggatttgccagtggtgacccagagagagatgccaaggcaattcggatctttctcgaagatggacatcaaattggatgtgcacagtcatatgcaaaaaacatgggactttatggccaaagagcaggatgccttagtattctctgcgacgatgaaatacaagcagttgatgtgaagagccagttacaacagattgccagacctatgtacagcaacccaccccttcacggcgcactaattgtttccactatccttggtgatccagcactgaaaagcttatggctgaaagaggtcaagggtatggctgatcgcattattggaatgcgaaaagcacttaaggagagccttgaaaagttgggttcaccattatcatgggaacatattactaatcagattggcatgttttgctacagcgggatgacacctgaacaagttgatcgcttaacaaatgaatttcacatatacatgactcgtaatggcaggataagcatggctggtgtaacaacaggaaatgtcgcatatttggctaacgctattcatgaggtcactaagccaatttaagaccccttcctccctcctgccattttgagaaataagaggagcctttcaacttcaagttgcagtttgcttttaatttccttaaaccttttatgttccaacaatgttgtttttatcaaacaatgtcccatattgttgtgacctatgggtgtgcaaatattgatttgtttcatcggagacacagaaaggaacactttattagtaagaactaaactgatcctaaaaaaaaaaaaaaaaaagct

SEQ ID NO: 63300 - protein, 475 aa, Triticum aestivum
  peptide (1)..(475): Ceres Seq. ID no. 12625389
AQGPSTEQHSGTQHASRSKAPVPRRFLRTQVTCHLLPSSGKLATARSDGMAMSRAAAAVGRRRCGPRLPAARSMASWFGHVEPAAKDPILGVTEAFLADPSPDKVNVGVGAYRDDDGKPVVLECVREAERRIAGSTNMEYLPMGGSVKMIEESLKLAYGEDSEFIKDKRIAAVQALSGTGACRLFADFQKRFLPDSQIYIPTPTWSNHHNIWRDAQVPQRTFAYYHPESRGLDFAGLMDDIKNAPEGSFFLLHACAHNPTGVDPSEEQWREISQQFKVKNHFPFFDMAYQGFASGDPERDAKAIRIFLEDGHQIGCAQSYAKNMGLYGQRAGCLSILCDDEIQAVDVKSQLQQIARPMYSNPPLHGALIVSTILGDPALKSLWLKEVKGMADRIIGMRKALKESLEKLGSPLSWEHITNQIGMFCYSGMTPEQVDRLTNEFHIYMTRNGRISMAGVTTGNVAYLANAIHEVTKPI

SEQ ID NO: 63301 - protein, 426 aa, Triticum aestivum
  peptide (1)..(426): Ceres Seq. ID no. 12625390
MAMSRAAAAVGRRRCGPRLPAARSMASWFGHVEPAAKDPILGVTEAFLADPSPDKVNVGVGAYRDDDGKPVVLECVREAERRIAGSTNMEYLPMGGSVKMIEESLKLAYGEDSEFIKDKRIAAVQALSGTGACRLFADFQKRFLPDSQIYIPTPTWSNHHNIWRDAQVPQRTFAYYHPESRGLDFAGLMDDIKNAPEGSFFLLHACAHNPTGVDPSEEQWREISQQFKVKNHFPFFDMAYQGFASGDPERDAKAIRIFLEDGHQIGCAQSYAKNMGLYGQRAGCLSILCDDEIQAVDVKSQLQQIARPMYSNPPLHGALIVSTILGDPALKSLWLKEVKGMADRIIGMRKALKESLEKLGSPLSWEHITNQIGMFCYSGMTPEQVDRLTNEFHIYMTRNGRISMAGVTTGNVAYLANAIHEVTKPI

SEQ ID NO: 63302 - protein, 424 aa, Triticum aestivum
  peptide (1)..(424): Ceres Seq. ID no. 12625391
MSRAAAAVGRRRCGPRLPAARSMASWFGHVEPAAKDPILGVTEAFLADPSPDKVNVGVGAYRDDDGKPVVLECVREAERRIAGSTNMEYLPMGGSVKMIEESLKLAYGEDSEFIKDKRIAAVQALSGTGACRLFADFQKRFLPDSQIYIPTPTWSNHHNIWRDAQVPQRTFAYYHPESRGLDFAGLMDDIKNAPEGSFFLLHACAHNPTGVDPSEEQWREISQQFKVKNHFPFFDMAYQGFASGDPERDAKAIRIFLEDGHQIGCAQSYAKNMGLYGQRAGCLSILCDDEIQAVDVKSQLQQIARPMYSNPPLHGALIVSTILGDPALKSLWLKEVKGMADRIIGMRKALKESLEKLGSPLSWEHITNQIGMFCYSGMTPEQVDRLTNEFHIYMTRNGRISMAGVTTGNVAYLANAIHEVTKPI

SEQ ID NO: 63303 - DNA, 1547 bp, Triticum aestivum
  misc_feature (1)..(1547): Ceres Seq. ID no. 13662513
ccgtggtcactccccrtcccatttccccmatcccccatccccgctagggttttccaccatggcgtcggcgtcgcgcgcgctcctcctctccagggcctcgcccctccacgccgccgcctcccgcttcctccgcccggtcgcggccgcggggagcctcctcccggcggcgctggtcccgtcchccgccgcggcgccctgggcggcggcgaggcgattcgcgacgcagcccgcgaactcgtcgctgcgggactcgtccccgaactggagcaaccgcccgcccaaggagacgatcctcctcgacggctgcgacttcgagcactggctcgtcgtcatggagccgcccccaggcgacggcgctaaccccgatgtcacccgcgacgagatcatcgacgggtacatcaagaccctcgcccaggtcgtcggaagtgaagacgaagcaaggatgaagatctactctgtgtcaactaggcattattttgcttttggtgccctagtatctgaggaactctcctacaaactcaaagagttgcctaaagtccgttgggttcttcctgattcatacctggatgtcagaaataaggactatggaggagaaccatttatagatggacaagctgttccttacgaccccaaataccatgaggagtgggtgagaaacaatgcccgtgccaatgaaagatcccggcgcaatgacaggcctcgcaactttgacaggtcgaggaactttgaaaggagaagggagaacacacaggcctaccagagtgggcctccaaaccaaatgccaccccatgatgctgctcctccaagtcgcggtgcacagggcccgccgccgccttcaggtgctccaccaaattaccagccccatgcaccaaacccacaggcaggctatgctgcaggaggtggaccaaactatccaaatgcaccaccaccccctggataccgaggtgccccagcccctggctaccaagctggyaaccaaggttaccagggtaatcctggtggcaacatgcacaatggaccmggcccagcctaccatagcaacaaccctggataccagggtggagygccaggaggcaacccgcygccrcctttygcaggtggcaaccagcctcctccctaccawggcggtggtcctagctatggtggtggtgcaccagactaccagggccaaccaggtggtaacccaggctaccaaggtggcggtaactacarcaacgccgcccctcctccctaygagggcagggacgggccagggaggaactaccagtagagaasactggtagaagagcgcygtktaggaagttagtamgagctatgctcgagtcgccctatgttgttctcgtggacttttatgcatatattctctatccatmatggtgttttgagaactagaactactgcaagcttaggtaagaagtgctttgtttttttctctttgtcgaaataaatacaatgctgactatcgtatggarccagagctttgttatttgttgccgtattgtaatagcaacatgttctgtgtgttctattgaatcacttttatattc

SEQ ID NO: 63304 - protein, 422 aa, Triticum aestivum
  peptide (1)..(422): Ceres Seq. ID no. 15220175
  misc_feature (5)..(5): Xaa is any aa, unknown or other
  misc_feature (10)..(10): Xaa is any aa, unknown or other
  misc_feature (61)..(61): Xaa is any aa, unknown or other
  misc_feature (324)..(324): Xaa is any aa, unknown or other
  misc_feature (340)..(340): Xaa is any aa, unknown or other
  misc_feature (355)..(355): Xaa is any aa, unknown or other
  misc_feature (361)..(361): Xaa is any aa, unknown or other
  misc_feature (362)..(362): Xaa is any aa, unknown or other
  misc_feature (364)..(364): Xaa is any aa, unknown or other
  misc_feature (374)..(374): Xaa is any aa, unknown or other
  misc_feature (404)..(404): Xaa is any aa, unknown or other
  misc_feature (411)..(411): Xaa is any aa, unknown or other
RGHSXSHFPXPPSPLGFSTMASASRALLLSRASPLHAAASRFLRPVAAAGSLLPAALVPSXAAAPWAAARRFATQPANSSLRDSSPNWSNRPPKETILLDGCDFEHWLVVMEPPPGDGANPDVTRDEIIDGYIKTLAQVVGSEDEARMKIYSVSTRHYFAFGALVSEELSYKLKELPKVRWVLPDSYLDVRNKDYGGEPFIDGQAVPYDPKYHEEWVRNNARANERSRRNDRPRNFDRSRNFERRRENTQAYQSGPPNQMPPHDAAPPSRGAQGPPPPSGAPPNYQPHAPNPQAGYAAGGGPNYPNAPPPPGYRGAPAPGYQAXNQGYQGNPGGNMHNGXGPAYHSNNPGYQGGXPGGNPXXPXAGGNQPPPYXGGGPSYGGGAPDYQGQPGGNPGYQGGGNYXNAAPPPXEGRDGPGRNYQ

SEQ ID NO: 63305 - protein, 403 aa, Triticum aestivum
  peptide (1)..(403): Ceres Seq. ID no. 15220176
  misc_feature (42)..(42): Xaa is any aa, unknown or other
  misc_feature (305)..(305): Xaa is any aa, unknown or other
  misc_feature (321)..(321): Xaa is any aa, unknown or other
  misc_feature (336)..(336): Xaa is any aa, unknown or other
  misc_feature (342)..(342): Xaa is any aa, unknown or other
  misc_feature (343)..(343): Xaa is any aa, unknown or other
  misc_feature (345)..(345): Xaa is any aa, unknown or other
  misc_feature (355)..(355): Xaa is any aa, unknown or other
  misc_feature (385)..(385): Xaa is any aa, unknown or other
  misc_feature (392)..(392): Xaa is any aa, unknown or other
MASASRALLLSRASPLHAAASRFLRPVAAAGSLLPAALVPSXAAAPWAAARRFATQPANSSLRDSSPNWSNRPPKETILLDGCDFEHWLVVMEPPPGDGANPDVTRDEIIDGYIKTLAQVVGSEDEARMKIYSVSTRHYFAFGALVSEELSYKLKELPKVRWVLPDSYLDVRNKDYGGEPFIDGQAVPYDPKYHEEWVRNNARANERSRRNDRPRNFDRSRNFERRRENTQAYQSGPPNQMPPHDAAPPSRGAQGPPPPSGAPPNYQPHAPNPQAGYAAGGGPNYPNAPPPPGYRGAPAPGYQAXNQGYQGNPGGNMHNGXGPAYHSNNPGYQGGXPGGNPXXPXAGGNQPPPYXGGGPSYGGGAPDYQGQPGGNPGYQGGGNYXNAAPPPXEGRDGPGRNYQ

SEQ ID NO: 63306 - protein, 312 aa, Triticum aestivum
  peptide (1)..(312): Ceres Seq. ID no. 15220177
  misc_feature (214)..(214): Xaa is any aa, unknown or other
  misc_feature (230)..(230): Xaa is any aa, unknown or other
  misc_feature (245)..(245): Xaa is any aa, unknown or other
  misc_feature (251)..(251): Xaa is any aa, unknown or other
  misc_feature (252)..(252): Xaa is any aa, unknown or other
  misc_feature (254)..(254): Xaa is any aa, unknown or other
  misc_feature (264)..(264): Xaa is any aa, unknown or other
  misc_feature (294)..(294): Xaa is any aa, unknown or other
  misc_feature (301)..(301): Xaa is any aa, unknown or other
MEPPPGDGANPDVTRDEIIDGYIKTLAQVVGSEDEARMKIYSVSTRHYFAFGALVSEELSYKLKELPKVRWVLPDSYLDVRNKDYGGEPFIDGQAVPYDPKYHEEWVRNNARANERSRRNDRPRNFDRSRNFERRRENTQAYQSGPPNQMPPHDAAPPSRGAQGPPPPSGAPPNYQPHAPNPQAGYAAGGGPNYPNAPPPPGYRGAPAPGYQAXNQGYQGNPGGNMHNGXGPAYHSNNPGYQGGXPGGNPXXPXAGGNQPPPYXGGGPSYGGGAPDYQGQPGGNPGYQGGGNYXNAAPPPXEGRDGPGRNYQ

SEQ ID NO: 63307 - DNA, 1500 bp, Triticum aestivum
  misc_feature (1)..(1500): Ceres Seq. ID no. 13655302
acaggtagacgcttgccccgctaccattccaagcacatattcccgcgggcatcccgccacctaaccgcctaccttgcaccgcaattcatcccccattcagcaaacccaaaatagtggagcagccccgattggaatcgtgttatacagatacggatacgggcgtagccggatacagctagctagctggaggcgccatggtgggggtgaggatggtgtgcaatgggaaggctgtggcggcgctgactgcggtgtttgtcgtctgcgccggggtggtctcgccggcggcggcgagcgggcgcgaggaggcccaccaggtgccggcggtctacgtgttcggcgactccacggtggacgtgggcaacaaccagtacctgccggggaacgccgcgctgcagctcccctacggcatcgacttcccgcagtcgcggcccaccgggaggttcagcaacgggttcaacgtcgccgactccatctcgaggctgttgggcttcaagaggagcccgccggcgtacctgtcgctgacgccggagacgagccgccagatcgtcagaggctaccgtggcgtcaactacgcctccggtggatccggcattctcgacaccaccgggaacaccctcacgttgactaagcaggtggagtacttcgcggccaccaagtcaaagatgacggagaagagccctggcatcgacgcgctgctgtccaagtcgctcttcctcatcagcgacggcggcaacgactttttcgccttcctccggcagaacctgacggccagcgacgcgccgtccttctacgcggacatgctgaccaaactacacgaagcacgtgcagacgctgtaccagctgggagcgcggcggttcgggatcgtcgacgtgccgcccatcggctgcgtgccggcggtgcgggtcacctccccggacggcgagaccgcgtgcgtcgaggccgccaacgccctcgccagggggttcaacgacgcgctggggaaggcgatggccaggctcgccgccgcgctgcccgggatgaggtactccgtggggagctcctacaacctgataacgttcatcacggtgcacccgcaggccgccgggttcaaggacgtggccagcgcgtgctgcggcggcgggaggctcggcgcgcagacatggtgcggggcgcccaacgccacctactgcgccgaccgcaacgacaatgtctactgggacgaggtgcacggcacccaggccacctccagcaagggcgccaaggccatcttcgccgcccccgtgaagctcggcttcgccgcgcccatcaacttcaagcagctggtttcttcttgatcgccggtcgaggcattgcaccggacggacacgatctgttgtcagctcttaatttagttgcgagtgttcaccctttgattaagggaggggaaaagaatgggtagcacactttttgattcttttgtagatcggtgaagatgcaatagaatcatagagagggtgcagtgatgcatgcgattttatgtt

SEQ ID NO: 63308 - protein, 407 aa, Triticum aestivum
  peptide (1)..(407): Ceres Seq. ID no. 15219734
MVGVRMVCNGKAVAALTAVFVVCAGVVSPAAASGREEAHQVPAVYVFGDSTVDVGNNQYLPGNAALQLPYGIDFPQSRPTGRFSNGFNVADSISRLLGFKRSPPAYLSLTPETSRQIVRGYRGVNYASGGSGILDTTGNTLTLTKQVEYFAATKSKMTEKSPGIDALLSKSLFLISDGGNDFFAFLRQNLTASDAPSFYADMLTKLHEARADAVPAGSAAVRDRRRAAHRLRAGGAGHLPGRRDRVRRGRQRPRQGVQRRAGEGDGQARRRAARDEVLRGELLQPDNVHHGAPAGRRVQGRGQRVLRRREARRADMVRGAQRHLLRRPQRQCLLGRGARHPGHLQQGRQGHLRRPREARLRRAHQLQAAGFFLIAGRGIAPDGHDLLSALNLVASVHPLIKGGEKNG

SEQ ID NO: 63309 - protein, 402 aa, Triticum aestivum
  peptide (1)..(402): Ceres Seq. ID no. 15219735
MVCNGKAVAALTAVFVVCAGVVSPAAASGREEAHQVPAVYVFGDSTVDVGNNQYLPGNAALQLPYGIDFPQSRPTGRFSNGFNVADSISRLLGFKRSPPAYLSLTPETSRQIVRGYRGVNYASGGSGILDTTGNTLTLTKQVEYFAATKSKMTEKSPGIDALLSKSLFLISDGGNDFFAFLRQNLTASDAPSFYADMLTKLHEARADAVPAGSAAVRDRRRAAHRLRAGGAGHLPGRRDRVRRGRQRPRQGVQRRAGEGDGQARRRAARDEVLRGELLQPDNVHHGAPAGRRVQGRGQRVLRRREARRADMVRGAQRHLLRRPQRQCLLGRGARHPGHLQQGRQGHLRRPREARLRRAHQLQAAGFFLIAGRGIAPDGHDLLSALNLVASVHPLIKGGEKNG

SEQ ID NO: 63310 - protein, 251 aa, Triticum aestivum
  peptide (1)..(251): Ceres Seq. ID no. 15219736
MTEKSPGIDALLSKSLFLISDGGNDFFAFLRQNLTASDAPSFYADMLTKLHEARADAVPAGSAAVRDRRRAAHRLRAGGAGHLPGRRDRVRRGRQRPRQGVQRRAGEGDGQARRRAARDEVLRGELLQPDNVHHGAPAGRRVQGRGQRVLRRREARRADMVRGAQRHLLRRPQRQCLLGRGARHPGHLQQGRQGHLRRPREARLRRAHQLQAAGFFLIAGRGIAPDGHDLLSALNLVASVHPLIKGGEKNG

SEQ ID NO: 63311 - DNA, 1695 bp, Triticum aestivum
  misc_feature (1)..(1695): Ceres Seq. ID no. 13597146
accattaaccagtccacaggcaggcaccggtcgtgaggcagagagagaaccagagccagacatgcagcgcctcgcctcctcccggaggctcctccgggccgccctcgcccccggccgggcgcattccagcctctccgcggccgcggtcgccgccgcgccggagaatggcgccggcgcccccaagatgccgccgttcgcgtacacgccgccgccgtacgacgggccgcgggtggcggagatcgcccagaagcgcgcccagttcctcagcccctcgctcttccacttctacgaccgccctttgaacatagtcgatggaaagatgcagtacctgttcgatgaggatggccgccgctacctggacgctttcggtggcattgcgaccgtttgttgcgggcactgccatcctgatgtgattgaagccatagtcaaccaggcaaagaagatacagcactccacagttctgtatctgaaccatgcaattgccgactttgctgaggctctggcgtccaaaatgcctggtgatctgaaggttgttttcttcacaaattctggcacagaggcaaatgagcttgcactgatgatcgctcggctttacacgggttcccatgacattatttcacttaggaatggataccatgggaatgcagctgcaacaatgggtgccactgctcaatccaactggaaatttaatgttgtccagaccggagtgcaccatgctcttaatccagacccatacagaggcgctttcgggtcagacggagagaaatatgccagagatattcaggaaaccattgactatgggactacaggaagagttgcaggtttcatttcagaggccatacagggagttggtggaatagtggaattagcaccaggatacctgcctgcggcctatgatatggtaaggaaagctggtggcctgtgcatcgccgacgaagttcaggcgggggttgcgcgcactggaagccacttctggggattcgaagggcagggtgtcatccctgatatagtcactatggcaaagggcatagggaacggaataccgataggagcggtcgttaccacacctgagattgctaaggtgttaacccgcagaagctacttcaacaccttcggtggtaaccctgtcagcacagctgccggccacgctgttctcaaggtactggagaaggagaagctgcaggagaatgcgttcgttgttggctcctacctgaaggagaaacttaacgctctgaaagagaagcatgacattatcggcgacgttagggggaaaggcctccttctcggggttgagctggtgaccgatcgccagaagaaaactccggcgaaagctgagatcgcgcaggtcatgaaccacatgaaagatatgggcgtgctggtggggaagggcggtttcttcggcaatgtgttcagggtgacgcctccgttgtgcttctccaaggaggactccgactacatgatcgaggtgatggacattgcgctgtcgaagctgtgaagaggcactgctctcatcgataaataagagacgatctgcgaaacagcacctcgttgtctcgtgttctgtcttgcaaacccatgatgcgcacatgcgatctgcgcctcctgaacattagtatgatgtgctgagtaggagctctatgtgaccaataagttcttcgtaataagatattcagatgtgctatggcagcttttatg

SEQ ID NO: 63312 - protein, 497 aa, Triticum aestivum
  peptide (1)..(497): Ceres Seq. ID no. 13597147
PLTSPQAGTGREAEREPEPDMQRLASSRRLLRAALAPGRAHSSLSAAAVAAAPENGAGAPKMPPFAYTPPPYDGPRVAEIAQKRAQFLSPSLFHFYDRPLNIVDGKMQYLFDEDGRRYLDAFGGIATVCCGHCHPDVIEAIVNQAKKIQHSTVLYLNHAIADFAEALASKMPGDLKVVFFTNSGTEANELALMIARLYTGSHDIISLRNGYHGNAAATMGATAQSNWKFNVVQTGVHHALNPDPYRGAFGSDGEKYARDIQETIDYGTTGRVAGFISEAIQGVGGIVELAPGYLPAAYDMVRKAGGLCIADEVQAGVARTGSHFWGFEGQGVIPDIVTMAKGIGNGIPIGAVVTTPEIAKVLTRRSYFNTFGGNPVSTAAGHAVLKVLEKEKLQENAFVVGSYLKEKLNALKEKHDIIGDVRGKGLLLGVELVTDRQKKTPAKAEIAQVMNHMKDMGVLVGKGGFFGNVFRVTPPLCFSKEDSDYMIEVMDIALSKL

SEQ ID NO: 63313 - protein, 477 aa, Triticum aestivum
  peptide (1)..(477): Ceres Seq. ID no. 13597148
MQRLASSRRLLRAALAPGRAHSSLSAAAVAAAPENGAGAPKMPPFAYTPPPYDGPRVAEIAQKRAQFLSPSLFHFYDRPLNIVDGKMQYLFDEDGRRYLDAFGGIATVCCGHCHPDVIEAIVNQAKKIQHSTVLYLNHAIADFAEALASKMPGDLKVVFFTNSGTEANELALMIARLYTGSHDIISLRNGYHGNAAATMGATAQSNWKFNVVQTGVHHALNPDPYRGAFGSDGEKYARDIQETIDYGTTGRVAGFISEAIQGVGGIVELAPGYLPAAYDMVRKAGGLCIADEVQAGVARTGSHFWGFEGQGVIPDIVTMAKGIGNGIPIGAVVTTPEIAKVLTRRSYFNTFGGNPVSTAAGHAVLKVLEKEKLQENAFVVGSYLKEKLNALKEKHDIIGDVRGKGLLLGVELVTDRQKKTPAKAEIAQVMNHMKDMGVLVGKGGFFGNVFRVTPPLCFSKEDSDYMIEVMDIALSKL

SEQ ID NO: 63314 - protein, 436 aa, Triticum aestivum
  peptide (1)..(436): Ceres Seq. ID no. 13597149
MPPFAYTPPPYDGPRVAEIAQKRAQFLSPSLFHFYDRPLNIVDGKMQYLFDEDGRRYLDAFGGIATVCCGHCHPDVIEAIVNQAKKIQHSTVLYLNHAIADFAEALASKMPGDLKVVFFTNSGTEANELALMIARLYTGSHDIISLRNGYHGNAAATMGATAQSNWKFNVVQTGVHHALNPDPYRGAFGSDGEKYARDIQETIDYGTTGRVAGFISEAIQGVGGIVELAPGYLPAAYDMVRKAGGLCIADEVQAGVARTGSHFWGFEGQGVIPDIVTMAKGIGNGIPIGAVVTTPEIAKVLTRRSYFNTFGGNPVSTAAGHAVLKVLEKEKLQENAFVVGSYLKEKLNALKEKHDIIGDVRGKGLLLGVELVTDRQKKTPAKAEIAQVMNHMKDMGVLVGKGGFFGNVFRVTPPLCFSKEDSDYMIEVMDIALSKL

SEQ ID NO: 63315 - DNA, 1272 bp, Triticum aestivum
  misc_feature (1)..(1272): Ceres Seq. ID no. 12625392
agacacagaccagagtccacagcacagcagagcaccaccactactaccacccccagtggcaaccctgacaaggctctagcagcttagctgaagatggccgggctactctctgtcaaggccgtcgcgctcgccgccgtgcttgctgccgcgtatgcctcttgcgccgccgccgagcagccgggggcggcggacctcgacgcctccgccgtgtcttacagctccgcgtggcttccggccagagcgacctggtacggagcgcccaacggcgccgggcccgacgacaacggcggcgcgtgcggcttcaagcacgtgaaccagtaccccttctcctccatgacctcctgcggcaaccagcccctgttcaaggacggcaagggctgcggctcctgctaccagatacggtgcagcggcgacaaatcctgctccggcaaaatcgagacggtgatgatcacggacatgaactactacccggtggcgcagtaccacttcgacctgagcggcacggccttcggcgcgctggccaagccggggctcaacgagaagctgcgccactcgggcatcatcgacatccagttccggcgggtgccctgcaacttcccgggcctcaagatcaacttccacgtggtggacggctccaacgcggtgtacctggcggtgctgatcgagtacgaggacatggacggcgacgtgatccaggtggacatgaaggaggccaactccgggtcgtggacgccgatgcgcgagtcctggggctccatctggcggatggactccaaccatcgcctccaggggcccttctccatgcgcatcaccagcgactccggcaagaagctggtggccaacaacgtcatcccggccaactggaggcccaacaccgactaccgctccttcgtccagttcagctgatccgagtccgaccggcccatgggcggccacgtgcggctgcatcatgcgtgcatgcgctctggcggtctggcccctctgctggctacgtacaattaatcgctcggccgatcgaaatcatttgccttattttattttttgtatttgcttgggatcaaggagctcgagatgccgtctgtctggtgtcatatgtggggtcgtcgtcgtctagcgtcttgagcatgtgtgggaaatgcgggagggcatagtttgcatgtgctctcccgcccactgactctgtgtagagtaccatacatgagatgacactaccggtttgtaagcaaatccaagttattataaattatatacgtacagttttttctactactc

SEQ ID NO: 63316 - protein, 270 aa, Triticum aestivum
  peptide (1)..(270): Ceres Seq. ID no. 12625393
MAGLLSVKAVALAAVLAAAYASCAAAEQPGAADLDASAVSYSSAWLPARATWYGAPNGAGPDDNGGACGFKHVNQYPFSSMTSCGNQPLFKDGKGCGSCYQIRCSGDKSCSGKIETVMITDMNYYPVAQYHFDLSGTAFGALAKPGLNEKLRHSGIIDIQFRRVPCNFPGLKINFHVVDGSNAVYLAVLIEYEDMDGDVIQVDMKEANSGSWTPMRESWGSIWRMDSNHRLQGPFSMRITSDSGKKLVANNVIPANWRPNTDYRSFVQFS

SEQ ID NO: 63317 - protein, 190 aa, Triticum aestivum
  peptide (1)..(190): Ceres Seq. ID no. 12625394
MTSCGNQPLFKDGKGCGSCYQIRCSGDKSCSGKIETVMITDMNYYPVAQYHFDLSGTAFGALAKPGLNEKLRHSGIIDIQFRRVPCNFPGLKINFHVVDGSNAVYLAVLIEYEDMDGDVIQVDMKEANSGSWTPMRESWGSIWRMDSNHRLQGPFSMRITSDSGKKLVANNVIPANWRPNTDYRSFVQFS

SEQ ID NO: 63318 - protein, 153 aa, Triticum aestivum
  peptide (1)..(153): Ceres Seq. ID no. 12625395
MITDMNYYPVAQYHFDLSGTAFGALAKPGLNEKLRHSGIIDIQFRRVPCNFPGLKINFHVVDGSNAVYLAVLIEYEDMDGDVIQVDMKEANSGSWTPMRESWGSIWRMDSNHRLQGPFSMRITSDSGKKLVANNVIPANWRPNTDYRSFVQFS

SEQ ID NO: 63319 - DNA, 1184 bp, Triticum aestivum
  misc_feature (1)..(1184): Ceres Seq. ID no. 13596958
accaccaccacaccacacttgctcgtctccctctgcccctccccttcctcctatagcaatcaaaccaccagctccactcccccctccccttcctccgtcctcaccctccccctcctgctactccccagttcatgtcctgctgcttcccatgtcgccgcctctcgagctcgactacataggcctctcggccgccgccggcggccgcccggacgacgacctgaaaggcaccgagctccgcctcggacttcccggctgcgagtcgcccgaccgccgcccggtcgccgccaccaccacactggagctgctgcccgccaagggggccaagcgagggttttcggacgaggtcgtgccgcctgcgccgatttccgccgccgggaaaggcaaggaggcgtccggggatgagaaggacaagaaggtcgccgccccgccgcagcctgctgccaaggctcaggtggtgggatggccaccagtccgcagctaccgcaagaacacgatggcaaccaccaccaaccagctgaagagcagcaaggaggattctgacacgaagcaggggcaagagtttctgtatgtcaaggtcagcatggatgggtgcgccttacctgaggaaggttgacctcaagacatacaaganctataaggacatggttgtggcgctagggaaaatgttcattggcttcaggaccgggaaggatggtgcatctgagaacagaaaggatggtgaatatgtgatgacttacgaagacaaggatggagactggatgctggttggtgacgtcccatgggagatgttcaccgaggcttgccggaggatcagggtcatgaaaagttcagatgtagttgggcttggagttacaagggcaggggttaagtccaagaataagaactaaaacggtcgctgcccacggtttgaagacgaggtcgcacatgccgtctgtactactgcatggttttcctatcccacaagtaaaatcacccgttactctaccgtttaagatttgcgacatctcctagagacttatgctctatattttgttgtgcccacgttgttgtacgcgtgttatttccatccgtgtaaatggttggtaagcagtgcgagagctactgctgtgtttgatgactcctatgtattttgccactcttgtcctgaaccggtcgttcgtcgtaaatgtgaaggttgcaagcct

SEQ ID NO: 63320 - protein, 203 aa, Triticum aestivum
  peptide (1)..(203): Ceres Seq. ID no. 13596959
PPPHHTCSSPSAPPLPPIAIKPPAPLPPPLPPSSPSPSCYSPVHVLLLPMSPPLELDYIGLSAAAGGRPDDDLKGTELRLGLPGCESPDRRPVAATTTLELLPAKGAKRGFSDEVVPPAPISAAGKGKEASGDEKDKKVAAPPQPAAKAQVVGWPPVRSYRKNTMATTTNQLKSSKEDSDTKQGQEFLYVKVSMDGCALPEEG

SEQ ID NO: 63321 - protein, 154 aa, Triticum aestivum
  peptide (1)..(154): Ceres Seq. ID no. 13596960
MSPPLELDYIGLSAAAGGRPDDDLKGTELRLGLPGCESPDRRPVAATTTLELLPAKGAKRGFSDEVVPPAPISAAGKGKEASGDEKDKKVAAPPQPAAKAQVVGWPPVRSYRKNTMATTTNQLKSSKEDSDTKQGQEFLYVKVSMDGCALPEEG

SEQ ID NO: 63322 - protein, 133 aa, Triticum aestivum
  peptide (1)..(133): Ceres Seq. ID no. 13596961
TTTTPHLLVSLCPSPSSYSNQTTSSTPPSPSSVLTLPLLLLPSSCPAASHVAASRARLHRPLGRRRRPPGRRPERHRAPPRTSRLRVARPPPGRRHHHTGAAARQGGQARVFGRGRAACADFRRRERQGGVRG

SEQ ID NO: 63323 - DNA, 1603 bp, Triticum aestivum
  misc_feature (1)..(1603): Ceres Seq. ID no. 13596962
gtcgtataactcggggtccaatttgcaaagagacagacgcccgttcttttactgcgagacctccgcgctcgtgggcaacggcggcggcgatggcggcatcggcgagcacgtccggcgagtggctgaagggcgccctgcaggaactgaggggccgcacggggagcgccctggagctcgacgacggcctcatctccggcctcgtctccttctgcgagctcgcgcctccgcccgacgcggccgactacctcgcgaatattgttggagcagaagctgcgcaggacctcattcaggagtacttgcagaggaggggctacattgacccctcaaaaggagctggaagctcgcagtcgtctaatcttcagccttatttgaagccatctgctgatgcagcaactgcccaaacaaagaaacagacacgtacacaaaaagatccagcatcttcttctagtcagagttccaagagtcaatcagatgctgctgacacccatgctgcctccaagagaggtccaaaaaagaagggaggaaaggccatctcccttgctgaggcagcaaagggctctattgtcttcaagcaggggaaaccttgttcatgccaagcacggctgcacaatcttgttagcaactgtttatcatgtggaaaaattgtgtgtgaacaagagggcgagggaccatgtagtttctgtggctcacttgtcttgatggaaggtagtacatatgcgggtttaagtgatgttggagttcctctttcggacacagaagttgcagctgaagcttatgcaaagaggcttgttgactatgacagaaactctgcggcaagaactaaagtttatgatgaccaaagtgactattttgaaatggaaggaaatagctggctctcatctaaggaaaagacaaacctaaagaaggtgcacgacgaagctcaggatgcagctgaaaaacaaaaggggaaagtgacggtcacatttgatttggtgggccgtaaggtaattttgaacaaggacgaagccgcagagtcggaatctgaccaagggatcatgagaccactagaacagaagcatcaggttcaacgcatacagcccagcccctcgatcagagagcaaccagtcttcgttgaaacaggacctgtgaagccgagaaccgacagggtaaaacagagcaagaaactcggaaagaatggcttgtgcctggaggtaaccggaagggtgcagcatgatgacaaggatccccagagctttcttggtggcaagatgaagaagggtgatcatctcgcgtacagttcctccggtgaagttcgtgaaggtgatgactacgagtgctcccttgattttgattgagcgttactgcaaattttgatgcgctcgagtgccttcacattgtacttgcttatcccatttcatacgggttggattgtggtctggtcaagtttccagctagaggtattttggaaaggtttgcttcgggatcatatcattcaactaaagttgtcaggccgggtaggctttgagggtcttgaacatattaagtaaaagattaagcacggagcttaaaaaattatgatcctgaaaaaaaaaaaaaaaaaagcttatcgataccgtcgacctcg

SEQ ID NO: 63324 - protein, 443 aa, Triticum aestivum
  peptide (1)..(443): Ceres Seq. ID no. 13596963
RITRGPICKETDARSFTARPPRSWATAAAMAASASTSGEWLKGALQELRGRTGSALELDDGLISGLVSFCELAPPPDAADYLANIVGAEAAQDLIQEYLQRRGYIDPSKGAGSSQSSNLQPYLKPSADAATAQTKKQTRTQKDPASSSSQSSKSQSDAADTHAASKRGPKKKGGKAISLAEAAKGSIVFKQGKPCSCQARLHNLVSNCLSCGKIVCEQEGEGPCSFCGSLVLMEGSTYAGLSDVGVPLSDTEVAAEAYAKRLVDYDRNSAARTKVYDDQSDYFEMEGNSWLSSKEKTNLKKVHDEAQDAAEKQKGKVTVTFDLVGRKVILNKDEAAESESDQGIMRPLEQKHQVQRIQPSPSIREQPVFVETGPVKPRTDRVKQSKKLGKNGLCLEVTGRVQHDDKDPQSFLGGKMKKGDHLAYSSSGEVREGDDYECSLDFD

SEQ ID NO: 63325 - protein, 414 aa, Triticum aestivum
  peptide (1)..(414): Ceres Seq. ID no. 13596964
MAASASTSGEWLKGALQELRGRTGSALELDDGLISGLVSFCELAPPPDAADYLANIVGAEAAQDLIQEYLQRRGYIDPSKGAGSSQSSNLQPYLKPSADAATAQTKKQTRTQKDPASSSSQSSKSQSDAADTHAASKRGPKKKGGKAISLAEAAKGSIVFKQGKPCSCQARLHNLVSNCLSCGKIVCEQEGEGPCSFCGSLVLMEGSTYAGLSDVGVPLSDTEVAAEAYAKRLVDYDRNSAARTKVYDDQSDYFEMEGNSWLSSKEKTNLKKVHDEAQDAAEKQKGKVTVTFDLVGRKVILNKDEAAESESDQGIMRPLEQKHQVQRIQPSPSIREQPVFVETGPVKPRTDRVKQSKKLGKNGLCLEVTGRVQHDDKDPQSFLGGKMKKGDHLAYSSSGEVREGDDYECSLDFD

SEQ ID NO: 63326 - DNA, 1774 bp, Triticum aestivum
  misc_feature (1)..(1774): Ceres Seq. ID no. 12625335
aacctctcgcataggcataggcagagcagacccacccgctgcagacctggaccaccggtcacgaggccacgcgtcagggaaacaccctctccctctccggcagaaaacggaggtggacgtcgtccacctttgccggccccgttcttaatgccgcgcggtaatcgccgcgagcttctactacagtcaccggaggtccggaggccggagcgcactgtgaggcgtcacatgggatgggcttgtacgtacgtacgctagctggcactccacatttattacggcagtcggcaggttgcccatcccctcccatcccctcccgtcgcggccgccgtcccttcccttctcgcctccaggtccaggtcccggcccgctttaaatccgcccctggcctcccttccggcctccctccctccctcgctcgccgctgcttagtggagtagtataatcagtacagataattattggcagccagatattttcgtccgctcagttcagttcaccacccgcggtggccgccagtgcccggatcgccgatcgacagatggacgcggccatatccgccgcccacgaagcgccgcccgctgtcgtcctcgtctccgccggcgccagccactccgtcgccctcctcgcgggcaatgtgctgtgcacgtggggcaggggagaggacgggcagctgggccacggggacgccgaggaccgcctcgtgccgacggtgatcagcggcttcgacgcgccggggatcacgtccgtcatctgcggggcggaccacaccaccgcctactccgaggacgagcaccaggtctacagctggggttggggggatttcgggaggctggggcacggcaactccaccgacgtgttcacgccccagccggtcaaggcgctgcaggggataaagatcaagcagctcgcctgtggggatagccactgtctggccgtcaccatggccggtgaagtgctcagctgggggcgtaaccaaaatggccagcttggtcttggaactactgaagattcgctgctcccacaaacgattcaagcttttgagggtatttctgtgaacatgattgctgctggtgccgaacatactgctgcagtaactgaagatggcgaaatctatggatggggctggggtcggtacggaaacttgggtcttggtgatcggaatgaccgatttgttcctgaaaaagtatcttcggtgtccctggcgccttcacccccacctgcagcaatcagcatgtaccaggcttcattactcaggccgaggagctcaaagccaagggtgtagatgagatcctgcttgtcagcgttaatgacccctttgtcatgaaagcatgggcgaagacatacccagacaacaagcatgtgaagttccttgctgatggagcggcagcatacacaaaagcacttggtcttgagcttgatcttacggagaaaggattgggtcttcgttcgaggcggtttgctctccttgctgacgacctcaaggtcaccgtcgcaaacgtcgaggaaggtggccagttcacaatctctggtgccgaggagatcctcaaggcactgtaggagcttcagcgcttcggaatcgcagcgatcacccaaaccttgtgtcatatcgatgtagtttgaacttgtctgccgaactactagtgggaataaattgtcaatgtgcatttcttcatgtactttatgtgcggtgcaagtgacttcagagttttccggtcaaattgttggttgtgttgcaaacattctgagattgttcaaggaaaatggtgtgggtggt

SEQ ID NO: 63327 - protein, 247 aa, Triticum aestivum
  peptide (1)..(247): Ceres Seq. ID no. 12625336
MDAAISAAHEAPPAVVLVSAGASHSVALLAGNVLCTWGRGEDGQLGHGDAEDRLVPTVISGFDAPGITSVICGADHTTAYSEDEHQVYSWGWGDFGRLGHGNSTDVFTPQPVKALQGIKIKQLACGDSHCLAVTMAGEVLSWGRNQNGQLGLGTTEDSLLPQTIQAFEGISVNMIAAGAEHTAAVTEDGEIYGWGWGRYGNLGLGDRNDRFVPEKVSSVSLAPSPPPAAISMYQASLLRPRSSKPRV

SEQ ID NO: 63328 - DNA, 462 bp, Triticum aestivum
  misc_feature (1)..(462): Ceres Seq. ID no. 13655305
gcactcccgcctctcccaaatcctagggtttctcgatccacccctccctcacaccccgccgccgccgccgccgccgtcgccgtccgccgcactcccgagggtttctcgatccacccccgcccccttcgcgccccgccgccgccggcccccgcccgcccgcgaagatgttggagctgaggctggtgcaggggagcctgctgaagaaggtgctggaggcgatcaaggagctggtgacggacgccaacttcgactgctccgggacgggcttctcgctgcaggccatggactcctcccacgtcgcgctcgtcgccctgctcctccgctccgagggattcgagcactaccgctgcgaccgcaacctctccatgggcatgaacctcggcaacatggccaagatgctccgctgcgcgggcaacgacgacatcatcaccatcaaggccgacgacggctccgacaccgtca

SEQ ID NO: 63329 - protein, 153 aa, Triticum aestivum
  peptide (1)..(153): Ceres Seq. ID no. 13655306
HSRLSQILGFLDPPLPHTPPPPPPPSPSAALPRVSRSTPAPFAPRRRRPPPAREDVGAEAGAGEPAEEGAGGDQGAGDGRQLRLLRDGLLAAGHGLLPRRARRPAPPLRGIRALPLRPQPLHGHEPRQHGQDAPLRGQRRHHHHQGRRRLRHR

SEQ ID NO: 63330 - protein, 99 aa, Triticum aestivum
  peptide (1)..(99): Ceres Seq. ID no. 13655307
MLELRLVQGSLLKKVLEAIKELVTDANFDCSGTGFSLQAMDSSHVALVALLLRSEGFEHYRCDRNLSMGMNLGNMAKMLRCAGNDDIITIKADDGSDTV

SEQ ID NO: 63331 - DNA, 1146 bp, Triticum aestivum
  misc_feature (1)..(1146): Ceres Seq. ID no. 12616093
atcgcctcgtcatccgcagctccactttccagtccgcagtgaccgccgccgccgccacctccacccgctcctcacctaccccggcggcgaccccccaggtacaccccgaatggcgacggcggtcacggcgtcggccaccgcggcgacccgcttcacgcgcctggcgggcgtcgccctccggcgcagcagctgccgcccccgcaccgcggtgcgcttccagcgcccggggctcaccaccaccgcgctcctcaggcccaccgagctcaagcccaaggaccagggccagcccgagacgctcgactaccgcgtcttcctcgtcgacggcgccgaccgcaaggtgtccccgtggcacgacgtgccgctccgcgccggggacggggcgttccacttcatcgtggagatccccaaggagagcagcgccaagatggaggtcgccaccgacgaggcctacacgcccatcaagcaggacaccaagaagggcaaccttcgttactacccgtacaacatcaactggaactacgggttacttccccagacatgggaggacccgacagctgcaaatgctgatgttgaaggagcacttggagacaatgatcctgttgatgttgtcgagattggtgaaagacgggccaatattggggatgttcttagggtgaaaccattggcagctttagcaatgatcgacgagggagagcttgactggaaaattgtggccatctctctggatgatcccaaagcatctcttgtgaatgatgtagatgatgtcgaggagcattttccgggaacattgactgcaatcagagactggttcagagactacaagataccagacggaaagcccgccaacagattcggcctcggcaacaagcccacaagcaaggaatatgccctgaaggtgatagaagaaaccaacgagtcatgggagaaattggtgaagaggaaaatcccggcgggagagctctcgctagcctagccttttacaggcccatgagaagccaacaacacattctttcagtgacatactactccctcctaagcgtgctgctctttcgtgacgtgtacctacgaacaagcttcttcatctgcagaacattccgtgtgcctgttaaaacaggaataaaaatgaataacctggttgtggagcgg

SEQ ID NO: 63332 - protein, 323 aa, Triticum aestivum
  peptide (1)..(323): Ceres Seq. ID no. 12616094
SPRHPQLHFPVRSDRRRRHLHPLLTYPGGDPPGTPRMATAVTASATAATRFTRLAGVALRRSSCRPRTAVRFQRPGLTTTALLRPTELKPKDQGQPETLDYRVFLVDGADRKVSPWHDVPLRAGDGAFHFIVEIPKESSAKMEVATDEAYTPIKQDTKKGNLRYYPYNINWNYGLLPQTWEDPTAANADVEGALGDNDPVDVVEIGERRANIGDVLRVKPLAALAMIDEGELDWKIVAISLDDPKASLVNDVDDVEEHFPGTLTAIRDWFRDYKIPDGKPANRFGLGNKPTSKEYALKVIEETNESWEKLVKRKIPAGELSLA

SEQ ID NO: 63333 - protein, 287 aa, Triticum aestivum
  peptide (1)..(287): Ceres Seq. ID no. 12616095
MATAVTASATAATRFTRLAGVALRRSSCRPRTAVRFQRPGLTTTALLRPTELKPKDQGQPETLDYRVFLVDGADRKVSPWHDVPLRAGDGAFHFIVEIPKESSAKMEVATDEAYTPIKQDTKKGNLRYYPYNINWNYGLLPQTWEDPTAANADVEGALGDNDPVDVVEIGERRANIGDVLRVKPLAALAMIDEGELDWKIVAISLDDPKASLVNDVDDVEEHFPGTLTAIRDWFRDYKIPDGKPANRFGLGNKPTSKEYALKVIEETNESWEKLVKRKIPAGELSLA

SEQ ID NO: 63334 - protein, 217 aa, Triticum aestivum
  peptide (1)..(217): Ceres Seq. ID no. 12616096
RLVIRSSTFQSAVTAAAATSTRSSPTPAATPQVHPEWRRRSRRRPPRRPASRAWRASPSGAAAAAPAPRCASSARGSPPPRSSGPPSSSPRTRASPRRSTTASSSSTAPTARCPRGTTCRSAPGTGRSTSSWRSPRRAAPRWRSPPTRPTRPSSRTPRRATFVTTRTTSTGTTGYFPRHGRTRQLQMLMLKEHLETMILLMLSRLVKDGPILGMFLG

SEQ ID NO: 63335 - DNA, 1230 bp, Triticum aestivum
  misc_feature (1)..(1230): Ceres Seq. ID no. 13655519
aggttttactagggtttttgctagtttgcgccgtcgatcgccgccgacccccgccacccgccgacgcatccctccttcccggcacagcgtacgggccatgagagacctccacctcccgctgaaccagacccagagggtccgcctcgaggccgcgctccacgagctccagacccttgcccccgcggccgcgtccgccgccgccgtcaccgtcgcggacaacatccccgtcaaccacgaggacaacatcctcaaagggcatggtacgacggatcaggatggggaggtggtggcgacgctgtgcggcgtggtggagcgggtcaacaagctcgtctacgtgaggacgctccgggctaggtataagccagaggttggtgatatcatagttggccgtgtcatcgagattgctccaaagcgctggcggttggagataaactttagccaagatgctgttttaatgctttcttcaatgaatttgcctgatggaattcagagaagaagaactgcggttgatgagcttaatatgcggagtatatttgaagaaaatgatgtcgtctgcgctgaagttcgtggtttccaacatgatggatctcttcatctacaagcaaggagtcaaaaatatggaaagcttcagagaggtcaattgctcacggtgcctgcgtatctggtaaaacgccggaagctgcatttccatcatctagagcagtatgacgtcgacctgatccttggctgcaacggtttcatctgggtcggtgagcacgtcgtggtgcgtgaaattgctgatttgaaggaagacgaacagaagctgagcgccgaagcggagacttttaccccaatagaaacaaggagacacatttgccgtcttgccaatgctgcacgcttgctttcagccctaggattcactctgactgttgagctgataattcagactgcggaagcgagcgtatcatcaaatgtcgagataaacgacatgctcggggctgaattctatgtccagacggcggagggagaggctaagcgtcgaggtgacctcctgggaaagaagaggtaatcatcttggccctgcctgcctggtttgctgtaaactgaaaatgctgacatgtacgggatatgtaaaaggaggtaatgccacccggtgcccttgtagcatacgacgattttgagattttggagcttgctccactgtagtgtgcattcgttttaagatggtattaagatatctgttattctgtc

SEQ ID NO: 63336 - protein, 348 aa, Triticum aestivum
  peptide (1)..(348): Ceres Seq. ID no. 13655520
GFTRVFASLRRRSPPTPATRRRIPPSRHSVRAMRDLHLPLNQTQRVRLEAALHELQTLAPAAASAAAVTVADNIPVNHEDNILKGHGTTDQDGEVVATLCGVVERVNKLVYVRTLRARYKPEVGDIIVGRVIEIAPKRWRLEINFSQDAVLMLSSMNLPDGIQRRRTAVDELNMRSIFEENDVVCAEVRGFQHDGSLHLQARSQKYGKLQRGQLLTVPAYLVKRRKLHFHHLEQYDVDLILGCNGFIWVGEHVVVREIADLKEDEQKLSAEAETFTPIETRRHICRLANAARLLSALGFTLTVELIIQTAEASVSSNVEINDMLGAEFYVQTAEGEAKRRGDLLGKKR

SEQ ID NO: 63337 - protein, 316 aa, Triticum aestivum
  peptide (1)..(316): Ceres Seq. ID no. 13655521
MRDLHLPLNQTQRVRLEAALHELQTLAPAAASAAAVTVADNIPVNHEDNILKGHGTTDQDGEVVATLCGVVERVNKLVYVRTLRARYKPEVGDIIVGRVIEIAPKRWRLEINFSQDAVLMLSSMNLPDGIQRRRTAVDELNMRSIFEENDVVCAEVRGFQHDGSLHLQARSQKYGKLQRGQLLTVPAYLVKRRKLHFHHLEQYDVDLILGCNGFIWVGEHVVVREIADLKEDEQKLSAEAETFTPIETRRHICRLANAARLLSALGFTLTVELIIQTAEASVSSNVEINDMLGAEFYVQTAEGEAKRRGDLLGKKR

SEQ ID NO: 63338 - protein, 197 aa, Triticum aestivum
  peptide (1)..(197): Ceres Seq. ID no. 13655522
MLSSMNLPDGIQRRRTAVDELNMRSIFEENDVVCAEVRGFQHDGSLHLQARSQKYGKLQRGQLLTVPAYLVKRRKLHFHHLEQYDVDLILGCNGFIWVGEHVVVREIADLKEDEQKLSAEAETFTPIETRRHICRLANAARLLSALGFTLTVELIIQTAEASVSSNVEINDMLGAEFYVQTAEGEAKRRGDLLGKKR

SEQ ID NO: 63339 - DNA, 2174 bp, Triticum aestivum
  misc_feature (1)..(2174): Ceres Seq. ID no. 12616176
aaaaacccctaaacccccaaaaaatggcggcgccgccggcacacctccgccgcctcctcctgccgcacctccgccggaaccgcctcttctccgcgctgaccgacaccccctcgcccccgccgcccgccccgacctcagacgccatcctctactcgctccgcggcctcgccaaggacccgccgcaggcgctctccctcttccggcgcgcggcggccgcgggccacccgctcggccccgcggcttacaacctcatgctccgcacgctcgcctccaccccggccgccgcgcgggcccacttctggcccttcctccgcgacatggacgccgccggccactccgtcgaccagggcacctacctcgccgccctcgcctccttcaagcgcgccagcctcgccaccgactacgccaccctctccgcccgcctcgccaagtcccgggacgaccacgccgcccaggccgccgccggcggcacccccgtcacctccctcgccgacgccgtccgcgggctcgacctcgaccagccgggggctgacgaggcgctcgaggagaagctggagggcgtcgccgagcagctgctgccgctcacggaggcggccgtggccggggtgctgcgggaggcgagggacgtcccggccaaggcgctcgctttcttccggtgggccggcaggcagaacggctacgagcacgggtccgtcgcctacaacgcgatggcgagggtgctcggccgggaggagtcgctgcgggagttctgggagctgatccaggagatgaagaccggcgagctgcacatcgacatcgacacctacatgaagctgtccaggcagttccagaagcgccacatgatgaccgaggccgtggagctctacgagctcatgatggacggcccctacaagcccgcgcagcaggacgggccgctgctcctccggcgcatcgccatggggccggagcccgacctcgagctggtgtaccgcgtcgtgaggaagttcgaggccgtctatgagttcaagaccaagaatgtgtttgacgggatccacagggcgctcaccagcaatggcaggttcgacgaggccgcggagatcgtggagaggatgagagccgctggccaccagccggacaacatcacgtatagccagctggtctttgggctgtgcaaggccaccaagtgcgatgaagctcgccaggtgctcgatgaaatggaggctgagggttgcacgccggacctgaagacctggaccatgttgatccaagggcactgtgccgccggggaggtggacaaggctctgcagtacttgacagagatgatcgagaaggacttggaagcagacgccgatttgctggatgtgatggtgaaaggtctgtgcaaacaggaaaagattgacgcggcttacactttgtttgttgagatggtggacactgccaagttgaacccttggcaaggaacttacaagcatatcattgccgagttgctgagggtgaagaaactcgaggaggcactgggccttcttaaatcaatgaaagcccgcaagtttccaccttttgcagaccccttcccttcaaacatcgctgaatacgggacgcttgaagatgccagggactttctgaaggccttgaaaggatcatctaataactatccgcagccccctgtctatgtgcagatgttcaaggcattctttgcagaggggagatactcagaagctcaggatttactctataaatgccccatccatatccgcaggcatcatgacatcaccgagctgtttgaaccaaaaaaagttcaggctactgcttgactgaagaacaataaattgttgagacggacttcctgcgcgatcggatgaaaactatgtggaagacgctgcctggaaggcatatccgatgtggtggtttctgacggagtttggcatgatagggattggcaacagaaacaagtcatatgttgataggtaggtagatatgctccctgcctgggaagatgcttcgtgcatcccacacgctagtactattatccgcagaatgtttatcacatgggcatcttgataattttatatatcctttattatacggttggaaatgtaacagtttatattctggaaagcgagagcacttggttgctgtcaaatttttacaacgcctttgctgcagttagaacttgcaggccttctgctggcagtgtc

SEQ ID NO: 63340 - protein, 595 aa, Triticum aestivum
  peptide (1)..(595): Ceres Seq. ID no. 12616177
KPLNPQKMAAPPAHLRRLLLPHLRRNRLFSALTDTPSPPPPAPTSDAILYSLRGLAKDPPQALSLFRRAAAAGHPLGPAAYNLMLRTLASTPAAARAHFWPFLRDMDAAGHSVDQGTYLAALASFKRASLATDYATLSARLAKSRDDHAAQAAAGGTPVTSLADAVRGLDLDQPGADEALEEKLEGVAEQLLPLTEAAVAGVLREARDVPAKALAFFRWAGRQNGYEHGSVAYNAMARVLGREESLREFWELIQEMKTGELHIDIDTYMKLSRQFQKRHMMTEAVELYELMMDGPYKPAQQDGPLLLRRIAMGPEPDLELVYRVVRKFEAVYEFKTKNVFDGIHRALTSNGRFDEAAEIVERMRAAGHQPDNITYSQLVFGLCKATKCDEARQVLDEMEAEGCTPDLKTWTMLIQGHCAAGEVDKALQYLTEMIEKDLEADADLLDVMVKGLCKQEKIDAAYTLFVEMVDTAKLNPWQGTYKHIIAELLRVKKLEEALGLLKSMKARKFPPFADPFPSNIAEYGTLEDARDFLKALKGSSNNYPQPPVYVQMFKAFFAEGRYSEAQDLLYKCPIHIRRHHDITELFEPKKVQATA

SEQ ID NO: 63341 - protein, 588 aa, Triticum aestivum
  peptide (1)..(588): Ceres Seq. ID no. 12616178
MAAPPAHLRRLLLPHLRRNRLFSALTDTPSPPPPAPTSDAILYSLRGLAKDPPQALSLFRRAAAAGHPLGPAAYNLMLRTLASTPAAARAHFWPFLRDMDAAGHSVDQGTYLAALASFKRASLATDYATLSARLAKSRDDHAAQAAAGGTPVTSLADAVRGLDLDQPGADEALEEKLEGVAEQLLPLTEAAVAGVLREARDVPAKALAFFRWAGRQNGYEHGSVAYNAMARVLGREESLREFWELIQEMKTGELHIDIDTYMKLSRQFQKRHMMTEAVELYELMMDGPYKPAQQDGPLLLRRIAMGPEPDLELVYRVVRKFEAVYEFKTKNVFDGIHRALTSNGRFDEAAEIVERMRAAGHQPDNITYSQLVFGLCKATKCDEARQVLDEMEAEGCTPDLKTWTMLIQGHCAAGEVDKALQYLTEMIEKDLEADADLLDVMVKGLCKQEKIDAAYTLFVEMVDTAKLNPWQGTYKHIIAELLRVKKLEEALGLLKSMKARKFPPFADPFPSNIAEYGTLEDARDFLKALKGSSNNYPQPPVYVQMFKAFFAEGRYSEAQDLLYKCPIHIRRHHDITELFEPKKVQATA

SEQ ID NO: 63342 - protein, 512 aa, Triticum aestivum
  peptide (1)..(512): Ceres Seq. ID no. 12616179
MLRTLASTPAAARAHFWPFLRDMDAAGHSVDQGTYLAALASFKRASLATDYATLSARLAKSRDDHAAQAAAGGTPVTSLADAVRGLDLDQPGADEALEEKLEGVAEQLLPLTEAAVAGVLREARDVPAKALAFFRWAGRQNGYEHGSVAYNAMARVLGREESLREFWELIQEMKTGELHIDIDTYMKLSRQFQKRHMMTEAVELYELMMDGPYKPAQQDGPLLLRRIAMGPEPDLELVYRVVRKFEAVYEFKTKNVFDGIHRALTSNGRFDEAAEIVERMRAAGHQPDNITYSQLVFGLCKATKCDEARQVLDEMEAEGCTPDLKTWTMLIQGHCAAGEVDKALQYLTEMIEKDLEADADLLDVMVKGLCKQEKIDAAYTLFVEMVDTAKLNPWQGTYKHIIAELLRVKKLEEALGLLKSMKARKFPPFADPFPSNIAEYGTLEDARDFLKALKGSSNNYPQPPVYVQMFKAFFAEGRYSEAQDLLYKCPIHIRRHHDITELFEPKKVQATA

SEQ ID NO: 63343 - DNA, 1444 bp, Triticum aestivum
  misc_feature (1)..(1444): Ceres Seq. ID no. 12616181
accgcctcagaagttacgcaactgctctgctgcccaaaacctaaccatggcgcgagtccgcagcaatgggcggcgtgccggcggcagtggaggtggaggcggccgcggcggcaagggcaaaggaaaaggaaaaggcccgggcaagtggaagatgccgttgtcggtggcgcggaagcagcaggcggtgctggcgaacgtggaccaggtcaccggcgagaggatccccaagagcttcgtcttctcgcgcggcaagctcccctccacgcttcgtcacctacagcaggacctccgcaagctcatgctcccctacaccgccctcaagctcaaggagaagaagaggaacaacctcaaggacttcgtcaacgttgccagcccattgggtgttacgcatttcttgatcctctcgaacccaaagagcttgccgcacttgcgcttcgccaagtcaccgcagggcccaacctacacttgtcagattttagaatacgctcttgcggctgacatcgcaaactcccaaaagcggccaaggtgtcctgcagagatattcaaaaactcgcctctggtcgtgctcagtggtttcaatggcctgggcgagcctttcaagagttttgttaccttctttaggcatttggtccctgctattgacacagatactgttaagttatcaacctgtcaaagattattattgctacagtatgacaaagagacggaggctatcgatttccggcattactccatcaagctacagcctgttggggtcagccgcaagattagaaaactcatgcagaacaatcaagtgccagacctaagggatcttaaagatgttagtgattatgtgacaaaagctggatatggatcagaaagtgaaccagacgatgaagcagcgactgtaagtctagcaagtgatatagacaaattgaacagagcatcccgaaaaagtgccgtcagactccaagagatcggaccaagaatgaccatgcgcttagttaaggttgaatctgggctatgctcgggcgacatcttgtacccacaatctgttggaaaagaagatgtgaaggagggacaagaggaagaagagatagaagatgctgaggatatgatggagctggatgatgggacggaggaggacgactcggttgacgaagagtagcctagatgagctcgagaggtgctgagcagcagcctatgatgattgctaaaaatgtgaagcaactggtgtattgcgactaacattatgagtttagttgatccttgagaaagcatattctgagaaagcatatccttaacagaagtcactcttgaaaaagagagggataaatctcttgcagtgataatccttattttggtcgaatccgaatggtttttagccctgtaacatgatacatattctgtatttacctaagttttgccttaggagggtgcatataagcactagctgctgcgttcg

SEQ ID NO: 63344 - protein, 381 aa, Triticum aestivum
  peptide (1)..(381): Ceres Seq. ID no. 12616182
PPQKLRNCSAAQNLTMARVRSNGRRAGGSGGGGGRGGKGKGKGKGPGKWKMPLSVARKQQAVLANVDQVTGERIPKSFVFSRGKLPSTLRHLQQDLRKLMLPYTALKLKEKKRNNLKDFVNVASPLGVTHFLILSNPKSLPHLRFAKSPQGPTYTCQILEYALAADIANSQKRPRCPAEIFKNSPLVVLSGFNGLGEPFKSFVTFFRHLVPAIDTDTVKLSTCQRLLLLQYDKETEAIDFRHYSIKLQPVGVSRKIRKLMQNNQVPDLRDLKDVSDYVTKAGYGSESEPDDEAATVSLASDIDKLNRASRKSAVRLQEIGPRMTMRLVKVESGLCSGDILYPQSVGKEDVKEGQEEEEIEDAEDMMELDDGTEEDDSVDEE

SEQ ID NO: 63345 - protein, 366 aa, Triticum aestivum
  peptide (1)..(366): Ceres Seq. ID no. 12616183
MARVRSNGRRAGGSGGGGGRGGKGKGKGKGPGKWKMPLSVARKQQAVLANVDQVTGERIPKSFVFSRGKLPSTLRHLQQDLRKLMLPYTALKLKEKKRNNLKDFVNVASPLGVTHFLILSNPKSLPHLRFAKSPQGPTYTCQILEYALAADIANSQKRPRCPAEIFKNSPLVVLSGFNGLGEPFKSFVTFFRHLVPAIDTDTVKLSTCQRLLLLQYDKETEAIDFRHYSIKLQPVGVSRKIRKLMQNNQVPDLRDLKDVSDYVTKAGYGSESEPDDEAATVSLASDIDKLNRASRKSAVRLQEIGPRMTMRLVKVESGLCSGDILYPQSVGKEDVKEGQEEEEIEDAEDMMELDDGTEEDDSVDEE

SEQ ID NO: 63346 - protein, 331 aa, Triticum aestivum
  peptide (1)..(331): Ceres Seq. ID no. 12616184
MPLSVARKQQAVLANVDQVTGERIPKSFVFSRGKLPSTLRHLQQDLRKLMLPYTALKLKEKKRNNLKDFVNVASPLGVTHFLILSNPKSLPHLRFAKSPQGPTYTCQILEYALAADIANSQKRPRCPAEIFKNSPLVVLSGFNGLGEPFKSFVTFFRHLVPAIDTDTVKLSTCQRLLLLQYDKETEAIDFRHYSIKLQPVGVSRKIRKLMQNNQVPDLRDLKDVSDYVTKAGYGSESEPDDEAATVSLASDIDKLNRASRKSAVRLQEIGPRMTMRLVKVESGLCSGDILYPQSVGKEDVKEGQEEEEIEDAEDMMELDDGTEEDDSVDEE

SEQ ID NO: 63347 - DNA, 1742 bp, Triticum aestivum
  misc_feature (1)..(1742): Ceres Seq. ID no. 13655375
atccatatagaaatacctcgtctccctccccgcccctgattcgcaaggccaaagcaagaggggcaggagcgccaccgcgaatcccatcccatccccgcaccgccgccgatcccgcccgcccgcccctccgcagatctccccgacattgcccgctccccggccggattcgcccagatccaccgacgcggcgcgcggtgctcccggcggcgtggtccggtcggtctgatcgggaaggcttgatcttttttgttggtgctgttgtctggagggtggtggcagcggagatgggcgtcggaggggagaagttccagctggggacggtgggggcgctgggcctctccgtggtgtcctccgtgtccattgtcatctgcaacaaggccctcatgagctccctcggcttcaccttcgctaccaccttgacgagctggcatctcctggtcactttctgctcccttcatgtggcactatggatgaagttttttgagcacaaggcttttgattcgagaactgtcatgggattcggagtactcaatggcatctccattgggctcctcaatctgagtcttggtttcaattctgttggcttttaccagatgacaaagctggccatcatcccctgcactgttattttggagactcttttcttcaggaagaagttcagccggactatccagatctccctttccgtgcttcttttgggtgtcggtgttgcaaccatgactgatttgcaactcaatgctgtggggtccatactgtccttgctggccattatcacgacttgcatcgctcaaatcatgacaaacactattcagaagaaattcaaggtttcttcaacccagctgctatatcagtcttgtccttaccagtcattgacactgtttcttatcggcccgttccttgatggattcctgactaaccaaaacgtctttgctttcaattacacatctaacgttgtgtttttcatcgtcttgtcgtgtttgatatcggtctcagtaaacttcagcacctttcttgtgatcggaaagacatctcctgttacttaccaagtcctgggccatcttaaaacatgcctagttttgaccttcggctacgttttgcttcatgatccgtttagctggagaaacatacttggcatcctaattgcggttgttgggatggtactatattcatacttctgctcaacagagactcaaccaaaaaataccgatgtctccgcacagcagtcaaaagaaggtgactcggcacctttgatctctgattctttgagcaaagttgaaaatggaggtgatgacgatgagcctttgaaggtaccgatgtggagctcaaagtactcaagggcgtgagaattttgtctcttagacggcggatggcattatacaggattcaatttagtaggcagatagtagggttggaagccaactttccaacccaagtaatgaagcaatggacatttcagttacaattaaaatgatctgattctttggagggttttaccttccaaaattgcagatcgaccatgaaactagatagcagatattgtaaaattgtatctggatatggtccaaatcttctcactgtaacttcacgttgggacactggtctgcagatagactccattctttttgtaccaaaggtcccgaggtcaagaattgtgcaagactttaaagtatttataggttcaagtttgtaactgtactttcagatttaccttggaccatagtaatgcaagtgatgtacatttc

SEQ ID NO: 63348 - protein, 446 aa, Triticum aestivum
  peptide (1)..(446): Ceres Seq. ID no. 13655376
PYRNTSSPSPPLIRKAKARGAGAPPRIPSHPRTAADPARPPLRRSPRHCPLPGRIRPDPPTRRAVLPAAWSGRSDREGLIFFVGAVVWRVVAAEMGVGGEKFQLGTVGALGLSVVSSVSIVICNKALMSSLGFTFATTLTSWHLLVTFCSLHVALWMKFFEHKAFDSRTVMGFGVLNGISIGLLNLSLGFNSVGFYQMTKLAIIPCTVILETLFFRKKFSRTIQISLSVLLLGVGVATMTDLQLNAVGSILSLLAIITTCIAQIMTNTIQKKFKVSSTQLLYQSCPYQSLTLFLIGPFLDGFLTNQNVFAFNYTSNVVFFIVLSCLISVSVNFSTFLVIGKTSPVTYQVLGHLKTCLVLTFGYVLLHDPFSWRNILGILIAVVGMVLYSYFCSTETQPKNTDVSAQQSKEGDSAPLISDSLSKVENGGDDDEPLKVPMWSSKYSRA

SEQ ID NO: 63349 - protein, 352 aa, Triticum aestivum
  peptide (1)..(352): Ceres Seq. ID no. 13655377
MGVGGEKFQLGTVGALGLSVVSSVSIVICNKALMSSLGFTFATTLTSWHLLVTFCSLHVALWMKFFEHKAFDSRTVMGFGVLNGISIGLLNLSLGFNSVGFYQMTKLAIIPCTVILETLFFRKKFSRTIQISLSVLLLGVGVATMTDLQLNAVGSILSLLAIITTCIAQIMTNTIQKKFKVSSTQLLYQSCPYQSLTLFLIGPFLDGFLTNQNVFAFNYTSNVVFFIVLSCLISVSVNFSTFLVIGKTSPVTYQVLGHLKTCLVLTFGYVLLHDPFSWRNILGILIAVVGMVLYSYFCSTETQPKNTDVSAQQSKEGDSAPLISDSLSKVENGGDDDEPLKVPMWSSKYSRA

SEQ ID NO: 63350 - protein, 319 aa, Triticum aestivum
  peptide (1)..(319): Ceres Seq. ID no. 13655378
MSSLGFTFATTLTSWHLLVTFCSLHVALWMKFFEHKAFDSRTVMGFGVLNGISIGLLNLSLGFNSVGFYQMTKLAIIPCTVILETLFFRKKFSRTIQISLSVLLLGVGVATMTDLQLNAVGSILSLLAIITTCIAQIMTNTIQKKFKVSSTQLLYQSCPYQSLTLFLIGPFLDGFLTNQNVFAFNYTSNVVFFIVLSCLISVSVNFSTFLVIGKTSPVTYQVLGHLKTCLVLTFGYVLLHDPFSWRNILGILIAVVGMVLYSYFCSTETQPKNTDVSAQQSKEGDSAPLISDSLSKVENGGDDDEPLKVPMWSSKYSRA

SEQ ID NO: 63351 - DNA, 1087 bp, Triticum aestivum
  misc_feature (1)..(1087): Ceres Seq. ID no. 13597142
gtccacctcctccctcctgttccttcagccaccgtgagcaatggcgcccaagcggaagggtggcaacggccggaagaagaccgtcctcctctcgatcgtcaaggaggacgcccgccatgtatgcttctcaaagcgcaagcggggcctgttcagcaagaccagcgcgctgtccctgctcacgggcgcccaggtggccgccgtcatcttctcgcccggcggcaaggtcttctccttcggccacccctccgtcgacgccgtcgtcaaccgcttcatggcgggggacgccgcggtggtccaggccgccgccgacgacaacgggttgcagacgctgcagctgcagcacggcgacatgcgcaccgagctggcggaccagaagaagcggaagaagcgcgctgaggaggccctggacaaggagcgcgctgggggggaccagattgcctcgtggctccaccccgacgtgcgcgacatggggcatgacgacatggcggccttcgccgccgcgctcttgcaggtccaggccgccgtctccggacgcgccaaccaggttctcgtcgaggcctttcgcgtcgacatcagccgtatgctccaggtgcccccgccgccgccgcctccgctccagctcttcggtgccagcaccattgagttcggtagtagcagcagcagcgccaacgccgggatggagatgcaacagatgcagatggttatggagatgccaccgccgcctgacttccccgcagtgatggggatgcagcagttggttatggagatgccaccacagccaaggttcgaggcagcgatggagatgacgccgctgcaggagttcgtcgccgggatgcagaaggtgcagcggcaggggctcgggccgaacgccgacttcccctactgaggagaagaaagacaccagacagagtccgaccgagtccgagtctcagttactatattctaaataaatcgttcagatccatgtaagatccatctacgtaggtccaagatctatgcattagttggttcaattatcttagtagcaattaaatttatggcattgtaatcttttttgtatcggtagtacaatggctggaaattcgtg

SEQ ID NO: 63352 - protein, 281 aa, Triticum aestivum
  peptide (1)..(281): Ceres Seq. ID no. 13597143
MAPKRKGGNGRKKTVLLSIVKEDARHVCFSKRKRGLFSKTSALSLLTGAQVAAVIFSPGGKVFSFGHPSVDAVVNRFMAGDAAVVQAAADDNGLQTLQLQHGDMRTELADQKKRKKRAEEALDKERAGGDQIASWLHPDVRDMGHDDMAAFAAALLQVQAAVSGRANQVLVEAFRVDISRMLQVPPPPPPPLQLFGASTIEFGSSSSSANAGMEMQQMQMVMEMPPPPDFPAVMGMQQLVMEMPPQPRFEAAMEMTPLQEFVAGMQKVQRQGLGPNADFPY

SEQ ID NO: 63353 - protein, 245 aa, Triticum aestivum
  peptide (1)..(245): Ceres Seq. ID no. 13597144
PPPPSCSFSHREQWRPSGRVATAGRRPSSSRSSRRTPAMYASQSASGACSARPARCPCSRAPRWPPSSSRPAARSSPSATPPSTPSSTASWRGTPRWSRPPPTTTGCRRCSCSTATCAPSWRTRRSGRSALRRPWTRSALGGTRLPRGSTPTCATWGMTTWRPSPPRSCRSRPPSPDAPTRFSSRPFASTSAVCSRCPRRRRLRSSSSVPAPLSSVVAAAAPTPGWRCNRCRWLWRCHRRLTSPQ

SEQ ID NO: 63354 - protein, 207 aa, Triticum aestivum
  peptide (1)..(207): Ceres Seq. ID no. 13597145
MYASQSASGACSARPARCPCSRAPRWPPSSSRPAARSSPSATPPSTPSSTASWRGTPRWSRPPPTTTGCRRCSCSTATCAPSWRTRRSGRSALRRPWTRSALGGTRLPRGSTPTCATWGMTTWRPSPPRSCRSRPPSPDAPTRFSSRPFASTSAVCSRCPRRRRLRSSSSVPAPLSSVVAAAAPTPGWRCNRCRWLWRCHRRLTSPQ

SEQ ID NO: 63355 - DNA, 1356 bp, Triticum aestivum
  misc_feature (1)..(1356): Ceres Seq. ID no. 14301482
tttttctccccccaccttccgcgtcccccctctccacctagcaagctccggccgtccgcccgcgcccgtcccgtccgtccacgagcgagccggccgggcgccgccgccgacgccgatgaagaagccgggcaagctcgcgctgccctcccaggactccaccatcggcaagttcctgacgcagagcgggaccttcaaggacggcgacctgctcgtcaacaaggacggcctccgcatcgtcccgcagagcgaggaaggcgaggctcctcctatcaagcctttggataataatcatcagttgagcatagacgatctagattcaatcaaagtgatcgggaaaggtaatagcgggaccgtgcaattggtgcgccacaaatggactggccagttttttgctctcaaggttatacagctcaatattcaggagagcatacgcaagcagatggcccaggagttgaaaataagcttgtttacacagtgccagtatgttgtcacgtgctatcagtgtttctatgtcaatggtgttatttctattgctttggagtacatggatggtggctctctcgctgatttcctcaaggctgttagaaccgttccagaggcctacctggctgcaatttgtaagcaggtgttgaaaggactgatgtacttgcatcatgagaagcgcgttatacaccgagatctgaaaccatcgaatatattgataaatcataggggtgaagtaaagatatcagattttggtgttagtgccatcatttctagttcttctgcacagcgagatacatttactggcacatttaactacatggcgcctgaaagaatcagtgggcagaaacatggtcatctgagtgatatctggagcttgggcctagttatgctggaatgtgccactggcaatttcccatatcctcctcgtgaaagcttttatgaacttcttgaagctgttgtcgaccaaccatcaccttctgcaccatcagaccagttttcaccagagttctgttcattcatttctgcttgtatccaaaaaaatgctgcagataggtcatctgcccaaaccctatcagctcatccattcctgagcatgtacgacgacctgaatatcgatctgtctgactacttcacgactgcaggatcaccgcttgccaccttcaagcaaatcgcgttgtgagacgacaaatgctcaaccatgtgtcatgagctggagctaactgaagcaagtgaatggagttatttttcttttcctgttattcatgaactgggctttgatgatatctttgaaccaaatatgatacaattggcttcataattatacaaatacaagtctgtaaagcatcagcgagcatcgaagttttgcctgtc

SEQ ID NO: 63356 - protein, 387 aa, Triticum aestivum
  peptide (1)..(387): Ceres Seq. ID no. 14301483
FSPPTFRVPPLHLASSGRPPAPVPSVHERAGRAPPPTPMKKPGKLALPSQDSTIGKFLTQSGTFKDGDLLVNKDGLRIVPQSEEGEAPPIKPLDNNHQLSIDDLDSIKVIGKGNSGTVQLVRHKWTGQFFALKVIQLNIQESIRKQMAQELKISLFTQCQYVVTCYQCFYVNGVISIALEYMDGGSLADFLKAVRTVPEAYLAAICKQVLKGLMYLHHEKRVIHRDLKPSNILINHRGEVKISDFGVSAIISSSSAQRDTFTGTFNYMAPERISGQKHGHLSDIWSLGLVMLECATGNFPYPPRESFYELLEAVVDQPSPSAPSDQFSPEFCSFISACIQKNAADRSSAQTLSAHPFLSMYDDLNIDLSDYFTTAGSPLATFKQIAL

SEQ ID NO: 63357 - protein, 349 aa, Triticum aestivum
  peptide (1)..(349): Ceres Seq. ID no. 14301484
MKKPGKLALPSQDSTIGKFLTQSGTFKDGDLLVNKDGLRIVPQSEEGEAPPIKPLDNNHQLSIDDLDSIKVIGKGNSGTVQLVRHKWTGQFFALKVIQLNIQESIRKQMAQELKISLFTQCQYVVTCYQCFYVNGVISIALEYMDGGSLADFLKAVRTVPEAYLAAICKQVLKGLMYLHHEKRVIHRDLKPSNILINHRGEVKISDFGVSAIISSSSAQRDTFTGTFNYMAPERISGQKHGHLSDIWSLGLVMLECATGNFPYPPRESFYELLEAVVDQPSPSAPSDQFSPEFCSFISACIQKNAADRSSAQTLSAHPFLSMYDDLNIDLSDYFTTAGSPLATFKQIAL

SEQ ID NO: 63358 - protein, 241 aa, Triticum aestivum
  peptide (1)..(241): Ceres Seq. ID no. 14301485
MAQELKISLFTQCQYVVTCYQCFYVNGVISIALEYMDGGSLADFLKAVRTVPEAYLAAICKQVLKGLMYLHHEKRVIHRDLKPSNILINHRGEVKISDFGVSAIISSSSAQRDTFTGTFNYMAPERISGQKHGHLSDIWSLGLVMLECATGNFPYPPRESFYELLEAVVDQPSPSAPSDQFSPEFCSFISACIQKNAADRSSAQTLSAHPFLSMYDDLNIDLSDYFTTAGSPLATFKQIAL

SEQ ID NO: 63359 - DNA, 1359 bp, Triticum aestivum
  misc_feature (1)..(1359): Ceres Seq. ID no. 13655381
aattttatcgattatcaggccggcactccgcccacaaatgctcgcctccatctcccgatctctcgctcgccgcctcccgcgccttccgcttgccaccgccgccgccacaacagccatgtcgtcgtccgacaccgccgggagcgtcgccgaccgtccgatctctcctgataccacacgcatcgggtgggtggggacgggcgtcatgggccagtccatggccggccacctcctcgccgccggctacgcgctcaccgtatacaaccgcacgccctccaaggcccagggcctcgtctctagcggcgcccgcctcgtggacagcccgcgcgccgccgcggccgtcgctgacgtcatcttcctcatggtcggcttcccctccgacgtccgctccacgtccctcgacccctccacgggcgctctcgccggcctcgccccaggcggcgtcctcgtcgacatgaccacctccgaccccaccctcgcggccgagatagctgcggccgcggcgggggccggctgcgccgcagtcgacgcccccgtgtcaggcggcgaccggggcgcccgcaacgcctgcctctcgatcttcgccggcggtgacgcggccgtggtggcccgcctggcgcccctcttcaagctgatgggcaacgccctctacatgggcgggccgggcgcggggcagcgcgcgaagctgggcaaccagatcgccatcgcgtccaccatggtgggactggtggagggcatggtgtacgcgcacaaggccgggctggacgtgggcaagtggctggaggccatctccacgggcgccgcggggtccaagtcgctggacctgtacgggaagcggatgctggagcgcgacatggcggccgggttctacgtccggcacttcgtcaaggacctcgggatctgcctgtccgagtgccagaccatggggctggcgctgccggggctcgcgctcgcgcaccagcthtacgtgtcgctgcttgcccacggcgagggcgggctcggcacgcaggcgctgatactggcagtcgagcggctcaacaacacctgccttgacaagaaaggggagtgaaactgtgaaagcctacgagagcttggttgatgcaatgcaacacgagagaattgtctcctgctgtgttcccttgtggatatgggacttctgcatgctctgtctgttcatgctttacagtgctctaaggttcaaataagattgcaaaaatggagtttttcacttgtattgataatattcaactactcctatagtcctatttggcaaatcagtctgtagtgattgtcgatcaacttggcagtgaaactagaatattgaatgtagctcaccctgtgttaacgggttatatttgccgc

SEQ ID NO: 63360 - protein, 354 aa, Triticum aestivum
  peptide (1)..(354): Ceres Seq. ID no. 15219737
  misc_feature (320)..(320): Xaa is any aa, unknown or other
ILSIIRPALRPQMLASISRSLARRLPRLPLATAAATTAMSSSDTAGSVADRPISPDTTRIGWVGTGVMGQSMAGHLLAAGYALTVYNRTPSKAQGLVSSGARLVDSPRAAAAVADVIFLMVGFPSDVRSTSLDPSTGALAGLAPGGVLVDMTTSDPTLAAEIAAAAAGAGCAAVDAPVSGGDRGARNACLSIFAGGDAAVVARLAPLFKLMGNALYMGGPGAGQRAKLGNQIAIASTMVGLVEGMVYAHKAGLDVGKWLEAISTGAAGSKSLDLYGKRMLERDMAAGFYVRHFVKDLGICLSECQTMGLALPGLALAHQXYVSLLAHGEGGLGTQALILAVERLNNTCLDKKGE

SEQ ID NO: 63361 - protein, 342 aa, Triticum aestivum
  peptide (1)..(342): Ceres Seq. ID no. 15219738
  misc_feature (308)..(308): Xaa is any aa, unknown or other
MLASISRSLARRLPRLPLATAAATTAMSSSDTAGSVADRPISPDTTRIGWVGTGVMGQSMAGHLLAAGYALTVYNRTPSKAQGLVSSGARLVDSPRAAAAVADVIFLMVGFPSDVRSTSLDPSTGALAGLAPGGVLVDMTTSDPTLAAEIAAAAAGAGCAAVDAPVSGGDRGARNACLSIFAGGDAAVVARLAPLFKLMGNALYMGGPGAGQRAKLGNQIAIASTMVGLVEGMVYAHKAGLDVGKWLEAISTGAAGSKSLDLYGKRMLERDMAAGFYVRHFVKDLGICLSECQTMGLALPGLALAHQXYVSLLAHGEGGLGTQALILAVERLNNTCLDKKGE

SEQ ID NO: 63362 - protein, 316 aa, Triticum aestivum
  peptide (1)..(316): Ceres Seq. ID no. 15219739
  misc_feature (282)..(282): Xaa is any aa, unknown or other
MSSSDTAGSVADRPISPDTTRIGWVGTGVMGQSMAGHLLAAGYALTVYNRTPSKAQGLVSSGARLVDSPRAAAAVADVIFLMVGFPSDVRSTSLDPSTGALAGLAPGGVLVDMTTSDPTLAAEIAAAAAGAGCAAVDAPVSGGDRGARNACLSIFAGGDAAVVARLAPLFKLMGNALYMGGPGAGQRAKLGNQIAIASTMVGLVEGMVYAHKAGLDVGKWLEAISTGAAGSKSLDLYGKRMLERDMAAGFYVRHFVKDLGICLSECQTMGLALPGLALAHQXYVSLLAHGEGGLGTQALILAVERLNNTCLDKKGE

SEQ ID NO: 63363 - DNA, 1273 bp, Triticum aestivum
  misc_feature (1)..(1273): Ceres Seq. ID no. 13596965
gtgttcttctcttcgaatcgagatcacgaccgcgagtggacagagaggcgacgcgaatcccccgaacctcatatttgccacccgccctcttccaaagatggctgcttcggcggccttcgcggcggtggcggtcatgatgctggtggcagcgcacttggccgttgcggcggcagctccggtgacggccccggcgttcctctgggcgcctgagaactatggttcccacgagactaaaggagtagtccactatcagacaatgccaccggcaagtctagcaaaatctgttcttgatgaaggtggctggtcaaacttggtgtgttcaagggagggctcttataagaatgttgacattgcagttgtttttcttggctcgaagctacaatcgtcagacatctctagagataagcaagctgatccatctttggctgacacactaaagctctccttcacaggctcagagttttccatggcattcccttatgttgctttgacagataatgacaaattggagagctcattgctatctggacttgctgagaattgtgacaatgattttcgcggaaaccacatcacatacacagacacgtgtactgtaagtggtgaagatctgaagaaacatcaaagcatggattctattcgcgacttagtgatgtcacggaagagaagcaatccaaggggaaagactgatctaattgtcttctgtaatggcggtttcaaggatttagataatgcaaaatcagaaggggagttgctttccgagctggtttctgtgctgaaaatgtctgaggccagatatacagttctttatgcttcccaaccctatggtttactggagaacccttccaacctaccattagccaggtatcttgcagagaagaccaacactactactaaatctggcctaggcaaatgtgatggggagtgcctagtaaaatcaagtcttctggaaggaacttttgttggactagtgctgctgatcattttgatatcaggactctgctgtatgatgggaatcgataccccctcgaggtttgaggctccccaggattaggtaggagagtacaaatcccattgaagcctgccagatatgaaagctcaaggcaggcgtgagaaatacaaatagtcaatttgcactgtggatataagttgcctcatatatgttaccaagacacgtgaccgattttttgtataatattattacatctcggacgtacgaccgaccagaaagatgtagctgagctcaaaacatattcttatgccaggcttgtgttat

SEQ ID NO: 63364 - protein, 349 aa, Triticum aestivum
  peptide (1)..(349): Ceres Seq. ID no. 13596966
CSSLRIEITTASGQRGDANPPNLIFATRPLPKMAASAAFAAVAVMMLVAAHLAVAAAAPVTAPAFLWAPENYGSHETKGVVHYQTMPPASLAKSVLDEGGWSNLVCSREGSYKNVDIAVVFLGSKLQSSDISRDKQADPSLADTLKLSFTGSEFSMAFPYVALTDNDKLESSLLSGLAENCDNDFRGNHITYTDTCTVSGEDLKKHQSMDSIRDLVMSRKRSNPRGKTDLIVFCNGGFKDLDNAKSEGELLSELVSVLKMSEARYTVLYASQPYGLLENPSNLPLARYLAEKTNTTTKSGLGKCDGECLVKSSLLEGTFVGLVLLIILISGLCCMMGIDTPSRFEAPQD

SEQ ID NO: 63365 - protein, 317 aa, Triticum aestivum
  peptide (1)..(317): Ceres Seq. ID no. 13596967
MAASAAFAAVAVMMLVAAHLAVAAAAPVTAPAFLWAPENYGSHETKGVVHYQTMPPASLAKSVLDEGGWSNLVCSREGSYKNVDIAVVFLGSKLQSSDISRDKQADPSLADTLKLSFTGSEFSMAFPYVALTDNDKLESSLLSGLAENCDNDFRGNHITYTDTCTVSGEDLKKHQSMDSIRDLVMSRKRSNPRGKTDLIVFCNGGFKDLDNAKSEGELLSELVSVLKMSEARYTVLYASQPYGLLENPSNLPLARYLAEKTNTTTKSGLGKCDGECLVKSSLLEGTFVGLVLLIILISGLCCMMGIDTPSRFEAPQD

SEQ ID NO: 63366 - protein, 305 aa, Triticum aestivum
  peptide (1)..(305): Ceres Seq. ID no. 13596968
MMLVAAHLAVAAAAPVTAPAFLWAPENYGSHETKGVVHYQTMPPASLAKSVLDEGGWSNLVCSREGSYKNVDIAVVFLGSKLQSSDISRDKQADPSLADTLKLSFTGSEFSMAFPYVALTDNDKLESSLLSGLAENCDNDFRGNHITYTDTCTVSGEDLKKHQSMDSIRDLVMSRKRSNPRGKTDLIVFCNGGFKDLDNAKSEGELLSELVSVLKMSEARYTVLYASQPYGLLENPSNLPLARYLAEKTNTTTKSGLGKCDGECLVKSSLLEGTFVGLVLLIILISGLCCMMGIDTPSRFEAPQD

SEQ ID NO: 63367 - DNA, 978 bp, Triticum aestivum
  misc_feature (1)..(978): Ceres Seq. ID no. 12616101
aacacatctttgacatccccacgaccgcactcgagtagcagccgcagacagatctttctcgacacccaccggcggctaagcggatatggcggcctcaccggcaacatcgtccgcggccgcgagggcctccaccttcgcacggctatccaacgcgcccctgcgtgcgcccagagccgccgccgtctcgttcccgtctcccaactccgctcgtccggccgcgctggtcgcggatgctcgggcttcccggctccccgtcgtggccgcagccgccggagggcaccagcggctgatggggtcgctgaccaacaccgaggggctcaggttcggcgtggttgtggcacggttcaatgagatagtgaccaacttgcttctgcagggggctttagaggcattcgagcgatactctgtcaaagcagaaaatatcaccgttgttagtgttcctggcagctttgaaattcctgttgcagcacagaagcttgggaagtctggaaagtatgatgcaattttgtgcattggggctgtgattagaggtgacacaacccactatgatgctgttgcaaactctgctgcttcaggtgtactcaatgctggattgtctgctggcgtcccctgcgtatttggtgttctgacctgtgatgacatggaccaggcgctaaatcgtgctggtggcaaggctggaaacaaaggtgctgagaccgccataactgctattgagatggcctcgctgtttcggcatcacttagcctgatgacaccgaatgctatggtcggcgagccagcaagattttctcccctgttcgcggctatcggagtttttcccccacatttgttttaaaatttcttttttcttgctgcaggctagtgtttgacatgtcgtttctaaattattttggtctgtacgtatgtactctgattgcctgttcgcctttgcccgcaagaaacttgcaagtttagagcatgaataaactttttttcctgc

SEQ ID NO: 63368 - protein, 220 aa, Triticum aestivum
  peptide (1)..(220): Ceres Seq. ID no. 12616102
MAASPATSSAAARASTFARLSNAPLRAPRAAAVSFPSPNSARPAALVADARASRLPVVAAAAGGHQRLMGSLTNTEGLRFGVVVARFNEIVTNLLLQGALEAFERYSVKAENITVVSVPGSFEIPVAAQKLGKSGKYDAILCIGAVIRGDTTHYDAVANSAASGVLNAGLSAGVPCVFGVLTCDDMDQALNRAGGKAGNKGAETAITAIEMASLFRHHLA

SEQ ID NO: 63369 - protein, 152 aa, Triticum aestivum
  peptide (1)..(152): Ceres Seq. ID no. 12616103
MGSLTNTEGLRFGVVVARFNEIVTNLLLQGALEAFERYSVKAENITVVSVPGSFEIPVAAQKLGKSGKYDAILCIGAVIRGDTTHYDAVANSAASGVLNAGLSAGVPCVFGVLTCDDMDQALNRAGGKAGNKGAETAITAIEMASLFRHHLA

SEQ ID NO: 63370 - protein, 116 aa, Triticum aestivum
  peptide (1)..(116): Ceres Seq. ID no. 12616104
NTSLTSPRPHSSSSRRQIFLDTHRRLSGYGGLTGNIVRGREGLHLRTAIQRAPACAQSRRRLVPVSQLRSSGRAGRGCSGFPAPRRGRSRRRAPAADGVADQHRGAQVRRGCGTVQ

SEQ ID NO: 63371 - DNA, 1002 bp, Triticum aestivum
  misc_feature (1)..(1002): Ceres Seq. ID no. 13598416
actttattctacttctccgcccacgcccagcgagcacgagactgacgacgagacccgagagaggccgagacctggaagatccgaatccatcgccgctcccccacgcgacgagatgtcttcacccgcagagtactacaattcacttccaccagtaagcaaggcatatgggacattgtgtttctttaccacagtgctggttcagctccagatactagacccaggccttctttatttatcttatccccatgtgttcaagagttttcagatatggaggctatttacaagcttctttttcctcggcaagttctccatcaactttggtattcgccttctgatgatagcaagatatggtgtgcagttggagaagggttcatttgagaagcggacagcagatttcttgtggatgatgatatttggtgcaatctcgttactggtactgtctgctattccctatctcgagacttatttgttgggtattcctatggttagcatgcttctttatgtctggagccgagagtacccaaactctcagataagcatgtatggcctcgtccaattgaggtcattttatctaccatgggctatgcttggattggatgtgatatttggctctccaatattgcctggccttttgggcattatggttggacatctgtactacttctttacagtgttgtatccgctagctagcggaaagaactacctcaagactcctatgtgggtacacaagattgttgctcgattcaggttgggcgtgcaggcaaactctccagtccggccagctaacacaggccctactgccttcagaggaagaggctatagactcaatcagtagactgctgcgacgcctggcgatgtacaagaggcatgaacaggttaacatggattcgatctaaactctgtggcagctctaggaatctgggttgggatttttcccattgaatctgtaatgtcctcatcgaataactacagatgtgcacttgcattgtacctgcgaagtgc

SEQ ID NO: 63372 - protein, 277 aa, Triticum aestivum
  peptide (1)..(277): Ceres Seq. ID no. 15222337
LYSTSPPTPSEHETDDETRERPRPGRSESIAAPPRDEMSSPAEYYNSLPPVSKAYGTLCFFTTVLVQLQILDPGLLYLSYPHVFKSFQIWRLFTSFFFLGKFSINFGIRLLMIARYGVQLEKGSFEKRTADFLWMMIFGAISLLVLSAIPYLETYLLGIPMVSMLLYVWSREYPNSQISMYGLVQLRSFYLPWAMLGLDVIFGSPILPGLLGIMVGHLYYFFTVLYPLASGKNYLKTPMWVHKIVARFRLGVQANSPVRPANTGPTAFRGRGYRLNQ

SEQ ID NO: 63373 - protein, 240 aa, Triticum aestivum
  peptide (1)..(240): Ceres Seq. ID no. 15222338
MSSPAEYYNSLPPVSKAYGTLCFFTTVLVQLQILDPGLLYLSYPHVFKSFQIWRLFTSFFFLGKFSINFGIRLLMIARYGVQLEKGSFEKRTADFLWMMIFGAISLLVLSAIPYLETYLLGIPMVSMLLYVWSREYPNSQISMYGLVQLRSFYLPWAMLGLDVIFGSPILPGLLGIMVGHLYYFFTVLYPLASGKNYLKTPMWVHKIVARFRLGVQANSPVRPANTGPTAFRGRGYRLNQ

SEQ ID NO: 63374 - protein, 166 aa, Triticum aestivum
  peptide (1)..(166): Ceres Seq. ID no. 15222339
MIARYGVQLEKGSFEKRTADFLWMMIFGAISLLVLSAIPYLETYLLGIPMVSMLLYVWSREYPNSQISMYGLVQLRSFYLPWAMLGLDVIFGSPILPGLLGIMVGHLYYFFTVLYPLASGKNYLKTPMWVHKIVARFRLGVQANSPVRPANTGPTAFRGRGYRLNQ

SEQ ID NO: 63375 - DNA, 1241 bp, Triticum aestivum
  misc_feature (1)..(1241): Ceres Seq. ID no. 13596969
cgaaaaacccacagccacatttgtcctacttagagacccagctagatcaccatggcttcctcggctgctcgtctcctgcttgtcttcgcgacagctctggtgctgagctctgtgtctgcagcagcggtgggggctggtggctcgccgccgctggccaagggcctgtcgttcgagttctaccgcgccaggtgcccgcaggcggaggccatcgtcttcgccttcctcaaggacgccatccgcaaggacgtcggcctcgccgccgcgctcctccgcatccacttccacgactgcttcgtgcagggctgcgacggctccgtgctcctcgacaagaccaacggcgtcgacagcgagaaggtgtctcccccgaacgtcacgctgcgtccgtcggcgttcaaggccatcaacgccatccgcgcgctcctccagaaggcgtgcggcgggcccgtcgtctcctgcgccgacatcgccgcgctcgccgcccgcgactccgtccagctggccggcgggccgcggtacgccgtcccgctcggccgccgcgacgggctcgcccccgcttccctggacaccatcctgggcgcgctcccgccgccgacctccaaggtgcccgtgctcctcagcttcctcgccaagatcggcctcaacgccgacgacctggtggcgctctccggcgcgcacacgctcgggatcgcgcactgcggctccttcgaggagcggctgtttcccaaggtcgaccccaccatggacaagtttttcgccggccacctcaagctcacctgcccgcggctcaaggtggacaacttcaccgccaacgacatccgcacgcctgacgtgttcgacaacaagttctacgtcgacctgctcaaccggcagggtctcttcacctccgaccaggacctgcacaccgacgccaagaccaagcccatggtcaccaggttcgccgtcgaccaggccgccttcttcgaccagttcgtcaagtccatggtgaaaatggggcagatcaacgtgctcactggcaaccagggtcagatccgcacggactgctccattcccaacgccgcccgcagtgccggcgacgagctgccgtggtccgtcgtcgagaccgccgtggagagcttggtgttgtaggtagtagtagggtttagtccatggatctcaagcttgttttatgttttggcaaggtttggactttggaagtcagagtgcatgcgtgtttagtttgttgagcaagaccgaaccagttg

SEQ ID NO: 63376 - protein, 357 aa, Triticum aestivum
  peptide (1)..(357): Ceres Seq. ID no. 13596970
MASSAARLLLVFATALVLSSVSAAAVGAGGSPPLAKGLSFEFYRARCPQAEAIVFAFLKDAIRKDVGLAAALLRIHFHDCFVQGCDGSVLLDKTNGVDSEKVSPPNVTLRPSAFKAINAIRALLQKACGGPVVSCADIAALAARDSVQLAGGPRYAVPLGRRDGLAPASLDTILGALPPPTSKVPVLLSFLAKIGLNADDLVALSGAHTLGIAHCGSFEERLFPKVDPTMDKFFAGHLKLTCPRLKVDNFTANDIRTPDVFDNKFYVDLLNRQGLFTSDQDLHTDAKTKPMVTRFAVDQAAFFDQFVKSMVKMGQINVLTGNQGQIRTDCSIPNAARSAGDELPWSVVETAVESLVL

SEQ ID NO: 63377 - protein, 274 aa, Triticum aestivum
  peptide (1)..(274): Ceres Seq. ID no. 13596971
KNPQPHLSYLETQLDHHGFLGCSSPACLRDSSGAELCVCSSGGGWWLAAAGQGPVVRVLPRQVPAGGGHRLRLPQGRHPQGRRPRRRAPPHPLPRLLRAGLRRLRAPRQDQRRRQREGVSPERHAASVGVQGHQRHPRAPPEGVRRARRLLRRHRRARRPRLRPAGRRAAVRRPARPPRRARPRFPGHHPGRAPAADLQGARAPQLPRQDRPQRRRPGGALRRAHARDRALRLLRGAAVSQGRPHHGQVFRRPPQAHLPAAQGGQLHRQRHPHA

SEQ ID NO: 63378 - DNA, 1340 bp, Triticum aestivum
  misc_feature (1)..(1340): Ceres Seq. ID no. 13585282
cacacccgccgccgccgccgccgtctccctccctccctctctctcccccccgacgccgccggctccaagccacatcccaccccgccccgccgtcacccggtctctcgtctcctgcggcggtccgcctccattcgcctctcgttcgcttcgcagacgcgttcttccgtccgcctagcgggctcgctggggagagcggcagcagccatggccatcgggtctctcgtcgcagccgcgtccaggtccagccgccacgccctcgcctccgccgccatctcccaggcggcttacagggcgcgccagcacgccggagtgcctcctctgctctcgcggcttgcaccactcgcccgcgccttcagctcaagccctgcagcagccgatgtcgattcagatctccctgtcatggaagtgcagaaacggcgggtgggcaaaaaggccaagggcgcgaaaagcggaaaagccatgatgttcccactccatttccactatgaagatgtgttgcgtgaggatctgttgctcaaactgaaccacaccaacaccatggaggtccctggattgtttgagatccgactggtgcccaagtctaccaccggtgccaaaatccagtttgggaaactggccatggagattctgtgcggccagaggtgcatacaggcagaactgcctgcccatctgaaagggaaggcgaccaacgcatacctggggtcccagaaagacgccgtgtccctgaggcagagcatcatccgagggcacgggatgtacaacttcctggtcagggtcctgacggtgatgtctatgctggactccaaggtggcgatcgagcaggggaactgcgtaaagttcttcatggccacggagttctgcgagttctcccccgagatagaggaccactttgagatctttgagaccatcggagggttcaacgtgaccatcgtcaccacggcctgctcgaaggaggagacctcgctgctgtggagcggcttcttgctcaaggatgaaggtgagatcagctaagtaagatgctggatgagatcatgagcattgtgactaaagacaaactctggtggaagcttctatcgttttgtgatccgatctttgctagctagagtcaatggccagcttttctttctagagcaatcttgttccggaatgaaactgagttcccctgttatgtctatcttcagaagaggctcgtttttcttctgatatgcagagattcattggtttctacggtttcaaaaaaattctagatggtgatcctcctagttttgtatcctgataggctttggtcatcctcttcatgtgaagagaactaaataataatgcatttgattaaatctgcg

SEQ ID NO: 63379 - protein, 336 aa, Triticum aestivum
  peptide (1)..(336): Ceres Seq. ID no. 13585283
HTRRRRRRLPPSLSLPPDAAGSKPHPTPPRRHPVSRLLRRSASIRLSFASQTRSSVRLAGSLGRAAAAMAIGSLVAAASRSSRHALASAAISQAAYRARQHAGVPPLLSRLAPLARAFSSSPAAADVDSDLPVMEVQKRRVGKKAKGAKSGKAMMFPLHFHYEDVLREDLLLKLNHTNTMEVPGLFEIRLVPKSTTGAKIQFGKLAMEILCGQRCIQAELPAHLKGKATNAYLGSQKDAVSLRQSIIRGHGMYNFLVRVLTVMSMLDSKVAIEQGNCVKFFMATEFCEFSPEIEDHFEIFETIGGFNVTIVTTACSKEETSLLWSGFLLKDEGEIS

SEQ ID NO: 63380 - protein, 268 aa, Triticum aestivum
  peptide (1)..(268): Ceres Seq. ID no. 13585284
MAIGSLVAAASRSSRHALASAAISQAAYRARQHAGVPPLLSRLAPLARAFSSSPAAADVDSDLPVMEVQKRRVGKKAKGAKSGKAMMFPLHFHYEDVLREDLLLKLNHTNTMEVPGLFEIRLVPKSTTGAKIQFGKLAMEILCGQRCIQAELPAHLKGKATNAYLGSQKDAVSLRQSIIRGHGMYNFLVRVLTVMSMLDSKVAIEQGNCVKFFMATEFCEFSPEIEDHFEIFETIGGFNVTIVTTACSKEETSLLWSGFLLKDEGEIS

SEQ ID NO: 63381 - protein, 203 aa, Triticum aestivum
  peptide (1)..(203): Ceres Seq. ID no. 13585285
MEVQKRRVGKKAKGAKSGKAMMFPLHFHYEDVLREDLLLKLNHTNTMEVPGLFEIRLVPKSTTGAKIQFGKLAMEILCGQRCIQAELPAHLKGKATNAYLGSQKDAVSLRQSIIRGHGMYNFLVRVLTVMSMLDSKVAIEQGNCVKFFMATEFCEFSPEIEDHFEIFETIGGFNVTIVTTACSKEETSLLWSGFLLKDEGEIS

SEQ ID NO: 63382 - DNA, 1569 bp, Triticum aestivum
  misc_feature (1)..(1569): Ceres Seq. ID no. 13598460
caggtccgtttacgcgtgtgctgggtttgggcacctctgctccatagcgcgaagagcgaaaggcacggccgccgccacgcaccaccccccctgccgccaacacgctgtaggtccgccgccggcaacattgaaggggcaccacagcacacaaagcagagagtaatggcgtcaacaaccatatcgtcctgcgcatatcaggcagtgcaaggcgcccaccgattgaagatctgtcagtttagtcacggtattgttggcatggacgtcaatgctgatggtttcatccgctccagcaccttcagggttgggggattcgactgggctatcttgtactacccagagggttatggcgacgacagtgagggattcatatcagtttttgttgagttcatgagcaagtatgggaaggcgccagcggtcgtcgacataagactgattgatcaagtcactggaaagcccaaatcgttattgtcaagtgtattctttgaagaggatgaggagccatttcgattcaaatctgacagcttcgcagaggctacctggggtaaggagaggtgtataagaagggaggcgttggaggattcagtgtatgtccgagatgactgccttgtgatcgaatgtgtcatcactgttttaggccaattaagggtgtctgaaactaaaccattgtgtgaaattgatgtgccaccccctaacgcactacagcattttcgcaagatgttagaggatacgtccgcagcagatgtgaccttcgacgttcaacaagaaacatttgctgcccacagggcggtgcttgctgcgcggtcacctgtcttccggaagcagttcagcgaacccatgaaggagaagatgagccgcataaccatcaactctgtggaaccagcggttttcaaggctctcctccatttcatttacaccgattccttgcctgtgatggatgatttcactagagctgaaagcaatgctgttttccagcatctacttgcagctgcggatcaatatggtttagagaggttgaagcttatgtgtgcaggcaccttggttatgaaccttaatgtggagaatgtggctagtgcactatggctagctgataagtacaattgccagaagcttaaagaagcttgtgtcaattttatggccccttccaacagagtcgatgctgtggtggcaagccaagggtaccagcttctgaaaagaggttctccttctccattagcagatgtgtgggagaagaggagccgtgctcgccaaagctttctttagagcagatccaaaagctacaatgctagattatgagtgcttctgtcagcagaatgactggtatgatgaaagcagttccaccaaaatttattgtgcgtatctagatcctgtgctttgaaaaatcatctaagcagtccctggtaactctttagctttttgcgagaaactattaatgtcatgttggtcatgtatgtgtagctgtgaaatgttgatctttagatgcattcctgggtcaatttagcggatatgctccagcaagtatgttccgaatgatgtgtgatctgttgatttgcagcttgttttgatttgggc

SEQ ID NO: 63383 - protein, 419 aa, Triticum aestivum
  peptide (1)..(419): Ceres Seq. ID no. 13598461
QVRLRVCWVWAPLLHSAKSERHGRRHAPPPLPPTRCRSAAGNIEGAPQHTKQRVMASTTISSCAYQAVQGAHRLKICQFSHGIVGMDVNADGFIRSSTFRVGGFDWAILYYPEGYGDDSEGFISVFVEFMSKYGKAPAVVDIRLIDQVTGKPKSLLSSVFFEEDEEPFRFKSDSFAEATWGKERCIRREALEDSVYVRDDCLVIECVITVLGQLRVSETKPLCEIDVPPPNALQHFRKMLEDTSAADVTFDVQQETFAAHRAVLAARSPVFRKQFSEPMKEKMSRITINSVEPAVFKALLHFIYTDSLPVMDDFTRAESNAVFQHLLAAADQYGLERLKLMCAGTLVMNLNVENVASALWLADKYNCQKLKEACVNFMAPSNRVDAVVASQGYQLLKRGSPSPLADVWEKRSRARQSFL

SEQ ID NO: 63384 - protein, 365 aa, Triticum aestivum
  peptide (1)..(365): Ceres Seq. ID no. 13598462
MASTTISSCAYQAVQGAHRLKICQFSHGIVGMDVNADGFIRSSTFRVGGFDWAILYYPEGYGDDSEGFISVFVEFMSKYGKAPAVVDIRLIDQVTGKPKSLLSSVFFEEDEEPFRFKSDSFAEATWGKERCIRREALEDSVYVRDDCLVIECVITVLGQLRVSETKPLCEIDVPPPNALQHFRKMLEDTSAADVTFDVQQETFAAHRAVLAARSPVFRKQFSEPMKEKMSRITINSVEPAVFKALLHFIYTDSLPVMDDFTRAESNAVFQHLLAAADQYGLERLKLMCAGTLVMNLNVENVASALWLADKYNCQKLKEACVNFMAPSNRVDAVVASQGYQLLKRGSPSPLADVWEKRSRARQSFL

SEQ ID NO: 63385 - protein, 334 aa, Triticum aestivum
  peptide (1)..(334): Ceres Seq. ID no. 13598463
MDVNADGFIRSSTFRVGGFDWAILYYPEGYGDDSEGFISVFVEFMSKYGKAPAVVDIRLIDQVTGKPKSLLSSVFFEEDEEPFRFKSDSFAEATWGKERCIRREALEDSVYVRDDCLVIECVITVLGQLRVSETKPLCEIDVPPPNALQHFRKMLEDTSAADVTFDVQQETFAAHRAVLAARSPVFRKQFSEPMKEKMSRITINSVEPAVFKALLHFIYTDSLPVMDDFTRAESNAVFQHLLAAADQYGLERLKLMCAGTLVMNLNVENVASALWLADKYNCQKLKEACVNFMAPSNRVDAVVASQGYQLLKRGSPSPLADVWEKRSRARQSFL

SEQ ID NO: 63386 - DNA, 1778 bp, Triticum aestivum
  misc_feature (1)..(1778): Ceres Seq. ID no. 15170666
aactctcgtctcgttctagtattcttgctcccacacggcgacgtcgccatcgacatcgctgccgctctctcctcagcagcgctcctctaccaccacctcctctaggcaggggttagcggccgccccctccgcgtgcgccgtcccaaaccctagcatatccccctccccgactcctctgcgccggagcttccctccgaccgcgcagatcgccggcgatggggtccaaggaccaggacctggccgcgtcgtcgggcggtggcggaggcttcttctcctcgatcgccgcgggcgtgcgcagctggggcaccgccgtgcacaaatcggtcaacgggttggttggctatgaagggcttgaagttatcaacccagatggaggcacagacgatgcggaagcagaggctatgaaggggcgatggaaacaggaggatcgcgacagttactggaagatgatgaacaagtacataggatcagatgtaacgtcacttgttacacttccagtcatcatctttgagccgatgtcaatgcttcagaaaatggcagagttgatggaatattgtgacctgttagacaaagcagatgaatgtgaggatccacacatgcggatggtatatgcttctacatgggctttgtcagcctacctagcctaccaccgtacgtggaagcctttcaatcccatccttggagagacatatgagatggttaaccaccagggtattacatttattgctgagcaggtaagccatcatcctccgatgggtgcagctcactgtgagaatgatcattttacttacgacatcacatcaaagttgaagacaaagttcttgggaaactcagtggaagtgtatccagttggaaggactagagtgacacttaaaaaatccggtgtcgtgttggaactggtaccaccactgacgaaggtcaacaacttgatatttgggcgcacatgggttgactcttttggagagatggtcttgacaaatctgacaactggagacaaagctgtgctgtatttccagccatgcggctggtttggggctgggcgattcgaggtggatgggtatgtatatactgcagctgaagaaccgaaaataatgatgacaggaaaatggaacaagtccatgagttaccagccttgtgatcaagaaggtgatcctcttccagggacggagctaaaagaggtctggaaagctgctcctgctccaccgaatgacaagtaccagtatacatactttgcgcacaaaataaatagctttgatacagcacctaagaagctcttgccttcagactcccgattaaggcccgacagatatgcccttgagaagggcgacatgtctaaatctggggcacacaagagcaggcttgaagaacaacaaagagctgagaagaaaattcgggacaccaagggggagcaatttactccaaaatggttcaagatgacggaagacatctcccctaccccgtggggcgacctggaggtgtatgaatacaatggcagatacgccgagcaccgggctgcgatagacagctctagcgtcgctgccaaggagaaggacgtcagctccatcgagttcaacccgtggcagtatggcgacttgccttcccaatgatttcaaagggtctgaaaccacccatatattattttctcatcgaaaacgctttcaggccttgtgctgatgcataccggcggtttccgtgccttgtagtattacatgactttccaccttttctcttcgtgctgtgatacagttcaggatgtgattgtgtatttgatgtagtcc

SEQ ID NO: 63387 - protein, 463 aa, Triticum aestivum
  peptide (1)..(463): Ceres Seq. ID no. 15170667
MGSKDQDLAASSGGGGGFFSSIAAGVRSWGTAVHKSVNGLVGYEGLEVINPDGGTDDAEAEAMKGRWKQEDRDSYWKMMNKYIGSDVTSLVTLPVIIFEPMSMLQKMAELMEYCDLLDKADECEDPHMRMVYASTWALSAYLAYHRTWKPFNPILGETYEMVNHQGITFIAEQVSHHPPMGAAHCENDHFTYDITSKLKTKFLGNSVEVYPVGRTRVTLKKSGVVLELVPPLTKVNNLIFGRTWVDSFGEMVLTNLTTGDKAVLYFQPCGWFGAGRFEVDGYVYTAAEEPKIMMTGKWNKSMSYQPCDQEGDPLPGTELKEVWKAAPAPPNDKYQYTYFAHKINSFDTAPKKLLPSDSRLRPDRYALEKGDMSKSGAHKSRLEEQQRAEKKIRDTKGEQFTPKWFKMTEDISPTPWGDLEVYEYNGRYAEHRAAIDSSSVAAKEKDVSSIEFNPWQYGDLPSQ

SEQ ID NO: 63388 - protein, 401 aa, Triticum aestivum
  peptide (1)..(401): Ceres Seq. ID no. 15170668
MKGRWKQEDRDSYWKMMNKYIGSDVTSLVTLPVIIFEPMSMLQKMAELMEYCDLLDKADECEDPHMRMVYASTWALSAYLAYHRTWKPFNPILGETYEMVNHQGITFIAEQVSHHPPMGAAHCENDHFTYDITSKLKTKFLGNSVEVYPVGRTRVTLKKSGVVLELVPPLTKVNNLIFGRTWVDSFGEMVLTNLTTGDKAVLYFQPCGWFGAGRFEVDGYVYTAAEEPKIMMTGKWNKSMSYQPCDQEGDPLPGTELKEVWKAAPAPPNDKYQYTYFAHKINSFDTAPKKLLPSDSRLRPDRYALEKGDMSKSGAHKSRLEEQQRAEKKIRDTKGEQFTPKWFKMTEDISPTPWGDLEVYEYNGRYAEHRAAIDSSSVAAKEKDVSSIEFNPWQYGDLPSQ

SEQ ID NO: 63389 - protein, 386 aa, Triticum aestivum
  peptide (1)..(386): Ceres Seq. ID no. 15170669
MMNKYIGSDVTSLVTLPVIIFEPMSMLQKMAELMEYCDLLDKADECEDPHMRMVYASTWALSAYLAYHRTWKPFNPILGETYEMVNHQGITFIAEQVSHHPPMGAAHCENDHFTYDITSKLKTKFLGNSVEVYPVGRTRVTLKKSGVVLELVPPLTKVNNLIFGRTWVDSFGEMVLTNLTTGDKAVLYFQPCGWFGAGRFEVDGYVYTAAEEPKIMMTGKWNKSMSYQPCDQEGDPLPGTELKEVWKAAPAPPNDKYQYTYFAHKINSFDTAPKKLLPSDSRLRPDRYALEKGDMSKSGAHKSRLEEQQRAEKKIRDTKGEQFTPKWFKMTEDISPTPWGDLEVYEYNGRYAEHRAAIDSSSVAAKEKDVSSIEFNPWQYGDLPSQ

SEQ ID NO: 63390 - DNA, 1239 bp, Triticum aestivum
  misc_feature (1)..(1239): Ceres Seq. ID no. 12616212
acccgttcacccccggcggcgccccttcgctcccccgacacatttccgcgagcagctggtgcgcgcgcggagcggaggccatggcgatggcgaaggccaaatccaccgccctctccgccgccgaaaagtgccggaacatcctgggcgccagttgggaagcccacctcaacaccatcaaagccgacgccaagggaagcaagggggaggtttacacgtcgagagtgcactacatggtccaaaagggcatgccctacttgatcgtgcccgagaacgacatgcacaacattaacattataatcgacgagcggggttctctctcggtgtccagtccagtcccaggtcgccttgccagcttgctcaagtcactcaacaagttgcctccccgggttgctatgaccggcgatgtcctgcgcatgaaggagacaaaggttccagttatagctgagagccttaagaaagctattctgaaggaacataaagctgctagcgaagctacttatggggtttcaacggtattgtcttccgcaagtgctacttgtaggtcgcgcagtgaaggtctccttagcttactcaatgaagagagctcctacaatatcttgaagtttgaaattggctcgtgtgtcttcatagattcaatggggagcagccataatatcaagttggatacttttgaaccaccaaaagccgacctgctattgccattctcttcgaggcttattgatggtatcaacaggagtgacccaaggcggagagcacttatacttttctgtttcgagtattttgatgtgactgccagagatgcactcttgctctccgttgatcaccatggatttgaggtgctcgccagggttcctgaaagagctaccgcacctgatgtccctcagcagtaccattggaaagagttcaggttcacattcaaggaagcagtcaaggatgttgaagacttctgccgcatgttggttgagctagaagaagaagctctgcacagcgtaaagagctatagcggattaggttgaaggggatagtagctctttctcaaaccaaagggcacaagattcagatcttcagttatgataatataaatcatctgaagaatataacttgaatccatttttgtagatggtttgcattgtaaactgacatcattcgattgagaatcaacagttaggtttgtatgtcaccataattttcagcctctgtttggtacttatttacaaatcagaaaggaaacttctctgc

SEQ ID NO: 63391 - protein, 337 aa, Triticum aestivum
  peptide (1)..(337): Ceres Seq. ID no. 12616213
PFTPGGAPSLPRHISASSWCARGAEAMAMAKAKSTALSAAEKCRNILGASWEAHLNTIKADAKGSKGEVYTSRVHYMVQKGMPYLIVPENDMHNINIIIDERGSLSVSSPVPGRLASLLKSLNKLPPRVAMTGDVLRMKETKVPVIAESLKKAILKEHKAASEATYGVSTVLSSASATCRSRSEGLLSLLNEESSYNILKFEIGSCVFIDSMGSSHNIKLDTFEPPKADLLLPFSSRLIDGINRSDPRRRALILFCFEYFDVTARDALLLSVDHHGFEVLARVPERATAPDVPQQYHWKEFRFTFKEAVKDVEDFCRMLVELEEEALHSVKSYSGLG

SEQ ID NO: 63392 - protein, 311 aa, Triticum aestivum
  peptide (1)..(311): Ceres Seq. ID no. 12616214
MAMAKAKSTALSAAEKCRNILGASWEAHLNTIKADAKGSKGEVYTSRVHYMVQKGMPYLIVPENDMHNINIIIDERGSLSVSSPVPGRLASLLKSLNKLPPRVAMTGDVLRMKETKVPVIAESLKKAILKEHKAASEATYGVSTVLSSASATCRSRSEGLLSLLNEESSYNILKFEIGSCVFIDSMGSSHNIKLDTFEPPKADLLLPFSSRLIDGINRSDPRRRALILFCFEYFDVTARDALLLSVDHHGFEVLARVPERATAPDVPQQYHWKEFRFTFKEAVKDVEDFCRMLVELEEEALHSVKSYSGLG

SEQ ID NO: 63393 - protein, 309 aa, Triticum aestivum
  peptide (1)..(309): Ceres Seq. ID no. 12616215
MAKAKSTALSAAEKCRNILGASWEAHLNTIKADAKGSKGEVYTSRVHYMVQKGMPYLIVPENDMHNINIIIDERGSLSVSSPVPGRLASLLKSLNKLPPRVAMTGDVLRMKETKVPVIAESLKKAILKEHKAASEATYGVSTVLSSASATCRSRSEGLLSLLNEESSYNILKFEIGSCVFIDSMGSSHNIKLDTFEPPKADLLLPFSSRLIDGINRSDPRRRALILFCFEYFDVTARDALLLSVDHHGFEVLARVPERATAPDVPQQYHWKEFRFTFKEAVKDVEDFCRMLVELEEEALHSVKSYSGLG

SEQ ID NO: 63394 - DNA, 1593 bp, Triticum aestivum
  misc_feature (1)..(1593): Ceres Seq. ID no. 13655712
ctctcagtttctctctcacacacagctctctctctctctctctccttctctccctctctcaaatactccccatgcccatcgccgtcctcctttgaagaagccaatggccagcaatggcatggcgtcctctccctccgccttcttccctccgaatttcctcctccacatgcagcaagcaccaccgcagcatgacccccaagaacaccaccagcagcaccaccaccaccaccatgagcaccacctccctcctccccatccccagcacaaccccttcctcccctccccccaatgcccctccctccaggacttccgtggcggtctgtcgccaatgctggggaagcgcccggcgatgtacgggggcggcggcgacgggggctgcggcggcgacgaggtgaccggcggaggcgcgaacgaggaggagacgtcggacgacgggtcgcagctgggcggcgagaagaagcggcggctgaacgtggagcaggtgcggacgctggagaagaacttcgaggtggccaacaagctggagccggagcgcaagatgcagctggcccgcgcgctggggctgcagccgcggcaggtggccatctggttccagaaccgccgcgcccggtggaagacaaagcagctggagaaggactacgacgtgctcaagcgccagttcgacgccgtcaaggccgagaacgacgccctcctctcccacaacaagaagctccagtccgagatactgggactgaagggatgcagggaggcggcgtcggagctgatcaacctcaacaaggagacggaggcgtcctgcagcaaccgcagcgagaacagctccgagatcaacctcgacatctcgcgcacgccgccgtccgacggccccatggacgctccgccctcgcaccagcagggcggcgggggcgggggcatgatccccttctacccctccgtcgcgcgccccgcgggcgtcgacatcgaccatctcctccacgcctccgtccccaagatggagcaccaccacggcggccccgacacgcccagcttcggcaacctgctgtgcggcgtcgacgagccgccgccgttctggccgtgggcggatcaccagcagttcaactgatcgcccggtcggtcgatcgggacgatatatatctttgttgcagtcaatgacgtctgctttgcttgcatggtcagcaatgagcgtgcataaatattcgatgcgtttggattcttgatgaggacgtacgtacggtggagacggttgtacatgcatgtttgatgagaggcaagttcagttcatccatgaggtacctactgaagacgatggtgatgcgatttgagtcatggatcgatcgagttgatgatgaatagtggggctacgtgtaggggaataagtccggtgtgtgtgaagcgtgtgtaggtagattttggagttgaatagtacctacctttggtattcttattattttttcttgttttttcatttttcctcttccttttgttcccatacataaatttgtgaattgtgaggcggtgttgatccgttgttgtataggttaatggtgcatgtggtgcttattccccctatttatatatggattatgtgaagactgt

SEQ ID NO: 63395 - protein, 365 aa, Triticum aestivum
  peptide (1)..(365): Ceres Seq. ID no. 13655713
SQFLSHTQLSLSLSPSLPLSNTPHAHRRPPLKKPMASNGMASSPSAFFPPNFLLHMQQAPPQHDPQEHHQQHHHHHHEHHLPPPHPQHNPFLPSPQCPSLQDFRGGLSPMLGKRPAMYGGGGDGGCGGDEVTGGGANEEETSDDGSQLGGEKKRRLNVEQVRTLEKNFEVANKLEPERKMQLARALGLQPRQVAIWFQNRRARWKTKQLEKDYDVLKRQFDAVKAENDALLSHNKKLQSEILGLKGCREAASELINLNKETEASCSNRSENSSEINLDISRTPPSDGPMDAPPSHQQGGGGGGMIPFYPSVARPAGVDIDHLLHASVPKMEHHHGGPDTPSFGNLLCGVDEPPPFWPWADHQQFN

SEQ ID NO: 63396 - protein, 331 aa, Triticum aestivum
  peptide (1)..(331): Ceres Seq. ID no. 13655714
MASNGMASSPSAFFPPNFLLHMQQAPPQHDPQEHHQQHHHHHHEHHLPPPHPQHNPFLPSPQCPSLQDFRGGLSPMLGKRPAMYGGGGDGGCGGDEVTGGGANEEETSDDGSQLGGEKKRRLNVEQVRTLEKNFEVANKLEPERKMQLARALGLQPRQVAIWFQNRRARWKTKQLEKDYDVLKRQFDAVKAENDALLSHNKKLQSEILGLKGCREAASELINLNKETEASCSNRSENSSEINLDISRTPPSDGPMDAPPSHQQGGGGGGMIPFYPSVARPAGVDIDHLLHASVPKMEHHHGGPDTPSFGNLLCGVDEPPPFWPWADHQQFN

SEQ ID NO: 63397 - protein, 326 aa, Triticum aestivum
  peptide (1)..(326): Ceres Seq. ID no. 13655715
MASSPSAFFPPNFLLHMQQAPPQHDPQEHHQQHHHHHHEHHLPPPHPQHNPFLPSPQCPSLQDFRGGLSPMLGKRPAMYGGGGDGGCGGDEVTGGGANEEETSDDGSQLGGEKKRRLNVEQVRTLEKNFEVANKLEPERKMQLARALGLQPRQVAIWFQNRRARWKTKQLEKDYDVLKRQFDAVKAENDALLSHNKKLQSEILGLKGCREAASELINLNKETEASCSNRSENSSEINLDISRTPPSDGPMDAPPSHQQGGGGGGMIPFYPSVARPAGVDIDHLLHASVPKMEHHHGGPDTPSFGNLLCGVDEPPPFWPWADHQQFN

SEQ ID NO: 63398 - DNA, 826 bp, Triticum aestivum
  misc_feature (1)..(826): Ceres Seq. ID no. 15173959
tccgctccggccccagtccagtactgtgcgcgcatctctcctcctttttctcccccctgagaggctttctttgcttcacgcggggctccggatattcgttgtcctcgcggctcagccaccgcggaatccatccagcgcagctcagggggaagaggcggtcgaagctggaggtggaagaggggctcgccatgggctccgagggatccgcgccggtcgtagttcccagaaactttagacttttggaagaacttgagagaggtgagaagggcattggtgatggaactgtgagctatgggatggatgatgctgatgacatatatatgcgctcctggacaggaactattatcggtccacccaatactgttcacgagggacgaatctatcaattgaagttgttctgtgatacagattatccagacaaaccaccgactgtccggttccaggctagggtcaatatgacatgtgtgaatcaagaaactggaatggttgatccaagacgatttcctatgcttggaaactggaaaagggaacatacaatggaggatatcctcatcagccttaaaaaggagatgtcaacccctcagaaccgcaggctccaccagcctcatgaaggcaacgatgatcagagagtggagcagaaagggctagcagctagatgtgtcgttatgtaagatacgcgcattgcaatgtacagtgttacactgagtagcatcagaacgcagaagctgaggaaacccaggaggaaatcatgtaatttgacagtcgctagtcgctactttggatcgaaactgctctattgccgaaataaaatgccaatgacttcgtc

SEQ ID NO: 63399 - protein, 222 aa, Triticum aestivum
  peptide (1)..(222): Ceres Seq. ID no. 15173960
RSGPSPVLCAHLSSFFSPLRGFLCFTRGSGYSLSSRLSHRGIHPAQLRGKRRSKLEVEEGLAMGSEGSAPVVVPRNFRLLEELERGEKGIGDGTVSYGMDDADDIYMRSWTGTIIGPPNTVHEGRIYQLKLFCDTDYPDKPPTVRFQARVNMTCVNQETGMVDPRRFPMLGNWKREHTMEDILISLKKEMSTPQNRRLHQPHEGNDDQRVEQKGLAARCVVM

SEQ ID NO: 63400 - protein, 160 aa, Triticum aestivum
  peptide (1)..(160): Ceres Seq. ID no. 15173961
MGSEGSAPVVVPRNFRLLEELERGEKGIGDGTVSYGMDDADDIYMRSWTGTIIGPPNTVHEGRIYQLKLFCDTDYPDKPPTVRFQARVNMTCVNQETGMVDPRRFPMLGNWKREHTMEDILISLKKEMSTPQNRRLHQPHEGNDDQRVEQKGLAARCVVM

SEQ ID NO: 63401 - protein, 124 aa, Triticum aestivum
  peptide (1)..(124): Ceres Seq. ID no. 15173962
MDDADDIYMRSWTGTIIGPPNTVHEGRIYQLKLFCDTDYPDKPPTVRFQARVNMTCVNQETGMVDPRRFPMLGNWKREHTMEDILISLKKEMSTPQNRRLHQPHEGNDDQRVEQKGLAARCVVM

SEQ ID NO: 63402 - DNA, 1249 bp, Triticum aestivum
  misc_feature (1)..(1249): Ceres Seq. ID no. 13598507
aatttcgtcccatagaaaaaccacagccacgaatcaggggaaatccggcagcgccgcgtgtgcgaagacgagtccaaacacggaacaaagccggcgattagcggcacactgagctggcatcttgtgcttctccgtccgtccgcgtccacaccggagctaggaggagaggagggggaagaagaaggcgtcgaggaggcgatggcgacggagtcgccgttccgggcggacgtgctgaagggcaaggcggcgctggtcaccggcggcggctccggcatctgcttcgagatcgccgcccagctcgcccgccacggcgcccacgtcgccatcatgggccgccgccgcgaggtcctcgacaaggccgtcgccgccctccgctccgagggccttcgggctgttggatttcagggagatgtacgtaaccaggaggatgcagcgagagtgcttgcgtcgaccgttgagcatttcggcaagcttgacattcttgtcaacggtgcagcgggcaacttccttgcatccccggaggatctcacacccaagggattccggacagttcttgagattgacactgtgggtacatacacaatgtgctacgaagccctgaagtatctgaaaaaaggtgggccagggaggggtccctccactggtggcctcatcattaacataagcgcgacactgcattacactgcttcttggtaccaaattcatgtctccgccgctaaggcaggtgttgatagtatcacaagaacgctggctctggaatggggaacagattatgaaattagggtcaatggaattgcaccaggaccaatcggaggcactccaggtctgaggaagcttgcacctgatgaaatgggcaaggggaaaagggaaatgatgcctttatttaagttgggggagacacaggacatagcaatggccgcgctctatcttgcttccgatgctggcaaatatgtaaatgggactacgctggtggttgatggagggctttggttgagtcaccctcgccacatccccaaggaggaagtgaaggagctctcaaaggtgatcgagaagaaggttagggcctctggtgtaggtgtaccctccagcaaattgtgatgacatccttggtttatgtcactgtctcacacatgtcatgtaccaccaccctcagtatttgctgtcagcggctcagcaccaactttattgtgtacgtggatcttgtaacctgctgagaacaattggtttcaaatgagcaacttcagtattt

SEQ ID NO: 63403 - protein, 299 aa, Triticum aestivum
  peptide (1)..(299): Ceres Seq. ID no. 13598508
MATESPFRADVLKGKAALVTGGGSGICFEIAAQLARHGAHVAIMGRRREVLDKAVAALRSEGLRAVGFQGDVRNQEDAARVLASTVEHFGKLDILVNGAAGNFLASPEDLTPKGFRTVLEIDTVGTYTMCYEALKYLKKGGPGRGPSTGGLIINISATLHYTASWYQIHVSAAKAGVDSITRTLALEWGTDYEIRVNGIAPGPIGGTPGLRKLAPDEMGKGKREMMPLFKLGETQDIAMAALYLASDAGKYVNGTTLVVDGGLWLSHPRHIPKEEVKELSKVIEKKVRASGVGVPSSKL

SEQ ID NO: 63404 - protein, 256 aa, Triticum aestivum
  peptide (1)..(256): Ceres Seq. ID no. 13598509
MGRRREVLDKAVAALRSEGLRAVGFQGDVRNQEDAARVLASTVEHFGKLDILVNGAAGNFLASPEDLTPKGFRTVLEIDTVGTYTMCYEALKYLKKGGPGRGPSTGGLIINISATLHYTASWYQIHVSAAKAGVDSITRTLALEWGTDYEIRVNGIAPGPIGGTPGLRKLAPDEMGKGKREMMPLFKLGETQDIAMAALYLASDAGKYVNGTTLVVDGGLWLSHPRHIPKEEVKELSKVIEKKVRASGVGVPSSKL

SEQ ID NO: 63405 - protein, 171 aa, Triticum aestivum
  peptide (1)..(171): Ceres Seq. ID no. 13598510
MCYEALKYLKKGGPGRGPSTGGLIINISATLHYTASWYQIHVSAAKAGVDSITRTLALEWGTDYEIRVNGIAPGPIGGTPGLRKLAPDEMGKGKREMMPLFKLGETQDIAMAALYLASDAGKYVNGTTLVVDGGLWLSHPRHIPKEEVKELSKVIEKKVRASGVGVPSSKL

SEQ ID NO: 63406 - DNA, 1226 bp, Triticum aestivum
  misc_feature (1)..(1226): Ceres Seq. ID no. 12617197
gtctgctgtccacttcagcgcagcgtggcgagacgcggagcaaccaaactccgcacagcagaggggactagccggagcggggagaaaaaacagcatggcggcggcggcggcggcgaggaagagcgtgtgcgtgaccggcgcagggggcttcgtcgcctcgtggctcgtcaagctcctcctctctaagggccactacgcggtccgcggcaccgtgcgcgatcccggtaatgctaagaatgctcaccttaaggcgctagaaggtgctggggaaaggttggagctgctcagcgccgacctgctgaactacgacagcattgcgtcagcggttgctggctgtgagggcgtctttcatgttgctagccctgtcccttctggcagatcaaccaatcctgaggaagaagttatagcccctgctgtaacaggcacactgaatgtcttgaaggcttgctacgaggcgaaagttaagcgagttgtcatggtgtcttcagttgctgctgtgtccaataatcctaactggcctaaggataaattatttgatgaagatagctggtcagacgaggatctctgcagaaagggtgaggattggtatttcctttccaaaacactcgcagagcgtgaggcttttgcttatgcagcaaaaactgggctggatattgtaactatttgcccgtcgttggtaattggccccttgatgcagtctacagtaaatacaagcagtaacattctccttaattacctcaaaggagaacgtgatactgtagaaaataaactcaggaatgtagtggatgtccgtgatgttgccgatgctcttctattggcatatgaaaatccagaggcgtctggacggtacatctgcagttcaaaaccagtaaaagtctctgatatgataagcgtactgaagaccttatatccaatgtacacttatcccaaaaactttacggaagtggaagaaaataccatttatagttcagagaaacttcagaagctagggtggaccttcaggcctttagagaagaccctgggggacagcgtggaatcctacaaagcatctggcgtcctgaactgagcatccaaccagggaaagtttggctgttaatgcttgcaaactccttgtggttcatgtaagcagtgaaacaaaataagttggtgacacaatcgtcacgagagtctgtgtgaacatgaacaaagcatgaatcgtatgcgcgcctttcttttggtgtgtcttg

SEQ ID NO: 63407 - protein, 354 aa, Triticum aestivum
  peptide (1)..(354): Ceres Seq. ID no. 12617198
SAVHFSAAWRDAEQPNSAQQRGLAGAGRKNSMAAAAAARKSVCVTGAGGFVASWLVKLLLSKGHYAVRGTVRDPGNAKNAHLKALEGAGERLELLSADLLNYDSIASAVAGCEGVFHVASPVPSGRSTNPEEEVIAPAVTGTLNVLKACYEAKVKRVVMVSSVAAVSNNPNWPKDKLFDEDSWSDEDLCRKGEDWYFLSKTLAEREAFAYAAKTGLDIVTICPSLVIGPLMQSTVNTSSNILLNYLKGERDTVENKLRNVVDVRDVADALLLAYENPEASGRYICSSKPVKVSDMISVLKTLYPMYTYPKNFTEVEENTIYSSEKLQKLGWTFRPLEKTLGDSVESYKASGVLN

SEQ ID NO: 63408 - protein, 323 aa, Triticum aestivum
  peptide (1)..(323): Ceres Seq. ID no. 12617199
MAAAAAARKSVCVTGAGGFVASWLVKLLLSKGHYAVRGTVRDPGNAKNAHLKALEGAGERLELLSADLLNYDSIASAVAGCEGVFHVASPVPSGRSTNPEEEVIAPAVTGTLNVLKACYEAKVKRVVMVSSVAAVSNNPNWPKDKLFDEDSWSDEDLCRKGEDWYFLSKTLAEREAFAYAAKTGLDIVTICPSLVIGPLMQSTVNTSSNILLNYLKGERDTVENKLRNVVDVRDVADALLLAYENPEASGRYICSSKPVKVSDMISVLKTLYPMYTYPKNFTEVEENTIYSSEKLQKLGWTFRPLEKTLGDSVESYKASGVLN

SEQ ID NO: 63409 - protein, 196 aa, Triticum aestivum
  peptide (1)..(196): Ceres Seq. ID no. 12617200
MVSSVAAVSNNPNWPKDKLFDEDSWSDEDLCRKGEDWYFLSKTLAEREAFAYAAKTGLDIVTICPSLVIGPLMQSTVNTSSNILLNYLKGERDTVENKLRNVVDVRDVADALLLAYENPEASGRYICSSKPVKVSDMISVLKTLYPMYTYPKNFTEVEENTIYSSEKLQKLGWTFRPLEKTLGDSVESYKASGVLN

SEQ ID NO: 63410 - DNA, 1298 bp, Triticum aestivum
  misc_feature (1)..(1298): Ceres Seq. ID no. 14302434
agaacatcctaatcgaaaatcatcgagctcgcatcacaggagttatctctggctagtcacgtcgcatcaaagccgaagaagcaatggccgccttcgccaccaggtccgcggccttccttggcctcgccgtcgtgctctgtttcctcgccggcgcggcgagcgcgcagcagctctctcccaacttctactcgaggtcttgccccaacctggcgtccatcgtgcggtcggggatgaccgccgcattgcagacggagaggcggatgggcgcgtccatcctccgcctcttcttccacgactgcttcgtcaatgggtgtgacggctcgattctgcttgacgacacctcgacgttcaccggcgagaagaacgccgggccgaacgccaactcggcgcgtgggttcgaggtgatcgacgccatcaagacccgggtcgaagccgcgtgcagggccaccgtctcctgcgccgacatcctcgcgctcgccgcccgtgacggtgtcaacctgctcggaggtcccacgtggagcgtgccgctggggcgcaaggactcgcgcacggcgagccagagcgcggccaacgcgaacctcccggggccggggtccagcctcgccacgctcatcgccatgttcggcaacaagaacctgtcgccgcgggacatgacggcgctctccggcgcgcacaccatcgggcgctcgcagtgccagttcttccgcaaccgcatctacaacgagcgcaacatcaacgccagcttcgcggcgctgcggcagcggacgtgcccgcggtcgggcggcgacggcaacctcgcgcccttcgacgtgcagaccgccgacgggttcgacaacgcctactaccagaacctggtcgggcagcgcggcctcctgcactcggaccaggagctcttcaacggcgggtcgcaggacgcgctggtgcggcagtacagcagcagccccagccagttctccgccgacttcgtcacggccatgctgaagatgggcggcctgctgccgtcgtccgggacgcagacggaggtcaggttgaactgcaggagacccaactaaaaagtacacacataacaagtgtgctaaataatgattgatgccttggaaaaccaggcattggtcaggttcacgtatgtatgtgtatgtatgatgaagaacaccaaatgtacaaacgctcgtttgctcaatccggggcgaacgtgcaaactacaaagtatcaaaatgtatgttggtcgtaaaagtgtatcatgatcatcatcatcaatacagaacaatgggatggtgcaatcatcataattaaagaat

SEQ ID NO: 63411 - protein, 322 aa, Triticum aestivum
  peptide (1)..(322): Ceres Seq. ID no. 14302435
MAAFATRSAAFLGLAVVLCFLAGAASAQQLSPNFYSRSCPNLASIVRSGMTAALQTERRMGASILRLFFHDCFVNGCDGSILLDDTSTFTGEKNAGPNANSARGFEVIDAIKTRVEAACRATVSCADILALAARDGVNLLGGPTWSVPLGRKDSRTASQSAANANLPGPGSSLATLIAMFGNKNLSPRDMTALSGAHTIGRSQCQFFRNRIYNERNINASFAALRQRTCPRSGGDGNLAPFDVQTADGFDNAYYQNLVGQRGLLHSDQELFNGGSQDALVRQYSSSPSQFSADFVTAMLKMGGLLPSSGTQTEVRLNCRRPN

SEQ ID NO: 63412 - protein, 273 aa, Triticum aestivum
  peptide (1)..(273): Ceres Seq. ID no. 14302436
MTAALQTERRMGASILRLFFHDCFVNGCDGSILLDDTSTFTGEKNAGPNANSARGFEVIDAIKTRVEAACRATVSCADILALAARDGVNLLGGPTWSVPLGRKDSRTASQSAANANLPGPGSSLATLIAMFGNKNLSPRDMTALSGAHTIGRSQCQFFRNRIYNERNINASFAALRQRTCPRSGGDGNLAPFDVQTADGFDNAYYQNLVGQRGLLHSDQELFNGGSQDALVRQYSSSPSQFSADFVTAMLKMGGLLPSSGTQTEVRLNCRRPN

SEQ ID NO: 63413 - protein, 263 aa, Triticum aestivum
  peptide (1)..(263): Ceres Seq. ID no. 14302437
MGASILRLFFHDCFVNGCDGSILLDDTSTFTGEKNAGPNANSARGFEVIDAIKTRVEAACRATVSCADILALAARDGVNLLGGPTWSVPLGRKDSRTASQSAANANLPGPGSSLATLIAMFGNKNLSPRDMTALSGAHTIGRSQCQFFRNRIYNERNINASFAALRQRTCPRSGGDGNLAPFDVQTADGFDNAYYQNLVGQRGLLHSDQELFNGGSQDALVRQYSSSPSQFSADFVTAMLKMGGLLPSSGTQTEVRLNCRRPN

SEQ ID NO: 63414 - DNA, 1136 bp, Triticum aestivum
  misc_feature (1)..(1136): Ceres Seq. ID no. 12616324
atccataattgcattcaaaggcgagcgcacaaaagagtgagactacctagagcactcagcaccgtcgtaggctcttcgccatccgttgagtgtcccaggttctcagcgtgcacgtctgatctgatggcggtaccagcaggagattcctccggcggcgacaagtacaggtctcacctggccggcgagggcgagaagaacaccgtgtggcggcacggcgcgccacccacgtacgacgccgtgaacagcctcttcgaggccgggaggactcaggagtgggcgaaggggtcgcttgaggaggtggtgcagaacgcgatcaagacgtgggagatggagctgtcgcacaaggcccgcatcgaggacttcaagtcggtgagccccggccggttcaccctgtccgtgaacggcgggcgggccctgacgggggaggagacgctggccatgggcagctacaacgcgctgctcgccagcccgatcctgccgggcaccggcgcgtacgacgccaccgccgagacgttcgagtcctcgcacgacctgttccgctccgccttcccgcgcgggttcgcgtgggaggtggtcaaggtctactccggcccgccggtgatcgccttcaagttccggcactggggccacatggaggggccctacaagggccacgcccccaccggggacaaagtcgagttctacggcgtcgccgtgctcaaggtggacgagcagctgcgggcggaggacgtggaggtgttctacgacccgggggagcttctcgcggggcttatcaagggtcccaaggaggaagacgaggcggcggcggcgctcgccgggaggctccgcgaggcggctacggtgtccgcatcaggtgctgacgcgcagccgcaggcctgccccttccttggctctggaaagcaggggtgatcgagtggcctcgtcgaataaaacgtgtcaagcctccagtcttcagggtgttgctgttgcatcactgttttgcaatcagatagatctttttcgtcagctttggagaccaactgaaagctcagttcaacgtgtaatcgtactgttaagtgcttgttgtttgttggaagttgttgggtccagatcagatcgatcgggatcagtgagtacagctctgtgaagaagtggtt

SEQ ID NO: 63415 - protein, 302 aa, Triticum aestivum
  peptide (1)..(302): Ceres Seq. ID no. 12616325
IHNCIQRRAHKRVRLPRALSTVVGSSPSVECPRFSACTSDLMAVPAGDSSGGDKYRSHLAGEGEKNTVWRHGAPPTYDAVNSLFEAGRTQEWAKGSLEEVVQNAIKTWEMELSHKARIEDFKSVSPGRFTLSVNGGRALTGEETLAMGSYNALLASPILPGTGAYDATAETFESSHDLFRSAFPRGFAWEVVKVYSGPPVIAFKFRHWGHMEGPYKGHAPTGDKVEFYGVAVLKVDEQLRAEDVEVFYDPGELLAGLIKGPKEEDEAAAALAGRLREAATVSASGADAQPQACPFLGSGKQG

SEQ ID NO: 63416 - protein, 261 aa, Triticum aestivum
  peptide (1)..(261): Ceres Seq. ID no. 12616326
MAVPAGDSSGGDKYRSHLAGEGEKNTVWRHGAPPTYDAVNSLFEAGRTQEWAKGSLEEVVQNAIKTWEMELSHKARIEDFKSVSPGRFTLSVNGGRALTGEETLAMGSYNALLASPILPGTGAYDATAETFESSHDLFRSAFPRGFAWEVVKVYSGPPVIAFKFRHWGHMEGPYKGHAPTGDKVEFYGVAVLKVDEQLRAEDVEVFYDPGELLAGLIKGPKEEDEAAAALAGRLREAATVSASGADAQPQACPFLGSGKQG

SEQ ID NO: 63417 - protein, 193 aa, Triticum aestivum
  peptide (1)..(193): Ceres Seq. ID no. 12616327
MELSHKARIEDFKSVSPGRFTLSVNGGRALTGEETLAMGSYNALLASPILPGTGAYDATAETFESSHDLFRSAFPRGFAWEVVKVYSGPPVIAFKFRHWGHMEGPYKGHAPTGDKVEFYGVAVLKVDEQLRAEDVEVFYDPGELLAGLIKGPKEEDEAAAALAGRLREAATVSASGADAQPQACPFLGSGKQG

SEQ ID NO: 63418 - DNA, 1241 bp, Triticum aestivum
  misc_feature (1)..(1241): Ceres Seq. ID no. 13655720
gtccgtgtccaaaaccgagcaaaacctcaaagcgcagacaagagaaggtcgctcgccaccgaggggaatggcggcgccgccggacagcaagtctgataaatccccagaggagctcctgtgcgcggcggcggaggccggtaacgacgatgctatcgccgagatcatttcctctggcgccgaccccacctacttcgacgcctccggcatgacgccactcatgcgcgcggcctccggcggccacgccgctgccgcgcggctcctgctcgatgccggcgcgccctggaacgcgctctcccccgaaggtctctccgcgggtgaccttacctccgaccccgccacatacgacctgctcctcgaccacgccctgcgctccgagctcatcctcggcaccgtcgcccgccgccaggcggcctccgcgaactcctccgacggcgtccccgccgagacctacctcgactcgagggtttcgttcagcgaggaccgggtgatggatgcggagagcaaggcggtgatgatggagtgggagcgtccgctgatggaggcgcacgcgcgggcggtgtgcgccgccggcggcggcaaggtgctcaacgtggggttcgggatggggctcgtggaccaggcgatacagaggtacgagcccgaggagcacaccatcatcgaggcccacccggaggtttacgcccggatgctcaagcttgggtggggtgagaagaagaacgtcaggatcctcttcgggcgatggcaggatgtgatcccgcagctcggctcgtatgatggtatattcttcgacacctacggggagtactacgaggacatgagggagttccacgagcacctcccgaagctgctgaatccgggaggggtctactcctacttcaatgggctgtgcggcgacaatgccttcttccacgtggtgtactgccagctggtggcgatggagctggcgagcctcgggtactcgacgcagttcgtccctctccccgtcagggactgcctcaaggcggaggtgtgggagggggtgaagcagaagtactggcagctcgacacctaccacctcccggtctgccaggccgaatctgaatcagagtagaatttctaccgtgttgctactgatcgagttttcgctagctcttcgctgctgctgtaagtttgttcaggtcttcaggatcaggtcaagcttgcctgcgtgcgtgtttgtggattgcagtcgatgatagaactcccgtggaaaatttggttcc

SEQ ID NO: 63419 - protein, 362 aa, Triticum aestivum
  peptide (1)..(362): Ceres Seq. ID no. 13655721
SVSKTEQNLKAQTREGRSPPRGMAAPPDSKSDKSPEELLCAAAEAGNDDAIAEIISSGADPTYFDASGMTPLMRAASGGHAAAARLLLDAGAPWNALSPEGLSAGDLTSDPATYDLLLDHALRSELILGTVARRQAASANSSDGVPAETYLDSRVSFSEDRVMDAESKAVMMEWERPLMEAHARAVCAAGGGKVLNVGFGMGLVDQAIQRYEPEEHTIIEAHPEVYARMLKLGWGEKKNVRILFGRWQDVIPQLGSYDGIFFDTYGEYYEDMREFHEHLPKLLNPGGVYSYFNGLCGDNAFFHVVYCQLVAMELASLGYSTQFVPLPVRDCLKAEVWEGVKQKYWQLDTYHLPVCQAESESE

SEQ ID NO: 63420 - protein, 340 aa, Triticum aestivum
  peptide (1)..(340): Ceres Seq. ID no. 13655722
MAAPPDSKSDKSPEELLCAAAEAGNDDAIAEIISSGADPTYFDASGMTPLMRAASGGHAAAARLLLDAGAPWNALSPEGLSAGDLTSDPATYDLLLDHALRSELILGTVARRQAASANSSDGVPAETYLDSRVSFSEDRVMDAESKAVMMEWERPLMEAHARAVCAAGGGKVLNVGFGMGLVDQAIQRYEPEEHTIIEAHPEVYARMLKLGWGEKKNVRILFGRWQDVIPQLGSYDGIFFDTYGEYYEDMREFHEHLPKLLNPGGVYSYFNGLCGDNAFFHVVYCQLVAMELASLGYSTQFVPLPVRDCLKAEVWEGVKQKYWQLDTYHLPVCQAESESE

SEQ ID NO: 63421 - protein, 294 aa, Triticum aestivum
  peptide (1)..(294): Ceres Seq. ID no. 13655723
MTPLMRAASGGHAAAARLLLDAGAPWNALSPEGLSAGDLTSDPATYDLLLDHALRSELILGTVARRQAASANSSDGVPAETYLDSRVSFSEDRVMDAESKAVMMEWERPLMEAHARAVCAAGGGKVLNVGFGMGLVDQAIQRYEPEEHTIIEAHPEVYARMLKLGWGEKKNVRILFGRWQDVIPQLGSYDGIFFDTYGEYYEDMREFHEHLPKLLNPGGVYSYFNGLCGDNAFFHVVYCQLVAMELASLGYSTQFVPLPVRDCLKAEVWEGVKQKYWQLDTYHLPVCQAESESE

SEQ ID NO: 63422 - DNA, 1368 bp, Triticum aestivum
  misc_feature (1)..(1368): Ceres Seq. ID no. 13597205
actcctcccctaaaagaactccggtggcgtactactagaaaacagcagagacggctgtgccctgctcctccttctcgccggtgccttctgctggaggcaaacgaaactcctcctcctcctcctgcccctctctcccacgcttcccccttcgtctccgtcgacaggaagcaaccaggagaggcgaggcggcgacgatgcagatgaagcagaaggtctacgagctctacaaggggacggtggagcgggtcacgggcccgcgcaccgtctcggcgttcctcgagaagggcgtcctctccgtccccgagttcatcctcgccggcgacaacctcgtatccaagtgcccaacctggtcctgggaggcgggcgatccgagcaagaggaagccatacctcccctccgataagcagttcctcgtcaccaggaacgtgccctgcctaagacgagctgtggcggtcgaggaagagtatgatgcagcgggagctgaggttgttctcgatgatgatgaggatggcgaaggctggctcgcaacacatgggctgcaagcatcagagtcaaaagaggaggaagacataccgtctatggatacattggacatagggaaagtcgaagagatcaaatctatcccctcctactttggtgctagtgaaaagccagatgaggaggaggatatacctgacatggacacctatgaagacacaggagatcattctacagctacccctcagccttcatattttgtcgcagaagagcctgatgatgacaacattcttctcaccagaacatatgatgttagcatcacatatgacaagtactaccaaactccacgtgtctggcttacaggctatgatgaggcaagaatgccattaaagcctgaacttgtgtttcaagatatcagtcaagaccatgcacacaaaacggtgactatcgaagaccatcctcacttgttagtgggacagcacgcttccgtgcatccttgcaagcacgctgctgtgatgaaaaagatcattgatgttatagtgtctcaaggaggtgcaccagaagttgacaagtaccttttcatatttctcaaattcatggcttctgtcatacccaccattgagtatgattacactatggatttcgatctgggcagtacaagcacataagccgcccattgaagaaaagctgaaactcccgagaaggtgagctgttcatggtcgccgaataattgctgctcttcggaaggatctgtacattgtgtccgtgtgtgttggttcgtttggaaatgaactttcaattgtaaactctgatgctctgcaggaagattgtcctgattggtcctcttacggtgtggtgccgcactgatatgacatttgtgattcttcgccg

SEQ ID NO: 63423 - protein, 316 aa, Triticum aestivum
  peptide (1)..(316): Ceres Seq. ID no. 13597206
MQMKQKVYELYKGTVERVTGPRTVSAFLEKGVLSVPEFILAGDNLVSKCPTWSWEAGDPSKRKPYLPSDKQFLVTRNVPCLRRAVAVEEEYDAAGAEVVLDDDEDGEGWLATHGLQASESKEEEDIPSMDTLDIGKVEEIKSIPSYFGASEKPDEEEDIPDMDTYEDTGDHSTATPQPSYFVAEEPDDDNILLTRTYDVSITYDKYYQTPRVWLTGYDEARMPLKPELVFQDISQDHAHKTVTIEDHPHLLVGQHASVHPCKHAAVMKKIIDVIVSQGGAPEVDKYLFIFLKFMASVIPTIEYDYTMDFDLGSTST

SEQ ID NO: 63424 - protein, 314 aa, Triticum aestivum
  peptide (1)..(314): Ceres Seq. ID no. 13597207
MKQKVYELYKGTVERVTGPRTVSAFLEKGVLSVPEFILAGDNLVSKCPTWSWEAGDPSKRKPYLPSDKQFLVTRNVPCLRRAVAVEEEYDAAGAEVVLDDDEDGEGWLATHGLQASESKEEEDIPSMDTLDIGKVEEIKSIPSYFGASEKPDEEEDIPDMDTYEDTGDHSTATPQPSYFVAEEPDDDNILLTRTYDVSITYDKYYQTPRVWLTGYDEARMPLKPELVFQDISQDHAHKTVTIEDHPHLLVGQHASVHPCKHAAVMKKIIDVIVSQGGAPEVDKYLFIFLKFMASVIPTIEYDYTMDFDLGSTST

SEQ ID NO: 63425 - protein, 188 aa, Triticum aestivum
  peptide (1)..(188): Ceres Seq. ID no. 13597208
MDTLDIGKVEEIKSIPSYFGASEKPDEEEDIPDMDTYEDTGDHSTATPQPSYFVAEEPDDDNILLTRTYDVSITYDKYYQTPRVWLTGYDEARMPLKPELVFQDISQDHAHKTVTIEDHPHLLVGQHASVHPCKHAAVMKKIIDVIVSQGGAPEVDKYLFIFLKFMASVIPTIEYDYTMDFDLGSTST

SEQ ID NO: 63426 - DNA, 1542 bp, Triticum aestivum
  misc_feature (1)..(1542): Ceres Seq. ID no. 13597389
acattttgccacttgatcattaatggtctcccccttcgtcacccctaaacagaaatcaaatctgcctccctaaaccgcaaagcttcaagcaccagcgacctccctccatctccgtcccttctactcttctcacccatctcccctccctcccatggctggagtaaacacgaaccacaaggatagtacaaagtagtgcagcggagtggcgtggggagctggtcaagcgcagcagcctagctcagctccatcctcacagcatccaacctccaaccaccgccgcgaccatgcgtgccgccgtggcgctcctcctcgccgccgtcctctgcctcggcggcggcggtgcggcgtccgcgtcgccggactttgactacccggcggcgttcaacttcggcgactccaactccgacacgggcggccgcatcgccgcgggcttcgagcccatgcccccgccctacggctccaccttcttcggcgccccctccggccgcttctccgacggccgcctcatcctcgacttcctcatggatgcgatggatatgccattcctcaatgcatacttggattctcttggtgcgcctaacttccgggcaggtgttaattttgctcaagctggctgttcgattactccagcaagtgcaacatctgtcagcccgttttcatttggtcttcagattaagcaattctttgccttcaaggaaaaagtcactagcctgctctccaaaggagataggtaccgtcggtatattcctcagttggattacttttcgaagggactctacatgtttgatataggtcaaaatgaccttgctggtcaattctactccagaacagaggaccaagtcattgcatccattccgactattttgttggaatttgaaactgggctcaagactctatacgatcagggtgccaggaagttctggattcacaacacaggtcctcttggctgcttacctcaaaacatagatctttttggcaaagacccaacacaactggatgaacttcattgtgtagcaaagcacaatcgtgctgcaaagattttcaacttacagctgcatgcactttgcacaaagttgagaggccagtttgctggagctaatatcacttacatcgacatctactccatcaaatatgccctgattggcaattactctcgatatggatttgaaagtcccaccgaagcatgctgtggatacggaggaccacccctgaattatgatggccgagtgccgtgtggacagacgaaatctgttaacggtaatctcgtaaccgcgaaaggatgcagtgacagcactgagtatgtcaactgggatggaatacattacacggaagctgcaaatttccacgttacatcgcagattctgaccgggaagtactcagatcctccgttcgtcgacaagatgccattccttataaaaccgaggttctaatgagcgggtatttattcccacaactgaattagtaaaccaatgtaatgttgtattgaccacaacagatgtattatttatcacatgtcaataatcacatatagcttcttttttc

SEQ ID NO: 63427 - protein, 381 aa, Triticum aestivum
  peptide (1)..(381): Ceres Seq. ID no. 13597390
MRAAVALLLAAVLCLGGGGAASASPDFDYPAAFNFGDSNSDTGGRIAAGFEPMPPPYGSTFFGAPSGRFSDGRLILDFLMDAMDMPFLNAYLDSLGAPNFRAGVNFAQAGCSITPASATSVSPFSFGLQIKQFFAFKEKVTSLLSKGDRYRRYIPQLDYFSKGLYMFDIGQNDLAGQFYSRTEDQVIASIPTILLEFETGLKTLYDQGARKFWIHNTGPLGCLPQNIDLFGKDPTQLDELHCVAKHNRAAKIFNLQLHALCTKLRGQFAGANITYIDIYSIKYALIGNYSRYGFESPTEACCGYGGPPLNYDGRVPCGQTKSVNGNLVTAKGCSDSTEYVNWDGIHYTEAANFHVTSQILTGKYSDPPFVDKMPFLIKPRF

SEQ ID NO: 63428 - protein, 329 aa, Triticum aestivum
  peptide (1)..(329): Ceres Seq. ID no. 13597391
MPPPYGSTFFGAPSGRFSDGRLILDFLMDAMDMPFLNAYLDSLGAPNFRAGVNFAQAGCSITPASATSVSPFSFGLQIKQFFAFKEKVTSLLSKGDRYRRYIPQLDYFSKGLYMFDIGQNDLAGQFYSRTEDQVIASIPTILLEFETGLKTLYDQGARKFWIHNTGPLGCLPQNIDLFGKDPTQLDELHCVAKHNRAAKIFNLQLHALCTKLRGQFAGANITYIDIYSIKYALIGNYSRYGFESPTEACCGYGGPPLNYDGRVPCGQTKSVNGNLVTAKGCSDSTEYVNWDGIHYTEAANFHVTSQILTGKYSDPPFVDKMPFLIKPRF

SEQ ID NO: 63429 - protein, 302 aa, Triticum aestivum
  peptide (1)..(302): Ceres Seq. ID no. 13597392
MDAMDMPFLNAYLDSLGAPNFRAGVNFAQAGCSITPASATSVSPFSFGLQIKQFFAFKEKVTSLLSKGDRYRRYIPQLDYFSKGLYMFDIGQNDLAGQFYSRTEDQVIASIPTILLEFETGLKTLYDQGARKFWIHNTGPLGCLPQNIDLFGKDPTQLDELHCVAKHNRAAKIFNLQLHALCTKLRGQFAGANITYIDIYSIKYALIGNYSRYGFESPTEACCGYGGPPLNYDGRVPCGQTKSVNGNLVTAKGCSDSTEYVNWDGIHYTEAANFHVTSQILTGKYSDPPFVDKMPFLIKPRF

SEQ ID NO: 63430 - DNA, 1470 bp, Triticum aestivum
  misc_feature (1)..(1470): Ceres Seq. ID no. 13584001
aaaaaaaacagagcagggaggtcggccgcgacctaggagctcggcggcggcgaccaccacgagcatcggcggctgcgcagccatgcttggccatctccggcgatcctctggcattctgcgccgcctaccgatcgccagcttcgctccctccgaccctgccgctgcatactcgggatggagttcacacgccgagtcactctcgtttgtttcatgttggtgtggcaagcatgctaccaggaatttctctacagatgataaagttaccaatggtcgtcgagggtatcggcaaaaggagttgaagaagccaagtacggccgtgaaggataatgatgcaatcattgatcgcatacaaaagagcacaagggggttgaaaaaagggccggttgggcacaccctttcatcagcagagaaaaggaaattccttatcaacactcttcttgatcttgaagactcaaaagaagctgtttacagcacccttgatgcatggatcgcctttgagcaggactttccactcgcctcattaaagcaagcaattgtagctcttgaaaaggaggaacaatggcatagagttgtccaagtaataaaatggatgttgagcaaagggcaaggaaataccatcagaacatacgagcaattagtgcgtgcacttgagaaggacaacagagcagaggaagcacataaaatctgggagaagaaaatagcccatgacctgcattcagttccttggcgtttctgcggtcttatgttggcaatttactacagaaacaatatgctagataggcttatcaagctcttcggtgcccttgaagcatgtggtcgcaagtgtcctagtaaagaatatatacggaaagttgaagttgcatatgaaatgcttggtctattagaagagaagaaggatttgcttgaaaagtacaaggatttgtacaataagccatcaaatagtgatagaaagaaagatcgacggttcaagaaggctgagaagaaagctgctgatgatggcagcaaacaattggagatggaaacatctgaaaacttaccagttaactcatgcccttcagataaggaactggttgccagcagttagtcaagataagaaatacaacaccgatggtgagatcagtatcagccaagaacgtgatgcagctagtaatctctaccagtaacacttactgggccaaccaatagtccattactaataggaaagaagcatgaacattgaaacccccttattcttccataaatcattgaagtgcggtgacttccatgttgccttggacaaatatttccgagtgttatcgttcgccaaaaaagttgtaatgtctgaatattggaataagtgggcgcataactgtagtcaacgaagggattacatgaggaaaccagtactttatctcatgtactcagtgtgagaattgttgtgctgacatttctgttttcatactagaaagccaaattcctgttatccatcgc

SEQ ID NO: 63431 - protein, 360 aa, Triticum aestivum
  peptide (1)..(360): Ceres Seq. ID no. 13584002
KKTEQGGRPRPRSSAAATTTSIGGCAAMLGHLRRSSGILRRLPIASFAPSDPAAAYSGWSSHAESLSFVSCWCGKHATRNFSTDDKVTNGRRGYRQKELKKPSTAVKDNDAIIDRIQKSTRGLKKGPVGHTLSSAEKRKFLINTLLDLEDSKEAVYSTLDAWIAFEQDFPLASLKQAIVALEKEEQWHRVVQVIKWMLSKGQGNTIRTYEQLVRALEKDNRAEEAHKIWEKKIAHDLHSVPWRFCGLMLAIYYRNNMLDRLIKLFGALEACGRKCPSKEYIRKVEVAYEMLGLLEEKKDLLEKYKDLYNKPSNSDRKKDRRFKKAEKKAADDGSKQLEMETSENLPVNSCPSDKELVASS

SEQ ID NO: 63432 - protein, 333 aa, Triticum aestivum
  peptide (1)..(333): Ceres Seq. ID no. 13584003
MLGHLRRSSGILRRLPIASFAPSDPAAAYSGWSSHAESLSFVSCWCGKHATRNFSTDDKVTNGRRGYRQKELKKPSTAVKDNDAIIDRIQKSTRGLKKGPVGHTLSSAEKRKFLINTLLDLEDSKEAVYSTLDAWIAFEQDFPLASLKQAIVALEKEEQWHRVVQVIKWMLSKGQGNTIRTYEQLVRALEKDNRAEEAHKIWEKKIAHDLHSVPWRFCGLMLAIYYRNNMLDRLIKLFGALEACGRKCPSKEYIRKVEVAYEMLGLLEEKKDLLEKYKDLYNKPSNSDRKKDRRFKKAEKKAADDGSKQLEMETSENLPVNSCPSDKELVASS

SEQ ID NO: 63433 - DNA, 1056 bp, Triticum aestivum
  misc_feature (1)..(1056): Ceres Seq. ID no. 15226227
gaggaacttttcgttggatccttcgcttttggggacgaaggaggagaaggtctctgtccctctccacccccacctccacctccgcctcccttcttggctggagaggagcaggaggaggagatgttcccccctggcctgatccaccaccgcacggacggccccgggcccggcgaggtgccgcgctccggcggcgcccccagcctcgtgctcacggcggaccccaagccccgcctccgctggacggccgacctccacgagcgcttcgtcgacgccgtcgcccagctcggcgggcccgagaaagcaacaccaaaaactatcttaaggacaatgggtgtaaagggactaacgcttttccacttgaagagtcatcttcagaaatacagaatgggaaaacaaactgggaaggagacgccggagcaatctaaagatgggtcctaccttcttgatgctcaaggtggaatgagcctgtctcccagagtttctactcaagatgcgaaagaaagccaagaagttaaagaagccctgagagcacagatggagatgcaacgaagcctgcatgaacaagtggaggttcagaagcatgtggacatcaggatggacgcgtacacgacgtacatcaacaccctgctggagaaggcctgcaagatcgtctcagagcagttcgcctcgagcggcttcagcgtctccgaccagagcctcccggagctgtcctccggcggtatcatgtgcggcaccgccaccgacgcgctgagctcctccgtgttccaccagctctccgtcagctcgatcaacatgcacagcccagggggcaagccttctccctcgggcatggaaggccagctgcttctccagaggtcacccgagttcaaacgcaagtcatcctgctgagtccaaaaatctgggtggaaaagttagcttaatcgtctgctgtagacatgtcgaatctcggccaatctgtaaactgacgccaatctgtaaactgactcttgtttctcttgccactgcatgccaagaagcaaggttttttatcgattaatcgtcgacctatgtttatac

SEQ ID NO: 63434 - protein, 295 aa, Triticum aestivum
  peptide (1)..(295): Ceres Seq. ID no. 15226228
EELFVGSFAFGDEGGEGLCPSPPPPPPPPPFLAGEEQEEEMFPPGLIHHRTDGPGPGEVPRSGGAPSLVLTADPKPRLRWTADLHERFVDAVAQLGGPEKATPKTILRTMGVKGLTLFHLKSHLQKYRMGKQTGKETPEQSKDGSYLLDAQGGMSLSPRVSTQDAKESQEVKEALRAQMEMQRSLHEQVEVQKHVDIRMDAYTTYINTLLEKACKIVSEQFASSGFSVSDQSLPELSSGGIMCGTATDALSSSVFHQLSVSSINMHSPGGKPSPSGMEGQLLLQRSPEFKRKSSC

SEQ ID NO: 63435 - protein, 255 aa, Triticum aestivum
  peptide (1)..(255): Ceres Seq. ID no. 15226229
MFPPGLIHHRTDGPGPGEVPRSGGAPSLVLTADPKPRLRWTADLHERFVDAVAQLGGPEKATPKTILRTMGVKGLTLFHLKSHLQKYRMGKQTGKETPEQSKDGSYLLDAQGGMSLSPRVSTQDAKESQEVKEALRAQMEMQRSLHEQVEVQKHVDIRMDAYTTYINTLLEKACKIVSEQFASSGFSVSDQSLPELSSGGIMCGTATDALSSSVFHQLSVSSINMHSPGGKPSPSGMEGQLLLQRSPEFKRKSSC

SEQ ID NO: 63436 - protein, 186 aa, Triticum aestivum
  peptide (1)..(186): Ceres Seq. ID no. 15226230
MGVKGLTLFHLKSHLQKYRMGKQTGKETPEQSKDGSYLLDAQGGMSLSPRVSTQDAKESQEVKEALRAQMEMQRSLHEQVEVQKHVDIRMDAYTTYINTLLEKACKIVSEQFASSGFSVSDQSLPELSSGGIMCGTATDALSSSVFHQLSVSSINMHSPGGKPSPSGMEGQLLLQRSPEFKRKSSC

SEQ ID NO: 63437 - DNA, 1193 bp, Triticum aestivum
  misc_feature (1)..(1193): Ceres Seq. ID no. 14302004
ctcccatcaccggtttcgaaatccatccatccaaaccagcggaagaagaagaaaagaaaaagagaaaaatccacgcgaaagggcgagcgcaggacagggacgaacaaccttgcgtgcgaggcgaggccgctccgattcgacagacgcaggcgcagcgcagggatggacgccttctactcgacctcgtcggcggcggccagcggatggggctacgactccctcaagaacttccgcgagatctcccccgccgtgcagtcccacctcaagctcgtttacctgaccctatgctttgccctggcctcatctgccgtgggtgcttacctgcacattgccctgaacattggcgggatgctgacaatgctcgcgtgtatcggaaccatcgcctggatgttctcggtgccagtctatgaggagaggaagaggtttgggctgctgatgggtgcagccctcctggaaggggcttcagttggacctctgattgagcttgccatagactttgacccaagcatcctcgtgacagggtttgtcggaaccgccatcgccttcgggtgcttctctggcgccgccatcatcgccaagcgcagggagtacctgtacctcggcggcctgctctcctctggcctgtcgatcctgctctggctgcagtttgccacgtccatctttggccactcctctggcagcttcatgtttgaggtttactttggcctgttgatcttcctggggtacatggtgtacgacacgcaggagatcatcgagagggcgcaccacggtgacatggactacatcaagcacgcgctcaccctcttcaccgacttcgtcgccgtcctcgtccgcatcctcatcatcatgctcaagaacgcaggcgacaagtcggaggacaagaagaagaggaagaggaggtcctgaacgtgtcctctgcacatcgtagataccatcaccaccgcgctactggtaccaccaccactgctaagtacttgtaggaattaagctggcgcagtaacttggcgccgtgccacccttgttaattcgcgctcgtgtgaacattgtgtgagtttgatgctgctgatgaagcatttgcagatgctgtctgcgttccggatctcttgtgttcctgttaccgtcacgataatagaaacctgagacgatttggtttggtttacgaagaacatggctatgcttgtttgtgattgaag

SEQ ID NO: 63438 - protein, 301 aa, Triticum aestivum
  peptide (1)..(301): Ceres Seq. ID no. 14302005
LPSPVSKSIHPNQRKKKKRKREKSTRKGERRTGTNNLACEARPLRFDRRRRSAGMDAFYSTSSAAASGWGYDSLKNFREISPAVQSHLKLVYLTLCFALASSAVGAYLHIALNIGGMLTMLACIGTIAWMFSVPVYEERKRFGLLMGAALLEGASVGPLIELAIDFDPSILVTGFVGTAIAFGCFSGAAIIAKRREYLYLGGLLSSGLSILLWLQFATSIFGHSSGSFMFEVYFGLLIFLGYMVYDTQEIIERAHHGDMDYIKHALTLFTDFVAVLVRILIIMLKNAGDKSEDKKKRKRRS

SEQ ID NO: 63439 - protein, 247 aa, Triticum aestivum
  peptide (1)..(247): Ceres Seq. ID no. 14302006
MDAFYSTSSAAASGWGYDSLKNFREISPAVQSHLKLVYLTLCFALASSAVGAYLHIALNIGGMLTMLACIGTIAWMFSVPVYEERKRFGLLMGAALLEGASVGPLIELAIDFDPSILVTGFVGTAIAFGCFSGAAIIAKRREYLYLGGLLSSGLSILLWLQFATSIFGHSSGSFMFEVYFGLLIFLGYMVYDTQEIIERAHHGDMDYIKHALTLFTDFVAVLVRILIIMLKNAGDKSEDKKKRKRRS

SEQ ID NO: 63440 - protein, 185 aa, Triticum aestivum
  peptide (1)..(185): Ceres Seq. ID no. 14302007
MLTMLACIGTIAWMFSVPVYEERKRFGLLMGAALLEGASVGPLIELAIDFDPSILVTGFVGTAIAFGCFSGAAIIAKRREYLYLGGLLSSGLSILLWLQFATSIFGHSSGSFMFEVYFGLLIFLGYMVYDTQEIIERAHHGDMDYIKHALTLFTDFVAVLVRILIIMLKNAGDKSEDKKKRKRRS

SEQ ID NO: 63441 - DNA, 1249 bp, Triticum aestivum
  misc_feature (1)..(1249): Ceres Seq. ID no. 13584416
caaaccaaatcaagcgcttcctccgccgctgcccaacagctcgcacccggctcccattcattctcttggcaaatcgcccagttcatcctaaattaccagctctcctcggcttcccttcctccaaatcgtcggcgttttcttcctctggttctctgcctgtgtgtccgagtttcttgatcgacaagggcatggcgacgacggtggactggcgcagctataggcccgatcttcctgccgcgatgtatcacatggtggacagcagggaccaggtaatgcacgcgtttgctccggcgacggcgcagggcgcggctccgaccatctcgttcgccttcccctgccccggcgcggagcagagcgccggcctgcttcgtggcgccagctacctcactcccgcgcaaatcctccagctccagtcgcagctgcaccacgtgcgccgggcgccgggcgcggccatggccgcggtggggcagccgatgaagcggcacggcgtggcagcgctcccggcgcggccggcgaccaagctttaccgcggcgtaaggcagcggcattgggggaagtgggtcgccgagatccgcctgccccgcaaccgcacccgcctctggctcggcaccttcgacaccgccgacgaggccgcgctggcctacgacgccgccgccttccggctccgcggcgagtccgccaggctcaacttccccgagctcaggcgcggcggcgagcaccacggcccgccgctcgacgccgcgatcgacgccaagctccgctccatctgccacggggaagacatgccccagagccagagcgatgagacgccggcgccgacgacgacactgacgccgatttctttcccggacgtcaagagcgagccagtctgctccgtctccgagagctcgtcgtcggctgacggcgaggtgtcctcgtgctccgacgtcgtcccggagatgcagcttcttgatttctcggaggctccatgggacgagttcctgctgcgcaagtacccgtcgctcgagatcgactgggacgcgatcctttcttgaatcaagttcatgcttgatccacagctcgtccaaagtgattacttctgctttcattaggctcttggataggttattatgggtttggtcaagtattcatgtgtaacatcaacccctgctctgcttggtttttgaatggcattgccaggaaggaggttttatgtagaaatttaagtctgtcatgtagttttgtgattcaataaagatacactttggtt

SEQ ID NO: 63442 - protein, 343 aa, Triticum aestivum
  peptide (1)..(343): Ceres Seq. ID no. 15222791
NQIKRFLRRCPTARTRLPFILLANRPVHPKLPALLGFPSSKSSAFSSSGSLPVCPSFLIDKGMATTVDWRSYRPDLPAAMYHMVDSRDQVMHAFAPATAQGAAPTISFAFPCPGAEQSAGLLRGASYLTPAQILQLQSQLHHVRRAPGAAMAAVGQPMKRHGVAALPARPATKLYRGVRQRHWGKWVAEIRLPRNRTRLWLGTFDTADEAALAYDAAAFRLRGESARLNFPELRRGGEHHGPPLDAAIDAKLRSICHGEDMPQSQSDETPAPTTTLTPISFPDVKSEPVCSVSESSSSADGEVSSCSDVVPEMQLLDFSEAPWDEFLLRKYPSLEIDWDAILS

SEQ ID NO: 63443 - protein, 281 aa, Triticum aestivum
  peptide (1)..(281): Ceres Seq. ID no. 15222792
MATTVDWRSYRPDLPAAMYHMVDSRDQVMHAFAPATAQGAAPTISFAFPCPGAEQSAGLLRGASYLTPAQILQLQSQLHHVRRAPGAAMAAVGQPMKRHGVAALPARPATKLYRGVRQRHWGKWVAEIRLPRNRTRLWLGTFDTADEAALAYDAAAFRLRGESARLNFPELRRGGEHHGPPLDAAIDAKLRSICHGEDMPQSQSDETPAPTTTLTPISFPDVKSEPVCSVSESSSSADGEVSSCSDVVPEMQLLDFSEAPWDEFLLRKYPSLEIDWDAILS

SEQ ID NO: 63444 - protein, 264 aa, Triticum aestivum
  peptide (1)..(264): Ceres Seq. ID no. 15222793
MYHMVDSRDQVMHAFAPATAQGAAPTISFAFPCPGAEQSAGLLRGASYLTPAQILQLQSQLHHVRRAPGAAMAAVGQPMKRHGVAALPARPATKLYRGVRQRHWGKWVAEIRLPRNRTRLWLGTFDTADEAALAYDAAAFRLRGESARLNFPELRRGGEHHGPPLDAAIDAKLRSICHGEDMPQSQSDETPAPTTTLTPISFPDVKSEPVCSVSESSSSADGEVSSCSDVVPEMQLLDFSEAPWDEFLLRKYPSLEIDWDAILS

SEQ ID NO: 63445 - DNA, 1359 bp, Triticum aestivum
  misc_feature (1)..(1359): Ceres Seq. ID no. 13584004
acgtccctcggcagtagatcgaagtacgtcagaggatctcgttcccccctcccctcccgtccgccgccgcctttctaccccactttcccggcgccagcttgttagatcccggcgccagcttcagccacgatattcaactattgggtgtgttaaattctcgaggatgatgaatcgtcagtttgcgaatatgatagtacacaattaccccaagggagtttattccctgcgccggatcaacctcatggagtatctcttctacccttcaacagaagctgccgaaaaggcagaagtgaataagaagggatggttatccaccatgttgaaagggagccccaagcagagtctgcccaagacgaacatcaacttctcatcactgcctaacatggccgacttaactaccaggcatttcttctccctgctgagagggcagggggagggctctgtcatgtttgtcagccctaacgtccacacgatgatgtacgacactagcacggacttcgtctttggcatgccacaagccaacttctgtaagcagagtgactcaatcgccctgtccatcactcggcggagctatggccaggacaaccacaagctctatgtcataggaaaaggagaggacaatgccttgttcgaggtcttgaactataccaggacaactgatctgaacaactcgtcttggtactggcgacctctaccctgcccgccactgtttcggccgtgcctgcctggcagcaacagcaaagtttgtcctccctctgcagccgctgtgttggatgccgccacaatatgtgtctcatctgtggatgctggagcctgcgccttctttgacacggcaacgcgcgagtggaggcaggctggcagctgggtgctgcccatccacggtgcggcggagtatgtccctgagtttgacctctggtttggcctcgacgatgtcattggcaaccccaaccattgcctgcgtgcttttgacttcgattcctccaggcgaccggtggtgcggcactcctggaactatctcagcgtcctgcccgatgagtggttgccgcggcagaggcacctgctaaacatgggctcaggcaagttctgcatcgccaccagctttcgaaatctcttgaggcacacctcgtgcagaccacttcatggtgcagtcaatgagcttactgtcttgaccggcgtggaggtggtgcgcaatgtcaatggtttccagatcatcaagcacaagtctgaatgttacagcttggaggacaatagaatccactgtgtgctctgaggaaaacttatctatgtttcactgttattggatggatccttccatgttttttcttctcagatgtgaatgaaaatatttgcttacctttt

SEQ ID NO: 63446 - protein, 422 aa, Triticum aestivum
  peptide (1)..(422): Ceres Seq. ID no. 13584005
RPSAVDRSTSEDLVPPSPPVRRRLSTPLSRRQLVRSRRQLQPRYSTIGCVKFSRMMNRQFANMIVHNYPKGVYSLRRINLMEYLFYPSTEAAEKAEVNKKGWLSTMLKGSPKQSLPKTNINFSSLPNMADLTTRHFFSLLRGQGEGSVMFVSPNVHTMMYDTSTDFVFGMPQANFCKQSDSIALSITRRSYGQDNHKLYVIGKGEDNALFEVLNYTRTTDLNNSSWYWRPLPCPPLFRPCLPGSNSKVCPPSAAAVLDAATICVSSVDAGACAFFDTATREWRQAGSWVLPIHGAAEYVPEFDLWFGLDDVIGNPNHCLRAFDFDSSRRPVVRHSWNYLSVLPDEWLPRQRHLLNMGSGKFCIATSFRNLLRHTSCRPLHGAVNELTVLTGVEVVRNVNGFQIIKHKSECYSLEDNRIHCVL

SEQ ID NO: 63447 - protein, 368 aa, Triticum aestivum
  peptide (1)..(368): Ceres Seq. ID no. 13584006
MMNRQFANMIVHNYPKGVYSLRRINLMEYLFYPSTEAAEKAEVNKKGWLSTMLKGSPKQSLPKTNINFSSLPNMADLTTRHFFSLLRGQGEGSVMFVSPNVHTMMYDTSTDFVFGMPQANFCKQSDSIALSITRRSYGQDNHKLYVIGKGEDNALFEVLNYTRTTDLNNSSWYWRPLPCPPLFRPCLPGSNSKVCPPSAAAVLDAATICVSSVDAGACAFFDTATREWRQAGSWVLPIHGAAEYVPEFDLWFGLDDVIGNPNHCLRAFDFDSSRRPVVRHSWNYLSVLPDEWLPRQRHLLNMGSGKFCIATSFRNLLRHTSCRPLHGAVNELTVLTGVEVVRNVNGFQIIKHKSECYSLEDNRIHCVL

SEQ ID NO: 63448 - protein, 367 aa, Triticum aestivum
  peptide (1)..(367): Ceres Seq. ID no. 13584007
MNRQFANMIVHNYPKGVYSLRRINLMEYLFYPSTEAAEKAEVNKKGWLSTMLKGSPKQSLPKTNINFSSLPNMADLTTRHFFSLLRGQGEGSVMFVSPNVHTMMYDTSTDFVFGMPQANFCKQSDSIALSITRRSYGQDNHKLYVIGKGEDNALFEVLNYTRTTDLNNSSWYWRPLPCPPLFRPCLPGSNSKVCPPSAAAVLDAATICVSSVDAGACAFFDTATREWRQAGSWVLPIHGAAEYVPEFDLWFGLDDVIGNPNHCLRAFDFDSSRRPVVRHSWNYLSVLPDEWLPRQRHLLNMGSGKFCIATSFRNLLRHTSCRPLHGAVNELTVLTGVEVVRNVNGFQIIKHKSECYSLEDNRIHCVL

SEQ ID NO: 63449 - DNA, 1314 bp, Triticum aestivum
  misc_feature (1)..(1314): Ceres Seq. ID no. 12616332
atttcaatttttgccccatcggcggagcaaaacagggtgtgggagtgttcgcttttcaggtgggctcggtcggagccgtcggaggagatcgccgccatccatggaaacgctggccagcgccatgcggcgcgacaaccgccgcttcaagaccccgccctcctcctccgccgccgccgcctccgccggcagggtccccctcgtcatggccttcctcgcctgcctcgcctgggtgtacgtcgccggccggctatggcaggacgcgcagacccgggcgatcctctccggcctcctcgagaagagcaccggcagtctccccaaggagatctcggtggacgacaagctgagggacctcggatgcactgggattgggaggaagatcgccgaggcggagatggacattgccaaggccaagagcgagggctacctgtggggaaatgggactggtgccggtgctgggggttccgaccggaagaagttcctcgcggtcattggagtttacaccggctttggctcccggctcaagaggaacaccttccgtggctcctggatgcccagaggtgatgctttaaagacgcttgaggaaaagggtgtggttattcgttttgttattgaccggagtcctaatcgaggtgatagcttggaccgtaatattaacgaagaaagcagaaagacaaacgatttcttgattctggaaagtcacgaggaagctgcagaggaattacctaaaaaagttaagtttttcttcagtgcagcaatagaagcttgggatgcagagttctacgtcaagattgacgataacattaatcttgacttggctgggttaattgagatgcttaacgcccgtcgaggtagccaagggttgtacatgggctgcatgaaatcaggagctgtcgttagtgaagaggagcaacaatggtatgaacctgaatggtggaaatttggagattcaaggacgtattttcgccatgctgctggttctttatttatcctctcaaacaatttggctcgctacatcaacataaacagtgcatcgctgcagagctatgcgcatgatgacatatcagttggttcatggatgatggggcttaatgccacttacgttgatgacgaccgtctgtgttgcctcagtccggtacaagagaaagtatgttcctttggatgagcggaaggaccagccgcccccccttctgatggtggtgtcctgatgaagaggtgtttttgtacattagccattttgtacacacctatagcaggcagcctatgtgaatgattgaatgaatgcaagaaatatatgaagaaactactttgagatgt

SEQ ID NO: 63450 - protein, 386 aa, Triticum aestivum
  peptide (1)..(386): Ceres Seq. ID no. 12616333
FQFLPHRRSKTGCGSVRFSGGLGRSRRRRSPPSMETLASAMRRDNRRFKTPPSSSAAAASAGRVPLVMAFLACLAWVYVAGRLWQDAQTRAILSGLLEKSTGSLPKEISVDDKLRDLGCTGIGRKIAEAEMDIAKAKSEGYLWGNGTGAGAGGSDRKKFLAVIGVYTGFGSRLKRNTFRGSWMPRGDALKTLEEKGVVIRFVIDRSPNRGDSLDRNINEESRKTNDFLILESHEEAAEELPKKVKFFFSAAIEAWDAEFYVKIDDNINLDLAGLIEMLNARRGSQGLYMGCMKSGAVVSEEEQQWYEPEWWKFGDSRTYFRHAAGSLFILSNNLARYININSASLQSYAHDDISVGSWMMGLNATYVDDDRLCCLSPVQEKVCSFG

SEQ ID NO: 63451 - protein, 353 aa, Triticum aestivum
  peptide (1)..(353): Ceres Seq. ID no. 12616334
METLASAMRRDNRRFKTPPSSSAAAASAGRVPLVMAFLACLAWVYVAGRLWQDAQTRAILSGLLEKSTGSLPKEISVDDKLRDLGCTGIGRKIAEAEMDIAKAKSEGYLWGNGTGAGAGGSDRKKFLAVIGVYTGFGSRLKRNTFRGSWMPRGDALKTLEEKGVVIRFVIDRSPNRGDSLDRNINEESRKTNDFLILESHEEAAEELPKKVKFFFSAAIEAWDAEFYVKIDDNINLDLAGLIEMLNARRGSQGLYMGCMKSGAVVSEEEQQWYEPEWWKFGDSRTYFRHAAGSLFILSNNLARYININSASLQSYAHDDISVGSWMMGLNATYVDDDRLCCLSPVQEKVCSFG

SEQ ID NO: 63452 - protein, 346 aa, Triticum aestivum
  peptide (1)..(346): Ceres Seq. ID no. 12616335
MRRDNRRFKTPPSSSAAAASAGRVPLVMAFLACLAWVYVAGRLWQDAQTRAILSGLLEKSTGSLPKEISVDDKLRDLGCTGIGRKIAEAEMDIAKAKSEGYLWGNGTGAGAGGSDRKKFLAVIGVYTGFGSRLKRNTFRGSWMPRGDALKTLEEKGVVIRFVIDRSPNRGDSLDRNINEESRKTNDFLILESHEEAAEELPKKVKFFFSAAIEAWDAEFYVKIDDNINLDLAGLIEMLNARRGSQGLYMGCMKSGAVVSEEEQQWYEPEWWKFGDSRTYFRHAAGSLFILSNNLARYININSASLQSYAHDDISVGSWMMGLNATYVDDDRLCCLSPVQEKVCSFG

SEQ ID NO: 63453 - DNA, 1356 bp, Triticum aestivum
  misc_feature (1)..(1356): Ceres Seq. ID no. 13597393
attacctagtacatcctaatcgaaaaaagagccctatagcccaaatggcagctctcctgaaccctacggctcggcgcctcaccctcgctgcctgccgccgcctctctacggcgccggcggtggagcccctcgtggctcactggagcacccaagcaagatacaattccagtctggtggaggttaatggcggatttggggagatggttgccgacacaaagaggtactacgtgcttggaggcaaaggtggtgttgggacaacaagcatggcagcatcgcttgctatgaagtttgccaaccatggtgaaccgacgctcatagtttctatgcacccagcacattcactgggtgatacatttgaacaagacctgagtggcggtaatattgtacctgtcaatggagtcgactctctttttgctgccgagattggccatgttaatacaaaggaggaatcttctaatagtggatcttttatgcgtaatatactggacaagatagggcttggagtccttgctgatccgctgggaaagaataagctgcatgaaatgctgatgaaaactcctggatttggagaagccgttgcaatttcgaagctgatgcaaatcgtcgaactgcaagagagcaataaatttaggcgcatagttttggataccgcggcaactgggcatacacttaaccttttatctgctacaactttaatggagaagctccttggtatggccaataaggctgtgaatttagcgtcatccttcccagctcttaaatcagctttcgggaaagaccaaatagatcctgccaggatagaggtgctaagaaagcagattgccagagtacatgagcttatgcaagatccacaatcaactgaatttatcattctgacgattcctacggtgatggctatcaccgagtcgtcaaggtttcatgcatctttgaagaaggatggtgcgtcagcaacaaggcttgtcgtaaatcaagtattgcccccctctacatctgagtgcagattttgttctacaaaacgcaaggaagaagcacgtgccctgaatatgataagcaatgatcgtgaacttggcggcctagagctaatccaagcgccacttctcgatgtggaggtcagaggcgcccctgctctcagattcttcggcgatgtggtctggaaatagacgctaggatgccaggccgtgacgagaattttgttatttcatctgaaactccacagtactggtggcggcactcaaattgtctagaaatgtggttgaatctggagaaaagatgaaacccagcaggataccagactgttcaggctgtagacgtttggtaggttcttaaataagaaacggagtattagttgctgccctc

SEQ ID NO: 63454 - protein, 385 aa, Triticum aestivum
  peptide (1)..(385): Ceres Seq. ID no. 15222088
YLVHPNRKKSPIAQMAALLNPTARRLTLAACRRLSTAPAVEPLVAHWSTQARYNSSLVEVNGGFGEMVADTKRYYVLGGKGGVGTTSMAASLAMKFANHGEPTLIVSMHPAHSLGDTFEQDLSGGNIVPVNGVDSLFAAEIGHVNTKEESSNSGSFMRNILDKIGLGVLADPLGKNKLHEMLMKTPGFGEAVAISKLMQIVELQESNKFRRIVLDTAATGHTLNLLSATTLMEKLLGMANKAVNLASSFPALKSAFGKDQIDPARIEVLRKQIARVHELMQDPQSTEFIILTIPTVMAITESSRFHASLKKDGASATRLVVNQVLPPSTSECRFCSTKRKEEARALNMISNDRELGGLELIQAPLLDVEVRGAPALRFFGDVVWK

SEQ ID NO: 63455 - protein, 371 aa, Triticum aestivum
  peptide (1)..(371): Ceres Seq. ID no. 15222089
MAALLNPTARRLTLAACRRLSTAPAVEPLVAHWSTQARYNSSLVEVNGGFGEMVADTKRYYVLGGKGGVGTTSMAASLAMKFANHGEPTLIVSMHPAHSLGDTFEQDLSGGNIVPVNGVDSLFAAEIGHVNTKEESSNSGSFMRNILDKIGLGVLADPLGKNKLHEMLMKTPGFGEAVAISKLMQIVELQESNKFRRIVLDTAATGHTLNLLSATTLMEKLLGMANKAVNLASSFPALKSAFGKDQIDPARIEVLRKQIARVHELMQDPQSTEFIILTIPTVMAITESSRFHASLKKDGASATRLVVNQVLPPSTSECRFCSTKRKEEARALNMISNDRELGGLELIQAPLLDVEVRGAPALRFFGDVVWK

SEQ ID NO: 63456 - protein, 319 aa, Triticum aestivum
  peptide (1)..(319): Ceres Seq. ID no. 15222090
MVADTKRYYVLGGKGGVGTTSMAASLAMKFANHGEPTLIVSMHPAHSLGDTFEQDLSGGNIVPVNGVDSLFAAEIGHVNTKEESSNSGSFMRNILDKIGLGVLADPLGKNKLHEMLMKTPGFGEAVAISKLMQIVELQESNKFRRIVLDTAATGHTLNLLSATTLMEKLLGMANKAVNLASSFPALKSAFGKDQIDPARIEVLRKQIARVHELMQDPQSTEFIILTIPTVMAITESSRFHASLKKDGASATRLVVNQVLPPSTSECRFCSTKRKEEARALNMISNDRELGGLELIQAPLLDVEVRGAPALRFFGDVVWK

SEQ ID NO: 63457 - DNA, 942 bp, Triticum aestivum
  misc_feature (1)..(942): Ceres Seq. ID no. 13597394
ccacccagttcccctcttcactccacgccgtgctccctctctttcccctctccccgatctccgtctccgtctccgtcctcccgccgctgccgccatggacggcgtcatcggccagatcttggagaagcaggtcctgtcggccgcgaaggcggtcgaggacaagctagatgagcagatcgccgcgctcgagcggctcgacccggacgacatcgaggcgctccgcgagcgccggatgctgcagatgcgccgcgcggccgagcgccgggccaagtggcgcgccctggggcacggcgagtatacggaggtccccgagaaagagttcttctccaccgccaaggccagcgagcgcatggtgtgccacttctaccgcgacaactggccgtgcaaggttatggacaaacacatgtcgattctcgctaaacagcatgtagaaacacggtttatcaaagtccatgctgaaaaggctccctttctgaccgaaaaactaagggttgttgtgctcccaactcttgccctagtgaagaatgccaaggttgaggattatgtggttggatttgatgagctgggtggtaaagatgacttcagcactgaggatctggaggaacgcattgccaaagctcaagtgatcttcctcgacggagaggggcctgcaaatccttccaagcaagctgctgccagcaagcgaagcgttcgacaatcagatactggcaactcagactcagactagttctgttcctgtattgaaggcgtgtgcgccaaggatttttatatataggatttatgccaagctgttatgctatccttactagtaataggaaagaagtttgtgtttcgatggcgatttgaaccgcaattgtcactgttgtagagtgctcttgtttttaccatgcgtccatacctggtttggtttgtttatttgagtggaaatgtttttncgttgct

SEQ ID NO: 63458 - protein, 241 aa, Triticum aestivum
  peptide (1)..(241): Ceres Seq. ID no. 15222091
HPVPLFTPRRAPSLSPLPDLRLRLRPPAAAAMDGVIGQILEKQVLSAAKAVEDKLDEQIAALERLDPDDIEALRERRMLQMRRAAERRAKWRALGHGEYTEVPEKEFFSTAKASERMVCHFYRDNWPCKVMDKHMSILAKQHVETRFIKVHAEKAPFLTEKLRVVVLPTLALVKNAKVEDYVVGFDELGGKDDFSTEDLEERIAKAQVIFLDGEGPANPSKQAAASKRSVRQSDTGNSDSD

SEQ ID NO: 63459 - protein, 210 aa, Triticum aestivum
  peptide (1)..(210): Ceres Seq. ID no. 15222092
MDGVIGQILEKQVLSAAKAVEDKLDEQIAALERLDPDDIEALRERRMLQMRRAAERRAKWRALGHGEYTEVPEKEFFSTAKASERMVCHFYRDNWPCKVMDKHMSILAKQHVETRFIKVHAEKAPFLTEKLRVVVLPTLALVKNAKVEDYVVGFDELGGKDDFSTEDLEERIAKAQVIFLDGEGPANPSKQAAASKRSVRQSDTGNSDSD

SEQ ID NO: 63460 - protein, 164 aa, Triticum aestivum
  peptide (1)..(164): Ceres Seq. ID no. 15222093
MLQMRRAAERRAKWRALGHGEYTEVPEKEFFSTAKASERMVCHFYRDNWPCKVMDKHMSILAKQHVETRFIKVHAEKAPFLTEKLRVVVLPTLALVKNAKVEDYVVGFDELGGKDDFSTEDLEERIAKAQVIFLDGEGPANPSKQAAASKRSVRQSDTGNSDSD

SEQ ID NO: 63461 - DNA, 1393 bp, Triticum aestivum
  misc_feature (1)..(1393): Ceres Seq. ID no. 13598234
acacaaaattccgttcagcgcgtgcagtagagagctccccgcttctcctcatcctcctccccaactccaatactctccacagaaatctccgctccttctcgtcccctctcgctcgcgtgcgcgtgaggtgcgcaatggcggcggcggcggtggcgttgtcgaacggctccggtggcgactccaaggccgagttcgcggaaatatacagcaggctcaaggaggagatgctcgaggaccccgccttcgagttcaccgacgagtcgctccagtggatcgaccgcatgctggattacaatgtcctaggaggaaagtgcaaccgtgggctctctgtcatcgatagctacaagacattgaaaggtgtagatgttttgaggaaggaggagacatttcttgcctgcacccttggttggtgtattgaatggcttcaagcatattttcttgtgcttgatgatatcatggacaactcccagacacgacggggccagccttgctggtttagggtgcctcaggttggccttattgctgtaaacgatgggattatccttcgcaaccatatttcacggatccttcaacgccacttcagaggaaaaccgtattatgttgatctcattgatttgttcaatgaggttgaattcaagacagcttcagggcagttgttggatcttatcactactcacgagggagaaaaggatctcacaaaatataacttgaatgttcaccggcgcattgtgcaatacaagacagcgtactattcattttatcttccggttgcatgtgcattgctgctgtcgggtgagaatttggataacttcggcgatgtaaagaacattcttgttgaaatgggaacatactttcaagttcaggatgattatctagattgttttggagatcctgaatctattggcaagattggaactgacattgaagactacaagtgttcctggttagttgtgcaagctcttgagcatgcagatgagagccaaaagggcattctacttgaaaattatgggaagtcagatccagagtctgttgcaaaagtgaaggatctgtataaagaacttgatctggagacggcatttcacaagtatgagcgggagagctacaataagctgatcgccgacatcgaggcccagccaagcaaagctgttcagaaagttttgatgtctttcctggagaagatctacaagaggcagaagtagagctaagctcttggagaggttgttgtgcctttccgtgctttggtaacttattccatgttctgtgtgtgttggtcttattaccataatgtacagcgtgttattccttccaacaataaactacggtgctattttttagtggtgcgtgaacctgctgtgccataaccatgttatttgaagctctctaatgtttttct

SEQ ID NO: 63462 - protein, 398 aa, Triticum aestivum
  peptide (1)..(398): Ceres Seq. ID no. 13598235
TKFRSARAVESSPLLLILLPNSNTLHRNLRSFSSPLARVRVRCAMAAAAVALSNGSGGDSKAEFAEIYSRLKEEMLEDPAFEFTDESLQWIDRMLDYNVLGGKCNRGLSVIDSYKTLKGVDVLRKEETFLACTLGWCIEWLQAYFLVLDDIMDNSQTRRGQPCWFRVPQVGLIAVNDGIILRNHISRILQRHFRGKPYYVDLIDLFNEVEFKTASGQLLDLITTHEGEKDLTKYNLNVHRRIVQYKTAYYSFYLPVACALLLSGENLDNFGDVKNILVEMGTYFQVQDDYLDCFGDPESIGKIGTDIEDYKCSWLVVQALEHADESQKGILLENYGKSDPESVAKVKDLYKELDLETAFHKYERESYNKLIADIEAQPSKAVQKVLMSFLEKIYKRQK

SEQ ID NO: 63463 - protein, 354 aa, Triticum aestivum
  peptide (1)..(354): Ceres Seq. ID no. 13598236
MAAAAVALSNGSGGDSKAEFAEIYSRLKEEMLEDPAFEFTDESLQWIDRMLDYNVLGGKCNRGLSVIDSYKTLKGVDVLRKEETFLACTLGWCIEWLQAYFLVLDDIMDNSQTRRGQPCWFRVPQVGLIAVNDGIILRNHISRILQRHFRGKPYYVDLIDLFNEVEFKTASGQLLDLITTHEGEKDLTKYNLNVHRRIVQYKTAYYSFYLPVACALLLSGENLDNFGDVKNILVEMGTYFQVQDDYLDCFGDPESIGKIGTDIEDYKCSWLVVQALEHADESQKGILLENYGKSDPESVAKVKDLYKELDLETAFHKYERESYNKLIADIEAQPSKAVQKVLMSFLEKIYKRQK

SEQ ID NO: 63464 - protein, 324 aa, Triticum aestivum
  peptide (1)..(324): Ceres Seq. ID no. 13598237
MLEDPAFEFTDESLQWIDRMLDYNVLGGKCNRGLSVIDSYKTLKGVDVLRKEETFLACTLGWCIEWLQAYFLVLDDIMDNSQTRRGQPCWFRVPQVGLIAVNDGIILRNHISRILQRHFRGKPYYVDLIDLFNEVEFKTASGQLLDLITTHEGEKDLTKYNLNVHRRIVQYKTAYYSFYLPVACALLLSGENLDNFGDVKNILVEMGTYFQVQDDYLDCFGDPESIGKIGTDIEDYKCSWLVVQALEHADESQKGILLENYGKSDPESVAKVKDLYKELDLETAFHKYERESYNKLIADIEAQPSKAVQKVLMSFLEKIYKRQK

SEQ ID NO: 63465 - DNA, 1061 bp, Triticum aestivum
  misc_feature (1)..(1061): Ceres Seq. ID no. 13584254
gaaaaacccacgcgaccgagaccagcagcagcaccacctcctccctccatcctgatccgatctgactgagccggccatggcggttagggtttggctctccgccatcctcctcgccttcctcctcgccgcctcccccttcgcccaagttgctagagctcagtctgaggaagatgctgctatgcaagaagttgttgatggggctgatctaggatatgtgggtgatgatactccggtttccagtgaagagcctttaagccctgctcctggtgtggagactgtttgcgtcttccccaaaaacgctgggaaaattgtaccagcaggtgaagaaactgagcttttggttggcctgcaaaatgagggtgaatcaactttgaatgttgttgctgtccattcaaccctgcatcttccttatgatcacaaaatgtatggacaaaaccttacagttcagagtttctacaacgcgtcagttcctgtctctgtgcaagcaacctttccctatacatttgccgtgagcaaattcttgcagcctggagcatatgatcttgttggttacattgtgtacgagattgatcagcacccttaccagaacgtattctacaatggcaccattgaggttgttgaggtcggagggttactgagtgttgaatctgtgttccttattacccttggaattgcacttcttggtctcctaggattgtgggcttatggtcaagtgcaacagctctcgaagaaaacaaagaaaggccccaaggtggaactcggaactggaacaactgacgccaacatggacgagtggctggagggtaccgcgtttgcaaaggacaaggccaagaaaaacaaatagattcgaggttgatgggcctagctagacatttcaggatctagaatgagacaaatcgagggtagcccttcacaagtaacctggatagatgagagagcagaggtgtttgaactagtctcgtggctgcacatcttgttgacaccattttcgaccttgctgtgtactttacagatagttttccttgaaacacaattttgttgaaggtatatgttatctatgg

SEQ ID NO: 63466 - protein, 255 aa, Triticum aestivum
  peptide (1)..(255): Ceres Seq. ID no. 13584255
MAVRVWLSAILLAFLLAASPFAQVARAQSEEDAAMQEVVDGADLGYVGDDTPVSSEEPLSPAPGVETVCVFPKNAGKIVPAGEETELLVGLQNEGESTLNVVAVHSTLHLPYDHKMYGQNLTVQSFYNASVPVSVQATFPYTFAVSKFLQPGAYDLVGYIVYEIDQHPYQNVFYNGTIEVVEVGGLLSVESVFLITLGIALLGLLGLWAYGQVQQLSKKTKKGPKVELGTGTTDANMDEWLEGTAFAKDKAKKNK

SEQ ID NO: 63467 - protein, 221 aa, Triticum aestivum
  peptide (1)..(221): Ceres Seq. ID no. 13584256
MQEVVDGADLGYVGDDTPVSSEEPLSPAPGVETVCVFPKNAGKIVPAGEETELLVGLQNEGESTLNVVAVHSTLHLPYDHKMYGQNLTVQSFYNASVPVSVQATFPYTFAVSKFLQPGAYDLVGYIVYEIDQHPYQNVFYNGTIEVVEVGGLLSVESVFLITLGIALLGLLGLWAYGQVQQLSKKTKKGPKVELGTGTTDANMDEWLEGTAFAKDKAKKNK

SEQ ID NO: 63468 - protein, 140 aa, Triticum aestivum
  peptide (1)..(140): Ceres Seq. ID no. 13584257
MYGQNLTVQSFYNASVPVSVQATFPYTFAVSKFLQPGAYDLVGYIVYEIDQHPYQNVFYNGTIEVVEVGGLLSVESVFLITLGIALLGLLGLWAYGQVQQLSKKTKKGPKVELGTGTTDANMDEWLEGTAFAKDKAKKNK

SEQ ID NO: 63469 - DNA, 1092 bp, Triticum aestivum
  misc_feature (1)..(1092): Ceres Seq. ID no. 13584012
aatttctgctaacctgctgctgcggtcgccggcggcgaggaggaggaggaaggggctgagagatggcgggcgccggcggcacgagggagcgggaggaggaagaggaggacgacttcgtctgcctggatccctccttcttcatgaaccgcaactacgagatgaagaccttcacctacggctcccaggagctccagctcctctgcctcagctccgcctgcactgattatgatcttactggacaattagtgtggccaggtgctgttctgatgaacacgtacctatctgaacaccctgagactgtgaaggggcgttcactaattgagttaggatctgggatcggcattaccggcatattgtgcagccgtttctgcaaagaggtggtattgactgatcacaatgatgaagttctagagattataaagaaaaatatagagatgcagtcatgttctggcaatgcggatgcagtgttgactgctgagaagctagaatggggaaatcatgatcatctaagcaatatcattgaaaaacatcctgttggatttgatctcattcttggagccgatatctgcttccagcaagctagcattccatgtctctttgatactgtagagaagcttcttcgtatgcaggccaataaatgtagatttatactggcttatgtatcacgaaccaaagtcatggacgcactggtactgaaggaagctgaaaaacgtggaatgcttgtcgaggaagtggacgggacaagaacaaccatcacagatctcgaaggcgtcatattcgacatcaccctcaaatgacgcctccgatgaaatgcttgggtgacaattccatcagacaggaacaagatgtggagcctcctcccatcaggaaagccaatgttaccgccttcatgatctgctgagctggccctgaacatgatgtggtctctagtccgcatctctccactccatgggagaaaacagttgcacaacaccagcatcagtcctgatatggcgctgattgattcagcgtaacttttaaatgattcgtcggtcgtgacccctttcgctaaatcaagaagcgattcggggtcacgagcatcgcatcgccgtc

SEQ ID NO: 63470 - protein, 244 aa, Triticum aestivum
  peptide (1)..(244): Ceres Seq. ID no. 13584013
MAGAGGTREREEEEEDDFVCLDPSFFMNRNYEMKTFTYGSQELQLLCLSSACTDYDLTGQLVWPGAVLMNTYLSEHPETVKGRSLIELGSGIGITGILCSRFCKEVVLTDHNDEVLEIIKKNIEMQSCSGNADAVLTAEKLEWGNHDHLSNIIEKHPVGFDLILGADICFQQASIPCLFDTVEKLLRMQANKCRFILAYVSRTKVMDALVLKEAEKRGMLVEEVDGTRTTITDLEGVIFDITLK

SEQ ID NO: 63471 - protein, 218 aa, Triticum aestivum
  peptide (1)..(218): Ceres Seq. ID no. 13584014
MNRNYEMKTFTYGSQELQLLCLSSACTDYDLTGQLVWPGAVLMNTYLSEHPETVKGRSLIELGSGIGITGILCSRFCKEVVLTDHNDEVLEIIKKNIEMQSCSGNADAVLTAEKLEWGNHDHLSNIIEKHPVGFDLILGADICFQQASIPCLFDTVEKLLRMQANKCRFILAYVSRTKVMDALVLKEAEKRGMLVEEVDGTRTTITDLEGVIFDITLK

SEQ ID NO: 63472 - protein, 212 aa, Triticum aestivum
  peptide (1)..(212): Ceres Seq. ID no. 13584015
MKTFTYGSQELQLLCLSSACTDYDLTGQLVWPGAVLMNTYLSEHPETVKGRSLIELGSGIGITGILCSRFCKEVVLTDHNDEVLEIIKKNIEMQSCSGNADAVLTAEKLEWGNHDHLSNIIEKHPVGFDLILGADICFQQASIPCLFDTVEKLLRMQANKCRFILAYVSRTKVMDALVLKEAEKRGMLVEEVDGTRTTITDLEGVIFDITLK

SEQ ID NO: 63473 - DNA, 920 bp, Triticum aestivum
  misc_feature (1)..(920): Ceres Seq. ID no. 13503003
attttgactgattagcctcatgtgagcttacacttgcacgtttccaaaattggtctacgctttcacgtggtttactttcttcgtttcaaattgcttaaattttcgcaaagttaactacagacagtgctagtgtagagtagcatcatcagttcactgcgcaccgacagccaaactagcaccggggtccgaggcagacgccatggccgacgacgaggtggtcgtcgcgtccgcggaggagtcgctgaccactccgctgctcgagccagccgcgagcccccgcgacccgtcggtggaggtgagtctgtaccggcggggcgccggcccgcccaaggtcttccggtcgggcctgaggggccctcgccgcgaccgcctcgacgtgcgcggcatccaggcagagcacgagctccgcgccctcttcgccttcaagccgggggtctcccgccgcggcctccggatccggcccgacccggcgaccggccactccgccgtgcccttccgcgacggcgccgccatcgccctcgacggcgagcccaaggtgcaggtgtcgtggaccaagcctgcctcgatgatcgtcgtcggtctgctggtgctggcgttgatggcggtggtggctttcaacggggtgccggagtcgctactgtcgtcgagcgtagtcaaagccctcttctcgccgtggatcctcgccagcgcggttatcgtcttcgtccgtctcaggatgcggccacaagctcctccccgtctcaggatgcggccacaagctcctccatgaacggaaccgagctatggtactgtaataactctcctttgtgatatccagagaagcccttcttctctggtttctcttcaggaattatgtgcaatggagacaaaattccagaataaatgtgtgtgcagtttgcttcaacgcgaataatcatctc

SEQ ID NO: 63474 - protein, 189 aa, Triticum aestivum
  peptide (1)..(189): Ceres Seq. ID no. 13503004
MADDEVVVASAEESLTTPLLEPAASPRDPSVEVSLYRRGAGPPKVFRSGLRGPRRDRLDVRGIQAEHELRALFAFKPGVSRRGLRIRPDPATGHSAVPFRDGAAIALDGEPKVQVSWTKPASMIVVGLLVLALMAVVAFNGVPESLLSSSVVKALFSPWILASAVIVFVRLRMRPQAPPRLRMRPQAPP

SEQ ID NO: 63475 - DNA, 1539 bp, Triticum aestivum
  misc_feature (1)..(1539): Ceres Seq. ID no. 15224912
atatcagataatcagagttctggacttgaagtagagttcgatgatgagatcaggctgaagcttcaagagctggagcatgctttacttgatgatggagatgacatcttgttcgaaatttcccaggcgggttgcatcagtgatgaatgggccgatcccatgaaggatgtcttgcttgcaacttctccgaaagaatcggaatcaagcattagttgtgcaggtagcaacagcggagaagcacggaccccaaagcagttgctctttgactgtgccacggcattagctgaatataacgtagatgaagcacaggcaatcataacggacctccggcagatggtctcaatccaaggggacccttctcacaggattgcagcttatctggtggagggccttgctgcaagaatagtagcttcagggacgggcatctacaaggcattgacatgcaaggaccctccaaccctgtatcagctgtcagcaatgcaaatcctctttgagatctgcccatgctatcgatttggtttcatggctgctaattatgccatacttgaagcctgcaaaggcgaagaaaggatgcatattatagactttgacatcaatcaaggcagccagtatattacactgatgcagtttatgaaagatgatgcaaacaagccacgccatttgagaataactggtgtggatgatcacgagacagtacagaggactgttggaggtctgaaggtcattgggcaacgcctggagaagcttgcggaggactgcggaatatcttttgagttcagggcagtgggtgccgacatcggggatgttacacctgcaatgctagattgccgtcccggggaagcactagttgtgaattttgcattccagctgcaccaccttcctgatgaaagtgtttcgatcatgaacgaacgggatcagctccttcgtatggtgaagggccttcaaccaaagcttgtgaccctggttgagcaggatgccaataccaatactgctccatttcagacaaggttccgtgaggtctatgactactactccgctcttttcgattcactggacgcaacacttccaagggaaagtccggacagaatgaatgtggagaggcagtgccttgctagagaaattgttaacatcttggcttgcgaaggccctgatcgcgtggagaggtacgaagttgctgggaaatggagggcgagaatgacgatggctggattcgcaccgtgcccatttagcagcaacgtcatcggaggaataagatcgctgctgagctcgtactgcgacaggtacaagttcgaggaggaccatgggggacttcacttcggctggggagagaaaacgctcatcgtcgcctccgcgtggcaataggccgagctcgctgacttgggttgcattagcactgctgtattttaggagcttctggtgcagagattgtaaaaagggtgtgaaccacggaggagttcttggctgatcttatctaattttaggagtctgcttgtcagaataattgagtttggctgatcgcccgggtgaaaaaaaaaaaaaaaa

SEQ ID NO: 63476 - protein, 452 aa, Triticum aestivum
  peptide (1)..(452): Ceres Seq. ID no. 15224913
ISDNQSSGLEVEFDDEIRLKLQELEHALLDDGDDILFEISQAGCISDEWADPMKDVLLATSPKESESSISCAGSNSGEARTPKQLLFDCATALAEYNVDEAQAIITDLRQMVSIQGDPSHRIAAYLVEGLAARIVASGTGIYKALTCKDPPTLYQLSAMQILFEICPCYRFGFMAANYAILEACKGEERMHIIDFDINQGSQYITLMQFMKDDANKPRHLRITGVDDHETVQRTVGGLKVIGQRLEKLAEDCGISFEFRAVGADIGDVTPAMLDCRPGEALVVNFAFQLHHLPDESVSIMNERDQLLRMVKGLQPKLVTLVEQDANTNTAPFQTRFREVYDYYSALFDSLDATLPRESPDRMNVERQCLAREIVNILACEGPDRVERYEVAGKWRARMTMAGFAPCPFSSNVIGGIRSLLSSYCDRYKFEEDHGGLHFGWGEKTLIVASAWQ

SEQ ID NO: 63477 - protein, 400 aa, Triticum aestivum
  peptide (1)..(400): Ceres Seq. ID no. 15224914
MKDVLLATSPKESESSISCAGSNSGEARTPKQLLFDCATALAEYNVDEAQAIITDLRQMVSIQGDPSHRIAAYLVEGLAARIVASGTGIYKALTCKDPPTLYQLSAMQILFEICPCYRFGFMAANYAILEACKGEERMHIIDFDINQGSQYITLMQFMKDDANKPRHLRITGVDDHETVQRTVGGLKVIGQRLEKLAEDCGISFEFRAVGADIGDVTPAMLDCRPGEALVVNFAFQLHHLPDESVSIMNERDQLLRMVKGLQPKLVTLVEQDANTNTAPFQTRFREVYDYYSALFDSLDATLPRESPDRMNVERQCLAREIVNILACEGPDRVERYEVAGKWRARMTMAGFAPCPFSSNVIGGIRSLLSSYCDRYKFEEDHGGLHFGWGEKTLIVASAWQ

SEQ ID NO: 63478 - protein, 342 aa, Triticum aestivum
  peptide (1)..(342): Ceres Seq. ID no. 15224915
MVSIQGDPSHRIAAYLVEGLAARIVASGTGIYKALTCKDPPTLYQLSAMQILFEICPCYRFGFMAANYAILEACKGEERMHIIDFDINQGSQYITLMQFMKDDANKPRHLRITGVDDHETVQRTVGGLKVIGQRLEKLAEDCGISFEFRAVGADIGDVTPAMLDCRPGEALVVNFAFQLHHLPDESVSIMNERDQLLRMVKGLQPKLVTLVEQDANTNTAPFQTRFREVYDYYSALFDSLDATLPRESPDRMNVERQCLAREIVNILACEGPDRVERYEVAGKWRARMTMAGFAPCPFSSNVIGGIRSLLSSYCDRYKFEEDHGGLHFGWGEKTLIVASAWQ

SEQ ID NO: 63479 - DNA, 1278 bp, Triticum aestivum
  misc_feature (1)..(1278): Ceres Seq. ID no. 13597033
cacttccgccagcgaccgatccattcccacttcgcacagacgcatccgcatccgcatccacccccggtagtacagatcggatccccacccatggccgggcacttcgacctccagggcaggcatggcaagtcccgcgtccgcgtctcccgcgtctggcgccgccccgccgatgccggcggccacctcttcgtcgagtggagcgtcgccgtcagcgtcgtctccgactgcctcccatcctacacctccgacgacaactccgccatcgtcgccaccgactccatcaagaacaccgtgtatgtgaaggccaaggagtgcacggaggtggtgtccatggaggaattcgcggtcatcctcgggaggcatttcacctcactgtacccgcaggtctcagaggctgcagtgacaatcgtggagcgcccatgggagcgtgtggctgtggacgggaagccccattcgcatgggttcaaacttggttctgaaaagcacaccacagaggtcacggtgaagaagtctggaagcctgcttataaattctgggatacaaggatactccctgctaaagacaactcagtctggatttgaaggattcatgagggaccgctacactcttcttcctgaaacaagagaaagaattgtagcaacagaagtaactgcttggtggaggtatccgttcgagcatatttcccagcttccgtcaaagccattttgcttcacacaaagataccaggatgtaaagaaggttcttgcagacacattctttggtccttctgatgttggtgtatatagtccatccgtgcagaatacattatacctcatggctagggaagttcttaccaggttcccagacatagcatccgttcagcttaggatgccaaacctccactttcttcccgtgaacctaggggggaaagaaaatccaggattggtgaagtttgctgatgatgtgtacatgccgactgacgagccgcatggaaccatcgaagcaacgttgagccgtgccaactcaaagctgtaatttcacttgatgcttgtggccaggctcatgatttggtttggtttcttgaagatcacaatcgccaataaacaaagtgatagggggaaagctagcacaaccaccccttgcaaaagggtaaaaggacgtaaactttgcatatgtattcagctaattgacttgtacatggctagctagagttcccccatcgtaaattttactgttgtacaaaaccttcaatgtttcgttgtctccacaatgctataatatagcctgttttttctttcc

SEQ ID NO: 63480 - protein, 337 aa, Triticum aestivum
  peptide (1)..(337): Ceres Seq. ID no. 15222019
HFRQRPIHSHFAQTHPHPHPPPVVQIGSPPMAGHFDLQGRHGKSRVRVSRVWRRPADAGGHLFVEWSVAVSVVSDCLPSYTSDDNSAIVATDSIKNTVYVKAKECTEVVSMEEFAVILGRHFTSLYPQVSEAAVTIVERPWERVAVDGKPHSHGFKLGSEKHTTEVTVKKSGSLLINSGIQGYSLLKTTQSGFEGFMRDRYTLLPETRERIVATEVTAWWRYPFEHISQLPSKPFCFTQRYQDVKKVLADTFFGPSDVGVYSPSVQNTLYLMAREVLTRFPDIASVQLRMPNLHFLPVNLGGKENPGLVKFADDVYMPTDEPHGTIEATLSRANSKL

SEQ ID NO: 63481 - protein, 307 aa, Triticum aestivum
  peptide (1)..(307): Ceres Seq. ID no. 15222020
MAGHFDLQGRHGKSRVRVSRVWRRPADAGGHLFVEWSVAVSVVSDCLPSYTSDDNSAIVATDSIKNTVYVKAKECTEVVSMEEFAVILGRHFTSLYPQVSEAAVTIVERPWERVAVDGKPHSHGFKLGSEKHTTEVTVKKSGSLLINSGIQGYSLLKTTQSGFEGFMRDRYTLLPETRERIVATEVTAWWRYPFEHISQLPSKPFCFTQRYQDVKKVLADTFFGPSDVGVYSPSVQNTLYLMAREVLTRFPDIASVQLRMPNLHFLPVNLGGKENPGLVKFADDVYMPTDEPHGTIEATLSRANSKL

SEQ ID NO: 63482 - protein, 227 aa, Triticum aestivum
  peptide (1)..(227): Ceres Seq. ID no. 15222021
MEEFAVILGRHFTSLYPQVSEAAVTIVERPWERVAVDGKPHSHGFKLGSEKHTTEVTVKKSGSLLINSGIQGYSLLKTTQSGFEGFMRDRYTLLPETRERIVATEVTAWWRYPFEHISQLPSKPFCFTQRYQDVKKVLADTFFGPSDVGVYSPSVQNTLYLMAREVLTRFPDIASVQLRMPNLHFLPVNLGGKENPGLVKFADDVYMPTDEPHGTIEATLSRANSKL

SEQ ID NO: 63483 - DNA, 1352 bp, Triticum aestivum
  misc_feature (1)..(1352): Ceres Seq. ID no. 12616285
atagtgcggtccgtcccgtcgcgtgctttcacatccatgatcagggcctgcctcagcgagctctgcgccagctgctgctcctgcgtgctcccgccgccgtcctcgccgcgcgccgccgaccaagagatggactccgacggcgccatcacgcaccgcagcgtcgaggccaacggcgtgcgcctccacgtggcggaggccggcccggccggcgcgccggtcgcgctgctgctgcacgggttcccggaggtgtggtacacctggcgccaccagatgcgcgcgctggccgccgcgggctaccgcgccgtcgcgcccgacatgcgcggctacggcggctccgacgcgccccccggcgggccggaccagtacacggcgctgcacgtcgtcggcgaccttgttgctctgattgattcgctcggcgagaagcaggtgttcgtcgtggcgcacgactggggcgccatgatcgcgtggagcctgtgcctgttccggccggacagggtgaaggcgctcgtcgccctcagcgtgcccttcagtccccggagccccgcgaggaagcccgtcgacggcttgaaggctctgtacggggacgagtactacatctgccgtatccaggagcctggggcaattgaagcagaattcgcacggctcggcacggagctggtgctaagaaagtttttcacttatcgaactcctggccctctgtttatccccaagagcggctggggctcaccagatgatgaggtgcccttgccgagctggatcacggaggaggacatcaaatactacgcgagtcagtttgacaagtctggcttcactggggcattgaactactaccgtgccctgaacaagacatgggaactcacgtcgccatggaccggagctgagataaaggtaccgaccaagtttatagttggtgatgtggacttgtcataccatgttgcaggcgcacatgattttattaacaaaggtggcctcaagaagtttgttccattactggacgatgtggtggtaatgaaagatgtcgggcatttcataaatgaagaaaaaccagaagaaattagtgcccatataatcagtttcttaaagaaattcgactgaaatgaggagtaacgaacacatcatggaacatggtcaaaatgtagatgcttgatggaaaatttgtattaagcccattgtattattgtgtcgcacaatttcacatatgtatgcaactattattttctttacatttcactctttgtttaatttttcatgtctagtgccgctaccctgctttctagtgtgtgtgcttgggttgtttcttcttaactaaaataaaagtgacagcggctagtcactgtcgcccgagttctttt

SEQ ID NO: 63484 - protein, 364 aa, Triticum aestivum
  peptide (1)..(364): Ceres Seq. ID no. 12616286
IVRSVPSRAFTSMIRACLSELCASCCSCVLPPPSSPRAADQEMDSDGAITHRSVEANGVRLHVAEAGPAGAPVALLLHGFPEVWYTWRHQMRALAAAGYRAVAPDMRGYGGSDAPPGGPDQYTALHVVGDLVALIDSLGEKQVFVVAHDWGAMIAWSLCLFRPDRVKALVALSVPFSPRSPARKPVDGLKALYGDEYYICRIQEPGAIEAEFARLGTELVLRKFFTYRTPGPLFIPKSGWGSPDDEVPLPSWITEEDIKYYASQFDKSGFTGALNYYRALNKTWELTSPWTGAEIKVPTKFIVGDVDLSYHVAGAHDFINKGGLKKFVPLLDDVVVMKDVGHFINEEKPEEISAHIISFLKKFD

SEQ ID NO: 63485 - protein, 352 aa, Triticum aestivum
  peptide (1)..(352): Ceres Seq. ID no. 12616287
MIRACLSELCASCCSCVLPPPSSPRAADQEMDSDGAITHRSVEANGVRLHVAEAGPAGAPVALLLHGFPEVWYTWRHQMRALAAAGYRAVAPDMRGYGGSDAPPGGPDQYTALHVVGDLVALIDSLGEKQVFVVAHDWGAMIAWSLCLFRPDRVKALVALSVPFSPRSPARKPVDGLKALYGDEYYICRIQEPGAIEAEFARLGTELVLRKFFTYRTPGPLFIPKSGWGSPDDEVPLPSWITEEDIKYYASQFDKSGFTGALNYYRALNKTWELTSPWTGAEIKVPTKFIVGDVDLSYHVAGAHDFINKGGLKKFVPLLDDVVVMKDVGHFINEEKPEEISAHIISFLKKFD

SEQ ID NO: 63486 - protein, 322 aa, Triticum aestivum
  peptide (1)..(322): Ceres Seq. ID no. 12616288
MDSDGAITHRSVEANGVRLHVAEAGPAGAPVALLLHGFPEVWYTWRHQMRALAAAGYRAVAPDMRGYGGSDAPPGGPDQYTALHVVGDLVALIDSLGEKQVFVVAHDWGAMIAWSLCLFRPDRVKALVALSVPFSPRSPARKPVDGLKALYGDEYYICRIQEPGAIEAEFARLGTELVLRKFFTYRTPGPLFIPKSGWGSPDDEVPLPSWITEEDIKYYASQFDKSGFTGALNYYRALNKTWELTSPWTGAEIKVPTKFIVGDVDLSYHVAGAHDFINKGGLKKFVPLLDDVVVMKDVGHFINEEKPEEISAHIISFLKKFD

SEQ ID NO: 63487 - DNA, 999 bp, Triticum aestivum
  misc_feature (1)..(999): Ceres Seq. ID no. 12616336
aatgccgcgccggtcactgtccccccagccccatcccgattttaacctcctcccctcgcactgaccaaaaccatgatttgcctcagagccatcccctcccctcgactcctccacctacccctaccccgcctcgcctcctccccgctccgccgcctcaggccctccgccgcagccatgtcctcctccccctccgtcgccgcgcccaccgtagcggcaccggtcgagcacatcgtgctcatcaaggtccgcccggaggccgtggcctcgggggccgccgcggcgatggtctccgcgctgcaggcgctctccacgctcgtcccgggggtctcctacatccacgcgggccccgtgctccgcctccgctccccggccgccgaggcgctgggccccacccacctcctccactcccgctacgccaccaaggccgacctcgccgcctacgccccgcacccggcccacgtggccgccgtgcaggcgcacgtcgcccccaacgctctcgacgccaccgccgttgactgggtcaacgccgcgggcgccccgtcccccgtcgcccccggcgccgccgtgcgcctcaccctcgccaaggtcaagcagggcgtggaggtcgggcagctcgtcgagaaggtggccgcggccaccaaggacgccggcgaggccagcggcgccaaggtcagcttcggggagaacttctcccccgcgcgggccaaggggtaccagttcgggatggtggccgtgttcgggagcgtcgaggagctggacgccgtggagggcgacggcaaggtggaggaggccaaggccgccctcaggcccatgctcgacgaggtcatggtgctggacttcgtcgtcgacgctccggcggccgcgagcctctgatggggggtttcaggttgatttcggatccgagtgtgctgccgatttgggaataatggagtcctttgtgatatctgtatcgatcttgagatgaataaccaatcaattgatgtgccagaaaaaaaaaaa

SEQ ID NO: 63488 - protein, 266 aa, Triticum aestivum
  peptide (1)..(266): Ceres Seq. ID no. 12616337
MICLRAIPSPRLLHLPLPRLASSPLRRLRPSAAAMSSSPSVAAPTVAAPVEHIVLIKVRPEAVASGAAAAMVSALQALSTLVPGVSYIHAGPVLRLRSPAAEALGPTHLLHSRYATKADLAAYAPHPAHVAAVQAHVAPNALDATAVDWVNAAGAPSPVAPGAAVRLTLAKVKQGVEVGQLVEKVAAATKDAGEASGAKVSFGENFSPARAKGYQFGMVAVFGSVEELDAVEGDGKVEEAKAALRPMLDEVMVLDFVVDAPAAASL

SEQ ID NO: 63489 - protein, 232 aa, Triticum aestivum
  peptide (1)..(232): Ceres Seq. ID no. 12616338
MSSSPSVAAPTVAAPVEHIVLIKVRPEAVASGAAAAMVSALQALSTLVPGVSYIHAGPVLRLRSPAAEALGPTHLLHSRYATKADLAAYAPHPAHVAAVQAHVAPNALDATAVDWVNAAGAPSPVAPGAAVRLTLAKVKQGVEVGQLVEKVAAATKDAGEASGAKVSFGENFSPARAKGYQFGMVAVFGSVEELDAVEGDGKVEEAKAALRPMLDEVMVLDFVVDAPAAASL

SEQ ID NO: 63490 - protein, 196 aa, Triticum aestivum
  peptide (1)..(196): Ceres Seq. ID no. 12616339
MVSALQALSTLVPGVSYIHAGPVLRLRSPAAEALGPTHLLHSRYATKADLAAYAPHPAHVAAVQAHVAPNALDATAVDWVNAAGAPSPVAPGAAVRLTLAKVKQGVEVGQLVEKVAAATKDAGEASGAKVSFGENFSPARAKGYQFGMVAVFGSVEELDAVEGDGKVEEAKAALRPMLDEVMVLDFVVDAPAAASL

SEQ ID NO: 63491 - DNA, 1099 bp, Triticum aestivum
  misc_feature (1)..(1099): Ceres Seq. ID no. 12616706
aaaagcactgcattattcatcgctccgacagtcgacacagagcgagtcctcacccagagcaagcaagcaagaagatcgggaggagggtcggagtttgatcgccatttgattcgatggcgccggagtttgggtggtggccgatgtcgccgtggctgagcccaggcacggcgtcgttcatcttcttcaacgtcctcgtcggcgccatcgcggtcatgtcgtcgtcccgggggccggaaccggccgcccggcgcaagctcgttcgcacggcctcgaccgtcgtgctggagagcctgcgctcgatctccaacttccccttccactcactgggcgactacagcgtcgcgtgctctgcaccggcgtcgtcgcagctccaccacatgcaagcgcagtactatagtgctacgatccaagagcaagaagcgcgggaggtgagcgcggtggagcccgagccggcatcagtcgcccgagaagaagctgtagtggcggccgcaacgaccacctcgccgcagagcgcgcctgccgtggcagaggaggtgaacaggatggagcccgagccagcgtcagacgcccaagaagaaactgtagcggcggccacaacaactacctcgccgcagagcgcggcaccggcagcactcgacgcgtcagcgacggcgactcagggcgaggtcgaagacggggagtccatcagcttggacgaggcgtacgcactggcgcgcgcagggcggcagtccgccgccgacacggtggccacggtgccgaagaaggccaagggacgaggagcctacggatgcgggcggggaacggaggacgtccaagggaaggcggaggtggacgcgcgggcggagcagttcatccggcagttccgggaggagctcaagctggagcgcatcaactccatcctcaaccacacccacgcgctgcgccgcaccgccggggcacgctagccgaccggcgccgctcggccgatcctctcgtttgatcgtgtagagagagcagaatatttcatttgcttgtacagccattcatgggtcatttccgcagagaatgatgcgacagcacacagttttggattatttactgtaaccatatagtggcaggc

SEQ ID NO: 63492 - protein, 276 aa, Triticum aestivum
  peptide (1)..(276): Ceres Seq. ID no. 12616707
MAPEFGWWPMSPWLSPGTASFIFFNVLVGAIAVMSSSRGPEPAARRKLVRTASTVVLESLRSISNFPFHSLGDYSVACSAPASSQLHHMQAQYYSATIQEQEAREVSAVEPEPASVAREEAVVAAATTTSPQSAPAVAEEVNRMEPEPASDAQEETVAAATTTTSPQSAAPAALDASATATQGEVEDGESISLDEAYALARAGRQSAADTVATVPKKAKGRGAYGCGRGTEDVQGKAEVDARAEQFIRQFREELKLERINSILNHTHALRRTAGAR

SEQ ID NO: 63493 - protein, 267 aa, Triticum aestivum
  peptide (1)..(267): Ceres Seq. ID no. 12616708
MSPWLSPGTASFIFFNVLVGAIAVMSSSRGPEPAARRKLVRTASTVVLESLRSISNFPFHSLGDYSVACSAPASSQLHHMQAQYYSATIQEQEAREVSAVEPEPASVAREEAVVAAATTTSPQSAPAVAEEVNRMEPEPASDAQEETVAAATTTTSPQSAAPAALDASATATQGEVEDGESISLDEAYALARAGRQSAADTVATVPKKAKGRGAYGCGRGTEDVQGKAEVDARAEQFIRQFREELKLERINSILNHTHALRRTAGAR

SEQ ID NO: 63494 - protein, 243 aa, Triticum aestivum
  peptide (1)..(243): Ceres Seq. ID no. 12616709
MSSSRGPEPAARRKLVRTASTVVLESLRSISNFPFHSLGDYSVACSAPASSQLHHMQAQYYSATIQEQEAREVSAVEPEPASVAREEAVVAAATTTSPQSAPAVAEEVNRMEPEPASDAQEETVAAATTTTSPQSAAPAALDASATATQGEVEDGESISLDEAYALARAGRQSAADTVATVPKKAKGRGAYGCGRGTEDVQGKAEVDARAEQFIRQFREELKLERINSILNHTHALRRTAGAR

SEQ ID NO: 63495 - DNA, 1204 bp, Triticum aestivum
  misc_feature (1)..(1204): Ceres Seq. ID no. 13597250
aaagagcagcagcgaccgcgcccatcaccaccaccacccgcctgacggagcccttccctcccatcggcggcggagatggtggggtggctcaaggcgctggtgtactgcgcagggggcatggcggtggtgggcctggcggcgctggtggcgctgcaggagcgcctcgtctacgtgcccgtgctccctggcctcccgcgcgcttaccccatcaagccctcgcgcctccgcctcatctacgaggacgtctggctccgcgccgccgacggcgtgcgcctccactcctggttcctccgccactctcccacctgccgaggtccgaccattctgttctttcaggaaaatgccggcaatattgcacatcgtttggaatgcgttcgactaatgatgcagcggctacagtgcaatgtgtttatgctttcttatagagggtatggtgagagcgagggttatccttctcagagtggcatcacaaaagatgcacaggccgcacttgatcatctagttcagaggaaggacattgacacatccaggatagttatctttgggagatctttaggaggtgctgttggagcagttcttgcaaaaaacaatcctgacaaggtgtctgctctaatattggaaaatacttttacatctatattggatatggctggtatcatgctgcccttcttaagatggttcataggcggtagttctgccaaaggcccaaaacttcttaactgcgttgttcgctctccatggagtacacttgatgttgttgcagaggtcaaacaacccattctcttcctttctggattgcaagatgaactggttcccccgtcacacatgaggatgctgtatgacaaagctgttgaacataacaggaattgtaggtttgttgattttcccagtggtatgcatatggatacctggatttctggaggggaccgctactggaggacaatcgaattgtttctggaccaatataccccagaagtacagagttctgatgccagctgcacaagtgaaattgctgatgatggtaattactaattagtatttaccaattcattataacattttcctgcgaatattgttctatcatgttttttcttgtacgtgtagggatacattatgttgtcatatttgtgtatttaactacatagtgtagttttactaatgttaatggcaatactgaatagtgaatacaaccatttgtatcttc

SEQ ID NO: 63496 - protein, 318 aa, Triticum aestivum
  peptide (1)..(318): Ceres Seq. ID no. 13597251
MVGWLKALVYCAGGMAVVGLAALVALQERLVYVPVLPGLPRAYPIKPSRLRLIYEDVWLRAADGVRLHSWFLRHSPTCRGPTILFFQENAGNIAHRLECVRLMMQRLQCNVFMLSYRGYGESEGYPSQSGITKDAQAALDHLVQRKDIDTSRIVIFGRSLGGAVGAVLAKNNPDKVSALILENTFTSILDMAGIMLPFLRWFIGGSSAKGPKLLNCVVRSPWSTLDVVAEVKQPILFLSGLQDELVPPSHMRMLYDKAVEHNRNCRFVDFPSGMHMDTWISGGDRYWRTIELFLDQYTPEVQSSDASCTSEIADDGNY

SEQ ID NO: 63497 - protein, 304 aa, Triticum aestivum
  peptide (1)..(304): Ceres Seq. ID no. 13597252
MAVVGLAALVALQERLVYVPVLPGLPRAYPIKPSRLRLIYEDVWLRAADGVRLHSWFLRHSPTCRGPTILFFQENAGNIAHRLECVRLMMQRLQCNVFMLSYRGYGESEGYPSQSGITKDAQAALDHLVQRKDIDTSRIVIFGRSLGGAVGAVLAKNNPDKVSALILENTFTSILDMAGIMLPFLRWFIGGSSAKGPKLLNCVVRSPWSTLDVVAEVKQPILFLSGLQDELVPPSHMRMLYDKAVEHNRNCRFVDFPSGMHMDTWISGGDRYWRTIELFLDQYTPEVQSSDASCTSEIADDGNY

SEQ ID NO: 63498 - protein, 216 aa, Triticum aestivum
  peptide (1)..(216): Ceres Seq. ID no. 13597253
MMQRLQCNVFMLSYRGYGESEGYPSQSGITKDAQAALDHLVQRKDIDTSRIVIFGRSLGGAVGAVLAKNNPDKVSALILENTFTSILDMAGIMLPFLRWFIGGSSAKGPKLLNCVVRSPWSTLDVVAEVKQPILFLSGLQDELVPPSHMRMLYDKAVEHNRNCRFVDFPSGMHMDTWISGGDRYWRTIELFLDQYTPEVQSSDASCTSEIADDGNY

SEQ ID NO: 63499 - DNA, 847 bp, Triticum aestivum
  misc_feature (1)..(847): Ceres Seq. ID no. 13597058
agtggaagatttgatcatcgcgttccaggagagcagagcgggctgagcgattcggatcgctctccaccttccgccgccgtcccccttcctccccccgatccccaatccaatggtgctggtcctagcgctgggggatctgcacatcccgcaccgtgcgcccgacctgcccgccaagttcaagtccatgctcgtcccgggcaagatccagcacatcatctgcaccgggaacctctgcatcaaggaagttcacgactaccttaaaagcctctgtcctgatctccacattaccagaggtgaatatgatgaggatgctcgctacccagagactaaaacagttactattggtcagttcaagctagggctatgccatggccatcaggttgttccatggggcgacctggactccctagcgatgctccagaggcagctggatgtggacatcctcgtcaccgggcacacccatcagttcaaggcctacaagcacgaggggggtgtcgtcatcaaccctggctcaggcacgggcgcccacagcagcatcacatatgacgtcaacccgagctttgtgctcatggacatcgatggcctccgtgttgttgtctacgtgtacgagctcattgacggcgaggtgaaggttgaccagatcgacttcaagaagaccgccacgatgcatggctgatggtgcttacgcatgacagaaatctgatcctgtttgttcttaccccccacccccactccacaccacaccaccaccaccacaatttccccgacctggagctctttttcctttgtacccttctgctcgatatgaaaaactagagctgtgtatacatattagtgaatgggatat

SEQ ID NO: 63500 - protein, 188 aa, Triticum aestivum
  peptide (1)..(188): Ceres Seq. ID no. 13597059
MVLVLALGDLHIPHRAPDLPAKFKSMLVPGKIQHIICTGNLCIKEVHDYLKSLCPDLHITRGEYDEDARYPETKTVTIGQFKLGLCHGHQVVPWGDLDSLAMLQRQLDVDILVTGHTHQFKAYKHEGGVVINPGSGTGAHSSITYDVNPSFVLMDIDGLRVVVYVYELIDGEVKVDQIDFKKTATMHG

SEQ ID NO: 63501 - protein, 163 aa, Triticum aestivum
  peptide (1)..(163): Ceres Seq. ID no. 13597060
MLVPGKIQHIICTGNLCIKEVHDYLKSLCPDLHITRGEYDEDARYPETKTVTIGQFKLGLCHGHQVVPWGDLDSLAMLQRQLDVDILVTGHTHQFKAYKHEGGVVINPGSGTGAHSSITYDVNPSFVLMDIDGLRVVVYVYELIDGEVKVDQIDFKKTATMHG

SEQ ID NO: 63502 - DNA, 1359 bp, Triticum aestivum
  misc_feature (1)..(1359): Ceres Seq. ID no. 13597041
taatcgaaaaatttggtctgttgttagttcgatcgttctcattcaggtccttgaaacggcatggatgcttttctcgcatgcccggatcacagcccggcggccgggcggtcgctgacgccggcgcgcggcgctcccgcctcgtccccggcgctcatctcggccgtccaggacctgtacgagttcatctgcagcggcccactggtggaaaggattggctacacccgggagaggatcgccgagtccatcgaccggtggctgtggtgcggctcgcaggtgagccggttgttccgcatcgacgagctccggctgacggacgccgagaagtcgaggatataccacttctacatacccgtcttcctctggtgcgaggaccaggtcgccgaccacaggtccaagtacaacgacggcgacgagatcccgccattagtgattggagtcagcgctccccaaggcagcgggaagacaactcttgttttcgctcttgattatctttttcgggtttctggtaggaactctgccacattgtctatcgatgacttctatttgactgcagcagaacagggtaaactgagggaaacacatgctggaaatgctcttttagagtttcgtggaaatgccggaagccacgatctccaattctcaattgacacacttgagtcactgatcaaactaacaaaggaaggtacgaagatgaagcttccacggtatgacaagtccgcttttggtggaagaggtgaccgagctgacccttcgacatggccagaggttgaagggcctacagaggttgttctctttgaaggatggatgcttgggtttaaacctcttccaaatgaagttgtaacagcagtggatcctcagcttgaggtgattaataagaacctagaagcatactatgacgcgtgggacagattcattgagtcatggattgtcataaaaattaaggagcctaactgtgtatttcagtggagactacaggcagaggtagctatgagagctgatggtaaagcaggaatgtctgacgaggaggttatggattttgtatcgcgctacctaccagcataccatgcctatttgcccacgctatataaagaaggaccaaatggcgcgaagaaagaccatctgctggtcattgacatagacgaagagaggactcctatatctggtagttgagtgctgagtgtacattctgaaatggatatcttgacttggtggttgagcttgggatttctgatctttctgagaccacttctgccaagcaagcaccaccgtcctcttgtttcttacagcttaaatatatcctaaacgtgtaaattcgatgtatatcaatttttgctatctatttaaagaaactggcatccc

SEQ ID NO: 63503 - protein, 369 aa, Triticum aestivum
  peptide (1)..(369): Ceres Seq. ID no. 13597042
MDAFLACPDHSPAAGRSLTPARGAPASSPALISAVQDLYEFICSGPLVERIGYTRERIAESIDRWLWCGSQVSRLFRIDELRLTDAEKSRIYHFYIPVFLWCEDQVADHRSKYNDGDEIPPLVIGVSAPQGSGKTTLVFALDYLFRVSGRNSATLSIDDFYLTAAEQGKLRETHAGNALLEFRGNAGSHDLQFSIDTLESLIKLTKEGTKMKLPRYDKSAFGGRGDRADPSTWPEVEGPTEVVLFEGWMLGFKPLPNEVVTAVDPQLEVINKNLEAYYDAWDRFIESWIVIKIKEPNCVFQWRLQAEVAMRADGKAGMSDEEVMDFVSRYLPAYHAYLPTLYKEGPNGAKKDHLLVIDIDEERTPISGS

SEQ ID NO: 63504 - DNA, 827 bp, Triticum aestivum
  misc_feature (1)..(827): Ceres Seq. ID no. 13597065
cccaagtaagcaaagcagccaggtcggacccaatcaaacccaaagaaagcaagaactttccccggccgtccatggccacctaccccctcctcctcctcttcgccgccgtcgccgtagccgtagcggcggcgtcgtccgcgggggacaagccaacggcgtacgagatgctggagcggtacgacttcccgcggggcatcctgccggagggggtggaggggtacgagctcgatccggacggcggcttccaggtgtacttcccgcgggagtgcgagttcctgctagcgaagcagtggctggtcaagtacgacacgcgcatcgccggcgccgccagcgcgggcaagctcgcggcgctgcagggcatctacgtcaaggtactcttcctgtggatccccgtcgccgaggtcgaccgcgccggcgaccgcctcagcttctacatcggccccgtctccacgtccttcccgctaagcgacttcgccagcagcccgcactgtcgcggctaccacgaccgcgccgccgtcgctgcggccgtctcgtgaatcatatgctttttacatgtactcctacttagctactgctgctggggggaaatagtatatttcacatggaaaactctattgatacggcctgattatttgaacaagacgcacaagagtcattgtttcaattaaccttctgtgccgtggtggttcgtggatatcacaatgagctctatacgattccagtttagcttgagagccaatgttggcgtttcgcaggagccagcgtttatctagaattttcttgagatgtactggtatgtatttatagatcacagattagtttatggt

SEQ ID NO: 63505 - protein, 188 aa, Triticum aestivum
  peptide (1)..(188): Ceres Seq. ID no. 13597066
PSKQSSQVGPNQTQRKQELSPAVHGHLPPPPPLRRRRRSRSGGVVRGGQANGVRDAGAVRLPAGHPAGGGGGVRARSGRRLPGVLPAGVRVPASEAVAGQVRHAHRRRRQRGQARGAAGHLRQGTLPVDPRRRGRPRRRPPQLLHRPRLHVLPAKRLRQQPALSRLPRPRRRRCGRLVNHMLFTCTPT

SEQ ID NO: 63506 - protein, 177 aa, Triticum aestivum
  peptide (1)..(177): Ceres Seq. ID no. 13597067
QVSKAARSDPIKPKESKNFPRPSMATYPLLLLFAAVAVAVAAASSAGDKPTAYEMLERYDFPRGILPEGVEGYELDPDGGFQVYFPRECEFLLAKQWLVKYDTRIAGAASAGKLAALQGIYVKVLFLWIPVAEVDRAGDRLSFYIGPVSTSFPLSDFASSPHCRGYHDRAAVAAAVS

SEQ ID NO: 63507 - protein, 154 aa, Triticum aestivum
  peptide (1)..(154): Ceres Seq. ID no. 13597068
MATYPLLLLFAAVAVAVAAASSAGDKPTAYEMLERYDFPRGILPEGVEGYELDPDGGFQVYFPRECEFLLAKQWLVKYDTRIAGAASAGKLAALQGIYVKVLFLWIPVAEVDRAGDRLSFYIGPVSTSFPLSDFASSPHCRGYHDRAAVAAAVS

SEQ ID NO: 63508 - DNA, 1607 bp, Triticum aestivum
  misc_feature (1)..(1607): Ceres Seq. ID no. 13597043
agcttaggaaatcctaaaccctagccccctctccccactcccatggcgccgccgtcgcaactggtgctcgcggcctcctccaccgacgccggcgtggccgcgtgggacctccgcacggggtccgaggccatccgccaccgcccctgcgcctcccggccacgtgccgtcgctgccgtcgccggccgcttcctcgccgccgcccaaatcgccgccggcaactccgcccccatccactactaccactgggacaagcctcaggtggctgtgaagagcttccccgccgagccaatccgcgcgctcattgctgacccggaggggaactatctcatcggcggcggtgtgtccggtgacatattcttttgggaggtggctagtggagagctgcttgtccgatggcatgctcactatcgtgatgttaggtgccttgccctctatgacatgttgcttgtctcagcgtccgaggatgggagcatcaaaatttgggatcttctcacgatgcttgatgagcaatcaaggtttgaggcaaagacgccatacctatacaacttcaatcagcacacacttcctgtaactgatattgcttgttttcatggagcaattgctgtgtcatcttcagaggaccgcacatgtaaaatatggagtctatcagagggcaggatgctgagaagtatttcatttcctgctatcattgattctgttgaaatagacccaagaagtcatattttctatgctggtggtagagatggaaagatatatgttactgctatgggtgttgatgcctcctctcagggccgtgatgattcgtctattctcggtattctggatgaccacagcaaggcggtaacgagcttaacatcaagtacagatggccttctactagtctctggttcggaggatggtaatgttcgggtttgggataccagaagtcagcaagtaacccgaaaattcaaaccctcccaaggtccagtaactaatgttctcatagtaacacccaaaagattaaacctgccacctttacaaccattgcggaaagtgtgcgcagcaagtggcgaagttgtaccacgagctgtaattctgcccaaccctgaaaatgatgttcatattgctggaaatctcagctctaaccttctagagcagctcttggatgcacagcagcacggcagctctaggttatttgattctggggtgagcactctcaatggcgtaccaaaccaacagggggcagaatggagaagtaaatacctagagttgcaggatctttttgtgcatgaggttcttggtgatatgtcatcttaatggacatatgataccacaagactggatattatgggctactgtcagttaggaggtttgtggtgaagaactgttcaacacatgatttggtgttcaactagcaaacctgggaaatccatggatgccaaagatgacttccttataacaaggaaactccttacctttcattgcgtccacatgtcaattgacatgtggcagagccatatcagaaatagtaggaaaaactataaacggagcaaagatgggacatcttaaactgtaattcgactgtgtaaacagaaatgaagaaattttcgcttattgtggggtactgc

SEQ ID NO: 63509 - protein, 417 aa, Triticum aestivum
  peptide (1)..(417): Ceres Seq. ID no. 15222022
MAPPSQLVLAASSTDAGVAAWDLRTGSEAIRHRPCASRPRAVAAVAGRFLAAAQIAAGNSAPIHYYHWDKPQVAVKSFPAEPIRALIADPEGNYLIGGGVSGDIFFWEVASGELLVRWHAHYRDVRCLALYDMLLVSASEDGSIKIWDLLTMLDEQSRFEAKTPYLYNFNQHTLPVTDIACFHGAIAVSSSEDRTCKIWSLSEGRMLRSISFPAIIDSVEIDPRSHIFYAGGRDGKIYVTAMGVDASSQGRDDSSILGILDDHSKAVTSLTSSTDGLLLVSGSEDGNVRVWDTRSQQVTRKFKPSQGPVTNVLIVTPKRLNLPPLQPLRKVCAASGEVVPRAVILPNPENDVHIAGNLSSNLLEQLLDAQQHGSSRLFDSGVSTLNGVPNQQGAEWRSKYLELQDLFVHEVLGDMSS

SEQ ID NO: 63510 - protein, 285 aa, Triticum aestivum
  peptide (1)..(285): Ceres Seq. ID no. 15222023
MLLVSASEDGSIKIWDLLTMLDEQSRFEAKTPYLYNFNQHTLPVTDIACFHGAIAVSSSEDRTCKIWSLSEGRMLRSISFPAIIDSVEIDPRSHIFYAGGRDGKIYVTAMGVDASSQGRDDSSILGILDDHSKAVTSLTSSTDGLLLVSGSEDGNVRVWDTRSQQVTRKFKPSQGPVTNVLIVTPKRLNLPPLQPLRKVCAASGEVVPRAVILPNPENDVHIAGNLSSNLLEQLLDAQQHGSSRLFDSGVSTLNGVPNQQGAEWRSKYLELQDLFVHEVLGDMSS

SEQ ID NO: 63511 - protein, 266 aa, Triticum aestivum
  peptide (1)..(266): Ceres Seq. ID no. 15222024
MLDEQSRFEAKTPYLYNFNQHTLPVTDIACFHGAIAVSSSEDRTCKIWSLSEGRMLRSISFPAIIDSVEIDPRSHIFYAGGRDGKIYVTAMGVDASSQGRDDSSILGILDDHSKAVTSLTSSTDGLLLVSGSEDGNVRVWDTRSQQVTRKFKPSQGPVTNVLIVTPKRLNLPPLQPLRKVCAASGEVVPRAVILPNPENDVHIAGNLSSNLLEQLLDAQQHGSSRLFDSGVSTLNGVPNQQGAEWRSKYLELQDLFVHEVLGDMSS

SEQ ID NO: 63512 - DNA, 1469 bp, Triticum aestivum
  misc_feature (1)..(1469): Ceres Seq. ID no. 13655454
acattttttcttacgacggcgttgctcttttttcttacgatggctccatgaagggatgaggtgatatgggttccctcttccctccatggccgctgccttccaccgttcgtcctctcccggccgctcgtcgccgaccccgggagcaccaccacgcgcccctcgccgttccgtcctcctcgtctcatcacgtccgtctccctcctccctcttcttcgcgcagtgagctccgtctcacccaaactgacctagcccgggcgcacacgccggcgtcgaggcgtgccgtgctccgtccaagaactgccccggaagccgatgccgcggcggccctcatggtcgtccgcgcggaggccggcgacttcgcgcgggctcagtccatctgggcgcagctcctgctcagctccgccgcgccgtgcctggccgccgcagcgcccagcctcctcccggcgtacgcgcgtctcggtcgctacgacgaggtcctcctcgccgcgcgggagctctccgcgcgcgaccccgccgcggcgcgggacctctacccgctcgccgtctcctgcctcggcgccgccggcgagctcgccctcatggaggacgccgtgcaggagatggcccgcgccggcctccgcgtcgactccgccaccggcaacgccttcgtgcggcactacgcggcctccggcaccgtaccggagatggaggcggcggtcggccggctcaagaagtccggcctcctcatctccgtcgacgccatccgcgccgtcgcttcagcgtacatcgccaaccggaagtactacaagctcggcgagttcgtcaggggcgtcggcctcggccgccgggacgccggcaacctgctctggaacctctacctcctctccttcgcggccaacttcaagatgaagtcgctgcagcgcgccttcctggagatgaccgccgccgggtgccggccggacctcaccaccttcaacatccgcgccgccgccttctccaagatgtgcatgttctgggacctccacctcaccgccgagcacatgcgccgcgacggcgtcgcgccggacctcgtcacgcacggctgcttcgtggacgcctacatggagcgccggctcgcgcgcaacctctccttcgcgttccgccggctggacggctcaggcgagcccgtggtggccacggacggcgtcgtgttcgaggcgttcggcaaggggggcttccacaccacctccgaggggctgctagaggcggccggcgggaagcggcgatggacgtaccacgacttgctcggcgtctacctgaggaagcagcacaggagaaaccaaatcttttggaactactgatcttcaccagtacagcactgttacactagtgcaacaaggtagtagtaccagatgctacgatgtacagggatgatgttatgcttagaaacaaaatcatagatgtaatggaactatggaagagtctttgtaaagatgattgtgccaaatttg

SEQ ID NO: 63513 - protein, 417 aa, Triticum aestivum
  peptide (1)..(417): Ceres Seq. ID no. 13655455
MGSLFPPWPLPSTVRPLPAARRRPREHHHAPLAVPSSSSHHVRLPPPSSSRSELRLTQTDLARAHTPASRRAVLRPRTAPEADAAAALMVVRAEAGDFARAQSIWAQLLLSSAAPCLAAAAPSLLPAYARLGRYDEVLLAARELSARDPAAARDLYPLAVSCLGAAGELALMEDAVQEMARAGLRVDSATGNAFVRHYAASGTVPEMEAAVGRLKKSGLLISVDAIRAVASAYIANRKYYKLGEFVRGVGLGRRDAGNLLWNLYLLSFAANFKMKSLQRAFLEMTAAGCRPDLTTFNIRAAAFSKMCMFWDLHLTAEHMRRDGVAPDLVTHGCFVDAYMERRLARNLSFAFRRLDGSGEPVVATDGVVFEAFGKGGFHTTSEGLLEAAGGKRRWTYHDLLGVYLRKQHRRNQIFWNY

SEQ ID NO: 63514 - protein, 329 aa, Triticum aestivum
  peptide (1)..(329): Ceres Seq. ID no. 13655456
MVVRAEAGDFARAQSIWAQLLLSSAAPCLAAAAPSLLPAYARLGRYDEVLLAARELSARDPAAARDLYPLAVSCLGAAGELALMEDAVQEMARAGLRVDSATGNAFVRHYAASGTVPEMEAAVGRLKKSGLLISVDAIRAVASAYIANRKYYKLGEFVRGVGLGRRDAGNLLWNLYLLSFAANFKMKSLQRAFLEMTAAGCRPDLTTFNIRAAAFSKMCMFWDLHLTAEHMRRDGVAPDLVTHGCFVDAYMERRLARNLSFAFRRLDGSGEPVVATDGVVFEAFGKGGFHTTSEGLLEAAGGKRRWTYHDLLGVYLRKQHRRNQIFWNY

SEQ ID NO: 63515 - protein, 246 aa, Triticum aestivum
  peptide (1)..(246): Ceres Seq. ID no. 13655457
MEDAVQEMARAGLRVDSATGNAFVRHYAASGTVPEMEAAVGRLKKSGLLISVDAIRAVASAYIANRKYYKLGEFVRGVGLGRRDAGNLLWNLYLLSFAANFKMKSLQRAFLEMTAAGCRPDLTTFNIRAAAFSKMCMFWDLHLTAEHMRRDGVAPDLVTHGCFVDAYMERRLARNLSFAFRRLDGSGEPVVATDGVVFEAFGKGGFHTTSEGLLEAAGGKRRWTYHDLLGVYLRKQHRRNQIFWNY

SEQ ID NO: 63516 - DNA, 857 bp, Triticum aestivum
  misc_feature (1)..(857): Ceres Seq. ID no. 13584023
aatcgaaaaattcggcttttccgcctcgctgccgccgcccaaaatccacctgggaagaagaaaagaggggcctcttctcttcctctctcgcgtccgatggcctcgagcccgggcgtcggcggcggaggggcggacggcggcggaggggatggaccgacgacgctcgacgagctgtaccacatcaacgtcgtgccggccgagctgcacttcaagttccgcaaggagctccagggcctccgcgtgggcctcaacttcgagttctacaacctagaggtgaatgattttgaggcaaaggtagttctgaagcccctggactttgaccggaagtggaagttccagtacaagcccatcagtggtgacatacagctgctttccaagaagataccagtcacaaaatatctcaaccttcaggtcggcattggtcacaatttccaactgaaggcaactggatggaagtggaagctctctacttgcttggggggagatggtgtttctcagataagaaacaaatcaaaactcaacgtgtttccagggtttgatctgaggctcggttggaaagctgaatatgtgcttcctgagattcatggggctgttggcacaggagaacctgccttcagtatgaactatggacgattgcaagcatccatagaccgggttgaggctattgtgacccaatcagatcggcactgaacctcctaggatgagcagaccaggacgttgatgatgttatggtcggcgaagcaagggagttctttggctacaatttcctctgcaaaatccgatggtttactcatgtcttttgaggctttgcatctgatgtacagaaatgagcaaacattgttttaccaacataaagg

SEQ ID NO: 63517 - protein, 229 aa, Triticum aestivum
  peptide (1)..(229): Ceres Seq. ID no. 13584024
NRKIRLFRLAAAAQNPPGKKKRGASSLPLSRPMASSPGVGGGGADGGGGDGPTTLDELYHINVVPAELHFKFRKELQGLRVGLNFEFYNLEVNDFEAKVVLKPLDFDRKWKFQYKPISGDIQLLSKKIPVTKYLNLQVGIGHNFQLKATGWKWKLSTCLGGDGVSQIRNKSKLNVFPGFDLRLGWKAEYVLPEIHGAVGTGEPAFSMNYGRLQASIDRVEAIVTQSDRH

SEQ ID NO: 63518 - protein, 197 aa, Triticum aestivum
  peptide (1)..(197): Ceres Seq. ID no. 13584025
MASSPGVGGGGADGGGGDGPTTLDELYHINVVPAELHFKFRKELQGLRVGLNFEFYNLEVNDFEAKVVLKPLDFDRKWKFQYKPISGDIQLLSKKIPVTKYLNLQVGIGHNFQLKATGWKWKLSTCLGGDGVSQIRNKSKLNVFPGFDLRLGWKAEYVLPEIHGAVGTGEPAFSMNYGRLQASIDRVEAIVTQSDRH

SEQ ID NO: 63519 - DNA, 1301 bp, Triticum aestivum
  misc_feature (1)..(1301): Ceres Seq. ID no. 13655636
atcccgcagactggactcccacagtattaaccccaggcacgcctcccgctgcaaccaacccgagtccttccaccctgcacagaatctcagcccaacccacaggtctcgactcaagccatgggcgccggcgacaagacggccgcgggcatgccgcgcatcggcatgggcacggcggtgcaggggcccaagccggaccccatccgccgcgccgtcctccgcgccatcgaggtagggtaccgccacttcgacacggccgcgcactacgagaccgaggcccccatcggcgaggccgccgccgaggccgtgcgctccggcgccgtcgcctcccgggacgacctcttcatcacctccaagctctggtgcagcgatgcgcaccgcgacagggtcgtccccgccctcaggcagacgctccggaatctccagatggagtacgtggacctgtacctcgtccactggccggtgtccatgaagcccgggcggttcaaggcccccttcacggcggaggacttcgtgccgttcgacatgcgggccgtgtgggaggccatggaggagtgccacaggctgggcctcgccaaggccatcggcgtcgccaatttctcctgcaagaagcttgagaccctcctctccttcgccaccatccctcccaccgtcaatcaggtggaggtgaacccggtgtggcagcagaggaagctgagggagttctgcaggggcaagggcatccagctgtgcacctactcgccgctgggggccaagggcacgcactggggcagcgacgccgtgatggacgcgggcgtcctgcaggagatcgccgcgtccaggggcaagagtgtggcgcaggtgtgcctgaggtgggtgtacgagcagggggactgcctcatcgtcaagagcttcgacgaggcccggatgcgggagaacctggacgtggacggctgggagctcaccgaggaggagcaccgcaggatcgcggagatcccgcagcgcaagatcaacctcggcaagcgctacgtgtccgagcacgggccctacaagtccctcgaggagctctgggacggtgagatataagtgatcactggagaggctggctggccggtgcgacgggttctgttgggttgtcatccttggccatggatgggtggttgatcgggggacgatttccctttgaataaaatcatgttctgcattgtgtttcagtgaataaatggagatgtttactaccggatttaaggagagttactaagagattgggatcatctcatcatgttattatgcgtactttcctggcaatgcaagttgttacaatg

SEQ ID NO: 63520 - protein, 314 aa, Triticum aestivum
  peptide (1)..(314): Ceres Seq. ID no. 13655637
MGAGDKTAAGMPRIGMGTAVQGPKPDPIRRAVLRAIEVGYRHFDTAAHYETEAPIGEAAAEAVRSGAVASRDDLFITSKLWCSDAHRDRVVPALRQTLRNLQMEYVDLYLVHWPVSMKPGRFKAPFTAEDFVPFDMRAVWEAMEECHRLGLAKAIGVANFSCKKLETLLSFATIPPTVNQVEVNPVWQQRKLREFCRGKGIQLCTYSPLGAKGTHWGSDAVMDAGVLQEIAASRGKSVAQVCLRWVYEQGDCLIVKSFDEARMRENLDVDGWELTEEEHRRIAEIPQRKINLGKRYVSEHGPYKSLEELWDGEI

SEQ ID NO: 63521 - protein, 304 aa, Triticum aestivum
  peptide (1)..(304): Ceres Seq. ID no. 13655638
MPRIGMGTAVQGPKPDPIRRAVLRAIEVGYRHFDTAAHYETEAPIGEAAAEAVRSGAVASRDDLFITSKLWCSDAHRDRVVPALRQTLRNLQMEYVDLYLVHWPVSMKPGRFKAPFTAEDFVPFDMRAVWEAMEECHRLGLAKAIGVANFSCKKLETLLSFATIPPTVNQVEVNPVWQQRKLREFCRGKGIQLCTYSPLGAKGTHWGSDAVMDAGVLQEIAASRGKSVAQVCLRWVYEQGDCLIVKSFDEARMRENLDVDGWELTEEEHRRIAEIPQRKINLGKRYVSEHGPYKSLEELWDGEI

SEQ ID NO: 63522 - protein, 299 aa, Triticum aestivum
  peptide (1)..(299): Ceres Seq. ID no. 13655639
MGTAVQGPKPDPIRRAVLRAIEVGYRHFDTAAHYETEAPIGEAAAEAVRSGAVASRDDLFITSKLWCSDAHRDRVVPALRQTLRNLQMEYVDLYLVHWPVSMKPGRFKAPFTAEDFVPFDMRAVWEAMEECHRLGLAKAIGVANFSCKKLETLLSFATIPPTVNQVEVNPVWQQRKLREFCRGKGIQLCTYSPLGAKGTHWGSDAVMDAGVLQEIAASRGKSVAQVCLRWVYEQGDCLIVKSFDEARMRENLDVDGWELTEEEHRRIAEIPQRKINLGKRYVSEHGPYKSLEELWDGEI

SEQ ID NO: 63523 - DNA, 1210 bp, Triticum aestivum
  misc_feature (1)..(1210): Ceres Seq. ID no. 12587870
cctcgcacacagtctgctacagggatcttccacacagacacactggaagtgataaccggtgaaatgcctcccccgaagcctgccggtggtgctatcatggatggaaatcaccacctactaggccatgaagatgttcacagagctgcaacgactaccttcgagaatggctttacaacccattcagttcacacatcaggagcgaaggtcgatggcccgaatgtgacgaatatcgcgaggggcgacatatcaactacgccgattcctgaagcaacaggtccacatcatgtagcggtatcagtccctgaagaagtgaatctggttgctcctagaccacaacagagggatgactgggatatactgaaagctatagtgtatggaggcttagtggagtcagtcaccagcctctctgttgtttcggcggcagcatcaagcggcgccaaaacattggacatattcatcttgggcatggccaaccttatcggagggctccctctcgtttaccacaatatcgccgatctgagagatgtccgagacgtgagcgacgacaacgagcgggtcggacactactggctgcagctcgggaggcggtcgaaagcccggctccacatggtcctggccctgctctcatacatggtgttcgggctacttcaaccggttgtctacgggctgtcgttccgcgagagcaacaacagggagaacaagatgatggccgtcgccggcgcttccctcgcgtgcatcgctctgctggcgctcggaaaggcgcatgtccagacagcacccagggcatacttcaagaccctcgtgtactacctgacgatcgccgtgagctcgtcggggctgtcgtacgtcgccggcgtgctcatcacgaggctcctggagcactttggtgtcatcgagcaaggcgggtcggctgctcctgctcctccagggctgtcgttcgctcattcagtgggtgcacaaacatctgcctgggcctcattctaaagtctgaactctgaagttcatgggaacactggtgcaaaaaaagaagacatgtaggaggtgcacactaggagatgtagcactagctagattaccttgtgccacatcttgggcttcagttattagtactaaaacatgaaggcacacattaagacggtagaaacatacaatataattagaacagatgtctggttgagcttcatatttgttttcaataaattaatattcc

SEQ ID NO: 63524 - protein, 327 aa, Triticum aestivum
  peptide (1)..(327): Ceres Seq. ID no. 12587871
PRTQSATGIFHTDTLEVITGEMPPPKPAGGAIMDGNHHLLGHEDVHRAATTTFENGFTTHSVHTSGAKVDGPNVTNIARGDISTTPIPEATGPHHVAVSVPEEVNLVAPRPQQRDDWDILKAIVYGGLVESVTSLSVVSAAASSGAKTLDIFILGMANLIGGLPLVYHNIADLRDVRDVSDDNERVGHYWLQLGRRSKARLHMVLALLSYMVFGLLQPVVYGLSFRESNNRENKMMAVAGASLACIALLALGKAHVQTAPRAYFKTLVYYLTIAVSSSGLSYVAGVLITRLLEHFGVIEQGGSAAPAPPGLSFAHSVGAQTSAWASF

SEQ ID NO: 63525 - protein, 306 aa, Triticum aestivum
  peptide (1)..(306): Ceres Seq. ID no. 12587872
MPPPKPAGGAIMDGNHHLLGHEDVHRAATTTFENGFTTHSVHTSGAKVDGPNVTNIARGDISTTPIPEATGPHHVAVSVPEEVNLVAPRPQQRDDWDILKAIVYGGLVESVTSLSVVSAAASSGAKTLDIFILGMANLIGGLPLVYHNIADLRDVRDVSDDNERVGHYWLQLGRRSKARLHMVLALLSYMVFGLLQPVVYGLSFRESNNRENKMMAVAGASLACIALLALGKAHVQTAPRAYFKTLVYYLTIAVSSSGLSYVAGVLITRLLEHFGVIEQGGSAAPAPPGLSFAHSVGAQTSAWASF

SEQ ID NO: 63526 - protein, 295 aa, Triticum aestivum
  peptide (1)..(295): Ceres Seq. ID no. 12587873
MDGNHHLLGHEDVHRAATTTFENGFTTHSVHTSGAKVDGPNVTNIARGDISTTPIPEATGPHHVAVSVPEEVNLVAPRPQQRDDWDILKAIVYGGLVESVTSLSVVSAAASSGAKTLDIFILGMANLIGGLPLVYHNIADLRDVRDVSDDNERVGHYWLQLGRRSKARLHMVLALLSYMVFGLLQPVVYGLSFRESNNRENKMMAVAGASLACIALLALGKAHVQTAPRAYFKTLVYYLTIAVSSSGLSYVAGVLITRLLEHFGVIEQGGSAAPAPPGLSFAHSVGAQTSAWASF

SEQ ID NO: 63527 - DNA, 924 bp, Triticum aestivum
  misc_feature (1)..(924): Ceres Seq. ID no. 13584026
cctctctgtcaccgccagcttccacacacctcgtcggcacggaacaccgcccctcgagtcaagagtcaacccacacccaccgatctccgtccatcgaccatgggagccggccaggacctggaggccggcgccggcgacggcggcgagaagaagatggcccactcctcctcctcgggcccgctcccgccgtcggagccgccgcacctgcggggccaggaccccgcccagtaccagtatggtaccttccacccccctgccccccaccccgacgtccgcccccacccgcccgtcggcttcccccaacccgcgcctccccccggattcgccgccggcggctaccagcagcagcagcagaagcagccctacgcgcccgccgacccctactacgcgcaggggtaccaggccgccccaggttatggtcctgttgttcaaggtaggcctgttgaaggaagacccgtgagaatgcggcgccttccatgctgtgggctcggcatgggctggcttctgttcattgccgggttcttcttggctgccattccgtggtatattggtgctttcgtcctaatctgtgtccgggtacatgaccacagagagaaaccaggatatgttgcctgcactgttgctgctataattgcggccattgttataccccttggagtaacaaaaggaacagactcatggtgagccaccaccaggtcttggcaggcggttctgttgctgaatataaacatcgttatttcaggcccagttacatgataggttaaaaagtctgctggttgtatttcatgtatgagtgtgtcttgtatacatatatgtacagtaaaaagagtggggctgcatcttcgatgttctcttgtatcgatacttggtacttatagtgtgtaataaaagcttgaatgtacaacacatatcttcctcgaggct

SEQ ID NO: 63528 - protein, 227 aa, Triticum aestivum
  peptide (1)..(227): Ceres Seq. ID no. 13584027
PLCHRQLPHTSSARNTAPRVKSQPTPTDLRPSTMGAGQDLEAGAGDGGEKKMAHSSSSGPLPPSEPPHLRGQDPAQYQYGTFHPPAPHPDVRPHPPVGFPQPAPPPGFAAGGYQQQQQKQPYAPADPYYAQGYQAAPGYGPVVQGRPVEGRPVRMRRLPCCGLGMGWLLFIAGFFLAAIPWYIGAFVLICVRVHDHREKPGYVACTVAAIIAAIVIPLGVTKGTDSW

SEQ ID NO: 63529 - protein, 194 aa, Triticum aestivum
  peptide (1)..(194): Ceres Seq. ID no. 13584028
MGAGQDLEAGAGDGGEKKMAHSSSSGPLPPSEPPHLRGQDPAQYQYGTFHPPAPHPDVRPHPPVGFPQPAPPPGFAAGGYQQQQQKQPYAPADPYYAQGYQAAPGYGPVVQGRPVEGRPVRMRRLPCCGLGMGWLLFIAGFFLAAIPWYIGAFVLICVRVHDHREKPGYVACTVAAIIAAIVIPLGVTKGTDSW

SEQ ID NO: 63530 - protein, 176 aa, Triticum aestivum
  peptide (1)..(176): Ceres Seq. ID no. 13584029
MAHSSSSGPLPPSEPPHLRGQDPAQYQYGTFHPPAPHPDVRPHPPVGFPQPAPPPGFAAGGYQQQQQKQPYAPADPYYAQGYQAAPGYGPVVQGRPVEGRPVRMRRLPCCGLGMGWLLFIAGFFLAAIPWYIGAFVLICVRVHDHREKPGYVACTVAAIIAAIVIPLGVTKGTDSW

SEQ ID NO: 63531 - DNA, 1694 bp, Triticum aestivum
  misc_feature (1)..(1694): Ceres Seq. ID no. 13597044
aaaacagaggcaccaaaatacaatctacgtacgtgcaaagttcagtgaaaccttgagttgacagacaccacaccaacaatggccggagcagcaaacgatctgaagctactgggcatgtgggcgagcccgtacgtcctgcgggtgcgccttgctctcagcatcaagagcatcagctacgagtacgcagaggaggacctccggcacaagagcgagctgctcctgcggtcaaaccccgtccacgatggtctgtttagttacaaggcaacctttgaagcatttgttggggtgcgggatgacgttgcaacttctcaagttaaactctttggtgatcaactcgaggatttggagaaaaatcttccattggacaatatttacaaatcagacaatgtatctgctgctccaattcgcgtgatgaatcttctttacaactctggggatgtgaaaggtcctcaaactatagctttcaatttgccaaatgatgagcggattgtgaatgagcgaggaacttcaatggttatgcttaagaacatttcagaagccaagttcaagaatatcttgaagcctatagccaatgcctgcatcagagaggagcagaaagaatatgttgattttgagccttattatacacatattgtttgccatgagtgctgccatggaattggacctcattccataacccttcctggtggtaaaaagtccacagttagaatggaacttcaagaatgtcattcagcattggaggaggcaaaagctgatatagttggtctgtgggcgctgaattttcttataaacaaggggttgcttcctaagagtctatcaaaatctatgtatgtttctttcctggctggatgctttcggtcaattcgcttcgggctggaagaagctcatgggaagggacaggcattgcagtttaattggttgtatgacaaaggagcttttatcttgcattctgacgggaaattctcaattgactttacaaaggttgaggaagctgttgaaagccttggcagagagatcatgacgatacaggcaaagggcgacaagcctgctgcgcagtctctccttcagtcgcgtgcaaccttgacgcagccattgcgtgtggcattggagaaaatcgaacacatgcaggtgcctgttgatatagccccgatatttggcacagccagtaagctgctcgcaaacaattaagcaccggaggacagcgattcagaaagttttgtgtctcccattgtacctgataaactacaaattgatttttttacgtgaaaaagtacaaattgttgaaacaagatgaagcaccatcctgagccgacacaaatggaaaataacacaaataaatgaatgatttcttaaaaggatggctgttaacatcactgcctaaatggatgaacttctaaaggatcactgttagcatcactgtctatttaccaaggtgtttttagaaagcgatgtctactgtaatctttgaacatattcactcaggaactaggagcggagactatcagaattctgctgaacttttgcggttttgccgcgctgaaggtcatcttgtgcttatatatatcagaatgttggtacacatggttcgttccttgtgagtgaatgctgcaaatatatgccccactctgatcggacccaattcaacgtttcaaacttgtaacgttacttcatacagaaacatgctctttcatctt

SEQ ID NO: 63532 - protein, 369 aa, Triticum aestivum
  peptide (1)..(369): Ceres Seq. ID no. 13597045
MAGAANDLKLLGMWASPYVLRVRLALSIKSISYEYAEEDLRHKSELLLRSNPVHDGLFSYKATFEAFVGVRDDVATSQVKLFGDQLEDLEKNLPLDNIYKSDNVSAAPIRVMNLLYNSGDVKGPQTIAFNLPNDERIVNERGTSMVMLKNISEAKFKNILKPIANACIREEQKEYVDFEPYYTHIVCHECCHGIGPHSITLPGGKKSTVRMELQECHSALEEAKADIVGLWALNFLINKGLLPKSLSKSMYVSFLAGCFRSIRFGLEEAHGKGQALQFNWLYDKGAFILHSDGKFSIDFTKVEEAVESLGREIMTIQAKGDKPAAQSLLQSRATLTQPLRVALEKIEHMQVPVDIAPIFGTASKLLANN

SEQ ID NO: 63533 - protein, 357 aa, Triticum aestivum
  peptide (1)..(357): Ceres Seq. ID no. 13597046
MWASPYVLRVRLALSIKSISYEYAEEDLRHKSELLLRSNPVHDGLFSYKATFEAFVGVRDDVATSQVKLFGDQLEDLEKNLPLDNIYKSDNVSAAPIRVMNLLYNSGDVKGPQTIAFNLPNDERIVNERGTSMVMLKNISEAKFKNILKPIANACIREEQKEYVDFEPYYTHIVCHECCHGIGPHSITLPGGKKSTVRMELQECHSALEEAKADIVGLWALNFLINKGLLPKSLSKSMYVSFLAGCFRSIRFGLEEAHGKGQALQFNWLYDKGAFILHSDGKFSIDFTKVEEAVESLGREIMTIQAKGDKPAAQSLLQSRATLTQPLRVALEKIEHMQVPVDIAPIFGTASKLLANN

SEQ ID NO: 63534 - protein, 258 aa, Triticum aestivum
  peptide (1)..(258): Ceres Seq. ID no. 13597047
MNLLYNSGDVKGPQTIAFNLPNDERIVNERGTSMVMLKNISEAKFKNILKPIANACIREEQKEYVDFEPYYTHIVCHECCHGIGPHSITLPGGKKSTVRMELQECHSALEEAKADIVGLWALNFLINKGLLPKSLSKSMYVSFLAGCFRSIRFGLEEAHGKGQALQFNWLYDKGAFILHSDGKFSIDFTKVEEAVESLGREIMTIQAKGDKPAAQSLLQSRATLTQPLRVALEKIEHMQVPVDIAPIFGTASKLLANN

SEQ ID NO: 63535 - DNA, 1267 bp, Triticum aestivum
  misc_feature (1)..(1267): Ceres Seq. ID no. 13585043
atttttccccgattctcagcaacgagagccgacctcgtgacggcgccggccagccaggatccatagcgacgcggtggcgccgttcgccggagtagcgcgcctcgacaagaggccgcgcgctgctccttcgaacggcgctgagcccagcgcagaggcggggtgtcgtcttcctccgtaagtacggcacatcggtgtcaacttcccgtgcgtcgtcccgagagaccacgacatcctggtcctcgtgcggcgtcgtcgcgcgggatcccggacgtgaggcaccaacgcggcgccatcagtttcatctttaaatcttgagttcatcaactgaaggagatgtctgtggttaggttacaaggcggcagtccagagcatttgggcagtggtttcgttgcttactgcaacggatgttcatgtctagtaatgacatcttaccatgttgttaaatcagccttcattaatggtcttatgattacggttatctttcctggtggacaaccgcgctttcaagccgatgtacaaaatttatccgagcctggggatcttgctatacttcagtttgattgtgagggctatatgtttgaacctctgctgttcgctgaaatatctaccaatcctgatttatttccatggacggtttatttgcatggatattacaatggtaaacgtggacaacttatcagaccttcgacattacctggccaaattgacggtatgtacgtaaatcaagaaactggtgttcatatgctttatgcaaattacaccagtaaccctggaatgtctggtggaccaattattatgggaggtagagtcttggagtcaacaaaggggctgaggcaggaacgagacttgctgtttcagtcctgggtgtacaccatgctagaggattggactggcggagcagaaacaattgctgagatgcttgaaatgcttgaagagcttgactattaaaataatcaatcttgcagcaccaagtattaaagccttcaatgaagtatcagttacttggagtgaatgtttgatacgctgctggagcctcagggtggagtgaaagatggtttattgcttccatacattaagccgtcgtttattttggaagttgtctgagtgcgatgtgtaatttgtatctctatacggttgttatttaagttattcttgtccgagtgactacatcagactatcaaggattgttatttgttatgtaccaatgtggagtcacataggttatttgtgcctgtagagtaagaattatattaatgtgatggactcc

SEQ ID NO: 63536 - protein, 204 aa, Triticum aestivum
  peptide (1)..(204): Ceres Seq. ID no. 13585044
MSVVRLQGGSPEHLGSGFVAYCNGCSCLVMTSYHVVKSAFINGLMITVIFPGGQPRFQADVQNLSEPGDLAILQFDCEGYMFEPLLFAEISTNPDLFPWTVYLHGYYNGKRGQLIRPSTLPGQIDGMYVNQETGVHMLYANYTSNPGMSGGPIIMGGRVLESTKGLRQERDLLFQSWVYTMLEDWTGGAETIAEMLEMLEELDY

SEQ ID NO: 63537 - protein, 175 aa, Triticum aestivum
  peptide (1)..(175): Ceres Seq. ID no. 13585045
MTSYHVVKSAFINGLMITVIFPGGQPRFQADVQNLSEPGDLAILQFDCEGYMFEPLLFAEISTNPDLFPWTVYLHGYYNGKRGQLIRPSTLPGQIDGMYVNQETGVHMLYANYTSNPGMSGGPIIMGGRVLESTKGLRQERDLLFQSWVYTMLEDWTGGAETIAEMLEMLEELDY

SEQ ID NO: 63538 - protein, 160 aa, Triticum aestivum
  peptide (1)..(160): Ceres Seq. ID no. 13585046
MITVIFPGGQPRFQADVQNLSEPGDLAILQFDCEGYMFEPLLFAEISTNPDLFPWTVYLHGYYNGKRGQLIRPSTLPGQIDGMYVNQETGVHMLYANYTSNPGMSGGPIIMGGRVLESTKGLRQERDLLFQSWVYTMLEDWTGGAETIAEMLEMLEELDY

SEQ ID NO: 63539 - DNA, 1412 bp, Triticum aestivum
  misc_feature (1)..(1412): Ceres Seq. ID no. 14303542
gacaccactccccctgagctcgctcgcacgccgcggccgggtaacaccaccaccgggcaccatggcctcctccttcctctccctacggctccctaccccctccccgcccaccgcgacgtcgtccccgttcttcccgaatcccctagtccggtccggaaggtgcagtccgctgtcctctaccctcgtggcgcgtgttgccgggccggcggcgggggctccgtcgccgttgttcaacccgaggggcgacccgttcctatccacgctagcagctgcttctccagagcagctcgcggcagctgcgggtggcgaacgccgcggcgaggaccacctgccgttcctcgagatcttccagaacgccaagctcatgtcctcgcccgcgcaggtggaacgttctagcagctcttacagtcagcacagtcctagaaggcctcccccggatttgccgtcgttgcttctacatggccggattgtttatattggcatgccgttggtgccagcagttaccgagcttattgttgcccagttgatgtaccttgattggatgaatagtagtgagcctgcatatatatacatcaactcaacaggaacggctcgtgatgatggtgaaccagttggaatggagacggaaggttttgctatctatgatgccatgatgcggatgaaaactgaggttcacacactttgtataggagctgcagcaggtcatgcctgccttgtccttgcagcagggaagaaaggcaaacgatatatgtttccccatgccaaagctttgattcagcaacctcgtattccttcatatgggatgatgcaagcttctgatgttgttattcgtgcgaaagaggtagtgcacaacaggaataccctggtcaaacttttagcaaggcacactggaaatccaccggagaaaatagataaggtgatgagaggaccattttatatggactctttgaaagccaaggagtttggggtaattgacaagatcctttggcgcggtcaggagaagtacatgtctgacatgctctcccctgaggattgggacaaggttgctggagtcagaggccccggtggaatgtgaagttgtgcactggaactcgaatacttagttaggtctttgagctcgcagtcgcaggggttgaacgaacaatcttgcctgttgacaggttgtcagagccgagggtacctgttgtacggactatggagaagctagattagaacttggacgatcatgttagtgcgtatgctcccgggattggagctagcgagtgttttgggtggagctattgttgttagtccgatcgtttgccagtccaggttttggtactctgctcactgtaggtgcatagtgtacaccggagttaaaagcaaaaaacaaccacatttgaggcttcgtttgcgaaaaaatacctagtccc

SEQ ID NO: 63540 - protein, 357 aa, Triticum aestivum
  peptide (1)..(357): Ceres Seq. ID no. 14303543
TPLPLSSLARRGRVTPPPGTMASSFLSLRLPTPSPPTATSSPFFPNPLVRSGRCSPLSSTLVARVAGPAAGAPSPLFNPRGDPFLSTLAAASPEQLAAAAGGERRGEDHLPFLEIFQNAKLMSSPAQVERSSSSYSQHSPRRPPPDLPSLLLHGRIVYIGMPLVPAVTELIVAQLMYLDWMNSSEPAYIYINSTGTARDDGEPVGMETEGFAIYDAMMRMKTEVHTLCIGAAAGHACLVLAAGKKGKRYMFPHAKALIQQPRIPSYGMMQASDVVIRAKEVVHNRNTLVKLLARHTGNPPEKIDKVMRGPFYMDSLKAKEFGVIDKILWRGQEKYMSDMLSPEDWDKVAGVRGPGGM

SEQ ID NO: 63541 - protein, 337 aa, Triticum aestivum
  peptide (1)..(337): Ceres Seq. ID no. 14303544
MASSFLSLRLPTPSPPTATSSPFFPNPLVRSGRCSPLSSTLVARVAGPAAGAPSPLFNPRGDPFLSTLAAASPEQLAAAAGGERRGEDHLPFLEIFQNAKLMSSPAQVERSSSSYSQHSPRRPPPDLPSLLLHGRIVYIGMPLVPAVTELIVAQLMYLDWMNSSEPAYIYINSTGTARDDGEPVGMETEGFAIYDAMMRMKTEVHTLCIGAAAGHACLVLAAGKKGKRYMFPHAKALIQQPRIPSYGMMQASDVVIRAKEVVHNRNTLVKLLARHTGNPPEKIDKVMRGPFYMDSLKAKEFGVIDKILWRGQEKYMSDMLSPEDWDKVAGVRGPGGM

SEQ ID NO: 63542 - protein, 236 aa, Triticum aestivum
  peptide (1)..(236): Ceres Seq. ID no. 14303545
MSSPAQVERSSSSYSQHSPRRPPPDLPSLLLHGRIVYIGMPLVPAVTELIVAQLMYLDWMNSSEPAYIYINSTGTARDDGEPVGMETEGFAIYDAMMRMKTEVHTLCIGAAAGHACLVLAAGKKGKRYMFPHAKALIQQPRIPSYGMMQASDVVIRAKEVVHNRNTLVKLLARHTGNPPEKIDKVMRGPFYMDSLKAKEFGVIDKILWRGQEKYMSDMLSPEDWDKVAGVRGPGGM

SEQ ID NO: 63543 - DNA, 1264 bp, Triticum aestivum
  misc_feature (1)..(1264): Ceres Seq. ID no. 12616360
ggagcagtggcctgcagacgcggagctaccgagagccggaggacggaagcaagtgagctgagcgcaggcggaggcggacgcgacgatgagggcggtggcgatcgcgagccccggcgggccggaggcgctgcaggtgcgcgaggtggaggacctcccggcgccgggggagggcgaggtgctcgtcgcggtggccgccgccggcgtcaaccgcgccgacacggtccagcggcagggccggtacccgccgccgccgggcgcctccccctacccgggcctcgagtgctccggcaccatcctcgcgctcggggccaacgtgcccccgcgctgggccgtcggcgaccaggtgtgcgcgctgctctccggtggcgggtatgcggagaaggtggtggtgccggcggggcagctgctcccggtcccggagggggtgtcgctggccgacgccgccggcttgcccgaggtggcctgcaccgtctggtccaccgtcttcatgaccagccacctctcccccggcgaatccttccttatccatggcggatcgagtggaattggtacattcgctatacagattgcgaagcaccttggtgttaaggtttttgttactgcaggaagtgaagaaaaactagcagcctgcaaaggtttgggagcggatgtatgtataaactacaaaactgaagattttgtagcacgcgtaaaagaagaaacaaatggaaagggtgttgatgtcattctggacaatatcggcgggtcttatctccagcgcaatctgaacagcctagctgttgatggtagactcttcatcatcggtttcatgggaggcactacaactgaagtgaaccttcaggcgatgcttgcccgaagactgaccatacaagctgctggactgcggaacagaagcctcgctaacaaagcccagatcgtcagcgaggtggagaagaatgtgtggcctgccgtcgcgtcgggcaaggtgaagccggtgatttacaagacattccctctatccgaagcagctgaatctcacaagttgatggagacgagctcccacattggcaagatactgctgattccatgatggggtatggtgtatcatgtattcatgtgtacactagccgatgtgggcactgttttctgtagtgaactatgcatggacatgcccttttatattgtaataagctggatctctaagtgctggtgaaattggatatgtatcttgaggataaatagtcacaataaaatgttggaacttggaagtcttgttctttcatct

SEQ ID NO: 63544 - protein, 327 aa, Triticum aestivum
  peptide (1)..(327): Ceres Seq. ID no. 12616361
MRAVAIASPGGPEALQVREVEDLPAPGEGEVLVAVAAAGVNRADTVQRQGRYPPPPGASPYPGLECSGTILALGANVPPRWAVGDQVCALLSGGGYAEKVVVPAGQLLPVPEGVSLADAAGLPEVACTVWSTVFMTSHLSPGESFLIHGGSSGIGTFAIQIAKHLGVKVFVTAGSEEKLAACKGLGADVCINYKTEDFVARVKEETNGKGVDVILDNIGGSYLQRNLNSLAVDGRLFIIGFMGGTTTEVNLQAMLARRLTIQAAGLRNRSLANKAQIVSEVEKNVWPAVASGKVKPVIYKTFPLSEAAESHKLMETSSHIGKILLIP

SEQ ID NO: 63545 - protein, 195 aa, Triticum aestivum
  peptide (1)..(195): Ceres Seq. ID no. 12616362
GAVACRRGATESRRTEASELSAGGGGRDDEGGGDREPRRAGGAAGARGGGPPGAGGGRGARRGGRRRRQPRRHGPAAGPVPAAAGRLPLPGPRVLRHHPRARGQRAPALGRRRPGVRAALRWRVCGEGGGAGGAAAPGPGGGVAGRRRRLARGGLHRLVHRLHDQPPLPRRILPYPWRIEWNWYIRYTDCEAPWC

SEQ ID NO: 63546 - protein, 193 aa, Triticum aestivum
  peptide (1)..(193): Ceres Seq. ID no. 12616363
MTSHLSPGESFLIHGGSSGIGTFAIQIAKHLGVKVFVTAGSEEKLAACKGLGADVCINYKTEDFVARVKEETNGKGVDVILDNIGGSYLQRNLNSLAVDGRLFIIGFMGGTTTEVNLQAMLARRLTIQAAGLRNRSLANKAQIVSEVEKNVWPAVASGKVKPVIYKTFPLSEAAESHKLMETSSHIGKILLIP

SEQ ID NO: 63547 - DNA, 1536 bp, Triticum aestivum
  misc_feature (1)..(1536): Ceres Seq. ID no. 14313522
aaaacggatgttcggtcgtgccgtcgtggagtttggctaggcaacgcagctcggatcccgcggaaaaggcaggcaacacaggcagcggcacacggtacagcctcaggagacacagaggcgagatcccgtggcggatcagcggctgcctgtctgaaccggcaacgcatctcctccctcccccctctccagtctccctactccgacgatctatccgtcgagcctcctcaccgcgcgactcgcagcagcgccggagggggaggatggggcggccgccaagcagcgggggccccgcgttccggttcacgcacgcggaggtggcggagatggaggagcacctccgccacctcaacaacgccatcccgcagcgcaacgtcatccagggcctcgccgagaagttcaccgcctccgccgcccgcgccggcaagatccccgtccagtacaagcaggtctggaactggttccagaaccggaggtactcgcagcgggccaggacccccaggggcgcgccgccgccgcaggggaagatgctgcccacgggggccgaggaacaccacccggcctccttcagggctcaggggtcttcctcgtcctaccccggatcccactcaggaaagagtccttcggatggtggccaggccgagtttgaagcaaagtcagctagagatggtgcatggtacgatgttgctgcctttctgtcccacaggctctttgaaacaggggacccggaagtaaaagttcgattttctggatttgggcctgaggaggatgaatggattaatgttcgtaaatgtgtgaggctgcgttctcttccatgtgaatctgcagaatgtgttgctgtgcttcctggggatctcattctttgttttcaggaaggcaaagagcaggccctctattttgacgctcgtgttcttgatgctcaaaggcgcaggcatgatgtaagagggtgccgctgcaggtttcttgttcgttatgatcatgatcactctgaggagattgttcctctgaggaaggtatgccgtcgaccagaaactgatttcaggctccagatcttgcacgcatctagagcggcggcctctgcggatgctcagaatgttagcccagttgagcagaaaccccaaaaggcgcacaagatgatggatgtgaacactgccgaggtgaccgtggttcgcaacccagatcaaggagggccatctgacaagccggctgctcccttaccagctgcgcctgctggcacccacggtgattcagtttcagatgtgcagatggggaatgtggaggttattccaaaagttgaagctgcaaatgaagcacatgatgacaacatgaacgtgggagcgtagttgtttcgcttccctgtgcgcttcggtgtgtacttactaagtccaaaaaaatgtttgcttaggaacttccggtcgaggaaggatggtcgcccggtaactgtaatgtgccgatgtcgacttgtttgctgatgtgtgtacaaagtcttggattgtcggtatctatatagctatatcgtgagacgaatgttgttttcag

SEQ ID NO: 63548 - protein, 445 aa, Triticum aestivum
  peptide (1)..(445): Ceres Seq. ID no. 14313523
NGCSVVPSWSLARQRSSDPAEKAGNTGSGTRYSLRRHRGEIPWRISGCLSEPATHLLPPPSPVSLLRRSIRRASSPRDSQQRRRGRMGRPPSSGGPAFRFTHAEVAEMEEHLRHLNNAIPQRNVIQGLAEKFTASAARAGKIPVQYKQVWNWFQNRRYSQRARTPRGAPPPQGKMLPTGAEEHHPASFRAQGSSSSYPGSHSGKSPSDGGQAEFEAKSARDGAWYDVAAFLSHRLFETGDPEVKVRFSGFGPEEDEWINVRKCVRLRSLPCESAECVAVLPGDLILCFQEGKEQALYFDARVLDAQRRRHDVRGCRCRFLVRYDHDHSEEIVPLRKVCRRPETDFRLQILHASRAAASADAQNVSPVEQKPQKAHKMMDVNTAEVTVVRNPDQGGPSDKPAAPLPAAPAGTHGDSVSDVQMGNVEVIPKVEAANEAHDDNMNVGA

SEQ ID NO: 63549 - protein, 359 aa, Triticum aestivum
  peptide (1)..(359): Ceres Seq. ID no. 14313524
MGRPPSSGGPAFRFTHAEVAEMEEHLRHLNNAIPQRNVIQGLAEKFTASAARAGKIPVQYKQVWNWFQNRRYSQRARTPRGAPPPQGKMLPTGAEEHHPASFRAQGSSSSYPGSHSGKSPSDGGQAEFEAKSARDGAWYDVAAFLSHRLFETGDPEVKVRFSGFGPEEDEWINVRKCVRLRSLPCESAECVAVLPGDLILCFQEGKEQALYFDARVLDAQRRRHDVRGCRCRFLVRYDHDHSEEIVPLRKVCRRPETDFRLQILHASRAAASADAQNVSPVEQKPQKAHKMMDVNTAEVTVVRNPDQGGPSDKPAAPLPAAPAGTHGDSVSDVQMGNVEVIPKVEAANEAHDDNMNVGA

SEQ ID NO: 63550 - protein, 338 aa, Triticum aestivum
  peptide (1)..(338): Ceres Seq. ID no. 14313525
MEEHLRHLNNAIPQRNVIQGLAEKFTASAARAGKIPVQYKQVWNWFQNRRYSQRARTPRGAPPPQGKMLPTGAEEHHPASFRAQGSSSSYPGSHSGKSPSDGGQAEFEAKSARDGAWYDVAAFLSHRLFETGDPEVKVRFSGFGPEEDEWINVRKCVRLRSLPCESAECVAVLPGDLILCFQEGKEQALYFDARVLDAQRRRHDVRGCRCRFLVRYDHDHSEEIVPLRKVCRRPETDFRLQILHASRAAASADAQNVSPVEQKPQKAHKMMDVNTAEVTVVRNPDQGGPSDKPAAPLPAAPAGTHGDSVSDVQMGNVEVIPKVEAANEAHDDNMNVGA

SEQ ID NO: 63551 - DNA, 1831 bp, Triticum aestivum
  misc_feature (1)..(1831): Ceres Seq. ID no. 13584031
agattaaatgttgaggtggaggaaagagaaaccgaaaaaaaggtcttgccttcgcttaattaagcgatgacatcttagccccgattttgatgcgatctgtgatccatgcgccgaacggccacagccggatccttctcgttgcctcgcgcgaaaattttcttcttggcgcgcctctcttccttctcgcccgtcctgcgcgccaaatttctcatcccgatcctggagcccgccagaagaaacctaggcccgctgcccccataaatccacagcagcagactccatcttccatccgtgcgacttgcaggttccttgagcaccaacatggctggccatgggaggaagaaagcggcgcccccatcccaggtgatggacggaccagacggacaagacccaaaatatggcgcccctcccctgccgatggggcgacctaaagctgccgcagcagccgtagcggcatcgaacgcttggttggctgggcatgctgccgctagatccgattcttcccttcaagttgattggggaaatgatgtttacccacctggtggttttgtaaattatttgaacaattcatcgagcttcagtcttccacaacaaattcctcctccaccagccatgacacatggtgctaatttcgcggcaccgctgacatttgcatctcaaaagaatccaattacagcagtgaagaaacgatccaaacgtgcccatgttgaaattgcggatgatgcgggagaaggtaaaactatgaagagattgccatggacatcagaggaggaggatagattgatgagtgcttggctcaagaactcaaatgatcctatcggtggtaatttcaagaagaatgacaaatattggggagatgtggtcgcggactacaatagcaacaccccctcagatcgcaaaagacaagtcaatcaagctatgaaccgatggcatcgagttaacaaaatgataaataatttccattccatccacggagagattagcggtgtatatgctagtgggcagtccaatcagcaattgatggagaaagtccacaaagcatatgagaacagacacggaggaccatttcttctggaaagtacctggcaggttgttcgtcactatccgaagtggtctacgtacaatgcagaactgaatggattgaagaaaatagatgtggccgacctggggaaggcagaggatcatgaggcagctgatagtgatgatatcccacggcctccaggtactaaaacagctaaaagagatgggaatggcaatgacaaaagaaagttgaagtcagaggatttagaagagcttgagaaattcttagaagcccaaaaagaagctactaaaagtcgcacggatgtccttgaggttcaaaagcgtattgcagccgataaacttgagtcgtcgaggctcattctccttgcagcgaaggagaacaaggaggcaaaaacaagagggaaaatgctagaacagtacggtaaattattgacacaagatatggcagggatgaccgagtttcagaaagctgagcatgcgattgcacttaaattgatgcgggaggagttattccccaacgctcgtcaataagtttggaaggaacctgttcctgtttgatgaatgaagagagaagaacagccaatgaagcaatgtggttcatgtcctagtactgatgcttcgggagtgcacaagcttgtttttgttttgttgacagaagtagttattatcaatagatttctgttggtctcgagctagttatttatgtatgtcaacttcttgcttaagtacttccaaaaattgttttctaatctgaagtcagtaataatcattaatccgtaatgattaaaat

SEQ ID NO: 63552 - protein, 416 aa, Triticum aestivum
  peptide (1)..(416): Ceres Seq. ID no. 13584032
MAGHGRKKAAPPSQVMDGPDGQDPKYGAPPLPMGRPKAAAAAVAASNAWLAGHAAARSDSSLQVDWGNDVYPPGGFVNYLNNSSSFSLPQQIPPPPAMTHGANFAAPLTFASQKNPITAVKKRSKRAHVEIADDAGEGKTMKRLPWTSEEEDRLMSAWLKNSNDPIGGNFKKNDKYWGDVVADYNSNTPSDRKRQVNQAMNRWHRVNKMINNFHSIHGEISGVYASGQSNQQLMEKVHKAYENRHGGPFLLESTWQVVRHYPKWSTYNAELNGLKKIDVADLGKAEDHEAADSDDIPRPPGTKTAKRDGNGNDKRKLKSEDLEELEKFLEAQKEATKSRTDVLEVQKRIAADKLESSRLILLAAKENKEAKTRGKMLEQYGKLLTQDMAGMTEFQKAEHAIALKLMREELFPNARQ

SEQ ID NO: 63553 - protein, 401 aa, Triticum aestivum
  peptide (1)..(401): Ceres Seq. ID no. 13584033
MDGPDGQDPKYGAPPLPMGRPKAAAAAVAASNAWLAGHAAARSDSSLQVDWGNDVYPPGGFVNYLNNSSSFSLPQQIPPPPAMTHGANFAAPLTFASQKNPITAVKKRSKRAHVEIADDAGEGKTMKRLPWTSEEEDRLMSAWLKNSNDPIGGNFKKNDKYWGDVVADYNSNTPSDRKRQVNQAMNRWHRVNKMINNFHSIHGEISGVYASGQSNQQLMEKVHKAYENRHGGPFLLESTWQVVRHYPKWSTYNAELNGLKKIDVADLGKAEDHEAADSDDIPRPPGTKTAKRDGNGNDKRKLKSEDLEELEKFLEAQKEATKSRTDVLEVQKRIAADKLESSRLILLAAKENKEAKTRGKMLEQYGKLLTQDMAGMTEFQKAEHAIALKLMREELFPNARQ

SEQ ID NO: 63554 - protein, 384 aa, Triticum aestivum
  peptide (1)..(384): Ceres Seq. ID no. 13584034
MGRPKAAAAAVAASNAWLAGHAAARSDSSLQVDWGNDVYPPGGFVNYLNNSSSFSLPQQIPPPPAMTHGANFAAPLTFASQKNPITAVKKRSKRAHVEIADDAGEGKTMKRLPWTSEEEDRLMSAWLKNSNDPIGGNFKKNDKYWGDVVADYNSNTPSDRKRQVNQAMNRWHRVNKMINNFHSIHGEISGVYASGQSNQQLMEKVHKAYENRHGGPFLLESTWQVVRHYPKWSTYNAELNGLKKIDVADLGKAEDHEAADSDDIPRPPGTKTAKRDGNGNDKRKLKSEDLEELEKFLEAQKEATKSRTDVLEVQKRIAADKLESSRLILLAAKENKEAKTRGKMLEQYGKLLTQDMAGMTEFQKAEHAIALKLMREELFPNARQ

SEQ ID NO: 63555 - DNA, 1325 bp, Triticum aestivum
  misc_feature (1)..(1325): Ceres Seq. ID no. 12617152
atgaccttcttccggtacctaccggaactcctctcctggccctccccttcttccagctcttcttgataaggccacactccgtagaagaacagcaccttgcgatgaaaatggcgagagccctgctcgtcgctcctcttctcgcctcgtgctttgtggcgctcggcctgtccggccgcgccgatgcggcggccgagacgaagaccgtcggtgtctacgagctcaagaagggggatttctccatcaaggtcaccaactggggtgccaccctcatgtccgtgatcctccccgactcgagaggaaacttgggggatgtgatcctgggctacgatacggttgctgagtatgtgaatggcaccgcctactttggagggttgatcggccgcgtcgccaacaggatcgccaacgcccggttcacgctggacgggaaggcctaccggctggttcccaacgatggcaacaacacgctacacggtggtcaccggggattcgataaggtcgtatggacggtgaaggagcacgtcgccggcggcagctccccattcatcactctgtactatcatagcttcgacggagagcaagggtttccaggcgatgtggacgtgcacgtgaagtaccagctctccggcccgcacgagctgagcgtgcgcatgaacgcgacggcgcggggcaaggccaccccggtgaacctcgcgcaccacgcctactggaacctcggcggccacggcagcggcagcgtcctcggcgaggaggtccgcctcttcgcctcccggtacacgcccgtggatgccgcgctcatcccgacgggccacctggcgcccgtggccggcacgccctacgacttccgcacgccggccgccgtgggctcgcgcatcggtggtctcctgagccggggcgttaatgggtacgacatcaactacgtcgtggacggcgggggcctgcgcccggtggcagttgtccgggatggcgcgtccggtagggcgatggagctgtgggcggatcagcccggggtgcagttctacaccgccaacgggctgagtggcgtgagggggaagggcggcaaggtctatggccgatacggcgcgctctgcttggagacgcaggggttccccgacgccgtgaaccgcccgagtttcccgtcgcagatcgtccggccggggaaggtgtacatgcatcacatggtgttcaagttctccttctagtatagctagtggtagtgtggtacccgagcttggtcgtttgtcaggcaacacagccgctcttgtgttttgtgtgctgtctgaatttgatcggttgagcttcaatggaggaataaaagcttgcatgct

SEQ ID NO: 63556 - protein, 398 aa, Triticum aestivum
  peptide (1)..(398): Ceres Seq. ID no. 12617153
DLLPVPTGTPLLALPFFQLFLIRPHSVEEQHLAMKMARALLVAPLLASCFVALGLSGRADAAAETKTVGVYELKKGDFSIKVTNWGATLMSVILPDSRGNLGDVILGYDTVAEYVNGTAYFGGLIGRVANRIANARFTLDGKAYRLVPNDGNNTLHGGHRGFDKVVWTVKEHVAGGSSPFITLYYHSFDGEQGFPGDVDVHVKYQLSGPHELSVRMNATARGKATPVNLAHHAYWNLGGHGSGSVLGEEVRLFASRYTPVDAALIPTGHLAPVAGTPYDFRTPAAVGSRIGGLLSRGVNGYDINYVVDGGGLRPVAVVRDGASGRAMELWADQPGVQFYTANGLSGVRGKGGKVYGRYGALCLETQGFPDAVNRPSFPSQIVRPGKVYMHHMVFKFSF

SEQ ID NO: 63557 - protein, 365 aa, Triticum aestivum
  peptide (1)..(365): Ceres Seq. ID no. 12617154
MKMARALLVAPLLASCFVALGLSGRADAAAETKTVGVYELKKGDFSIKVTNWGATLMSVILPDSRGNLGDVILGYDTVAEYVNGTAYFGGLIGRVANRIANARFTLDGKAYRLVPNDGNNTLHGGHRGFDKVVWTVKEHVAGGSSPFITLYYHSFDGEQGFPGDVDVHVKYQLSGPHELSVRMNATARGKATPVNLAHHAYWNLGGHGSGSVLGEEVRLFASRYTPVDAALIPTGHLAPVAGTPYDFRTPAAVGSRIGGLLSRGVNGYDINYVVDGGGLRPVAVVRDGASGRAMELWADQPGVQFYTANGLSGVRGKGGKVYGRYGALCLETQGFPDAVNRPSFPSQIVRPGKVYMHHMVFKFSF

SEQ ID NO: 63558 - protein, 363 aa, Triticum aestivum
  peptide (1)..(363): Ceres Seq. ID no. 12617155
MARALLVAPLLASCFVALGLSGRADAAAETKTVGVYELKKGDFSIKVTNWGATLMSVILPDSRGNLGDVILGYDTVAEYVNGTAYFGGLIGRVANRIANARFTLDGKAYRLVPNDGNNTLHGGHRGFDKVVWTVKEHVAGGSSPFITLYYHSFDGEQGFPGDVDVHVKYQLSGPHELSVRMNATARGKATPVNLAHHAYWNLGGHGSGSVLGEEVRLFASRYTPVDAALIPTGHLAPVAGTPYDFRTPAAVGSRIGGLLSRGVNGYDINYVVDGGGLRPVAVVRDGASGRAMELWADQPGVQFYTANGLSGVRGKGGKVYGRYGALCLETQGFPDAVNRPSFPSQIVRPGKVYMHHMVFKFSF

SEQ ID NO: 63559 - DNA, 1576 bp, Triticum aestivum
  misc_feature (1)..(1576): Ceres Seq. ID no. 13580053
caaatactggtttcttccaccgtcggtgacctccaagcccaagcccaaaccccaacacccgcgcggctcccgccgccgccgcaccggagatggcggcgtacctgagcatgggcgaggcgcaccgccgcatcgctgactacctctcccgcttggacgacgctatctctcagtccgacggcgccgacctcgcctctctcctcgccatctcctcggcgcccgcctccaccccgctctccgacgcgctcgccgcttttccggattttccccgcctcgcctccgaccgcttcccccacctctccgacttcctccccccgctcctccgcgccatccactcccactccctccgccgcttcggggacgcctactcctccttcgagaaggctgctagcgcgttcctgcaggagttccggaactgggagactccttgggcgatggaggcgatgcacatggtggcgcttgagatcaggctgctagctgagaaggcagacagggagcttgtgatgagcgggaagaacccagacaagctgcaggctgctgggtccttcctgatgaaggtttttggggcacttgcggttaaaggacctaagcgcgttggggcactgtatgttacctgccagctgtttaaaatttatttcaggcttggtactgttaacctttgccgtagtgtcataaggagtatcgaaacagctaggaattttgattttgaagattttccagtgaaagataaggtcacttatatgtattatacaggtcgcttggaggtgtttaatgagaattttcttgttgctgatcagaaactaacttatgctttgatgcattgtaatcctcaaagcgaatcaaatttgaggaaaattttgaagttcctaatccctgtaaagctgtcaattggtgttttgccaaggaggaccctcctggagaagtacaatctgcttgagtatgcagatattgtgacctcacttaggagaggggatctcaggctccttaagcaagcccttgatagacatgaagaccagttactaaaatgtggtgtctaccttgtgttggagaaacttgaactccaggtctaccgaagattagtgaagaaaatccatatcatacagagggagaaggaaccatcgaaggcgcatcaaatcaagctagaggtcttggtaaagactctgcaatggcttggaatcaccatggatgtggatgaggtggaatgcatcatggcgtgcctaatatacaagaatctcataaaaggatactttgcccacaagagcaaagttcttgtccttagcaaacaagaccccttcccaaagttgaatgggaagcccgtttagttcgcagcgatacctcataagcttgtacacctaatggaagtttctcttatctttgatgtacggaacatgacaggtttatgtaaaattaccgcgactctgattgtaacaacatttgtattctagctgcaatgtttgtaaacatttatggttggtagcctccacttaaacggtggttttcatagcttcagtgaggtacaatattgtattctggataaactaaatttgcagactgcaattaaggccatagtaaaaaaccg

SEQ ID NO: 63560 - protein, 409 aa, Triticum aestivum
  peptide (1)..(409): Ceres Seq. ID no. 13580054
MAAYLSMGEAHRRIADYLSRLDDAISQSDGADLASLLAISSAPASTPLSDALAAFPDFPRLASDRFPHLSDFLPPLLRAIHSHSLRRFGDAYSSFEKAASAFLQEFRNWETPWAMEAMHMVALEIRLLAEKADRELVMSGKNPDKLQAAGSFLMKVFGALAVKGPKRVGALYVTCQLFKIYFRLGTVNLCRSVIRSIETARNFDFEDFPVKDKVTYMYYTGRLEVFNENFLVADQKLTYALMHCNPQSESNLRKILKFLIPVKLSIGVLPRRTLLEKYNLLEYADIVTSLRRGDLRLLKQALDRHEDQLLKCGVYLVLEKLELQVYRRLVKKIHIIQREKEPSKAHQIKLEVLVKTLQWLGITMDVDEVECIMACLIYKNLIKGYFAHKSKVLVLSKQDPFPKLNGKPV

SEQ ID NO: 63561 - protein, 403 aa, Triticum aestivum
  peptide (1)..(403): Ceres Seq. ID no. 13580055
MGEAHRRIADYLSRLDDAISQSDGADLASLLAISSAPASTPLSDALAAFPDFPRLASDRFPHLSDFLPPLLRAIHSHSLRRFGDAYSSFEKAASAFLQEFRNWETPWAMEAMHMVALEIRLLAEKADRELVMSGKNPDKLQAAGSFLMKVFGALAVKGPKRVGALYVTCQLFKIYFRLGTVNLCRSVIRSIETARNFDFEDFPVKDKVTYMYYTGRLEVFNENFLVADQKLTYALMHCNPQSESNLRKILKFLIPVKLSIGVLPRRTLLEKYNLLEYADIVTSLRRGDLRLLKQALDRHEDQLLKCGVYLVLEKLELQVYRRLVKKIHIIQREKEPSKAHQIKLEVLVKTLQWLGITMDVDEVECIMACLIYKNLIKGYFAHKSKVLVLSKQDPFPKLNGKPV

SEQ ID NO: 63562 - protein, 295 aa, Triticum aestivum
  peptide (1)..(295): Ceres Seq. ID no. 13580056
MEAMHMVALEIRLLAEKADRELVMSGKNPDKLQAAGSFLMKVFGALAVKGPKRVGALYVTCQLFKIYFRLGTVNLCRSVIRSIETARNFDFEDFPVKDKVTYMYYTGRLEVFNENFLVADQKLTYALMHCNPQSESNLRKILKFLIPVKLSIGVLPRRTLLEKYNLLEYADIVTSLRRGDLRLLKQALDRHEDQLLKCGVYLVLEKLELQVYRRLVKKIHIIQREKEPSKAHQIKLEVLVKTLQWLGITMDVDEVECIMACLIYKNLIKGYFAHKSKVLVLSKQDPFPKLNGKPV

SEQ ID NO: 63563 - DNA, 1046 bp, Triticum aestivum
  misc_feature (1)..(1046): Ceres Seq. ID no. 12616414
cttttccagcagagcctttccccatccctccctccctccccacaaccgccgccgcccatcacgcgcagaaaccacgctccaagacaccaaaacccaccgatcccccatggagaacggcgacgaaaccctcgtctctccccccgccgccgccaccgctgaggtcgagaaggctgcgcccaacggaggcgttgagggcgaggaggtcaccgtcgccgacgctgtccaccccgccaagtcctacgccgccgtcgccgcgaacgccgagatcgaggacctccgcgccaccaagctcgacctcgaggagcagctcgccaatgccagccaggagaacaagaccctcgccgcggaggcccaccgcctcgaagggctcttctctcaggccagggacgacgtcgccaccgccgagcacgccgccgccaccaccgaagaagaggtggcctctctccgcgccgaggtcgagcgcctccaggccctcgtcgaccgcaagaaggctgaccgtgaggcggacgagcgccaacgtcaggagctcacggccgaggtggagaccgttcgtcaggcgaagctcaagctcgagaaggaggtcgacgccctgaaggcttccgccgctgctaccaccgtggaggacagggaggctgctccggacgctggggtcccgaaggaacagggggtcgcctggcaggggatggcagcgggggcggccgctggtgctgccatcaccgctgccgtcgttctgatctacctccgcctcaagaggtaatctggtgctctggtgcgcaggaagttttgctctgctgctacagcttatggaagatttgatgagtttgtcgtggtgatgctgttagtaccgaactgagagtaatatgtcttctatcagttagttgcttaatagaccacaaaaaattaggtaatctgcagaatggttatgtttcatcggtgtttttccttaatcatctacgggcttttggtggtgacgatgaatgtgtagacactttgtcaaccgggcaaggctgtatgcttggttatattatcgttatggttgctggctc

SEQ ID NO: 63564 - protein, 251 aa, Triticum aestivum
  peptide (1)..(251): Ceres Seq. ID no. 12616415
FSSRAFPHPSLPPHNRRRPSRAETTLQDTKTHRSPMENGDETLVSPPAAATAEVEKAAPNGGVEGEEVTVADAVHPAKSYAAVAANAEIEDLRATKLDLEEQLANASQENKTLAAEAHRLEGLFSQARDDVATAEHAAATTEEEVASLRAEVERLQALVDRKKADREADERQRQELTAEVETVRQAKLKLEKEVDALKASAAATTVEDREAAPDAGVPKEQGVAWQGMAAGAAAGAAITAAVVLIYLRLKR

SEQ ID NO: 63565 - protein, 216 aa, Triticum aestivum
  peptide (1)..(216): Ceres Seq. ID no. 12616416
MENGDETLVSPPAAATAEVEKAAPNGGVEGEEVTVADAVHPAKSYAAVAANAEIEDLRATKLDLEEQLANASQENKTLAAEAHRLEGLFSQARDDVATAEHAAATTEEEVASLRAEVERLQALVDRKKADREADERQRQELTAEVETVRQAKLKLEKEVDALKASAAATTVEDREAAPDAGVPKEQGVAWQGMAAGAAAGAAITAAVVLIYLRLKR

SEQ ID NO: 63566 - protein, 196 aa, Triticum aestivum
  peptide (1)..(196): Ceres Seq. ID no. 12616417
FPAEPFPIPPSLPTTAAAHHAQKPRSKTPKPTDPPWRTATKPSSLPPPPPPLRSRRLRPTEALRARRSPSPTLSTPPSPTPPSPRTPRSRTSAPPSSTSRSSSPMPARRTRPSPRRPTASKGSSLRPGTTSPPPSTPPPPPKKRWPLSAPRSSASRPSSTARRLTVRRTSANVRSSRPRWRPFVRRSSSSRRRSTP

SEQ ID NO: 63567 - DNA, 1113 bp, Triticum aestivum
  misc_feature (1)..(1113): Ceres Seq. ID no. 13597090
aaaatccgccgcgccgcatccaaccccttccttccttccgttcctccgccgctccggtggcgcgatggccgcgcgggccctcctcctccgggcaaccgcccgctgctgctcccctctccactcccccaccgccgccccgcgcctccacccgcggctccgcagccacgccgccgccgccgctccccagctccgcttccccgcgctttccttctccgcctccgccgtgtccaccagctcgcacggccccagcggcggtgacgccggcgagggggaggatgacaagggagcgtacgagaactacctggggatgagcgacgacgagctcatggcgcagtgcgacatgggcaccttcaagtcctccgggcccggcggccagcaccgcaacaagcgcgagtccgccgtgcgcctccgccaccaccccaccggcatcgtcgcccaggctgtggaggataggtcacaacataagaatcgatcgtctgctttatctcggcttcggaccctgattgctcttaaagttaggaggccgataaaccttgataactacactcctccagttgaacttcttcagatattgccactgaagtctaccattcgatcaaaggatgttggcagccaaattgggccaaataacccaaaattttctccaggaatgcaagctttattagatcttctatttgctgttgaaggttctgtatcagaggcagcgaaaattctaggcctaagcactggtgccctgtcaaggttaattctatcagatgattctctccgagcggctgcaaatgaactgcgagcctccaagggactgaagccattaagatgatgcccctttacaatgttatcatcttctgctgcgccacaggtgccaaggtgtctcattgctcatgatttcatggcatgccattggagcttatgcccaattccttagcgcaagaaatgcaaaacgtacacagggtctgtcttatacagggccatcatcatgcctgcttgtttgtctcacaccattgtaaccttgttgttgtacagtgcaattgtactttcacatgtcgccatcgcttgatgatgccttcaacaaattggatctacttttaagccatatagtgtctttttattacc

SEQ ID NO: 63568 - protein, 272 aa, Triticum aestivum
  peptide (1)..(272): Ceres Seq. ID no. 13597091
KSAAPHPTPSFLPFLRRSGGAMAARALLLRATARCCSPLHSPTAAPRLHPRLRSHAAAAAPQLRFPALSFSASAVSTSSHGPSGGDAGEGEDDKGAYENYLGMSDDELMAQCDMGTFKSSGPGGQHRNKRESAVRLRHHPTGIVAQAVEDRSQHKNRSSALSRLRTLIALKVRRPINLDNYTPPVELLQILPLKSTIRSKDVGSQIGPNNPKFSPGMQALLDLLFAVEGSVSEAAKILGLSTGALSRLILSDDSLRAAANELRASKGLKPLR

SEQ ID NO: 63569 - protein, 251 aa, Triticum aestivum
  peptide (1)..(251): Ceres Seq. ID no. 13597092
MAARALLLRATARCCSPLHSPTAAPRLHPRLRSHAAAAAPQLRFPALSFSASAVSTSSHGPSGGDAGEGEDDKGAYENYLGMSDDELMAQCDMGTFKSSGPGGQHRNKRESAVRLRHHPTGIVAQAVEDRSQHKNRSSALSRLRTLIALKVRRPINLDNYTPPVELLQILPLKSTIRSKDVGSQIGPNNPKFSPGMQALLDLLFAVEGSVSEAAKILGLSTGALSRLILSDDSLRAAANELRASKGLKPLR

SEQ ID NO: 63570 - protein, 170 aa, Triticum aestivum
  peptide (1)..(170): Ceres Seq. ID no. 13597093
MSDDELMAQCDMGTFKSSGPGGQHRNKRESAVRLRHHPTGIVAQAVEDRSQHKNRSSALSRLRTLIALKVRRPINLDNYTPPVELLQILPLKSTIRSKDVGSQIGPNNPKFSPGMQALLDLLFAVEGSVSEAAKILGLSTGALSRLILSDDSLRAAANELRASKGLKPLR

SEQ ID NO: 63571 - DNA, 1330 bp, Triticum aestivum
  misc_feature (1)..(1330): Ceres Seq. ID no. 13597076
attacctagaacatcctaatcgaaaagttttccctgcaaaactctcgccgctgcgagttcccaaaaagcgaagcgaccaccacacctctcgccggagatgccgccggggacccctctgccgtcgacgggggcgtggacctgggagaacgccgtcgccggagcgaccgccggcttcgccaccgtcgccaccttccacccgctcgacgtcgtccgcacccgcttccaagtgagcggcgggagagggttgtccgacttgccgccgtacaggaacacgggacacgctgtatacaccatcgcacgatctgagggcctgaggggactttatgccggcttttatcctgcagttctggggtcaaccgtttcttgggggctatatttctttttttataacagagctaaacaaagatacttgcaggagaaggatgttcagctccgtccattcgaccatcttgcctcagctgcagaagcaggtgctttggtttgcctgtttacaaatcccatatggctggtgaaaacacggatgcaactacaaacacctgggcatacttcatcttattctggattttctgatgctttgagaactattcggaaagaggagggatggcgagcactttatagagggatcgggcctggacttttgctggtcacccatggcgcgatacaattcactgcctatgaggaacttcgcaaggctatgatatctgcgaaaagtaaacaaacaaggggagatgacaaaggcagcgaggatttattgaactccgttgattatgcggcacttggcgctggttcaaaattatctgctattctgcttacttatccttatcaggttatccgagcccgcttacagcaacgacctggtagtgatggtatcccaaagtactcagatagttggcatgtagtgaaggaagctgcaaggtacgaaggtgtccgtgggttttacaggggcatcacttccaacctattgaagaaccttccagcagcttccgtgacgtttgtggtgtatgaaaacgttatcaaactattcagagcagccaaggagaagacgtaattccaacttgcaactggagccaggagaaacataggaggaactaggaaagacactaatgttccgcgcaaatacagaatctgttcattcaccacactatccgagctcaacgtgatgttccatcacatttcccagttcagctcttattgacttaacagaaacggaatttagtttggcgaacttgttttttgtagagaaaattcattttctaagaaacagctcattggttcatgttgtccagttgaatgcttgttgaagatagagctctggttctatgtgtggttc

SEQ ID NO: 63572 - protein, 316 aa, Triticum aestivum
  peptide (1)..(316): Ceres Seq. ID no. 13597077
MPPGTPLPSTGAWTWENAVAGATAGFATVATFHPLDVVRTRFQVSGGRGLSDLPPYRNTGHAVYTIARSEGLRGLYAGFYPAVLGSTVSWGLYFFFYNRAKQRYLQEKDVQLRPFDHLASAAEAGALVCLFTNPIWLVKTRMQLQTPGHTSSYSGFSDALRTIRKEEGWRALYRGIGPGLLLVTHGAIQFTAYEELRKAMISAKSKQTRGDDKGSEDLLNSVDYAALGAGSKLSAILLTYPYQVIRARLQQRPGSDGIPKYSDSWHVVKEAARYEGVRGFYRGITSNLLKNLPAASVTFVVYENVIKLFRAAKEKT

SEQ ID NO: 63573 - protein, 175 aa, Triticum aestivum
  peptide (1)..(175): Ceres Seq. ID no. 13597078
MQLQTPGHTSSYSGFSDALRTIRKEEGWRALYRGIGPGLLLVTHGAIQFTAYEELRKAMISAKSKQTRGDDKGSEDLLNSVDYAALGAGSKLSAILLTYPYQVIRARLQQRPGSDGIPKYSDSWHVVKEAARYEGVRGFYRGITSNLLKNLPAASVTFVVYENVIKLFRAAKEKT

SEQ ID NO: 63574 - DNA, 1339 bp, Triticum aestivum
  misc_feature (1)..(1339): Ceres Seq. ID no. 12624791
ccacagagtcccatctccattccattcctcagcagactccagcgaccgagatcggatcagagagagcgatggcggcggtgatggagtcgtcgtcggtgcccggcgtggacggcggcgagggtgcggaggggagggtgcggaagccctacaccatcaccaagtcgcgggagagctggaccgacccggagcacgacaagttcatcgaggcgctcctcctgttcgatcgcgattggagaaagatcgaagcatttgttggctccaagacagtgatacagttctgttggcagatcaggagccatgcacagaagtactttctgaaggttcagaagaatgggacaggtgagcatctgcccccacctaggccgaagaggaaggcggcacacccgtacccacataataaagcctcaaaaaaggcccctgaagtcgacttgccacagcagcctcctcatgtcgtggagcaagggcgtgttatacctatggatgcacctactgtcgctacaaactcaagtgcaaacgaggacacatttccttcctgggacgatgttcttacccaaccttatagcccaagacatacacaagacttaggcgctgcaaataatagctctagtagcatagagtgccaatctggaacttggccagcttctgatgcgattgggcaagaaatttggccaacttccgatgcgattgagcaagagattgtacttccagcattgcatgccatgccagactttgctcaagtatacaactttcttgggggcgtatttgatccagatacaacaggacatttgcagaagttgagagagatggatcctatagatgctgaaacggtactacaactgatgaaaaatctatcggtaaacctgtctagcccggactttgagacacacctgagcatacagcacccctgactgttgcagaggaggatgctctcgtcgcacggtggcggcatgggccaagccaggcacgagagcgtaggagatccggggtctctactcagacccttcgcgttccattcatgtaatctctagtcaccctcttcgtgatccacgctcacgacatcgctaatttcactaagcgcatggaccgctctgcagggtaaggagcagatgaggaaagcgtacggtacatcgttacattgttgtcaaagttgcgacatgttaatgcatcgccgcctatttttgtacatatttcttggagatgttctcgggctcttaggcctgggaacttttacctatccggcttgtggcatgtatagtcaggacatggttgcgcatgttgttttggagaggggagaggggaaagtgtttattacccatgaaggaagaccgttcttgtgtgc

SEQ ID NO: 63575 - protein, 301 aa, Triticum aestivum
  peptide (1)..(301): Ceres Seq. ID no. 12624792
TESHLHSIPQQTPATEIGSERAMAAVMESSSVPGVDGGEGAEGRVRKPYTITKSRESWTDPEHDKFIEALLLFDRDWRKIEAFVGSKTVIQFCWQIRSHAQKYFLKVQKNGTGEHLPPPRPKRKAAHPYPHNKASKKAPEVDLPQQPPHVVEQGRVIPMDAPTVATNSSANEDTFPSWDDVLTQPYSPRHTQDLGAANNSSSSIECQSGTWPASDAIGQEIWPTSDAIEQEIVLPALHAMPDFAQVYNFLGGVFDPDTTGHLQKLREMDPIDAETVLQLMKNLSVNLSSPDFETHLSIQHP

SEQ ID NO: 63576 - protein, 279 aa, Triticum aestivum
  peptide (1)..(279): Ceres Seq. ID no. 12624793
MAAVMESSSVPGVDGGEGAEGRVRKPYTITKSRESWTDPEHDKFIEALLLFDRDWRKIEAFVGSKTVIQFCWQIRSHAQKYFLKVQKNGTGEHLPPPRPKRKAAHPYPHNKASKKAPEVDLPQQPPHVVEQGRVIPMDAPTVATNSSANEDTFPSWDDVLTQPYSPRHTQDLGAANNSSSSIECQSGTWPASDAIGQEIWPTSDAIEQEIVLPALHAMPDFAQVYNFLGGVFDPDTTGHLQKLREMDPIDAETVLQLMKNLSVNLSSPDFETHLSIQHP

SEQ ID NO: 63577 - protein, 275 aa, Triticum aestivum
  peptide (1)..(275): Ceres Seq. ID no. 12624794
MESSSVPGVDGGEGAEGRVRKPYTITKSRESWTDPEHDKFIEALLLFDRDWRKIEAFVGSKTVIQFCWQIRSHAQKYFLKVQKNGTGEHLPPPRPKRKAAHPYPHNKASKKAPEVDLPQQPPHVVEQGRVIPMDAPTVATNSSANEDTFPSWDDVLTQPYSPRHTQDLGAANNSSSSIECQSGTWPASDAIGQEIWPTSDAIEQEIVLPALHAMPDFAQVYNFLGGVFDPDTTGHLQKLREMDPIDAETVLQLMKNLSVNLSSPDFETHLSIQHP

SEQ ID NO: 63578 - DNA, 999 bp, Triticum aestivum
  misc_feature (1)..(999): Ceres Seq. ID no. 15173967
aggacatcaagcacctgagctccacatcgatcagtacccacagccactccactctcagctcagggactcggtgtcagggcgacccaagacagaagaatcatgggatccgtgacggcgtcgacgatggcacagcccaccctccgcgtggccgccttctgcggctccctccgcaaggactcatggcaccgcggcctcatccgcgccgccgaggagctgtgcgaggagtccatcccggggctgcgcatcgaccacgtggacatctccggcctgcccatggtcaacccggacctggagaccgacggcggcgagggcttcccgccggccgtcgaggcgctccgcgagagggtccgcgccgccgactgcttcctcttcgcctcgcccgagtacaactactcggtcaccgcctccctgaagaacgcgctggactgggcgtccaggggcaagcgcaactgctgggcggacagggcggcggcgatcgtgtgcgcggggggcgacttcggcggggccagggcgtcgctccacctccgccagatcggggtgttcctcgacctccacttcatcaacaagccggagctccacatcagggcgttcgcggacccgcccaagttcgacgaggagggcaacctcatcgacgccgtgaccagggagcggctcaagaaggttctcctctcgctccaggccttcgcgctcaggctcaaacacaaggacgagtgactgactcaagatcaacgatactacttggcagttggcaccgtataccgtacctgctggttaatttgcattgcattttccttcagctccgtgcactagtattcgtggttccgtgaaatcccctaggaagtgtgtgctactttgtctaataaatcgccgaagaattgttctgtactgtttaacgtgtggaagcttatgtgttttaccgttgctactagaacgcgagcgcgcaccacgcccgtctatgttgagaaaacaaaagaaaattattgaagaaattgatatgtc

SEQ ID NO: 63579 - protein, 274 aa, Triticum aestivum
  peptide (1)..(274): Ceres Seq. ID no. 15173968
DIKHLSSTSISTHSHSTLSSGTRCQGDPRQKNHGIRDGVDDGTAHPPRGRLLRLPPQGLMAPRPHPRRRGAVRGVHPGAAHRPRGHLRPAHGQPGPGDRRRRGLPAGRRGAPREGPRRRLLPLRLARVQLLGHRLPEERAGLGVQGQAQLLGGQGGGDRVRGGRLRRGQGVAPPPPDRGVPRPPLHQQAGAPHQGVRGPAQVRRGGQPHRRRDQGAAQEGSPLAPGLRAQAQTQGRVTDSRSTILLGSWHRIPYLLVNLHCIFLQLRALVFVVP

SEQ ID NO: 63580 - protein, 215 aa, Triticum aestivum
  peptide (1)..(215): Ceres Seq. ID no. 15173969
MAPRPHPRRRGAVRGVHPGAAHRPRGHLRPAHGQPGPGDRRRRGLPAGRRGAPREGPRRRLLPLRLARVQLLGHRLPEERAGLGVQGQAQLLGGQGGGDRVRGGRLRRGQGVAPPPPDRGVPRPPLHQQAGAPHQGVRGPAQVRRGGQPHRRRDQGAAQEGSPLAPGLRAQAQTQGRVTDSRSTILLGSWHRIPYLLVNLHCIFLQLRALVFVVP

SEQ ID NO: 63581 - protein, 204 aa, Triticum aestivum
  peptide (1)..(204): Ceres Seq. ID no. 15173970
MGSVTASTMAQPTLRVAAFCGSLRKDSWHRGLIRAAEELCEESIPGLRIDHVDISGLPMVNPDLETDGGEGFPPAVEALRERVRAADCFLFASPEYNYSVTASLKNALDWASRGKRNCWADRAAAIVCAGGDFGGARASLHLRQIGVFLDLHFINKPELHIRAFADPPKFDEEGNLIDAVTRERLKKVLLSLQAFALRLKHKDE

SEQ ID NO: 63582 - DNA, 616 bp, Triticum aestivum
  misc_feature (1)..(616): Ceres Seq. ID no. 12616383
acagcatctgcacactccgcctcccgcctcttgcagcctaaccccacctctcgagtctcgacaccctcgaatcagcgtccatggcacccaaggcggagaagaagccggtggccacggagaaggctccagcggggaagaagcccaaggcagagaagcggccgccggcgtccaaggagggcggcgagaagaagggcaagaagaagtccaagaagagcgtggagacgtacaagatctacatcttcaaggtgctcaagcaggtgcacccggacatcggcatctcctccaaggccatgtccatcatgaactccttcatcaacgacatcttcgagaagctcgccggcgagcttctcgaagatgtcgttgatgaagaagagagaggagatgtccagtgtcctcaggaagatgagatctgctggaactggaaccgagaagaagaaatagagcatcccaggctcatgaagttgatggaaaatcttctgttctggtgtccggtttttactgcatgtagaacctgctagacttgaaactgttatccgccagctaaacattatgctatgttgaacctcctgtcttgtgagatttttgagctaacttgcaatgcatcgtttgccacccc

SEQ ID NO: 63583 - protein, 145 aa, Triticum aestivum
  peptide (1)..(145): Ceres Seq. ID no. 12616384
MAPKAEKKPVATEKAPAGKKPKAEKRPPASKEGGEKKGKKKSKKSVETYKIYIFKVLKQVHPDIGISSKAMSIMNSFINDIFEKLAGELLEDVVDEEERGDVQCPQEDEICWNWNREEEIEHPRLMKLMENLLFWCPVFTACRTC

SEQ ID NO: 63584 - protein, 120 aa, Triticum aestivum
  peptide (1)..(120): Ceres Seq. ID no. 12616385
QHLHTPPPASCSLTPPLESRHPRISVHGTQGGEEAGGHGEGSSGEEAQGREAAAGVQGGRREEGQEEVQEERGDVQDLHLQGAQAGAPGHRHLLQGHVHHELLHQRHLREARRRASRRCR

SEQ ID NO: 63585 - protein, 100 aa, Triticum aestivum
  peptide (1)..(100): Ceres Seq. ID no. 12616386
TASAHSASRLLQPNPTSRVSTPSNQRPWHPRRRRSRWPRRRLQRGRSPRQRSGRRRPRRAARRRARRSPRRAWRRTRSTSSRCSSRCTRTSASPPRPCPS

SEQ ID NO: 63586 - DNA, 558 bp, Triticum aestivum
  misc_feature (1)..(558): Ceres Seq. ID no. 15173480
aaaaaaaaaagcacaagcagaagcaaccgagcgaacggcgacgacgacccgaagaagatggtgatgcccacggaccctatgctatggcacaaggtggccgccgtctccggggtcgttgcgcttggactgggcacctatggagcgcacatgttccgcccgcagaaccctagatacaaagagatttggcagaccgcgtccctgtaccatctcgtccacaccgcggcgctgctcggggctcccatgaccaagcgccccaacatcttcggaggccttctgacaactgggattgtgctcttctctggaacgtgctacactgtggcttaccttgaagacaggaagttctcttcaccagcaccgatcggtggctttgcattcattgctgcttgggccagcctgctcttctgattgtattgtgttttatcgggtgaaaactatgtctactttacacaaggctttgtatcagtcgctctattaggtcatgattgtactgctgtggcacacaactttctcatacctttacaaaataattagaataaaacagttcccttgatgtttcac

SEQ ID NO: 63587 - protein, 134 aa, Triticum aestivum
  peptide (1)..(134): Ceres Seq. ID no. 15173481
KKKSTSRSNRANGDDDPKKMVMPTDPMLWHKVAAVSGVVALGLGTYGAHMFRPQNPRYKEIWQTASLYHLVHTAALLGAPMTKRPNIFGGLLTTGIVLFSGTCYTVAYLEDRKFSSPAPIGGFAFIAAWASLLF

SEQ ID NO: 63588 - protein, 115 aa, Triticum aestivum
  peptide (1)..(115): Ceres Seq. ID no. 15173482
MVMPTDPMLWHKVAAVSGVVALGLGTYGAHMFRPQNPRYKEIWQTASLYHLVHTAALLGAPMTKRPNIFGGLLTTGIVLFSGTCYTVAYLEDRKFSSPAPIGGFAFIAAWASLLF

SEQ ID NO: 63589 - protein, 113 aa, Triticum aestivum
  peptide (1)..(113): Ceres Seq. ID no. 15173483
MPTDPMLWHKVAAVSGVVALGLGTYGAHMFRPQNPRYKEIWQTASLYHLVHTAALLGAPMTKRPNIFGGLLTTGIVLFSGTCYTVAYLEDRKFSSPAPIGGFAFIAAWASLLF

SEQ ID NO: 63590 - DNA, 766 bp, Triticum aestivum
  misc_feature (1)..(766): Ceres Seq. ID no. 15224278
agaccaaggaaaaaaaggagaatgaaatccgcgatgcttcccctgctcctcctgctcgccgtggccggccccgccgccgcgaagccgacggcctacgaggcgctcgcggccttcgacttccccccgggcatcatccccaagggggtcgtctcctacaccctcgacaacgccaccggcgacttcacggcgcacatcaactcctcctccacctgcgagttctccatccagggctcctactcgctccggtacaagcccgacatcagcggccgcatctccgtcgaccgcctcaccaacctccagggcgtcaccgtcaaggtcctcttcttctggctcaacatcgtcgaggtcacccgcagcggcgaccagctcggcttctccgtcggcatcgcctccgccgacttcggcctcgacaacttcctcgagagccccacctgcggctgcggcttcgactgcaacgacctcctgctgccgcagtccaccgccgagccgagcctgcgcctgcgaggtgcgttctaggatccccaccgagctctctcacaagtcacaacggccccttcaaaattcagctagttcgtggatggattattcatgctcttgttgctggaagataccaaggggctggtagtattttctagtgctgttcctgttttagatggaccaacaatttcaggactcgatttcgatgggtccgtgtatgagtggtgtactgtttcatcaggaagtttagagtaaaacacttgagatcaataaaagtttcatgttcctt

SEQ ID NO: 63591 - protein, 210 aa, Triticum aestivum
  peptide (1)..(210): Ceres Seq. ID no. 15224279
TKEKKENEIRDASPAPPARRGRPRRREADGLRGARGLRLPPGHHPQGGRLLHPRQRHRRLHGAHQLLLHLRVLHPGLLLAPVQARHQRPHLRRPPHQPPGRHRQGPLLLAQHRRGHPQRRPARLLRRHRLRRLRPRQLPREPHLRLRLRLQRPPAAAVHRRAEPAPARCVLGSPPSSLTSHNGPFKIQLVRGWIIHALVAGRYQGAGSIF

SEQ ID NO: 63592 - protein, 171 aa, Triticum aestivum
  peptide (1)..(171): Ceres Seq. ID no. 15224280
RPRKKRRMKSAMLPLLLLLAVAGPAAAKPTAYEALAAFDFPPGIIPKGVVSYTLDNATGDFTAHINSSSTCEFSIQGSYSLRYKPDISGRISVDRLTNLQGVTVKVLFFWLNIVEVTRSGDQLGFSVGIASADFGLDNFLESPTCGCGFDCNDLLLPQSTAEPSLRLRGAF

SEQ ID NO: 63593 - protein, 164 aa, Triticum aestivum
  peptide (1)..(164): Ceres Seq. ID no. 15224281
MKSAMLPLLLLLAVAGPAAAKPTAYEALAAFDFPPGIIPKGVVSYTLDNATGDFTAHINSSSTCEFSIQGSYSLRYKPDISGRISVDRLTNLQGVTVKVLFFWLNIVEVTRSGDQLGFSVGIASADFGLDNFLESPTCGCGFDCNDLLLPQSTAEPSLRLRGAF

SEQ ID NO: 63594 - DNA, 804 bp, Triticum aestivum
  misc_feature (1)..(804): Ceres Seq. ID no. 14302093
atatctatcacttcccggagttcttcgtttggccacgctgatcaattgagatcaagaccatggcaaactgtaagaagtggcttctgctcgttgtgggcctcacggccatgatttcctcgtcggaggcgtacgtcttctacgccggcggccgcgacggctgggtcgtcgaccccgccgagagctacaaccactgggccgagcgcaaccggtttcagatcaacgacaccatcgtgtttgcgcgcggcgagggcgagggcgcggactcggtgctgctggtgaccgagccggacttcgacgcgtgcaacacgcgtagccctgtccgccggctagaggacgccggtggtcgcccggagttccggttcgaccggtcgggtgccttcttcttcatcagcggcgacgaggaccggtgccagaagggcaagaagttgtacgtcgtcgtgatggcgcctcggtcccaggagtgggagctcgcaccggcgcccggatcgccgccgctctgggcctcggcaccagagcacgcggaggccccggacatgagccctggcaacgaaaccttgttcacatcgtttggggctgtgagcgaaactccggccggatctcctcatggatggaacccgaataggcgataaacctggactagagacttgagtgtttaggcaggccatggccgacacccccgttgggcttccgcttgaaggttgccgagtacatgtcgtgtaaacggcggtaagtggtgagagcgtgtgtgaagaagtacccccctgcagggttaacatcatttattcaaataaccgtgtccgcggg

SEQ ID NO: 63595 - protein, 189 aa, Triticum aestivum
  peptide (1)..(189): Ceres Seq. ID no. 14302094
MANCKKWLLLVVGLTAMISSSEAYVFYAGGRDGWVVDPAESYNHWAERNRFQINDTIVFARGEGEGADSVLLVTEPDFDACNTRSPVRRLEDAGGRPEFRFDRSGAFFFISGDEDRCQKGKKLYVVVMAPRSQEWELAPAPGSPPLWASAPEHAEAPDMSPGNETLFTSFGAVSETPAGSPHGWNPNRR

SEQ ID NO: 63596 - protein, 173 aa, Triticum aestivum
  peptide (1)..(173): Ceres Seq. ID no. 14302095
MISSSEAYVFYAGGRDGWVVDPAESYNHWAERNRFQINDTIVFARGEGEGADSVLLVTEPDFDACNTRSPVRRLEDAGGRPEFRFDRSGAFFFISGDEDRCQKGKKLYVVVMAPRSQEWELAPAPGSPPLWASAPEHAEAPDMSPGNETLFTSFGAVSETPAGSPHGWNPNRR

SEQ ID NO: 63597 - DNA, 810 bp, Triticum aestivum
  misc_feature (1)..(810): Ceres Seq. ID no. 15173457
ccctttccttcccatctatcctccgatctccatcaaccggagccgccgtgcttcctccttccgcctgcacacgcttcgaccccggcggccgctcgcggcgcgtcgccaccttcctcacccttcgttccgctgctcaggatcccgctccccagtccagcacagggaggggggcaatggaaggaccgtctgacggccaactgatcccctccaccgcaggagaccctcacctcaacagctcggccgcgcccatggacgccaccagcagcggctcgcagcacgtcgcgacgctgcggaagctgctgttccggaggatgctggtcggggtgaacgacggccgctacttcctggggctgttccactgcgtcgacaagcaggggaacataatcctgcaggacgcggtggagtaccgcagcgcgcgccgctcatccccgtcggcgccgaaggaggagcggtgcctcgggctcatcctgatcccggcgtcctgccgctcgtcctgccatgtcgactgcttcatcgaagagcagatggccctgctgtccctgtgcaagtgaaggatgcttctgatttctttcttcttctggtttctcaagctatgtggcgtcgatgaatctgtgcctggagaccttactgtcacttttatttgtaatcagttgtgccatattggagttaccctgcatattattatttttgttatttcagctagaagctggtattcatcaatcagtgtcactggctgtgagttcttcaatcaacaagattttgtacacaaattcagtaactgatgacatacaagctcataccataacttcc

SEQ ID NO: 63598 - protein, 182 aa, Triticum aestivum
  peptide (1)..(182): Ceres Seq. ID no. 15173458
LSFPSILRSPSTGAAVLPPSACTRFDPGGRSRRVATFLTLRSAAQDPAPQSSTGRGAMEGPSDGQLIPSTAGDPHLNSSAAPMDATSSGSQHVATLRKLLFRRMLVGVNDGRYFLGLFHCVDKQGNIILQDAVEYRSARRSSPSAPKEERCLGLILIPASCRSSCHVDCFIEEQMALLSLCK

SEQ ID NO: 63599 - protein, 125 aa, Triticum aestivum
  peptide (1)..(125): Ceres Seq. ID no. 15173459
MEGPSDGQLIPSTAGDPHLNSSAAPMDATSSGSQHVATLRKLLFRRMLVGVNDGRYFLGLFHCVDKQGNIILQDAVEYRSARRSSPSAPKEERCLGLILIPASCRSSCHVDCFIEEQMALLSLCK

SEQ ID NO: 63600 - protein, 100 aa, Triticum aestivum
  peptide (1)..(100): Ceres Seq. ID no. 15173460
MDATSSGSQHVATLRKLLFRRMLVGVNDGRYFLGLFHCVDKQGNIILQDAVEYRSARRSSPSAPKEERCLGLILIPASCRSSCHVDCFIEEQMALLSLCK

SEQ ID NO: 63601 - DNA, 1394 bp, Triticum aestivum
  misc_feature (1)..(1394): Ceres Seq. ID no. 13585342
caacatcctaatcgaaaaagttgttaaaggcagcggggacagggccaccgcccaccgccgtcgtactcgtggaacttgcttgcttgccaccccgtcctttgctgctaccgccgcagccgatcgatggccgattcggccggaaagcggcctccaacgccggcgccggcctccggcggaggcggcatggcgtggaagctctctttagctctgttcgtgttgctcgcggcgttcctgtacaagcagattcagcctccggctccggaaatcgttggctcgccgggtggcccccctgttacagcatcaagaacaaagctcaaagacggcaggcatttggcatacctggaatctggcgtcccaaaggagaaggccaagtacaagatcatttttgtccatggattcgactcctgcagatacgacgtgcttcaagtttccccggagctggcacaagagctgggcatctacctgctgtccttcgaccggcctgggtatggtgagagcgaccctgacccggcaccgtctgagaagagcatcgccctcgacatcgaggagctcgccgacaacctgcagctgggccccaaattccacctcatcggcttctccatgggcggcgaaatcatgtggagctgcctcaagtacatcccgcacaggctctctggggtggccgttctcgggccggtcggcaactactggtggtcgggcttgccgtcgaacgtgtcatgggacgcctggtaccagcagctcccacaggaccaatgggcggtctgggtctcccatcatctgccatggctgacctactggtggaacacccagaagctcttcccggcctccagcgtcatcgcctacaaccctgccctcctgtccgaagaagacgcgaagctcatggagaagtttggaatgcgaacctacatgccgatgataaggcagcagggggagtactactgcctgcaccgcgacatgatggtcgggttcgggaagtggggttggagccccctggacctcaaggacccgttcgccggcggcgagggcaaggtgcacctgtggcacggcgcggaggaccgcatcgtgccggtcatcttgtccaggtacatcagcgagaggctcccgtgggtggtctaccacgagctccccaagtccggacacctcttccccgttgcccaggaaatggccgacgccatcgtcaagtccctgctgctcggagagcagtaaccttccactccgatcatctatctctatgtagtatgcttcttgtgcagtacctcagcgccgtgtggttagctcctcctcacgggcaccgaataacaggtgtttctttcggtctggaagacgacgatagacacttgtatatatctgtgagggctagggttcgtatattcaagccatggccatggaattcc

SEQ ID NO: 63602 - protein, 360 aa, Triticum aestivum
  peptide (1)..(360): Ceres Seq. ID no. 15220759
MADSAGKRPPTPAPASGGGGMAWKLSLALFVLLAAFLYKQIQPPAPEIVGSPGGPPVTASRTKLKDGRHLAYLESGVPKEKAKYKIIFVHGFDSCRYDVLQVSPELAQELGIYLLSFDRPGYGESDPDPAPSEKSIALDIEELADNLQLGPKFHLIGFSMGGEIMWSCLKYIPHRLSGVAVLGPVGNYWWSGLPSNVSWDAWYQQLPQDQWAVWVSHHLPWLTYWWNTQKLFPASSVIAYNPALLSEEDAKLMEKFGMRTYMPMIRQQGEYYCLHRDMMVGFGKWGWSPLDLKDPFAGGEGKVHLWHGAEDRIVPVILSRYISERLPWVVYHELPKSGHLFPVAQEMADAIVKSLLLGEQ

SEQ ID NO: 63603 - protein, 340 aa, Triticum aestivum
  peptide (1)..(340): Ceres Seq. ID no. 15220760
MAWKLSLALFVLLAAFLYKQIQPPAPEIVGSPGGPPVTASRTKLKDGRHLAYLESGVPKEKAKYKIIFVHGFDSCRYDVLQVSPELAQELGIYLLSFDRPGYGESDPDPAPSEKSIALDIEELADNLQLGPKFHLIGFSMGGEIMWSCLKYIPHRLSGVAVLGPVGNYWWSGLPSNVSWDAWYQQLPQDQWAVWVSHHLPWLTYWWNTQKLFPASSVIAYNPALLSEEDAKLMEKFGMRTYMPMIRQQGEYYCLHRDMMVGFGKWGWSPLDLKDPFAGGEGKVHLWHGAEDRIVPVILSRYISERLPWVVYHELPKSGHLFPVAQEMADAIVKSLLLGEQ

SEQ ID NO: 63604 - protein, 226 aa, Triticum aestivum
  peptide (1)..(226): Ceres Seq. ID no. 15220761
MGRLVPAAPTGPMGGLGLPSSAMADLLVEHPEALPGLQRHRLQPCPPVRRRREAHGEVWNANLHADDKAAGGVLLPAPRHDGRVREVGLEPPGPQGPVRRRRGQGAPVARRGGPHRAGHLVQVHQREAPVGGLPRAPQVRTPLPRCPGNGRRHRQVPAARRAVTFHSDHLSLCSMLLVQYLSAVWLAPPHGHRITGVSFGLEDDDRHLYISVRARVRIFKPWPWNS

SEQ ID NO: 63605 - DNA, 1518 bp, Triticum aestivum
  misc_feature (1)..(1518): Ceres Seq. ID no. 12587035
acgaaaaaaagagctcaccatcgaagcagcagcaagaagaggaggaggagctaggagttctcggtctcgccgcagagcaacttggcagagcgagtgagcaagacaagcgaggaaagcaagggaaggatacatggcgtgcgcggtggcaccgggctcgccggtcttctcgccgtcccgcctcggcctgctccagcagttggagcagcagctccaccaccaccaccaccacggctgctccagcagcggcgcctccttcctcccctcctcgccgctccgccccttcgcccacctccgcgcgcgcatccaccccgacccctccccgtgcgccgccccgccgctgcccgccgtcaagactgaggattcttcttctgttgctccggctaaggccccggtcaagcgcaggcgcccggcgcctctgctagttccggccgcggtcaccgtcgcgccggcggtgctggaggccgccgcggcgagcggggtggacgaggtggcggagcagggcgacggcttcgcggccttctgccggagggggaagggccggaagcgggtcgagatggaggaccgccacgtcgccgccgtcgcgctcggcggggaccgcgcgcaggccctcttcgccgtgttcgacggccacggagggaagagcgccgcggagttcgccgcggagaacatgccacggatcgtggcggaggagctggagaggtcggcgcgcggcggaggggcagggcgcgcggcggtggagggcgccgtgcggcgggcgtacctgcgcaccgacgaggagttctcctccacctcctccaagaaccgggagcaggcgggcgggggcgcctgctgcgtgacggcgctgctccgcgagggcgggcggcagctggtggtgtccggcgccggggactgccgcgcggtcctgagccgcggcggcagggcggaggcgctcaccgacgaccaccgcgcgtcgcggcaggacgagcgggaccggatcgaggcgctgaaaggcgggctggtgctcaactgccgcggcgtatggcgggtgcagggctcgctggcggtgacccggggcatcggcgacgcgcacctcaagccgtgggtggtggcggagccggagactagaaccgtcgacttgggcgccgactgcgagctgctcatcctcgcctccgacgggctgtgggacaaggtgggcaaccaggaggccgtcgacgccgccgccgcctcctccggcgacctgcccgccgcgtgccgccggctcgtcgacatggccgtgtccaggggctcctccgacgacatcagcgtgctcgtcatccagctgcagcgccctctccgataagactgtagtagtagtagcagagaagatatgcatcggcgccatggatgttcaccctacgtgtagatagagagcttttttgacgtcgtctctctcgtccccgctcgatccggctgctggtgcttgtaacaagatcattagatcaagcactgttagtgctaataatcatcacccggttgagatttcgatcaccgtgggacggg

SEQ ID NO: 63606 - protein, 395 aa, Triticum aestivum
  peptide (1)..(395): Ceres Seq. ID no. 12587036
MACAVAPGSPVFSPSRLGLLQQLEQQLHHHHHHGCSSSGASFLPSSPLRPFAHLRARIHPDPSPCAAPPLPAVKTEDSSSVAPAKAPVKRRRPAPLLVPAAVTVAPAVLEAAAASGVDEVAEQGDGFAAFCRRGKGRKRVEMEDRHVAAVALGGDRAQALFAVFDGHGGKSAAEFAAENMPRIVAEELERSARGGGAGRAAVEGAVRRAYLRTDEEFSSTSSKNREQAGGGACCVTALLREGGRQLVVSGAGDCRAVLSRGGRAEALTDDHRASRQDERDRIEALKGGLVLNCRGVWRVQGSLAVTRGIGDAHLKPWVVAEPETRTVDLGADCELLILASDGLWDKVGNQEAVDAAAASSGDLPAACRRLVDMAVSRGSSDDISVLVIQLQRPLR

SEQ ID NO: 63607 - protein, 254 aa, Triticum aestivum
  peptide (1)..(254): Ceres Seq. ID no. 12587037
MEDRHVAAVALGGDRAQALFAVFDGHGGKSAAEFAAENMPRIVAEELERSARGGGAGRAAVEGAVRRAYLRTDEEFSSTSSKNREQAGGGACCVTALLREGGRQLVVSGAGDCRAVLSRGGRAEALTDDHRASRQDERDRIEALKGGLVLNCRGVWRVQGSLAVTRGIGDAHLKPWVVAEPETRTVDLGADCELLILASDGLWDKVGNQEAVDAAAASSGDLPAACRRLVDMAVSRGSSDDISVLVIQLQRPLR

SEQ ID NO: 63608 - protein, 216 aa, Triticum aestivum
  peptide (1)..(216): Ceres Seq. ID no. 12587038
MPRIVAEELERSARGGGAGRAAVEGAVRRAYLRTDEEFSSTSSKNREQAGGGACCVTALLREGGRQLVVSGAGDCRAVLSRGGRAEALTDDHRASRQDERDRIEALKGGLVLNCRGVWRVQGSLAVTRGIGDAHLKPWVVAEPETRTVDLGADCELLILASDGLWDKVGNQEAVDAAAASSGDLPAACRRLVDMAVSRGSSDDISVLVIQLQRPLR

SEQ ID NO: 63609 - DNA, 957 bp, Triticum aestivum
  misc_feature (1)..(957): Ceres Seq. ID no. 15173971
cccgtcctgccctgcccactcccccaaatacaaccaacccctctcgccgtctgctcgcttgcccgtccgtccgtccccccaaatccaaccccctccccgcacgaaccccggcggcgtcaccggcgatggagtgcgtcatcggcgtggtcggccgcgacttcgcggtggtggccgcggacacgtccgccgtgcagagcatcctcgtccacaagacggacgaggacaagatcatgctcctcgactcccacaagctcatgggcgcctccggggagcccggcgaccgcgtgcagttcaccgagttcatccagaagaacctccacctctaccagttccgcaacaacatgccgctcagcaccgccgccaccgccaacttcacccgcggcgagctcgccaccgccctccgcaagaatccctactctgtaaacatcatacttgcagggtttgataaagatgctggtgcatcgatgtactacattgactacatcgcaacgctccacaaaattgacaagggagcattcgggtacgggtcgtacttctgtttgtcgctgatggacaagttgtaccgccctgacatgactgtcgaggaagcggtagaccttgttgacaagtgcatcaaggagatcagactccggctggtcgtcgcgcctcagaatttcgccatcaagatcgtggacaaggatggcgccagggactatgctaggcgtgagataggaggtgacagtcctgcagtcgcaaccgcaaccgcaacaatagcaacaactgcctgaggtgattggcgctgtcggtggtcatttggctggctggaggctgaaccctttctgttaattgtttccaagtactgtcactatgtaatcgcaatacgtttcggttcgagaactgtgttgcaaattctcccagatgtggactagtctgtttatgacccctatttcatggttatatgtttcactgtttcttgcc

SEQ ID NO: 63610 - protein, 254 aa, Triticum aestivum
  peptide (1)..(254): Ceres Seq. ID no. 15173972
RPALPTPPNTTNPSRRLLACPSVRPPKSNPLPARTPAASPAMECVIGVVGRDFAVVAADTSAVQSILVHKTDEDKIMLLDSHKLMGASGEPGDRVQFTEFIQKNLHLYQFRNNMPLSTAATANFTRGELATALRKNPYSVNIILAGFDKDAGASMYYIDYIATLHKIDKGAFGYGSYFCLSLMDKLYRPDMTVEEAVDLVDKCIKEIRLRLVVAPQNFAIKIVDKDGARDYARREIGGDSPAVATATATIATTA

SEQ ID NO: 63611 - protein, 213 aa, Triticum aestivum; identical to SEQ ID NO: 56585
  peptide (1)..(213): Ceres Seq. ID no. 15173973

SEQ ID NO: 63612 - protein, 178 aa, Triticum aestivum; identical to SEQ ID NO: 56586
  peptide (1)..(178): Ceres Seq. ID no. 15173974

SEQ ID NO: 63613 - DNA, 515 bp, Triticum aestivum
  misc_feature (1)..(515): Ceres Seq. ID no. 13584057
ataacgtttcctcgttgccggggggaagctctctcgtgtcctcctctgctcttcctcgacgagagtgaggccggccaccggcgacagggcggccatggcggcggcgcttctctccccggcctctcccctccctcgctcctcctccgcggcccatcccaggagcaagggcgcggctggtgcagcagcagggtgcgctccgccgtccaggaggagggccgtctcgtgctcgtgcgcgcccgattcgtggagcctcgggctggagaggaggcagctcgtgctctccggcctcgtctcctcctttgcaatcgccctcccgattacagtagtacaatcgtgcgctgctgccactgaggttgagcttgacgacggcgtgaagatggccatgctggtagatgagaccaacgcctactcttttctctacccggttcagctgccagggaagaaaacctccttcagatgggtggagtccaggaaatcggagcgatattcctctgcggcgccactatctcctgatg

SEQ ID NO: 63614 - protein, 140 aa, Triticum aestivum
  peptide (1)..(140): Ceres Seq. ID no. 13584058
MAAALLSPASPLPRSSSAAHPRSKGAAGAAAGCAPPSRRRAVSCSCAPDSWSLGLERRQLVLSGLVSSFAIALPITVVQSCAAATEVELDDGVKMAMLVDETNAYSFLYPVQLPGKKTSFRWVESRKSERYSSAAPLSPD

SEQ ID NO: 63615 - protein, 116 aa, Triticum aestivum
  peptide (1)..(116): Ceres Seq. ID no. 13584059
ITFPRCRGEALSCPPLLFLDESEAGHRRQGGHGGGASLPGLSPPSLLLRGPSQEQGRGWCSSRVRSAVQEEGRLVLVRARFVEPRAGEEAARALRPRLLLCNRPPDYSSTIVRCCH

SEQ ID NO: 63616 - DNA, 1224 bp, Triticum aestivum
  misc_feature (1)..(1224): Ceres Seq. ID no. 15225685
acgagascattacctagarcatcctratcgaawatcatcagccccttgccaacaacatgtcttcttcttcttcttcttctacccgggtctcccagctgggcatcgccggcttggccgcgcttctggcggccgtctgcctcctccacgccggcggggcggcggcggcggagctgtgcacggactactacgactgcacgtgcccggacgcgtacaagatcgtgcagggggtgctggtggaggcgcaccagtcggaccctcgcatcttcgccagcctcatccgcctccacttccacgactgcttcgtgcagggctgcgacggctcgctgctgctggacaccttcgacgggatggagtcggagaaggacgcgcggcccaacaacgggtcggcgcgcggcttcgaggtcgtggacgccgccaaggccgccctcgaggacgcctgccccggcgtcgtctcctgcgccgacatcctcgccatcgccgccgagatctcggtcgagctgtccggagggcccgggtggaacgtgttgctggggaggctggacagcttcacgtccagcaaagccgacgccgagaacctaccaggccccttcgacggcctcgatgtgctgagagcaaagttccggaacgccacgctcgacgatactaccgacctcgtcgccctctcaggtggccacactttcggccgcgtgcaatgccagttcgtcacgggccggctgtacaacttcagcgggacgaaccagcctgacccgaccctcgacgcgacataccgagccttcctgtcacagagatgcccgaggaacggcgacggaacgtccctcaacgacctcgacccgaccacacccgacaacttcgacaagaactacttcacaaacctcgaggtgaaccgcggcttccttcagtcagaccaggagctcaagtcggaccccggcgcggcggggacgacggcgccaatcgtcgatcggttcgcgggcagtcaggaggccttcttcagtagcttcgtgacttctatgatcaagatggggaacattaggcccgtcacagatccctcccagggagaagtccggaaccgctgcgcgtttgtcaattcaaattagcgggcaggggggagaccacgtgtgggtatatgcaaatgtggcatggtcatggatgcaaggatgaattcatctcttgtcgtctctggtgtaataattggtttttgtgtcaaccaatgtaaacatttcatgc

SEQ ID NO: 63617 - protein, 345 aa, Triticum aestivum
  peptide (1)..(345): Ceres Seq. ID no. 15225686
MSSSSSSSTRVSQLGIAGLAALLAAVCLLHAGGAAAAELCTDYYDCTCPDAYKIVQGVLVEAHQSDPRIFASLIRLHFHDCFVQGCDGSLLLDTFDGMESEKDARPNNGSARGFEVVDAAKAALEDACPGVVSCADILAIAAEISVELSGGPGWNVLLGRLDSFTSSKADAENLPGPFDGLDVLRAKFRNATLDDTTDLVALSGGHTFGRVQCQFVTGRLYNFSGTNQPDPTLDATYRAFLSQRCPRNGDGTSLNDLDPTTPDNFDKNYFTNLEVNRGFLQSDQELKSDPGAAGTTAPIVDRFAGSQEAFFSSFVTSMIKMGNIRPVTDPSQGEVRNRCAFVNSN

SEQ ID NO: 63618 - protein, 248 aa, Triticum aestivum
  peptide (1)..(248): Ceres Seq. ID no. 15225687
MESEKDARPNNGSARGFEVVDAAKAALEDACPGVVSCADILAIAAEISVELSGGPGWNVLLGRLDSFTSSKADAENLPGPFDGLDVLRAKFRNATLDDTTDLVALSGGHTFGRVQCQFVTGRLYNFSGTNQPDPTLDATYRAFLSQRCPRNGDGTSLNDLDPTTPDNFDKNYFTNLEVNRGFLQSDQELKSDPGAAGTTAPIVDRFAGSQEAFFSSFVTSMIKMGNIRPVTDPSQGEVRNRCAFVNSN

SEQ ID NO: 63619 - protein, 247 aa, Triticum aestivum
  peptide (1)..(247): Ceres Seq. ID no. 15225688
  misc_feature (2)..(2): Xaa is any aa, unknown or other
  misc_feature (6)..(6): Xaa is any aa, unknown or other
  misc_feature (9)..(9): Xaa is any aa, unknown or other
  misc_feature (11)..(11): Xaa is any aa, unknown or other
RXHYLXHPXRXSSAPCQQHVFFFFFFYPGLPAGHRRLGRASGGRLPPPRRRGGGGGAVHGLLRLHVPGRVQDRAGGAGGGAPVGPSHLRQPHPPPLPRLLRAGLRRLAAAGHLRRDGVGEGRAAQQRVGARLRGRGRRQGRPRGRLPRRRLLRRHPRHRRRDLGRAVRRARVERVAGEAGQLHVQQSRRREPTRPLRRPRCAESKVPERHARRYYRPRRPLRWPHFRPRAMPVRHGPAVQLQRDEPA

SEQ ID NO: 63620 - DNA, 1235 bp, Triticum aestivum
  misc_feature (1)..(1235): Ceres Seq. ID no. 12624774
cactgagccagccgtcaccaccaccaacaacaaaaaaacacgcatcgacgatacgtacaacgcagccgcccctcgccggcgacgagtgctaggccatggattccgactacggcgtgccgcgcgagctctcggaggtgcagcagaaccggactctctaccagcccgagctgcccccctgcctccagggcactactgtgagggtggagtatggtgatgtggcgatcgctgctgatcccgccggcgctcatgtgatcagccacgcgtacccccacacatacgggcagccactggctcatttcctcaggaaggcggctaatgttcctgatgctaaagtcatatcagagcaccctgccgtcagggttggtattgtattctgtggaaggcagtccccgggaggccacaatgtcatatggggactccatgaggccatcaaagctcacaacgtgaacagcaaacttattggtttcctcggaggaaccgacggtcttcttgcacaaaaaactttggagatcacaaatgaagttctttcttcctacaaaaaccaaggtggttatgatatgcttggtcggactaaggatcaaatcagaacaacggagcaagtcaatggtgcaatggctacttgccaggctttgaagttggatgctcttgtaataatcggaggtggattgactgggggaacgcgcatccgctgccaacctggggggaagtgagggacctgaaagcgtcctactaccaaggaacgtgccaccagtcaacagtcgcctgcccaggcttcatggctgcccaggccgtctcgtcgctgcagatccgagaagactcgtcctctccaggccagggagtcgccgccgcgaccgtcgttaataggatgctcggcggcgccaacaggctcaacctttacagggagatatgaagaaggaagatatatacaacctcgtcgtcatagtgttcttgtacataatagtcaccgaaggtgtgctgactattttgcctgcgtgcagctgttccagccatcaggagaatctgatggcgcaacttgtttcgcccttttgttttcgtcggtcggtgtaataggatattttgcgtctgttgttattgtcggtattgtaatgaaacaagtatgatttcgattctcttgctgctagctgggttttctctcgaaagtctatatatagttcttgtttgcgtttcctcacaaaataaaaaggagcctgtggaatgaaaaaccttttaccctt

SEQ ID NO: 63621 - protein, 204 aa, Triticum aestivum
  peptide (1)..(204): Ceres Seq. ID no. 12624775
MDSDYGVPRELSEVQQNRTLYQPELPPCLQGTTVRVEYGDVAIAADPAGAHVISHAYPHTYGQPLAHFLRKAANVPDAKVISEHPAVRVGIVFCGRQSPGGHNVIWGLHEAIKAHNVNSKLIGFLGGTDGLLAQKTLEITNEVLSSYKNQGGYDMLGRTKDQIRTTEQVNGAMATCQALKLDALVIIGGGLTGGTRIRCQPGGK

SEQ ID NO: 63622 - DNA, 1542 bp, Triticum aestivum
  misc_feature (1)..(1542): Ceres Seq. ID no. 13662197
aattgccttcccgcaaaaataaggaaaattacaccttcccgccgccgccaacgaacgacgctttgcctcattgctcagttccctatgaccagcacgcccaccgttaccaagtcgccgccggcgctcatcccgccggcgggacctaccccctgcggcacccttccgttctcctccattgacaagaccgtcgccggctccggctttgtgaaccttatgcaggtctttcccccgccctcgatctccgccgcccgcaaggaccagggcgccgtcgcggccgtggccgcaatgcgcaacgggttcgcgagggcgcttgtgccgtactatccggtggccggccgcatcgcctcgagcggcctcgcggtggactgcaccggggagggcatctggtttgtggaagccgccgcgagctgcacgctcgccgacgtggacggcctcgacagctgcccactgctgatcccaggagagctcctcctccctcgccctccccccggcgagaagctcagcgacctcatcctcatagcccaggcgacgaggttcacctgcggtggtttcgccgtcgggatccgcttcagccacgcggtgttcgacgggcatggggctgcgcagttccttacggcggtgggggagctagcgcgggggctcaaggcgccgtcagtggctccggtgtgggaccgcgacgcgatcccagaagctccaagcccgctgccggggcagctcacggagttcaggctggtgacccaggtggtcgacatctcggcggagagcatcgcgcgcgtgaaggacgagttcaagcaggctgccgcgacatcgacgggggaagtgtgctccacctttgacgcggtgacggccgtggtgttcaagtgccgcgcgctggcgctggcatcggcgctcccggacgagaccgaggtccggatggccttcgccgccagcacgcggcaccttctccgcggtgtgctgccgacggtggagggctactacggcaactgcgtattcctggcgtgcgccactaggacaggcaaggccgtccgggaggccacgctggcggaggtggtcggcgcggtacgggaggcgaaggaggcggttcccgctcggttcgcgggctggatgcgcggcgtcgagcagtacgacgtgccgccgctggactacagcacagtgacgttgtcggactggagccgtctcggcttcgacgaggtggactacggcttcggtgcgcccgggtacgttttcccgctcaacgaccacgtcaacttcgtcgcggcgctcaactacgtcaggccgccggcgcccaggcgtgggggcatccgggtggtgctccgctgcgtcgaggagcctcatgcggctgcgttcgccgtcgagctcgccaagttcgcctagatgcaacgcacgcgtgcttcccatttcttggccatgtccgtccattaatgtgagaccgcgcagttcagggaacacattttcacattttttttctctcggcagccaacacgttgtatctccattgtatggtcgtataataagagtaatactttatcttttcctatcggg

SEQ ID NO: 63623 - protein, 457 aa, Triticum aestivum
  peptide (1)..(457): Ceres Seq. ID no. 13662198
NCLPAKIRKITPSRRRQRTTLCLIAQFPMTSTPTVTKSPPALIPPAGPTPCGTLPFSSIDKTVAGSGFVNLMQVFPPPSISAARKDQGAVAAVAAMRNGFARALVPYYPVAGRIASSGLAVDCTGEGIWFVEAAASCTLADVDGLDSCPLLIPGELLLPRPPPGEKLSDLILIAQATRFTCGGFAVGIRFSHAVFDGHGAAQFLTAVGELARGLKAPSVAPVWDRDAIPEAPSPLPGQLTEFRLVTQVVDISAESIARVKDEFKQAAATSTGEVCSTFDAVTAVVFKCRALALASALPDETEVRMAFAASTRHLLRGVLPTVEGYYGNCVFLACATRTGKAVREATLAEVVGAVREAKEAVPARFAGWMRGVEQYDVPPLDYSTVTLSDWSRLGFDEVDYGFGAPGYVFPLNDHVNFVAALNYVRPPAPRRGGIRVVLRCVEEPHAAAFAVELAKFA

SEQ ID NO: 63624 - protein, 429 aa, Triticum aestivum
  peptide (1)..(429): Ceres Seq. ID no. 13662199
MTSTPTVTKSPPALIPPAGPTPCGTLPFSSIDKTVAGSGFVNLMQVFPPPSISAARKDQGAVAAVAAMRNGFARALVPYYPVAGRIASSGLAVDCTGEGIWFVEAAASCTLADVDGLDSCPLLIPGELLLPRPPPGEKLSDLILIAQATRFTCGGFAVGIRFSHAVFDGHGAAQFLTAVGELARGLKAPSVAPVWDRDAIPEAPSPLPGQLTEFRLVTQVVDISAESIARVKDEFKQAAATSTGEVCSTFDAVTAVVFKCRALALASALPDETEVRMAFAASTRHLLRGVLPTVEGYYGNCVFLACATRTGKAVREATLAEVVGAVREAKEAVPARFAGWMRGVEQYDVPPLDYSTVTLSDWSRLGFDEVDYGFGAPGYVFPLNDHVNFVAALNYVRPPAPRRGGIRVVLRCVEEPHAAAFAVELAKFA

SEQ ID NO: 63625 - protein, 386 aa, Triticum aestivum
  peptide (1)..(386): Ceres Seq. ID no. 13662200
MQVFPPPSISAARKDQGAVAAVAAMRNGFARALVPYYPVAGRIASSGLAVDCTGEGIWFVEAAASCTLADVDGLDSCPLLIPGELLLPRPPPGEKLSDLILIAQATRFTCGGFAVGIRFSHAVFDGHGAAQFLTAVGELARGLKAPSVAPVWDRDAIPEAPSPLPGQLTEFRLVTQVVDISAESIARVKDEFKQAAATSTGEVCSTFDAVTAVVFKCRALALASALPDETEVRMAFAASTRHLLRGVLPTVEGYYGNCVFLACATRTGKAVREATLAEVVGAVREAKEAVPARFAGWMRGVEQYDVPPLDYSTVTLSDWSRLGFDEVDYGFGAPGYVFPLNDHVNFVAALNYVRPPAPRRGGIRVVLRCVEEPHAAAFAVELAKFA

SEQ ID NO: 63626 - DNA, 1245 bp, Triticum aestivum
  misc_feature (1)..(1245): Ceres Seq. ID no. 13597094
acgacatcctccacactcgactcaaccaagcagcaacgagacgcagagcaagcagcaacaagtagcttcgaccttcagcttctagcgcatggcggagatgggggtgcgtgacaacttgccctgctcgacttcatggagagagctcacacacaccagctggagggatgacgattacaggaggatggtgatggcgagcctgatcgaggcggtgtacctgctggagctggagaggcaggagcggagggacgcggcggaggtggcgcagcagtggtggaagcccttcagctaccgcctcgcgcacgagctggtggacgaacgcgacggctccgtcttcggcgccatcttcgagtgggaggaccgccacctgctcgaccgccgcggcgccagcgccgaggaaaggccgaccggcgcgcccagcgcggtgatcgcgttccggggcacgctgctgcgcgcgcccaccatccggcgggacgtggaggacgagctgcgcctgctggcgtgcaacagcctccgcggctccgccaggctccacggcgcgctgcaggcgctcagggccaccatcgacaggttcggctccgagaacgtgtgcctctgcggccactccctcggcgccggcttcgcgcgccaggtcggcaggatgctcatggcgtcgcgccagcagcagcagccgcagccgcagcagcagcagcagcaacagaaccccgccgcggcgctcgagttccacctcttcaacgcgccctacctgtcgctgcccacgggcgtgcggagggtggtgaggacggccgactgcctgctcaagacggtccgcaccggcgtcgccgccgtcggcaggtggcacggcaaggcgctcaagaacgtggcctacgccaactgcgtgctcggctacacgcgcctcgacagcgacggcaggaagttgttcgagtgagaagagaacatgctacgccaactgcaactgatctgccacacccatgactgacgccatgactcgcctgaagagagggagggatccagcgctgaaaacgtgcgactgtactgaaaatcccaaacacgcggcacgtatctcgatcatggaggccatgatcccgaacgaacgatctatctattatcagcttgtactactagtaggattcaatttgaaggagacaataagcatcctgcccggcccagggatgcacggcttaggtagctagcttagtctgcatgcttgctctctagtctgtacatgttaatcgcgtttccattgtc

SEQ ID NO: 63627 - protein, 278 aa, Triticum aestivum
  peptide (1)..(278): Ceres Seq. ID no. 13597095
MAEMGVRDNLPCSTSWRELTHTSWRDDDYRRMVMASLIEAVYLLELERQERRDAAEVAQQWWKPFSYRLAHELVDERDGSVFGAIFEWEDRHLLDRRGASAEERPTGAPSAVIAFRGTLLRAPTIRRDVEDELRLLACNSLRGSARLHGALQALRATIDRFGSENVCLCGHSLGAGFARQVGRMLMASRQQQQPQPQQQQQQQNPAAALEFHLFNAPYLSLPTGVRRVVRTADCLLKTVRTGVAAVGRWHGKALKNVAYANCVLGYTRLDSDGRKLFE

SEQ ID NO: 63628 - protein, 275 aa, Triticum aestivum
  peptide (1)..(275): Ceres Seq. ID no. 13597096
MGVRDNLPCSTSWRELTHTSWRDDDYRRMVMASLIEAVYLLELERQERRDAAEVAQQWWKPFSYRLAHELVDERDGSVFGAIFEWEDRHLLDRRGASAEERPTGAPSAVIAFRGTLLRAPTIRRDVEDELRLLACNSLRGSARLHGALQALRATIDRFGSENVCLCGHSLGAGFARQVGRMLMASRQQQQPQPQQQQQQQNPAAALEFHLFNAPYLSLPTGVRRVVRTADCLLKTVRTGVAAVGRWHGKALKNVAYANCVLGYTRLDSDGRKLFE

SEQ ID NO: 63629 - protein, 247 aa, Triticum aestivum
  peptide (1)..(247): Ceres Seq. ID no. 13597097
MVMASLIEAVYLLELERQERRDAAEVAQQWWKPFSYRLAHELVDERDGSVFGAIFEWEDRHLLDRRGASAEERPTGAPSAVIAFRGTLLRAPTIRRDVEDELRLLACNSLRGSARLHGALQALRATIDRFGSENVCLCGHSLGAGFARQVGRMLMASRQQQQPQPQQQQQQQNPAAALEFHLFNAPYLSLPTGVRRVVRTADCLLKTVRTGVAAVGRWHGKALKNVAYANCVLGYTRLDSDGRKLFE

SEQ ID NO: 63630 - DNA, 1135 bp, Triticum aestivum
  misc_feature (1)..(1135): Ceres Seq. ID no. 13597171
atttacctcgtcaggtcctcccaacaccataacttagcaggtaggttcgcttagacttcagccgaggtttcttcatcagccaagcccaagcccaatcggattagggaagcgtacttcgactccggccggagtgagggataggaaggaggagggggcttcagccgagacccaagggagaaagatctcacatcagataggcaactgcagcagtagagttcaacaagccgaaggggaaatggcaattggacagactatgccgaaggggtctctcgccaccagcttgagcttcccaagcagcggcagcacaaggatcctggggaggaagagggtcgctgtttctccggctccaagcccctcaggcccgcactccccggtgcggactctgcgcaagcagcgcagcattaggttccacatggatgacaccatctgccttcttgaatcgctgcctcaagatgtcttggttaaagtcctgtgcaaggtgaaccacagcgacctgaggcagctcctcctggtgtcgaagccagtcagcgaagcaacagtggttgctaaggagctgcatttcgccttcgcgacgccgtcgaaggcctccacggacggcgaggaggaagatgatggccccggggcgcccaagcaacacagggttgcacggtcgcgctgccggggcatgaatttggcaagtgtcgccgtcaatctgtcggagtcgttcagcagcttgatgtcagaggtgtaggtgtacataccacggcacgaattttcccgcttgtacttgtccatcggagcgctcttttttcttcataggccacgtcgaacagaaacactttagttagtgatatatgtagtgatcatcatatgtgttagtagtaagttatatatggtcattcttcaatgctgcgattgaagaggacacgctgctttatttctgtgtatgtaatagtataagttatatgtaagcgtcatgagtgttggagctcattagaagagtatttagtgtaagttatatgtaagcgtcatagtgttggaactcagaagagacgtctcttctcactttgtgtatgctgtagtgtacgatctctgtatactcgtgtgcatgggaagtttctcttattaataaaagtaaaatcagtttgtcttgggc

SEQ ID NO: 63631 - protein, 164 aa, Triticum aestivum
  peptide (1)..(164): Ceres Seq. ID no. 13597172
MAIGQTMPKGSLATSLSFPSSGSTRILGRKRVAVSPAPSPSGPHSPVRTLRKQRSIRFHMDDTICLLESLPQDVLVKVLCKVNHSDLRQLLLVSKPVSEATVVAKELHFAFATPSKASTDGEEEDDGPGAPKQHRVARSRCRGMNLASVAVNLSESFSSLMSEV

SEQ ID NO: 63632 - protein, 158 aa, Triticum aestivum
  peptide (1)..(158): Ceres Seq. ID no. 13597173
MPKGSLATSLSFPSSGSTRILGRKRVAVSPAPSPSGPHSPVRTLRKQRSIRFHMDDTICLLESLPQDVLVKVLCKVNHSDLRQLLLVSKPVSEATVVAKELHFAFATPSKASTDGEEEDDGPGAPKQHRVARSRCRGMNLASVAVNLSESFSSLMSEV

SEQ ID NO: 63633 - protein, 105 aa, Triticum aestivum
  peptide (1)..(105): Ceres Seq. ID no. 13597174
MDDTICLLESLPQDVLVKVLCKVNHSDLRQLLLVSKPVSEATVVAKELHFAFATPSKASTDGEEEDDGPGAPKQHRVARSRCRGMNLASVAVNLSESFSSLMSEV

SEQ ID NO: 63634 - DNA, 1357 bp, Triticum aestivum
  misc_feature (1)..(1357): Ceres Seq. ID no. 12616439
ccgttttagctgtagcaggagggagaaaattccggctccaccgtgtcccattcgcattcccccctcgccagcttccagaaaccccccgttcgttcgttcgtccgttccttccttcgattcgcaggcggttcgcgagcgatggcggacgccagcccgcaggcggagaggccgaggctgaggcgcctggagttcgtgcacgtggtggcggtgcaggcggccgtgtgcatcgcggcgctctacgcgctcgccagggaccactccggctcgctccgccccagagtcgacgccgtcgagtccgccgtcaggcgcgtcgccggccccgtcgcccgccgcttccacggcgtccccctccacgtcctcgccttcgtcgaccgcaaggtggacgacgcggtgcaggagctgggccggcacctcccgccggcggtgaagtccgcgtcggcgaaggcgtgccacgcggtccacgccgtgccggagctggccagggagattgccgacggggcgaggcggtccggcgtgaagggcgtggccaaggacgtgtacggcatggtccagccggtggccaagggcctctacgtgcgctgcgagccggtggccaaggacctctacgtgcgctacgagccggcggccgagcacctcgccgtctccgcctggcgctcgctcaacgggctgccggtgttcccgcaggtggcgcacatcgtcgtgcccaccgccgcctactggtgcgagaagtacaacagggtgatctcgttcgcggccgggcgtgggttccccggcgcacggttcctccccggcatccccatcgagcgcatcgccaaggcgttcgggccgagctcggcaggcgagcgctcgccggttgccaagccgacggaacctgatgcccagacttccaaggagcgctcggcggatgccaagccgacgggacttgatgcccagacttccgaggagcgctcaccggatgccaagcctatgggacttgatgcgcagaccgcggaggagagctcgtctgatgccaagcctgtgggacctgatgcgcagaccggggaggagagctcgccggatgccaagcctgtggaatctgacgcccatgccgccggggagagccagccggaggcggccaagactatggatcttggggcacaggcctaggtgtgcctctaatgataatgatgttgtactagctactatgcttttgtgtggtgcgcgtctctaatgttctccgtgcttttgtacaaaagttgcttgatgtcgccttcgtcgacttgatccaatgcaattgggttcgtccttctatggattcgcgagttcgtctctgtggactgtggccactagttaagcactgttttggttttggtgcgtc

SEQ ID NO: 63635 - protein, 335 aa, Triticum aestivum
  peptide (1)..(335): Ceres Seq. ID no. 12616440
MADASPQAERPRLRRLEFVHVVAVQAAVCIAALYALARDHSGSLRPRVDAVESAVRRVAGPVARRFHGVPLHVLAFVDRKVDDAVQELGRHLPPAVKSASAKACHAVHAVPELAREIADGARRSGVKGVAKDVYGMVQPVAKGLYVRCEPVAKDLYVRYEPAAEHLAVSAWRSLNGLPVFPQVAHIVVPTAAYWCEKYNRVISFAAGRGFPGARFLPGIPIERIAKAFGPSSAGERSPVAKPTEPDAQTSKERSADAKPTGLDAQTSEERSPDAKPMGLDAQTAEESSSDAKPVGPDAQTGEESSPDAKPVESDAHAAGESQPEAAKTMDLGAQA

SEQ ID NO: 63636 - protein, 290 aa, Triticum aestivum
  peptide (1)..(290): Ceres Seq. ID no. 12616441
VLAVAGGRKFRLHRVPFAFPPRQLPETPRSFVRPFLPSIRRRFASDGGRQPAGGEAEAEAPGVRARGGGAGGRVHRGALRARQGPLRLAPPQSRRRRVRRQARRRPRRPPLPRRPPPRPRLRRPQGGRRGAGAGPAPPAGGEVRVGEGVPRGPRRAGAGQGDCRRGEAVRREGRGQGRVRHGPAGGQGPLRALRAGGQGPLRALRAGGRAPRRLRLALAQRAAGVPAGGAHRRAHRRLLVREVQQGDLVRGRAWVPRRTVPPRHPHRAHRQGVRAELGRRALAGCQADGT

SEQ ID NO: 63637 - protein, 200 aa, Triticum aestivum
  peptide (1)..(200): Ceres Seq. ID no. 12616442
MVQPVAKGLYVRCEPVAKDLYVRYEPAAEHLAVSAWRSLNGLPVFPQVAHIVVPTAAYWCEKYNRVISFAAGRGFPGARFLPGIPIERIAKAFGPSSAGERSPVAKPTEPDAQTSKERSADAKPTGLDAQTSEERSPDAKPMGLDAQTAEESSSDAKPVGPDAQTGEESSPDAKPVESDAHAAGESQPEAAKTMDLGAQA

SEQ ID NO: 63638 - DNA, 1378 bp, Triticum aestivum
  misc_feature (1)..(1378): Ceres Seq. ID no. 13597361
aacacaataccatcatcgtccttcctctcatcccctctctctcccacagagacacatcactctctctctctcccatctccatctctgtcagaaggggaggccagagggggacggagaggggcaatggagctggacgagcaggccttcttggaggagctcttctcgctgaggagggacgccacggccgcgtgggagtgcaatgccatgggggacttcttctccccggcctgtgctggcgccgccgccatggactgcttccaggagcggcaccagcccaccgtcagcgtgctgcccaccttcaccgcctccttcgaccacccacagcagcaggcgggggtgaccgcggctggggggttcgactgcctcagcgaggtctacggcggcggccccttccccaatgccgtcggcggcgggtacggcgagatggggtttctcgccgcgatggaccccaaggcggcggcggcggcggctctggtggaggggggcggcctcggcgcctgcaaggtggagcccgggctggcggcggtggacggcggcgcgttcgggtcgggtcagatggcggccgtcccggcgccggcgtcgaggaagaagcgggtggagggcatgccgtccaagaacctgatggcggagcggcgccgccgcaagcgcctcaacgaccgcctctccatgctccgctccgtcgtgcccaagatcagcaagatggacaggacgtcgatcctgggggacaccatcgactacatgaaggagctgctggagaggatccggcggctgcaggaggagatggaggagccgcatgccggtccggcggcggcgccgctgctgagcgtgttccgggagctcaaccccaacgagatgctcgccaggaacacccccaagttcgaggtggagcgcaaggaggaggacacccgggtggagatctactgcgcggccaagccggggctgctgctgtcgacggtgagcacgctcgacacgctgggcctcgacatccagcagtgcgtcgtcagctgcttcaacgacttcgccatgcacgcctcctgctccgagatgcagagggagatgatcagcgcggacgccatcaagcaggagctgttcaagaacgccggctacggagggggctgcttgtgagcaagaagcaccaccaccagcaccaccatgagtccatgaccaccaccaccagcaggaggaggaaggataataaagtagaagtagctgtagcaggcagtagaattagcagttagcactagcaccagcagccagcagtagcgagaaggggccggaagatctgggcggaggccctttatcgcaaatcataaccatgtcgccgtgatcaaaattctctcctgttagcaacaaagatcggcgggcgcctttccgatgc

SEQ ID NO: 63639 - protein, 411 aa, Triticum aestivum
  peptide (1)..(411): Ceres Seq. ID no. 13597362
HNTIIVLPLIPSLSHRDTSLSLSPISISVRRGGQRGTERGNGAGRAGLLGGALLAEEGRHGRVGVQCHGGLLLPGLCWRRRHGLLPGAAPAHRQRAAHLHRLLRPPTAAGGGDRGWGVRLPQRGLRRRPLPQCRRRRVRRDGVSRRDGPQGGGGGGSGGGGRPRRLQGGARAGGGGRRRVRVGSDGGRPGAGVEEEAGGGHAVQEPDGGAAPPQAPQRPPLHAPLRRAQDQQDGQDVDPGGHHRLHEGAAGEDPAAAGGDGGAACRSGGGAAAERVPGAQPQRDARQEHPQVRGGAQGGGHPGGDLLRGQAGAAAVDGEHARHAGPRHPAVRRQLLQRLRHARLLLRDAEGDDQRGRHQAGAVQERRLRRGLLVSKKHHHQHHHESMTTTTSRRRKDNKVEVAVAGSRISS

SEQ ID NO: 63640 - protein, 374 aa, Triticum aestivum
  peptide (1)..(374): Ceres Seq. ID no. 13597363
NTIPSSSFLSSPLSPTETHHSLSLPSPSLSEGEARGGRRGAMELDEQAFLEELFSLRRDATAAWECNAMGDFFSPACAGAAAMDCFQERHQPTVSVLPTFTASFDHPQQQAGVTAAGGFDCLSEVYGGGPFPNAVGGGYGEMGFLAAMDPKAAAAAALVEGGGLGACKVEPGLAAVDGGAFGSGQMAAVPAPASRKKRVEGMPSKNLMAERRRRKRLNDRLSMLRSVVPKISKMDRTSILGDTIDYMKELLERIRRLQEEMEEPHAGPAAAPLLSVFRELNPNEMLARNTPKFEVERKEEDTRVEIYCAAKPGLLLSTVSTLDTLGLDIQQCVVSCFNDFAMHASCSEMQREMISADAIKQELFKNAGYGGGCL

SEQ ID NO: 63641 - protein, 333 aa, Triticum aestivum
  peptide (1)..(333): Ceres Seq. ID no. 13597364
MELDEQAFLEELFSLRRDATAAWECNAMGDFFSPACAGAAAMDCFQERHQPTVSVLPTFTASFDHPQQQAGVTAAGGFDCLSEVYGGGPFPNAVGGGYGEMGFLAAMDPKAAAAAALVEGGGLGACKVEPGLAAVDGGAFGSGQMAAVPAPASRKKRVEGMPSKNLMAERRRRKRLNDRLSMLRSVVPKISKMDRTSILGDTIDYMKELLERIRRLQEEMEEPHAGPAAAPLLSVFRELNPNEMLARNTPKFEVERKEEDTRVEIYCAAKPGLLLSTVSTLDTLGLDIQQCVVSCFNDFAMHASCSEMQREMISADAIKQELFKNAGYGGGCL

SEQ ID NO: 63642 - DNA, 1343 bp, Triticum aestivum
  misc_feature (1)..(1343): Ceres Seq. ID no. 12625452
aaaaaaagagagagagaaagccaaggcaagccgcggcgagcagaagcggtgggcgcgcgacggcggcggcggttggccctctcgagtcatggtgctacccgccaacctctcgcgcgacgtcggagctcactcgtgctctgcgcaggacggccagggggaagcggggccgccgcgcccgcgcagaccgcccgcgttctacagctccgtgttcgcacagatcgaagaggtcgggtgggggcagctagtgagcgccacaggcgatgacggcgtgtcgtgcctcaccttccgcgtcgtggatgagcagcgacggcaacattcactggagatcacactgcccatgaactacccggcatgccctccttcaattgccgcggatgttccttatctccccaaattacagtggtcaaaaagttcaagactgaaggatgttctctgccaattccaagagcacctgaaggtattgcaagattactggtctacaatggatggcattgacaaggccctttgggttgtcgatactacaaagccgacatatgctatgtctcatcgtcgcatagctttgggtgatgattgctatattttactacatgttgatacgcacaagcccaactccttaccagagtgccgcttcctaggcacagatgggaaactggaaaggctgataaagaattggagaaaaaatcgtaagagatggagcgcccacagaaagttccatgaaaacctggcaactgtgttagattttgctctgccgcaacccccttctgtgagcatcaaagatgaccagcaagctgattgtgggatatgttacgccacgcatctgcccgtcgatgacgaacttgggactcagagcgggtgcgcggcggactacaagtgcgaaaaccctagctgcagcagagccttccactccgtgtgcctgagagactggctgcgcaccattactacgacaaggcagtcgttcgatgttctgttcgggaactgcccttactgcagtgagcctgtcgccgtgaagggcaccgacagctgaacccgccttcttcgcatttacaaatcgagatgctgaagttgggttaatgcggaccagtaaaaaggaagagggacgaaataatctaggtcgcctgctgaaggccggtcgtcatgatctagatgtcatcaatggagctgcaaggggtcaaaattcccaattgtttctacgaaattggcgtccacttgtagagatgaaagaagtgtgccagcctaattactgaaaattgatgtctgtcacgcacccttctagattcgggacgaatgcgtagttgctgactggtatacataacagtggtttggatctctgaatgtcaatgcgc

SEQ ID NO: 63643 - protein, 340 aa, Triticum aestivum
  peptide (1)..(340): Ceres Seq. ID no. 12625453
KKEREKAKASRGEQKRWARDGGGGWPSRVMVLPANLSRDVGAHSCSAQDGQGEAGPPRPRRPPAFYSSVFAQIEEVGWGQLVSATGDDGVSCLTFRVVDEQRRQHSLEITLPMNYPACPPSIAADVPYLPKLQWSKSSRLKDVLCQFQEHLKVLQDYWSTMDGIDKALWVVDTTKPTYAMSHRRIALGDDCYILLHVDTHKPNSLPECRFLGTDGKLERLIKNWRKNRKRWSAHRKFHENLATVLDFALPQPPSVSIKDDQQADCGICYATHLPVDDELGTQSGCAADYKCENPSCSRAFHSVCLRDWLRTITTTRQSFDVLFGNCPYCSEPVAVKGTDS

SEQ ID NO: 63644 - protein, 311 aa, Triticum aestivum
  peptide (1)..(311): Ceres Seq. ID no. 12625454
MVLPANLSRDVGAHSCSAQDGQGEAGPPRPRRPPAFYSSVFAQIEEVGWGQLVSATGDDGVSCLTFRVVDEQRRQHSLEITLPMNYPACPPSIAADVPYLPKLQWSKSSRLKDVLCQFQEHLKVLQDYWSTMDGIDKALWVVDTTKPTYAMSHRRIALGDDCYILLHVDTHKPNSLPECRFLGTDGKLERLIKNWRKNRKRWSAHRKFHENLATVLDFALPQPPSVSIKDDQQADCGICYATHLPVDDELGTQSGCAADYKCENPSCSRAFHSVCLRDWLRTITTTRQSFDVLFGNCPYCSEPVAVKGTDS

SEQ ID NO: 63645 - protein, 228 aa, Triticum aestivum
  peptide (1)..(228): Ceres Seq. ID no. 12625455
MNYPACPPSIAADVPYLPKLQWSKSSRLKDVLCQFQEHLKVLQDYWSTMDGIDKALWVVDTTKPTYAMSHRRIALGDDCYILLHVDTHKPNSLPECRFLGTDGKLERLIKNWRKNRKRWSAHRKFHENLATVLDFALPQPPSVSIKDDQQADCGICYATHLPVDDELGTQSGCAADYKCENPSCSRAFHSVCLRDWLRTITTTRQSFDVLFGNCPYCSEPVAVKGTDS

SEQ ID NO: 63646 - DNA, 681 bp, Triticum aestivum
  misc_feature (1)..(681): Ceres Seq. ID no. 13655489
atctctgtccatacggagtgtcgggctttgaatagtgcaaactttttgtgctcacacactattctagatagacaacctccatggctgctgctcctgctactcaacctcgtgtcatggtgttacccttccctgcacagggccatgtcatcccgctaatggagctgtctcgcaagctcgccgggcacggcgtcgaggtggacttcgtgaacaccgagttcaaccacgacctcgtcatggaagcaatggcagagaagggagcaattcctgatgggatccacatgctcaccgttccggacggcctgggccccggagacgaccacgcggacatcggcaagtttgtcaaggacctgcccgccgccatgtccggccgcctggaggagatgatccggtcgaggaagatcaagtgggtgatcgtggatgtgtccatgagctgggcactgcaggtggccaccacggcgggtgcccgtgttgcctcgttctcgacctactccgcggccgtgtttgctctcaggatgaacctccccaaattgatacaggacggtgttcttgatgaaagtggggatgtgaaggggcaggagcagatcaagatgatgccgcccatcgacgcgtcggagatcccctnngtcagcctggccagcaccagcgcccctgagaggcgcagaaacaatatcgagaacgtcc

SEQ ID NO: 63647 - protein, 200 aa, Triticum aestivum
  peptide (1)..(200): Ceres Seq. ID no. 13655490
  misc_feature (181)..(181): Xaa is any aa, unknown or other
MAAAPATQPRVMVLPFPAQGHVIPLMELSRKLAGHGVEVDFVNTEFNHDLVMEAMAEKGAIPDGIHMLTVPDGLGPGDDHADIGKFVKDLPAAMSGRLEEMIRSRKIKWVIVDVSMSWALQVATTAGARVASFSTYSAAVFALRMNLPKLIQDGVLDESGDVKGQEQIKMMPPIDASEIPXVSLASTSAPERRRNNIENV

SEQ ID NO: 63648 - protein, 189 aa, Triticum aestivum
  peptide (1)..(189): Ceres Seq. ID no. 13655491
  misc_feature (170)..(170): Xaa is any aa, unknown or other
MVLPFPAQGHVIPLMELSRKLAGHGVEVDFVNTEFNHDLVMEAMAEKGAIPDGIHMLTVPDGLGPGDDHADIGKFVKDLPAAMSGRLEEMIRSRKIKWVIVDVSMSWALQVATTAGARVASFSTYSAAVFALRMNLPKLIQDGVLDESGDVKGQEQIKMMPPIDASEIPXVSLASTSAPERRRNNIENV

SEQ ID NO: 63649 - protein, 175 aa, Triticum aestivum
  peptide (1)..(175): Ceres Seq. ID no. 13655492
  misc_feature (156)..(156): Xaa is any aa, unknown or other
MELSRKLAGHGVEVDFVNTEFNHDLVMEAMAEKGAIPDGIHMLTVPDGLGPGDDHADIGKFVKDLPAAMSGRLEEMIRSRKIKWVIVDVSMSWALQVATTAGARVASFSTYSAAVFALRMNLPKLIQDGVLDESGDVKGQEQIKMMPPIDASEIPXVSLASTSAPERRRNNIENV

SEQ ID NO: 63650 - DNA, 1277 bp, Triticum aestivum
  misc_feature (1)..(1277): Ceres Seq. ID no. 15224731
aaggacacgacgaccaaccaagggagaagagaagagaagagaagagaagggagagggcggcgacgagggcgcacgacggcacgccgaacgctctcgcaatgcatcacgccaagaccgactcggaggtgacgtcgagcatggcgccgtcgtcgccttcgcgggcgccctactacgtgcagtcgcccagccacgacgacggcgagaaccactccaagacggccgcctcctccttccactcctccccggccgcctccccgccgcgctcgctcgggaaccactccagggagtcctcctcctcgcgcttctccggcaaggtcccctccgccggctcgtcccgccgcggggtcgccggcggaggcgggaagcgcggcgggggtggcggcggcggcgaggcggcgcgccgcagcccctggatgaaggaggcggccatcgaggaggaggggctcctcatggaggacgacgacgacgccgacggccgcgccggcggcttctcggcgctccccaagaaggtgcgctacgggctggccttcgtcggcgccttcctcgtgctcttcaccttcttcgccctcatcctctggggcgccagccgcaaccagaagcccgttctctccgtcaacagcgtcacgttccacagcttcgtgatccaggcggggacggacgcgtcgctggtgcccacggagatgtccacgatcaacgccacggtgaggctcacgttccgcaacacggggagcttcttcggcgtgcacgtcacggcgcagcccgtcacgctctactactcgcagctcctcatggcatccggcgacatgaagtacttctaccagcctcggaagagccagcgcaaggtggcggtgacggtggtgggcaacaaggtgccgctgtacggcggcggcgcggggctgagcagcacgccggggcccaagggcgtgcccccgccgccggtgccgctgcagctgacgctgaggatcagggcgcgggcgctggtgctgggcaagctggtgaagcccaggttctacaacaacgtgcagtgcagcgtccgcctggacacgaccaagctgggcaaggccatctccctcaagaaatcatgcacccacgtctagccaccctgccagacctttcttcttgttgttgctgcatatgttatgtccgtaatgtaatactcctacgtggattactgccattttgaagggagaaagcatcatgtctgttgtgtatgtacggatgaattttgtcgcctgcgtcgggatggaatgaatgaatgatcacgcgtttcttgccac

SEQ ID NO: 63651 - protein, 393 aa, Triticum aestivum
  peptide (1)..(393): Ceres Seq. ID no. 15224732
RTRRPTKGEEKRREEKGEGGDEGARRHAERSRNASRQDRLGGDVEHGAVVAFAGALLRAVAQPRRRREPLQDGRLLLPLLPGRLPAALAREPLQGVLLLALLRQGPLRRLVPPRGRRRRREARRGWRRRRGGAPQPLDEGGGHRGGGAPHGGRRRRRRPRRRLLGAPQEGALRAGLRRRLPRALHLLRPHPLGRQPQPEARSLRQQRHVPQLRDPGGDGRVAGAHGDVHDQRHGEAHVPQHGELLRRARHGAARHALLLAAPHGIRRHEVLLPASEEPAQGGGDGGGQQGAAVRRRRGAEQHAGAQGRAPAAGAAAADAEDQGAGAGAGQAGEAQVLQQRAVQRPPGHDQAGQGHLPQEIMHPRLATLPDLSSCCCCICYVRNVILLRGLLPF

SEQ ID NO: 63652 - protein, 364 aa, Triticum aestivum
  peptide (1)..(364): Ceres Seq. ID no. 15224733
GHDDQPREKRREEKRRERAATRAHDGTPNALAMHHAKTDSEVTSSMAPSSPSRAPYYVQSPSHDDGENHSKTAASSFHSSPAASPPRSLGNHSRESSSSRFSGKVPSAGSSRRGVAGGGGKRGGGGGGGEAARRSPWMKEAAIEEEGLLMEDDDDADGRAGGFSALPKKVRYGLAFVGAFLVLFTFFALILWGASRNQKPVLSVNSVTFHSFVIQAGTDASLVPTEMSTINATVRLTFRNTGSFFGVHVTAQPVTLYYSQLLMASGDMKYFYQPRKSQRKVAVTVVGNKVPLYGGGAGLSSTPGPKGVPPPPVPLQLTLRIRARALVLGKLVKPRFYNNVQCSVRLDTTKLGKAISLKKSCTHV

SEQ ID NO: 63653 - protein, 332 aa, Triticum aestivum
  peptide (1)..(332): Ceres Seq. ID no. 15224734
MHHAKTDSEVTSSMAPSSPSRAPYYVQSPSHDDGENHSKTAASSFHSSPAASPPRSLGNHSRESSSSRFSGKVPSAGSSRRGVAGGGGKRGGGGGGGEAARRSPWMKEAAIEEEGLLMEDDDDADGRAGGFSALPKKVRYGLAFVGAFLVLFTFFALILWGASRNQKPVLSVNSVTFHSFVIQAGTDASLVPTEMSTINATVRLTFRNTGSFFGVHVTAQPVTLYYSQLLMASGDMKYFYQPRKSQRKVAVTVVGNKVPLYGGGAGLSSTPGPKGVPPPPVPLQLTLRIRARALVLGKLVKPRFYNNVQCSVRLDTTKLGKAISLKKSCTHV

SEQ ID NO: 63654 - DNA, 1227 bp, Triticum aestivum
  misc_feature (1)..(1227): Ceres Seq. ID no. 13597182
agaacatcctaatcgaaaagcctacaccaaaacttcccttgtcatcgcagatcacgagctagctatctgagcgcaggaaatagctaaacacaccagctcgctcgtaagcacactcccacgccgaccggcaagatggtgaagcctgtgcaggacgaggagaaccagaggctgctcctcgacgaccacaaggagaagcacttcacctccggcgaggtggtccgggacatcatcatcggcgtctctgacggcctcaccgtgcccttcgccctagccgccggcctgtcgggcgccaacgcgtcctcctcgctcgtgctcaccgccgggctcgccgaggtcgccgccggcgccatctccatggggctcggagggtacctcgccgctaagagcgacgccgaccactactaccgggagctgcagcgcgagcaggacgagatcgacaccgtcccggacacagaggccgcggagatcgcggacatactctctgagtacgggctgggccccgaggagtacgggccggtcgtcacctccctccgcaacaacccaaaggcctggctcgagttcatgatgaagttcgagctggggctggagaagccggacccgcggcgcgcgctgacgagcgcggcgacgatcgcgctggcctacgtcgtcggcggcatggtgccgctctccccctacatgttcctggcgtcggtcgacagcgccatgatgacctccgtcgtggtcaccctcgccgcgctgctcttcttcggctacgtcaagggccgcttcaccgggaaccgcccgttcctcagcgccatccagactgccatcatcggcgcgcttgcctcctccgccgcctacggcatggccaaggccgtgcaggccatctgatcgagctcgagccacgccgcgcccgggggacggctaagtaccaagaaaaataagtacagcaagctacctacctgtgtatgtatgatcaagtgttgccatagtggagtggtagctgtacgtgcagactctagcgtccgatctggtaagtgtactggtggcccaagtgtgctgatgtgcaccgttcgttttgttttctgtttcgttttcgagctcgatgatgatgtacactatgttagtagtgtatatgtttgggtgtatttggtttttcttctgtcgcgttaggtaagtatactatttgtaagggaagttgcgttatttaggtgatgtggtaatctgatgggctttgagtcagctgcc

SEQ ID NO: 63655 - protein, 245 aa, Triticum aestivum
  peptide (1)..(245): Ceres Seq. ID no. 13597183
MVKPVQDEENQRLLLDDHKEKHFTSGEVVRDIIIGVSDGLTVPFALAAGLSGANASSSLVLTAGLAEVAAGAISMGLGGYLAAKSDADHYYRELQREQDEIDTVPDTEAAEIADILSEYGLGPEEYGPVVTSLRNNPKAWLEFMMKFELGLEKPDPRRALTSAATIALAYVVGGMVPLSPYMFLASVDSAMMTSVVVTLAALLFFGYVKGRFTGNRPFLSAIQTAIIGALASSAAYGMAKAVQAI

SEQ ID NO: 63656 - protein, 171 aa, Triticum aestivum
  peptide (1)..(171): Ceres Seq. ID no. 13597184
MGLGGYLAAKSDADHYYRELQREQDEIDTVPDTEAAEIADILSEYGLGPEEYGPVVTSLRNNPKAWLEFMMKFELGLEKPDPRRALTSAATIALAYVVGGMVPLSPYMFLASVDSAMMTSVVVTLAALLFFGYVKGRFTGNRPFLSAIQTAIIGALASSAAYGMAKAVQAI

SEQ ID NO: 63657 - DNA, 501 bp, Triticum aestivum
  misc_feature (1)..(501): Ceres Seq. ID no. 13597185
ccatccccttccccccctctcttcttctccatcaatccccgacgaaaccaaccaaccaacaatggaagttgctgcgcccaagcaactcctccccatggcgccgcgggaccccaactccccgtcctcctccacctcctcctcctcgccgtcttccgccgcgtcgccctccagccaccggcccagcccgctgccgccgtccccgaggcccgtgccccgcaccatcgacaccacccccttccccaccaccttcgtccaggccgacaccgcctccttcaagcaggtcgtccagatgctcaccggcgccgacatgcctccgccgtcctcgcagccgcaggcccagagccagaggccccccgcggccgccaacagcaaggccggcgcgccgtgccggcccaagaagccggcgttcaagctctacgagcgccggagcagcatgaagaacctcaagatgatcgcgccgctcgccatggcggccgccgcgggggcgtcgccgaggaaggc

SEQ ID NO: 63658 - protein, 167 aa, Triticum aestivum
  peptide (1)..(167): Ceres Seq. ID no. 13597186
PSPSPPLFFSINPRRNQPTNNGSCCAQATPPHGAAGPQLPVLLHLLLLAVFRRVALQPPAQPAAAVPEARAPHHRHHPLPHHLRPGRHRLLQAGRPDAHRRRHASAVLAAAGPEPEAPRGRQQQGRRAVPAQEAGVQALRAPEQHEEPQDDRAARHGGRRGGVAEEG

SEQ ID NO: 63659 - protein, 166 aa, Triticum aestivum
  peptide (1)..(166): Ceres Seq. ID no. 13597187
HPLPPLSSSPSIPDETNQPTMEVAAPKQLLPMAPRDPNSPSSSTSSSSPSSAASPSSHRPSPLPPSPRPVPRTIDTTPFPTTFVQADTASFKQVVQMLTGADMPPPSSQPQAQSQRPPAAANSKAGAPCRPKKPAFKLYERRSSMKNLKMIAPLAMAAAAGASPRK

SEQ ID NO: 63660 - protein, 146 aa, Triticum aestivum
  peptide (1)..(146): Ceres Seq. ID no. 13597188
MEVAAPKQLLPMAPRDPNSPSSSTSSSSPSSAASPSSHRPSPLPPSPRPVPRTIDTTPFPTTFVQADTASFKQVVQMLTGADMPPPSSQPQAQSQRPPAAANSKAGAPCRPKKPAFKLYERRSSMKNLKMIAPLAMAAAAGASPRK

SEQ ID NO: 63661 - DNA, 1424 bp, Triticum aestivum
  misc_feature (1)..(1424): Ceres Seq. ID no. 13597194
ttttggatcccatccaccccttctccgctcctctttaaagccgccgcccgtccccctctgcgttccaccgcactaccgccagcgcagcgacaccagagctcgttcgatagcttagagcggaggcgaggaggaggagatgaggatgtcgctgctgagatccgcgtcgcagcacctgcgccgccgccgcggctactcgtcgacgcccgcgcagccggagcggaaggtggccatcctcggcgcggcgggcggcatcggccagccgctggcgctgctcatgaagctcaacccgctcgtctcctccctctccctctacgacatcgccgccacgcccggcgtcgccgccgacgtatcccacatcaacacccgcgccctggtgaaggggttcgtcggggacgaccagctcggggaggcgctggagggcgccgacctcgtcatcatccccgccggggtgccccgcaagcccggcatgaccagggacgacctcttcaagatcaacgcagggatcgtcaagggcctctgcaccgccatcgccacgcactgccccaacgctctcgtcaatatgatcagcaaccctgtcaactcgactgtcccaattgcagctgaggtgttcaagaaggctggtacctatgatgagaagaagctgtttggtgtgaccactcttgatgttgttcgtgctaaaacattctatgctggaaaggcgaacgtgccagttactggggtgaatgttcctgttgttggtggccatgctggaatcactatcctgccactgttctcacaggctactcctgcaagtaatgcattgtcccatgaggaccttgtcgccctcacgaagaggacacaagatggtggcacggaagttgttgaagcgaaggctggaaagggctcagcaacattgtcgatggcatatgctggtgcagtttttggagatgcatgcttgaaggggctcaacggtgttcctgacatcgtagagtgctcttttgtccaatcaactgtaacagagctgccattctttgcctccaaggtgaggctgggcaagagcggcgtggaggaagtgatggggctgggcgagctgtcggcgttggagaaggaggggctggagagcctcaagggcgagctgctgtcttccatcgagaagggcgtcaagttcgcgcaggaaagctaggctgcaacctgctcagcctataacaatcggttcacacttgaactcatgcaaatttttgttcgaccgctttcgttgcccccaaacccgggtgtgccgctgggcatcgaggcgtcgccgtgctccacaataaaatgtactactggctttgatgtcccgccagactgaactgaacctgtcgtaccagaaacagcagacaccggtgcctatgtgttcatggcattcgtacccgagatcacgaagcgcgaaaccgaagattctgcgg

SEQ ID NO: 63662 - protein, 341 aa, Triticum aestivum
  peptide (1)..(341): Ceres Seq. ID no. 13597195
MRMSLLRSASQHLRRRRGYSSTPAQPERKVAILGAAGGIGQPLALLMKLNPLVSSLSLYDIAATPGVAADVSHINTRALVKGFVGDDQLGEALEGADLVIIPAGVPRKPGMTRDDLFKINAGIVKGLCTAIATHCPNALVNMISNPVNSTVPIAAEVFKKAGTYDEKKLFGVTTLDVVRAKTFYAGKANVPVTGVNVPVVGGHAGITILPLFSQATPASNALSHEDLVALTKRTQDGGTEVVEAKAGKGSATLSMAYAGAVFGDACLKGLNGVPDIVECSFVQSTVTELPFFASKVRLGKSGVEEVMGLGELSALEKEGLESLKGELLSSIEKGVKFAQES

SEQ ID NO: 63663 - protein, 339 aa, Triticum aestivum
  peptide (1)..(339): Ceres Seq. ID no. 13597196
MSLLRSASQHLRRRRGYSSTPAQPERKVAILGAAGGIGQPLALLMKLNPLVSSLSLYDIAATPGVAADVSHINTRALVKGFVGDDQLGEALEGADLVIIPAGVPRKPGMTRDDLFKINAGIVKGLCTAIATHCPNALVNMISNPVNSTVPIAAEVFKKAGTYDEKKLFGVTTLDVVRAKTFYAGKANVPVTGVNVPVVGGHAGITILPLFSQATPASNALSHEDLVALTKRTQDGGTEVVEAKAGKGSATLSMAYAGAVFGDACLKGLNGVPDIVECSFVQSTVTELPFFASKVRLGKSGVEEVMGLGELSALEKEGLESLKGELLSSIEKGVKFAQES

SEQ ID NO: 63664 - protein, 295 aa, Triticum aestivum
  peptide (1)..(295): Ceres Seq. ID no. 13597197
MKLNPLVSSLSLYDIAATPGVAADVSHINTRALVKGFVGDDQLGEALEGADLVIIPAGVPRKPGMTRDDLFKINAGIVKGLCTAIATHCPNALVNMISNPVNSTVPIAAEVFKKAGTYDEKKLFGVTTLDVVRAKTFYAGKANVPVTGVNVPVVGGHAGITILPLFSQATPASNALSHEDLVALTKRTQDGGTEVVEAKAGKGSATLSMAYAGAVFGDACLKGLNGVPDIVECSFVQSTVTELPFFASKVRLGKSGVEEVMGLGELSALEKEGLESLKGELLSSIEKGVKFAQES

SEQ ID NO: 63665 - DNA, 1646 bp, Triticum aestivum
  misc_feature (1)..(1646): Ceres Seq. ID no. 13597198
ccccatccccttccttccacttgacaggtctctccacacccgcggctgcagtccacacccaaaccctagccgtcgcgtcggcagcttccaccgccatggacgaccccgccgccgcagccaccgccgccgccacggaggttggtgtgcccgcatcaccgcccccgccggccgccgaggaggccgatgcctcggcggaggcggaggccgtcccggaggcgaagaggtggcccgggtggccgggggacaacgtgttccggatggttgtgcccgtgctgaaggtcgggagcatcatcgggcggaagggcgagctcatcaagcgtctcgtcgaggagaccaaggccagggtccgcgtcctcgagggtcctgtcggcgccaccgagcgcattgttttggtgtctgcaaaagaagatccgggcttggagctgcctccagctgtggacgctctgattagagtttttaaacgtgtcaatggaataacagatggagctgctgaaggtacccagacagctgctgcacctggtgtatgtgctgcccggttggtggttcctggagctcaagcaattaacctcattgggaagcaaggtgcttcaattaaggcaatccaggagggcacgggtgctacaataagggttatatcagtagatgagcgagatcggcctttctatgtaactgacgatgagaggatagttgagatacagggtgaaacagagaaagttctaaaagcactgcaagcagtttctaatcatctccggaagtttttggttgaccatagtgtacttccattgtttgagaagactaatgccccagtaagtcaagatcgcagtgctgaaacttggaatgatatgccacatcattcaattgtttctacacaagtaaatcaacaacctgaagtgcgtgatgaatatgttcttccaatgaaaagggaccatttgtatcttgaacgggaaccgctggtagaacataacattcatcgctcaggtgtgtcattatatgggcgagatcctgccttgtcagcattacgaccttctggaatgcatggtgctggccctctacttacacagataacacaaaccatgcaaatcccacttacctatgcagaagatatcataggagtcaaaggagcaaacattgcatacatacgggctaacagtggtgctgttgtcacaattcaagagagtttgggaagccctgatgatataactgttgaaataaaggggacgtcgtcccaggtacaatctgctcaacagcttatccaggactccctggctacgcacagagaacctgtgaggagcagttacgcaggagtattagatccgttatataggtccagctacccgtatggcagctcggcctacccgtcatcatcgctgccatcttattctaacatggacgggagtggatattcatcgtcaggtcttggtggttacggttccacttaccgctactaagatggtagctgtttgccatcaagcttgcggccaccctgtctccactcctgggtcatcgttgtgtatgtcagcaatagttgctctgctggcttcatgttcctcagggtggtactattatagtcgtatcgaatcggggtgcgtgatttagtgtctacttgatttgtagatgttcttatttcgaggaagtctgttctagcc

SEQ ID NO: 63666 - protein, 481 aa, Triticum aestivum
  peptide (1)..(481): Ceres Seq. ID no. 15222046
PSPSFHLTGLSTPAAAVHTQTLAVASAASTAMDDPAAAATAAATEVGVPASPPPPAAEEADASAEAEAVPEAKRWPGWPGDNVFRMVVPVLKVGSIIGRKGELIKRLVEETKARVRVLEGPVGATERIVLVSAKEDPGLELPPAVDALIRVFKRVNGITDGAAEGTQTAAAPGVCAARLVVPGAQAINLIGKQGASIKAIQEGTGATIRVISVDERDRPFYVTDDERIVEIQGETEKVLKALQAVSNHLRKFLVDHSVLPLFEKTNAPVSQDRSAETWNDMPHHSIVSTQVNQQPEVRDEYVLPMKRDHLYLEREPLVEHNIHRSGVSLYGRDPALSALRPSGMHGAGPLLTQITQTMQIPLTYAEDIIGVKGANIAYIRANSGAVVTIQESLGSPDDITVEIKGTSSQVQSAQQLIQDSLATHREPVRSSYAGVLDPLYRSSYPYGSSAYPSSSLPSYSNMDGSGYSSSGLGGYGSTYRY

SEQ ID NO: 63667 - protein, 450 aa, Triticum aestivum
  peptide (1)..(450): Ceres Seq. ID no. 15222047
MDDPAAAATAAATEVGVPASPPPPAAEEADASAEAEAVPEAKRWPGWPGDNVFRMVVPVLKVGSIIGRKGELIKRLVEETKARVRVLEGPVGATERIVLVSAKEDPGLELPPAVDALIRVFKRVNGITDGAAEGTQTAAAPGVCAARLVVPGAQAINLIGKQGASIKAIQEGTGATIRVISVDERDRPFYVTDDERIVEIQGETEKVLKALQAVSNHLRKFLVDHSVLPLFEKTNAPVSQDRSAETWNDMPHHSIVSTQVNQQPEVRDEYVLPMKRDHLYLEREPLVEHNIHRSGVSLYGRDPALSALRPSGMHGAGPLLTQITQTMQIPLTYAEDIIGVKGANIAYIRANSGAVVTIQESLGSPDDITVEIKGTSSQVQSAQQLIQDSLATHREPVRSSYAGVLDPLYRSSYPYGSSAYPSSSLPSYSNMDGSGYSSSGLGGYGSTYRY

SEQ ID NO: 63668 - protein, 396 aa, Triticum aestivum
  peptide (1)..(396): Ceres Seq. ID no. 15222048
MVVPVLKVGSIIGRKGELIKRLVEETKARVRVLEGPVGATERIVLVSAKEDPGLELPPAVDALIRVFKRVNGITDGAAEGTQTAAAPGVCAARLVVPGAQAINLIGKQGASIKAIQEGTGATIRVISVDERDRPFYVTDDERIVEIQGETEKVLKALQAVSNHLRKFLVDHSVLPLFEKTNAPVSQDRSAETWNDMPHHSIVSTQVNQQPEVRDEYVLPMKRDHLYLEREPLVEHNIHRSGVSLYGRDPALSALRPSGMHGAGPLLTQITQTMQIPLTYAEDIIGVKGANIAYIRANSGAVVTIQESLGSPDDITVEIKGTSSQVQSAQQLIQDSLATHREPVRSSYAGVLDPLYRSSYPYGSSAYPSSSLPSYSNMDGSGYSSSGLGGYGSTYRY

SEQ ID NO: 63669 - DNA, 1256 bp, Triticum aestivum
  misc_feature (1)..(1256): Ceres Seq. ID no. 12616669
cacaatcgctcgtcccaagcgttcgcacccgccgccgccgccgccgccgcctcaataatctccggggacctaaacctcgacagtaccctaccctccaagctccctccgcctcccgtttttcgttcctccgccgcgccgccaccgcaaggctctcccgcctcgcgccgtgcccgggacgatacgatggtggggctctcggagggggagaagcacttcatccgcggcggcatcgcgcaggacctccgggccgacggccgcaggcggctgcagttccgggccctcaccgtcgagacaggaatcatccctcaggccaacggctcggcgcgtgttaggatgggtgcgaccgaagtcatcgccagcgtcaaggctgagttggggaaaccaaccattcttcatcccgacaaaggaaaagtttccatttatgttgattgtagtccaactgctgcgcctatgtttgagggtagaggttcggaagaattgtctgctgagctctctgttgggctgcaaagatgtttactgggtggtaaaagtggtgcaggggctgcaatcgatttatcgtctctgattgttgttgagggaaaagcctgctgggatctgtacattgatggacttgtggtcagttctgatggtaatttgcttgatgcactggcggctgcgataaaggtagctttgagtgatacaggtataccaaaagttaatgtttctcttaataatgaaacggatggggagcctgaggttgatatcagtgatgaagaatttttgcaattcgacacttctggtgtgcctgtcataattacattgaccaaggttggtaagcactacattgttgatgccacctcggaggaggaatcgcagatgagttctgcggtttccgtttcagtcaacagccatggccagatatgtgggttaaccaagaggggaggcgcagggttggatccaagcgtcatttttgatatgatatccgtggccaagaatgtaagccaacggttctatactctactggaatcagcattcgcagctgctgaagcagtagcggatgagtagagaaaaagcatagaagataccgtgatcacgctgaccgcccgtagttgaccttgctaatgcctcagaagaatgtactatcttggtgccgcaattgccaatgttttgcacaagcttttggttttggtgttatgttgtgtcgagtgccatacgttggtgaaatgttttgatgtataattattttgttgtagctgttcggaggttggattagattt

SEQ ID NO: 63670 - protein, 347 aa, Triticum aestivum
  peptide (1)..(347): Ceres Seq. ID no. 12616670
HNRSSQAFAPAAAAAAASIISGDLNLDSTLPSKLPPPPVFRSSAAPPPQGSPASRRARDDTMVGLSEGEKHFIRGGIAQDLRADGRRRLQFRALTVETGIIPQANGSARVRMGATEVIASVKAELGKPTILHPDKGKVSIYVDCSPTAAPMFEGRGSEELSAELSVGLQRCLLGGKSGAGAAIDLSSLIVVEGKACWDLYIDGLVVSSDGNLLDALAAAIKVALSDTGIPKVNVSLNNETDGEPEVDISDEEFLQFDTSGVPVIITLTKVGKHYIVDATSEEESQMSSAVSVSVNSHGQICGLTKRGGAGLDPSVIFDMISVAKNVSQRFYTLLESAFAAAEAVADE

SEQ ID NO: 63671 - protein, 286 aa, Triticum aestivum
  peptide (1)..(286): Ceres Seq. ID no. 12616671
MVGLSEGEKHFIRGGIAQDLRADGRRRLQFRALTVETGIIPQANGSARVRMGATEVIASVKAELGKPTILHPDKGKVSIYVDCSPTAAPMFEGRGSEELSAELSVGLQRCLLGGKSGAGAAIDLSSLIVVEGKACWDLYIDGLVVSSDGNLLDALAAAIKVALSDTGIPKVNVSLNNETDGEPEVDISDEEFLQFDTSGVPVIITLTKVGKHYIVDATSEEESQMSSAVSVSVNSHGQICGLTKRGGAGLDPSVIFDMISVAKNVSQRFYTLLESAFAAAEAVADE

SEQ ID NO: 63672 - protein, 236 aa, Triticum aestivum
  peptide (1)..(236): Ceres Seq. ID no. 12616672
MGATEVIASVKAELGKPTILHPDKGKVSIYVDCSPTAAPMFEGRGSEELSAELSVGLQRCLLGGKSGAGAAIDLSSLIVVEGKACWDLYIDGLVVSSDGNLLDALAAAIKVALSDTGIPKVNVSLNNETDGEPEVDISDEEFLQFDTSGVPVIITLTKVGKHYIVDATSEEESQMSSAVSVSVNSHGQICGLTKRGGAGLDPSVIFDMISVAKNVSQRFYTLLESAFAAAEAVADE

SEQ ID NO: 63673 - DNA, 1391 bp, Triticum aestivum
  misc_feature (1)..(1391): Ceres Seq. ID no. 13598761
gcaatccgatgaaccagcaaaaccgtggacgagcaccgccggtattctgctcccgaattccacagatttccactccccgctcccaaagccccgatactttatagccggcgacagcaagcccagcaaaatcccatctcccaacccggaaatcctcccactcccgggaatgaatcagcttccccttccccttctctgagatctcagcccgagcctgcgcgccgcgacttccaccggaatccttccctcctagccgcaacatcgccggatcgattcaggcattcttggtggccggagaagcagtctttggtcctctgcttgagatcatcatcagacatgtcgctgctatcgaaattgcggctggttactgtggatgtgactggtactctgcttgcttacaaaggacggcttggtgattactactgcatggctgctaaggctgctggaaagccatgccctgattatgatcgaatgcacgaaggcttcaagcttgcatacactgagatggcaaggaaatacccatgctttggatttgcggcaaagatgccaacgattgaatggtggaggatttgtgtcaaggattcatttgttaaggctgggtatgattacgatgatgagacatttgataaagtgttcaagcgaatttattccgcctttggctcctctgcgccatactctgtttttcctgatgcacagcccttcatgagagggctgagggaaaaggggatcacagttggaatcgtcagcaatgcagagtaccggtacaaagaggtcatcttgcctgcgttagggctgaatcagggctcagagtgggacttcggggtgttctcaggcatcgtcggtgtcgagaaacctgacccaaaaatctacaagatcgcgctggagatggcggggaacgtcgcaccggaagaggcgctccacattggcgacagctaccgcaaggactacgtccctgcacggagcatcgggatgcacgcgctgctcctggaccggttcaagaccgccgacgccgagagctggaggcagtccggcgcgccggtgctccctgatctcgaagccgcacaggcatggctcaccaagaacccgaccgaggaacccgctgaggagccactaggggccgcactgctgcgcaggatggccgagaagctctgaatctcgcccctgggatggttcctgttgtgctcttgctggggagtgagggagccaaggagaagggatgtgttgtagcgatggttcactggccagtttagctagctggagctacttgaactctggtagtaggcttccagtgctgttgttgactgctgaatgtggccaagtgattcagccgtgcgacaaacatcttgcaatgacgaataattctaatcatgtttcgcataatggaggaatttaac

SEQ ID NO: 63674 - protein, 271 aa, Triticum aestivum
  peptide (1)..(271): Ceres Seq. ID no. 13598762
MSLLSKLRLVTVDVTGTLLAYKGRLGDYYCMAAKAAGKPCPDYDRMHEGFKLAYTEMARKYPCFGFAAKMPTIEWWRICVKDSFVKAGYDYDDETFDKVFKRIYSAFGSSAPYSVFPDAQPFMRGLREKGITVGIVSNAEYRYKEVILPALGLNQGSEWDFGVFSGIVGVEKPDPKIYKIALEMAGNVAPEEALHIGDSYRKDYVPARSIGMHALLLDRFKTADAESWRQSGAPVLPDLEAAQAWLTKNPTEEPAEEPLGAALLRRMAEKL

SEQ ID NO: 63675 - protein, 241 aa, Triticum aestivum
  peptide (1)..(241): Ceres Seq. ID no. 13598763
MAAKAAGKPCPDYDRMHEGFKLAYTEMARKYPCFGFAAKMPTIEWWRICVKDSFVKAGYDYDDETFDKVFKRIYSAFGSSAPYSVFPDAQPFMRGLREKGITVGIVSNAEYRYKEVILPALGLNQGSEWDFGVFSGIVGVEKPDPKIYKIALEMAGNVAPEEALHIGDSYRKDYVPARSIGMHALLLDRFKTADAESWRQSGAPVLPDLEAAQAWLTKNPTEEPAEEPLGAALLRRMAEKL

SEQ ID NO: 63676 - protein, 226 aa, Triticum aestivum
  peptide (1)..(226): Ceres Seq. ID no. 13598764
MHEGFKLAYTEMARKYPCFGFAAKMPTIEWWRICVKDSFVKAGYDYDDETFDKVFKRIYSAFGSSAPYSVFPDAQPFMRGLREKGITVGIVSNAEYRYKEVILPALGLNQGSEWDFGVFSGIVGVEKPDPKIYKIALEMAGNVAPEEALHIGDSYRKDYVPARSIGMHALLLDRFKTADAESWRQSGAPVLPDLEAAQAWLTKNPTEEPAEEPLGAALLRRMAEKL

SEQ ID NO: 63677 - DNA, 1750 bp, Triticum aestivum
  misc_feature (1)..(1750): Ceres Seq. ID no. 13584160
aaagtaacaacctccaactcagacacagtcaccaccctgtcccctcccctcctcttcctcggccctcgcttcgttctccgcgggagccggcgagccgccgccccactctctctctccccccgtccaccgcacgcctccgccacgccattcccatatgctcttctccggcgagggcaacagagcatgattctgtggcaaggttgaatggcggtgagttaggagactgcggagcaggggttattaataaattgtgcaagaggcgagccttggccgagatggatgccgttgttgatgttgccgatgctatgggcgctgtgactatagagaacggggcgaagctggagttgcctgacggtgtagaggagcgcggcgaagagcatgatgcgcaggccaacagagaccattcaggggagagtgaggtgatcaacccgcacgaagaggcaggtggagaagccagctcacacccagaagggaggaagatcggccgttccaagggaactgcaagtcatggtcctaaggttgcaaagacaaggagcccaaagagtggagatgaaggtctagcaaggagaggcacccctagttcctctcttcgtaaggcacccattgtgcgagtatcgcatgcagactcaggcactggctcttgtaccaatggtgatccgagtgtcgataagaaaaaatctggaaagattgagtctcgtccgtctgccaaggagacatcattgctcgaggacgcaaaatccagggagggaagtaaagctcaaaagcaatcagaccagcattcttccatcagaagagatgaagaagatttaaatagtgaaagttcaaaagctcgaaggtctggcagcactcctgcctatggattcagtttcaagtgtgatgagagagctgaaaaaagaagagagttctactcaaagcttgaggagaagattcacgcaagagagatggaaataagcaatatgcaagcgaaatcgaaggagactgaagaagctgaactcaaaatgctgagaaaaagcttaaagttcaaggctacgccgatgccaagcttctccccaccaccaaaggttgaactgaaaaagattcctcccactagagctaaatcaccaaagcttggccgttccaagaacaaatctgggctggaggctgaagaaagtaccaccccaagccatcctatccgtatgagccttgatgagaaggctactcaaaatggtgcgaagaaagtaaccccatcaaactcggtgaagaagccccagaggaagtcactcccgaaattgccatcagaggcaagcggcccacttgaggccagacagccaaaaatgccatcagaggcaagcggcccacttgaggccacacagccaaaaagcacggaggacctaaacacagataatcatcaggagtcagggtcgccagcaaagcagcttcaggaaaccgagtcgatcgccagcaacgcccaggagccgatccgagctaaagttacccccgacgaccaagaactcgacgagcaggcatccgtgtagcaacgaccatggtgaccaaatccttcgattttgtgatggcaggtgtgcatgcctctggctttgtcgcgtattgtgccatatttcgatagtgtatctagtgtcctgtgttcagtaaaccaacgctcgtctcgtctttgttgagtctagcatctgtgttgcttctgttcataatcgtaagcgaggctccagtgtcgtgtgcaactgcaaatagttttgtcctattttctactgctgct

SEQ ID NO: 63678 - protein, 503 aa, Triticum aestivum
  peptide (1)..(503): Ceres Seq. ID no. 13584161
SNNLQLRHSHHPVPSPPLPRPSLRSPREPASRRPTLSLPPSTARLRHAIPICSSPARATEHDSVARLNGGELGDCGAGVINKLCKRRALAEMDAVVDVADAMGAVTIENGAKLELPDGVEERGEEHDAQANRDHSGESEVINPHEEAGGEASSHPEGRKIGRSKGTASHGPKVAKTRSPKSGDEGLARRGTPSSSLRKAPIVRVSHADSGTGSCTNGDPSVDKKKSGKIESRPSAKETSLLEDAKSREGSKAQKQSDQHSSIRRDEEDLNSESSKARRSGSTPAYGFSFKCDERAEKRREFYSKLEEKIHAREMEISNMQAKSKETEEAELKMLRKSLKFKATPMPSFSPPPKVELKKIPPTRAKSPKLGRSKNKSGLEAEESTTPSHPIRMSLDEKATQNGAKKVTPSNSVKKPQRKSLPKLPSEASGPLEARQPKMPSEASGPLEATQPKSTEDLNTDNHQESGSPAKQLQETESIASNAQEPIRAKVTPDDQELDEQASV

SEQ ID NO: 63679 - protein, 412 aa, Triticum aestivum
  peptide (1)..(412): Ceres Seq. ID no. 13584162
MDAVVDVADAMGAVTIENGAKLELPDGVEERGEEHDAQANRDHSGESEVINPHEEAGGEASSHPEGRKIGRSKGTASHGPKVAKTRSPKSGDEGLARRGTPSSSLRKAPIVRVSHADSGTGSCTNGDPSVDKKKSGKIESRPSAKETSLLEDAKSREGSKAQKQSDQHSSIRRDEEDLNSESSKARRSGSTPAYGFSFKCDERAEKRREFYSKLEEKIHAREMEISNMQAKSKETEEAELKMLRKSLKFKATPMPSFSPPPKVELKKIPPTRAKSPKLGRSKNKSGLEAEESTTPSHPIRMSLDEKATQNGAKKVTPSNSVKKPQRKSLPKLPSEASGPLEARQPKMPSEASGPLEATQPKSTEDLNTDNHQESGSPAKQLQETESIASNAQEPIRAKVTPDDQELDEQASV

SEQ ID NO: 63680 - protein, 402 aa, Triticum aestivum
  peptide (1)..(402): Ceres Seq. ID no. 13584163
MGAVTIENGAKLELPDGVEERGEEHDAQANRDHSGESEVINPHEEAGGEASSHPEGRKIGRSKGTASHGPKVAKTRSPKSGDEGLARRGTPSSSLRKAPIVRVSHADSGTGSCTNGDPSVDKKKSGKIESRPSAKETSLLEDAKSREGSKAQKQSDQHSSIRRDEEDLNSESSKARRSGSTPAYGFSFKCDERAEKRREFYSKLEEKIHAREMEISNMQAKSKETEEAELKMLRKSLKFKATPMPSFSPPPKVELKKIPPTRAKSPKLGRSKNKSGLEAEESTTPSHPIRMSLDEKATQNGAKKVTPSNSVKKPQRKSLPKLPSEASGPLEARQPKMPSEASGPLEATQPKSTEDLNTDNHQESGSPAKQLQETESIASNAQEPIRAKVTPDDQELDEQASV

SEQ ID NO: 63681 - DNA, 482 bp, Triticum aestivum
  misc_feature (1)..(482): Ceres Seq. ID no. 13584164
aacacacacataccaacagagcaacaaccaacaaagaacagagtaccatatcaactagccgtagccacacagagagatcgacggaagagccttagctttagccatcgcctagcacagcacaccaccgcaccaccaccagcacctacataagcacgcatggcgcgctgggccatcgccatccacggaggcgcgggcgtggaccccaacctgccggagcaccgccaggaggaggccaagcgcgtgctggcccggtgcctgcaggtcggcgtcgacctgctccgggctggtgcgacggcgctggacgtcgtggaggccgtggtgcgggagctggagacggacccctgcttcaactcgggccgcggctccgcgctcacacgcgccggcaccgtcgagatggaggccagcatcatggacggccgcggccgccgctgcggcgccgtctccggtgtgtccaccgttaaaaaccccgtgtccctggcccg

SEQ ID NO: 63682 - protein, 108 aa, Triticum aestivum
  peptide (1)..(108): Ceres Seq. ID no. 13584165
MARWAIAIHGGAGVDPNLPEHRQEEAKRVLARCLQVGVDLLRAGATALDVVEAVVRELETDPCFNSGRGSALTRAGTVEMEASIMDGRGRRCGAVSGVSTVKNPVSLA

SEQ ID NO: 63683 - DNA, 531 bp, Triticum aestivum
  misc_feature (1)..(531): Ceres Seq. ID no. 13584209
tataacatctctaatcgaaaaaaattaaaaagacagaacaccgaagcaccgaagcgcagctccaccaccatttcacactctcccctgcttcacttcactgagaagcacacggacgaaaagctgcttgctgggagccatggctcccccgctcctcctcctcgtcctcttcctcctcccggccctcgccgccggccaccagcacccctcctcctacggctcctccgccctctccgaatggcgcaacgccaagtcctcctacttcgccgccgaccccggagacgccatcggtggcgcgtgcgggttcggggatctggggaagcacgggtacgggatggcgacggtggggctgagcacggcgctgttcgagcgcggcgccgcctgcggcggctgctacgaggtcaagtgcgtggaggacctcaagtactgcctccccggcacctccatcgtcgtcacggccaccaacttctgcccgcccaactacggcttncccgccgacgccggcggcgtctgcaacccgcccaaccaccattt

SEQ ID NO: 63684 - protein, 177 aa, Triticum aestivum
  peptide (1)..(177): Ceres Seq. ID no. 13584210
  misc_feature (163)..(163): Xaa is any aa, unknown or other
YNISNRKKLKRQNTEAPKRSSTTISHSPLLHFTEKHTDEKLLAGSHGSPAPPPRPLPPPGPRRRPPAPLLLRLLRPLRMAQRQVLLLRRRPRRRHRWRVRVRGSGEARVRDGDGGAEHGAVRARRRLRRLLRGQVRGGPQVLPPRHLHRRHGHQLLPAQLRLXRRRRRRLQPAQPPF

SEQ ID NO: 63685 - protein, 131 aa, Triticum aestivum
  peptide (1)..(131): Ceres Seq. ID no. 13584211
  misc_feature (117)..(117): Xaa is any aa, unknown or other
MAPPLLLLVLFLLPALAAGHQHPSSYGSSALSEWRNAKSSYFAADPGDAIGGACGFGDLGKHGYGMATVGLSTALFERGAACGGCYEVKCVEDLKYCLPGTSIVVTATNFCPPNYGXPADAGGVCNPPNHH

SEQ ID NO: 63686 - protein, 99 aa, Triticum aestivum
  peptide (1)..(99): Ceres Seq. ID no. 13584212
  misc_feature (85)..(85): Xaa is any aa, unknown or other
MAQRQVLLLRRRPRRRHRWRVRVRGSGEARVRDGDGGAEHGAVRARRRLRRLLRGQVRGGPQVLPPRHLHRRHGHQLLPAQLRLXRRRRRRLQPAQPPF

SEQ ID NO: 63687 - DNA, 1303 bp, Triticum aestivum
  misc_feature (1)..(1303): Ceres Seq. ID no. 13584292
gtggctgcatcatcaccaccaccacctcggaagtccttggcgagcgtgcgtgcgtgcgtgcgagctgtaggagggctgtgatgaaaagttgcatctgttaacggacacgagttctgctaccaagttcgacatgggttcaggaaacctgatggtgaagaaggtggtgaggcccagctcttttgacctcgacatacatctcgacaaaagctggaaggaggacgttacctgcccaatctgtctggattacccccacaatgcagtcctactgaggtgcacatcttatgagaagggctgcaggccgtttgtgtgcgacaccgaccagacccgctccaactgtcttgagaggttcaaaggtgcttatgagctgcctgccaatgtcaaggtctcgtctatagctgtggcccctcttgatagcatccacatcgtgtcgtctcacgcaaacaatcgcccaagttgcccgttgtgcagaggtgatgttatcgggtggattgtaatcagcgaggctcgtctgcatcttaaccagaagaagagatgctgtgaagaggattgctgctcctttactggcaacttcaatgagcttcagaagcacacacaacaaaagcatccagattcacgcccttcagaaatcgaccctgccaggcaagtcgattgggacaacttccagcaatcttctgatatcgtggatgtcttgagcacaatacatgcacaagttcctaatggcatcgttctcggagactatgtcattgaatatggggatgatgatactggagatgactatgaagtgctccgcagggttaggaggaagtggtggtcttttatttgttgcaaggctttttgtagatatccaaggagccgaagaagagggagaggaagggacaatagaggaagtggaaggaggaacagcaatcaggctcatctggagaacttcaatctcgaggttccgacacaagctgttgacctgagggaactcagatttgatgaaatcgatgatgagtacattgttacaggggcagtacctagtatggcaacaccaggaagaatggccagtttccattacagggatacaagatatggtcggtgatcgggcgtactacttaatagaaccagctgataaagaaaaggatttgcagccgcgatgtgatgccgcagccttcaggaaactccacccccgcccatttttcgtttcttttcctgcccccgtcgttgctaggtgccgctccagcccggacttcctgtgcataaaaagtagcaacagaaaccctctgccgccgccgttcgtttgcaatagattttcatttaccct

SEQ ID NO: 63688 - protein, 316 aa, Triticum aestivum
  peptide (1)..(316): Ceres Seq. ID no. 13584293
MGSGNLMVKKVVRPSSFDLDIHLDKSWKEDVTCPICLDYPHNAVLLRCTSYEKGCRPFVCDTDQTRSNCLERFKGAYELPANVKVSSIAVAPLDSIHIVSSHANNRPSCPLCRGDVIGWIVISEARLHLNQKKRCCEEDCCSFTGNFNELQKHTQQKHPDSRPSEIDPARQVDWDNFQQSSDIVDVLSTIHAQVPNGIVLGDYVIEYGDDDTGDDYEVLRRVRRKWWSFICCKAFCRYPRSRRRGRGRDNRGSGRRNSNQAHLENFNLEVPTQAVDLRELRFDEIDDEYIVTGAVPSMATPGRMASFHYRDTRYGR

SEQ ID NO: 63689 - protein, 310 aa, Triticum aestivum
  peptide (1)..(310): Ceres Seq. ID no. 13584294
MVKKVVRPSSFDLDIHLDKSWKEDVTCPICLDYPHNAVLLRCTSYEKGCRPFVCDTDQTRSNCLERFKGAYELPANVKVSSIAVAPLDSIHIVSSHANNRPSCPLCRGDVIGWIVISEARLHLNQKKRCCEEDCCSFTGNFNELQKHTQQKHPDSRPSEIDPARQVDWDNFQQSSDIVDVLSTIHAQVPNGIVLGDYVIEYGDDDTGDDYEVLRRVRRKWWSFICCKAFCRYPRSRRRGRGRDNRGSGRRNSNQAHLENFNLEVPTQAVDLRELRFDEIDDEYIVTGAVPSMATPGRMASFHYRDTRYGR

SEQ ID NO: 63690 - DNA, 1205 bp, Triticum aestivum
  misc_feature (1)..(1205): Ceres Seq. ID no. 13584213
accattacctagaacattcctaatcgaaaaactagaacggtggtagtactagtgtgctccactaccaccaccaacaccacgagtgagggcggtggccaaaagacaggagataaggcgagactgtgagagggacagggcgggagacctcgacgacccctctcattgtttctttccggccgtccagcgccggcaggcagcgaagctagggcagatcgaatcaacagacgcgcgccggccgccggacaagatgatgggtcgcccggtgttcgtgctcttcggctcctccatcgtgcagtacagcttcagcaacggcggatggggagccaccctcaccgacgtctacgcccgcaaggctgatattgttctcagaggatatattgcatggaactcaaggcgagcacttcaagtcattaccaaaattttccccaaggattcagcagtgcagcctagcttggtggtagtttactttggtggcaatgattcgattgctccgcacccttctgggcttggacctcatgtgccacttgaggagtacatggacaacatgaggaagataggagagcacctcaagagcctgtccgacaagactcgtgtgatctttctgagctgcccgccgctcaacgaggagctgctcaagaaatcaacgagcactgcactgagcgagattgtgcggaccaatgaaacctgccgtctctactctgaagcatgtatatctgtatcgaaagagatgggcatcaaggtggtcgatctttggaacgccatgcagaaacgagaggactgggccacagcatgctttacggacgggctgcatttgtcagaagaggggagcaatatagttgtggaagagatcctgaggatcctcaaggaggcggagtgggatccatgcctacactggaaggcgatgccgaccgagttcggggaggactcgccctacgaccttgtcgcctctagcggcaaatccaccatcaacccatccgagtggacattccacaggaaaagatcatgggaatgaacggatcgccaggacatgtgtgagatcgagcagctgcacgtgatattttgcgccggcgctcttcggtcgctttgtgttattcatctgatggaagaacgtgataagatgtttctgaattgcaagtgtccatcgggtcgtagaattaataatgaacatgtttgagttgaacaacgttgagctgagttgggtgtgc

SEQ ID NO: 63691 - protein, 254 aa, Triticum aestivum
  peptide (1)..(254): Ceres Seq. ID no. 13584214
MMGRPVFVLFGSSIVQYSFSNGGWGATLTDVYARKADIVLRGYIAWNSRRALQVITKIFPKDSAVQPSLVVVYFGGNDSIAPHPSGLGPHVPLEEYMDNMRKIGEHLKSLSDKTRVIFLSCPPLNEELLKKSTSTALSEIVRTNETCRLYSEACISVSKEMGIKVVDLWNAMQKREDWATACFTDGLHLSEEGSNIVVEEILRILKEAEWDPCLHWKAMPTEFGEDSPYDLVASSGKSTINPSEWTFHRKRSWE

SEQ ID NO: 63692 - protein, 253 aa, Triticum aestivum
  peptide (1)..(253): Ceres Seq. ID no. 13584215
MGRPVFVLFGSSIVQYSFSNGGWGATLTDVYARKADIVLRGYIAWNSRRALQVITKIFPKDSAVQPSLVVVYFGGNDSIAPHPSGLGPHVPLEEYMDNMRKIGEHLKSLSDKTRVIFLSCPPLNEELLKKSTSTALSEIVRTNETCRLYSEACISVSKEMGIKVVDLWNAMQKREDWATACFTDGLHLSEEGSNIVVEEILRILKEAEWDPCLHWKAMPTEFGEDSPYDLVASSGKSTINPSEWTFHRKRSWE

SEQ ID NO: 63693 - protein, 158 aa, Triticum aestivum
  peptide (1)..(158): Ceres Seq. ID no. 13584216
MDNMRKIGEHLKSLSDKTRVIFLSCPPLNEELLKKSTSTALSEIVRTNETCRLYSEACISVSKEMGIKVVDLWNAMQKREDWATACFTDGLHLSEEGSNIVVEEILRILKEAEWDPCLHWKAMPTEFGEDSPYDLVASSGKSTINPSEWTFHRKRSWE

SEQ ID NO: 63694 - DNA, 586 bp, Triticum aestivum
  misc_feature (1)..(586): Ceres Seq. ID no. 15173379
caccacaagagaagagagagagagagagagagagagagcctgagcagcgacgatgtcgagcttgatgacgaagaaggagatcgggcagacccacgacgtgctccgcttcggcgtcaacgacagcgtcagggccgacctcgcgccggcgcaccccgtccaggccaccatccataaggagaccaagttctgggacgagaagaagaggttcgggaccgaggccatctacgggtccgccttcaacatccgcaaggacctggacgcccaaatcctctccaggttccaaaggcccccaggtgcattgccatcatctatgctaggatatgaggcaatgacaggttccttggatgattttggatttgaagattaccttaacttgccccaggactctgacagcctgcgcataccggacatgcaccacgggatggaggttcggcttggcctgtcgaagggccctgtctgccccagcttcagttgattccttccacccatgtattttgcttcccgtccagcatctacactgtatcatggattggtgaaacatgagaagtaaataattgggtattgcatcagtctgaatttcatgaac

SEQ ID NO: 63695 - protein, 140 aa, Triticum aestivum
  peptide (1)..(140): Ceres Seq. ID no. 15173380
MSSLMTKKEIGQTHDVLRFGVNDSVRADLAPAHPVQATIHKETKFWDEKKRFGTEAIYGSAFNIRKDLDAQILSRFQRPPGALPSSMLGYEAMTGSLDDFGFEDYLNLPQDSDSLRIPDMHHGMEVRLGLSKGPVCPSFS

SEQ ID NO: 63696 - protein, 136 aa, Triticum aestivum
  peptide (1)..(136): Ceres Seq. ID no. 15173381
MTKKEIGQTHDVLRFGVNDSVRADLAPAHPVQATIHKETKFWDEKKRFGTEAIYGSAFNIRKDLDAQILSRFQRPPGALPSSMLGYEAMTGSLDDFGFEDYLNLPQDSDSLRIPDMHHGMEVRLGLSKGPVCPSFS

SEQ ID NO: 63697 - DNA, 623 bp, Triticum aestivum
  misc_feature (1)..(623): Ceres Seq. ID no. 15173386
acatccaattccaatcacaagctccaaacaagcacagcaaaccaatccagagtaccatcggctatcaatcagcaggaggaagaaatagctgctcgatcggggaagaatcaagaggctcggcgaagatgcaggcggcgaaggagaaggtgaaggacggggtgagcgcggtgaaggccaagaccaagatcacgcaggccaaggcgtcggagaaggcggaggcggccacggcgaggtcgcacgccgagcgggagctggcgcacgagcgcggcaaggccaaggtcgccgcggccaagatggagctgcaccaggacaaggcgctccaccgggaggaggccatggagcaccgcatccacaagcacggcggccacggccgccaccaccacaagcacggcgtcggcatcgtggccgcgcccccaccggcaactggggcgggagccggggcgtaccaccatcctcccgccgccggtggccactactactaatccctaggcagctcgatcgccagctagatgggcacatgcgtcgcttctgtgtgatgtgatcttgatagctaataagcctctactttgtactctgtgtgtaatgacttaccaacgcgtgctttttaattttgcacttggttg

SEQ ID NO: 63698 - protein, 159 aa, Triticum aestivum
  peptide (1)..(159): Ceres Seq. ID no. 15173387
IQFQSQAPNKHSKPIQSTIGYQSAGGRNSCSIGEESRGSAKMQAAKEKVKDGVSAVKAKTKITQAKASEKAEAATARSHAERELAHERGKAKVAAAKMELHQDKALHREEAMEHRIHKHGGHGRHHHKHGVGIVAAPPPATGAGAGAYHHPPAAGGHYY

SEQ ID NO: 63699 - protein, 118 aa, Triticum aestivum
  peptide (1)..(118): Ceres Seq. ID no. 15173388
MQAAKEKVKDGVSAVKAKTKITQAKASEKAEAATARSHAERELAHERGKAKVAAAKMELHQDKALHREEAMEHRIHKHGGHGRHHHKHGVGIVAAPPPATGAGAGAYHHPPAAGGHYY

SEQ ID NO: 63700 - DNA, 884 bp, Triticum aestivum
  misc_feature (1)..(884): Ceres Seq. ID no. 13584263
gaagcccccgtccgattcaacaggcaaaacccccctcacgctcacgcgatgggagtcgccgcctccgccgccccccctcccccggaggccgccgcgcccgccgatccaccatccaaagaagatgcccagcatgccgctgccgccgccgccgcagcagcagcagctgcgcccgccgattcaccggcaaaggaagaggtccagtccgccgccgccgccgctcccggcggcggggcggacgcggcgggggagacggtggtcctggacgccgccgcggagggcggcgaggaggaggaaggggagtgcgggttttgcgtgtacatgaagggcggcgggtgcaaggaggagttcgtggggtgggagaagtgcgtggagcaggcggaggcggagggcagcgacgtcgtcgagcgctgccacgacgccaccgccgcgctgcgcaggtgcatggacaagttcccggactactacgagcccatcctccgcgccgagcgcgccatggccgaggatctcgaggccttcaaggccagcgaagcctccgagccctcccccgcctcgccgccgcccccggcggcsgaggaggaacagggcgacgataagaagcaggcggaggcggtggtggcgaaggaggatctcgcggcctgatcccgccgcctaggcgtgggatcttgcgattttttggtgagatttgaggcatcctagatgtgaattattttgttttacctggacgtgatctgcaaggtgggagagggcggcctctccaagaaaagttcgattcttttggtgggaattatacacttgttcacgagttctagctcgtgaactaatatggagaagtgatcttgtgctgtaataataatccaatgcatcgatactgatttgrcrcggtc

SEQ ID NO: 63701 - protein, 212 aa, Triticum aestivum
  peptide (1)..(212): Ceres Seq. ID no. 15222788
  misc_feature (190)..(190): Xaa is any aa, unknown or other
EAPVRFNRQNPPHAHAMGVAASAAPPPPEAAAPADPPSKEDAQHAAAAAAAAAAAAPADSPAKEEVQSAAAAAPGGGADAAGETVVLDAAAEGGEEEEGECGFCVYMKGGGCKEEFVGWEKCVEQAEAEGSDVVERCHDATAALRRCMDKFPDYYEPILRAERAMAEDLEAFKASEASEPSPASPPPPAXEEEQGDDKKQAEAVVAKEDLAA

SEQ ID NO: 63702 - protein, 196 aa, Triticum aestivum
  peptide (1)..(196): Ceres Seq. ID no. 15222789
  misc_feature (190)..(190): Xaa is any aa, unknown or other
SPRPIQQAKPPSRSRDGSRRLRRPPSPGGRRARRSTIQRRCPACRCRRRRSSSSCARRFTGKGRGPVRRRRRSRRRGGRGGGDGGPGRRRGGRRGGGRGVRVLRVHEGRRVQGGVRGVGEVRGAGGGGGQRRRRALPRRHRRAAQVHGQVPGLLRAHPPRRARHGRGSRGLQGQRSLRALPRLAAAPGGXGGTGRR

SEQ ID NO: 63703 - protein, 196 aa, Triticum aestivum
  peptide (1)..(196): Ceres Seq. ID no. 15222790
  misc_feature (174)..(174): Xaa is any aa, unknown or other
MGVAASAAPPPPEAAAPADPPSKEDAQHAAAAAAAAAAAAPADSPAKEEVQSAAAAAPGGGADAAGETVVLDAAAEGGEEEEGECGFCVYMKGGGCKEEFVGWEKCVEQAEAEGSDVVERCHDATAALRRCMDKFPDYYEPILRAERAMAEDLEAFKASEASEPSPASPPPPAXEEEQGDDKKQAEAVVAKEDLAA

SEQ ID NO: 63704 - DNA, 851 bp, Triticum aestivum
  misc_feature (1)..(851): Ceres Seq. ID no. 15173393
gaatccatccacctctcgagctcttttctgaagccgcaagcgagcagagcacaccgcacacgtagcagtttccctttcagatattttcttcgactagccaccatgactgctttggccaagccctccgcctcagcgccgaagccgaagaagacctccgccgctggagccgcccacccgacctacttcgagatgatcaaggaggcgatcgcggctctcaaggacaggaccgggtcgagctcggtcgccatcgccaagttcatcgaggagaagcacggcaaggccctcccggccaacttcaagaagatgctctccgtccagctccgctcctccgccgccaagggcaagctcgtcaaggtcaaggcctcctacaagctctccgacgccgccaagaaggactcccccaagcccaaggccaagcccgccgcccccaaggctgcggcgaagcccgcaaaggacgccgccaagcccaagaagaaggcctccgcgaagcccaagaaggccgccgccgctggcacgaagcgcaaggcacccgagaagaagaagctggtcgccaaagccaagaagtcgcccgcggcgaaggccaaggcgaagccgaagaccgtccgctccccggccgccaagaaggcccgcaaggtcgcctccgcttgatctgatctgatctgatcttataggtggttttaagtgtgcgttggtgctctgggtctgtacaaaaggatgcctcatcctccctgatttaggcttcggttctgctaggcaggttctatgtactatcgctggtggtgtttagtgtctggaatgttcaggtgtcagatgtatccagctcaaactctgaaatgaatttgcagtttcgc

SEQ ID NO: 63705 - protein, 215 aa, Triticum aestivum
  peptide (1)..(215): Ceres Seq. ID no. 15173394
ESIHLSSSFLKPQASRAHRTRSSFPFRYFLRLATMTALAKPSASAPKPKKTSAAGAAHPTYFEMIKEAIAALKDRTGSSSVAIAKFIEEKHGKALPANFKKMLSVQLRSSAAKGKLVKVKASYKLSDAAKKDSPKPKAKPAAPKAAAKPAKDAAKPKKKASAKPKKAAAAGTKRKAPEKKKLVAKAKKSPAAKAKAKPKTVRSPAAKKARKVASA

SEQ ID NO: 63706 - protein, 181 aa, Triticum aestivum
  peptide (1)..(181): Ceres Seq. ID no. 15173395
MTALAKPSASAPKPKKTSAAGAAHPTYFEMIKEAIAALKDRTGSSSVAIAKFIEEKHGKALPANFKKMLSVQLRSSAAKGKLVKVKASYKLSDAAKKDSPKPKAKPAAPKAAAKPAKDAAKPKKKASAKPKKAAAAGTKRKAPEKKKLVAKAKKSPAAKAKAKPKTVRSPAAKKARKVASA

SEQ ID NO: 63707 - protein, 152 aa, Triticum aestivum
  peptide (1)..(152): Ceres Seq. ID no. 15173396
MIKEAIAALKDRTGSSSVAIAKFIEEKHGKALPANFKKMLSVQLRSSAAKGKLVKVKASYKLSDAAKKDSPKPKAKPAAPKAAAKPAKDAAKPKKKASAKPKKAAAAGTKRKAPEKKKLVAKAKKSPAAKAKAKPKTVRSPAAKKARKVASA

SEQ ID NO: 63708 - DNA, 801 bp, Triticum aestivum
  misc_feature (1)..(801): Ceres Seq. ID no. 12586124
ccgctgttctacccttgctgcttcctaccctctcttgccgcctctgctgtgagcgagcgagcgcgaggaatggaggcgaggcgggagatcgccaagcgggcgcgcacggccggcacgagcaacgacgacgacgccgggagccaggggagcgcgggaggggcggcggcggcgtcctccagggccgacgtgagcaccggcgcggcggagatggacggggaggagttggccgtcgtggcggcggcggaggctgaggtggcgggctcggcggagacggaggagcacgtccagcgcatcctcctcgccatcgacaacttcacccgcaaggtgtcggagatgctggactccgggcgcgccatgttcaaggacctcgccgccgacttcgaggaccgcctctgcacgatccacaaggagagggtggagaagtgggaggaggagatccgggagctgcgcgcccgtgacgccgccaacgagcagacccgcgccgtcctccacaacgcccaactccagctcttccacatccgcgaatagtcagtcgagttcagtctgcttcgatcagctagctgttccacacatcttcagcaaaggcaagacatccaacagcactgtctgcatgcaacagcagcagctcccctgtttcttctgcatgctttctgctgtatatctttctgaacttatcagcacagctatattaacaagtccagtttgatgtagtactactaatactgtatgctcgtatgaatctgccacctgcagtgagttgccacttctgaatctgaacatgaatgccttgcactttagttg

SEQ ID NO: 63709 - protein, 175 aa, Triticum aestivum
  peptide (1)..(175): Ceres Seq. ID no. 12586125
PLFYPCCFLPSLAASAVSERARGMEARREIAKRARTAGTSNDDDAGSQGSAGGAAAASSRADVSTGAAEMDGEELAVVAAAEAEVAGSAETEEHVQRILLAIDNFTRKVSEMLDSGRAMFKDLAADFEDRLCTIHKERVEKWEEEIRELRARDAANEQTRAVLHNAQLQLFHIRE

SEQ ID NO: 63710 - protein, 152 aa, Triticum aestivum
  peptide (1)..(152): Ceres Seq. ID no. 12586126
MEARREIAKRARTAGTSNDDDAGSQGSAGGAAAASSRADVSTGAAEMDGEELAVVAAAEAEVAGSAETEEHVQRILLAIDNFTRKVSEMLDSGRAMFKDLAADFEDRLCTIHKERVEKWEEEIRELRARDAANEQTRAVLHNAQLQLFHIRE

SEQ ID NO: 63711 - protein, 106 aa, Triticum aestivum
  peptide (1)..(106): Ceres Seq. ID no. 12586127
MDGEELAVVAAAEAEVAGSAETEEHVQRILLAIDNFTRKVSEMLDSGRAMFKDLAADFEDRLCTIHKERVEKWEEEIRELRARDAANEQTRAVLHNAQLQLFHIRE

SEQ ID NO: 63712 - DNA, 939 bp, Triticum aestivum
  misc_feature (1)..(939): Ceres Seq. ID no. 15173400
gactccagtccccccaaattacaacctctctctctcgccgtctgctcgctcgctcgtcccccaaatcccaccccctccccgaccgaaccccagcggcgtcgccggcgatggagtgcgtcatcggcgtggtgggcagcgacttcgcggtggtggcggcggacacgtccgccgtgcagagcatcctcgtccacaagacggacgaggacaagatcatgctcctcgactcccacaagctcatgggcgcctccggggagcccggcgaccgcgtgcagttcaccgagttcatccagaagaacctccacctctaccagttccgcaacaacatgccgctcagcaccgccgccaccgccaacttcacccgcggcgagctcgccaccgccctgcgcaagaatccctactccgtaaacatcatacttgcagggtttgataaagacgctggtgcatcgatgtactacattgactacatcgcgacgctccacaagatcgacaagggagcattcgggtacgggtcgtacttctgtctgtcgctgatggacaagttgtaccgccctgacatgtctgtcgaggaagcggtagaccttgttgacaagtgcatcaaggagatcagactccggctggtcgtcgcgcctcagaatttcgccatcaagatcgtggacaaggatggcgccagggactatgctaggcgtgagatcggaggtgacagtcctgcagccgcaaccgcaaccgcagcagtagcaacaattgcctgaggtgattggccctgtcggtggtcatttggctgggtggaggctgaacccttcctgtcaattgtttccgagtactgtcactatgtaatcgcaatacgtttcggttcgagaactgtgttgcaaattctcccagatgtggactagtctgtttatgaccccctatttcatggttatatgtttcactgtttcttgt

SEQ ID NO: 63713 - protein, 248 aa, Triticum aestivum
  peptide (1)..(248): Ceres Seq. ID no. 15173401
LQSPQITTSLSRRLLARSSPKSHPLPDRTPAASPAMECVIGVVGSDFAVVAADTSAVQSILVHKTDEDKIMLLDSHKLMGASGEPGDRVQFTEFIQKNLHLYQFRNNMPLSTAATANFTRGELATALRKNPYSVNIILAGFDKDAGASMYYIDYIATLHKIDKGAFGYGSYFCLSLMDKLYRPDMSVEEAVDLVDKCIKEIRLRLVVAPQNFAIKIVDKDGARDYARREIGGDSPAAATATAAVATIA

SEQ ID NO: 63714 - protein, 213 aa, Triticum aestivum; identical to SEQ ID NO: 56016
  peptide (1)..(213): Ceres Seq. ID no. 15173402

SEQ ID NO: 63715 - protein, 178 aa, Triticum aestivum; identical to SEQ ID NO: 56017
  peptide (1)..(178): Ceres Seq. ID no. 15173403

SEQ ID NO: 63716 - DNA, 850 bp, Triticum aestivum
  misc_feature (1)..(850): Ceres Seq. ID no. 12616797
actgactgggttggacttggggctgccctccccacggccacgctagaccgcccgctcctgccaagatccaacacaactttccgccccctcgtccggtcgtcgggccgtcgccgccgaacaccgcccccctccaccgaagcgcggcagctcgaaggttcgtgttctaataagcttattccccttgaggcagcatgcctaagataaagacgagccgtgtgaagtatcctgaaggatgggagcttattgaaccaactctccgtgatttggaagccaaaatgagagaagctgagaatgatacacatgatgggaagaggaagtgtgaggctctctggccaatcttccgtatttctcaccaaaagagccgttatatatatgatctctactatcgaaggaaggagataaaaaaggagctgtatgagttttgcttggaccaaggttatgcagacaaaaatctgattgctaagtggaaaaagccaggttatgagcgtctctgctgcctccgctgcatacagacacgagaccacaactttgcaaccacctgcgtctgcagggtccccaagcacctcagggaagagacggtgatagaatgtgtccactgcggatgcaaggggtgtgccagcggcgattgaagtcgccactcgttgttaagaataatctgaaaccgattgctcgagatgctctgttggatccctgatgaatgaatgaaaacaagtaacgtacaatcaggtgattcgtccatatattcactgtaaactctcgagccttggtatgtctttgcgtgagaagactcggttttctgccgtggaagttgacaactgtttcgctgagaatgttatgttaacccgatctt

SEQ ID NO: 63717 - protein, 145 aa, Triticum aestivum
  peptide (1)..(145): Ceres Seq. ID no. 12616798
MPKIKTSRVKYPEGWELIEPTLRDLEAKMREAENDTHDGKRKCEALWPIFRISHQKSRYIYDLYYRRKEIKKELYEFCLDQGYADKNLIAKWKKPGYERLCCLRCIQTRDHNFATTCVCRVPKHLREETVIECVHCGCKGCASGD

SEQ ID NO: 63718 - protein, 117 aa, Triticum aestivum
  peptide (1)..(117): Ceres Seq. ID no. 12616799
MREAENDTHDGKRKCEALWPIFRISHQKSRYIYDLYYRRKEIKKELYEFCLDQGYADKNLIAKWKKPGYERLCCLRCIQTRDHNFATTCVCRVPKHLREETVIECVHCGCKGCASGD

SEQ ID NO: 63719 - DNA, 882 bp, Triticum aestivum
  misc_feature (1)..(882): Ceres Seq. ID no. 13585616
ctagctcgattcgattccgccgccgccgcccaagcccgaggaggacgattcgattccgccgccgccgcccaagccgcccaagcccgaggaggacgattcgattccgccgccgccgcccaagccgcccaagcccgaggaggacgattcgattccaccgccgccgccgccgcccaagcccgaggaggagaggagaggagaggagaggatggcgtccgtggggccgacgctcgagtccctcgtcgaccgtgagcctcccttccccttccttccttcctccctccctaaacctagcagcttgtttcagtttcaatctcaccgtctttctttcttgttttctgtatgtatgtatgtatgtatgtatgtagaagtgatctccgtcatcaccaacgacggccgcaacatcgtggggactctgcggggcttcgaccaggccaccaacataatcctcgacgagtcccacgagagggtctactccactaaggagggagtacagcagcttgtccttggtctgtacatcatcaggggtgataacataggcgtggtgggtgaggtggacgaggagctggacgcggcgctggacatgtcgaagctgagagcgcagcccctcaagccagtcatccactgaagatgatgaaatgttctatcgatctgatcctgatcgcgcaagccgaagctgatgttgctcagtcaatctgtaccgtaggttaatcgattgatcgctcactcatatctcatatctcatatcatggacccttgtatgatgaaaaaaaacagggtttgctgcgtcgatggaccggtcatgttcttgtatgagagagtgatacatgcatctctgtgcacgtaagtaatgaatgaatgaatgaagtaggcaattgatgttgg

SEQ ID NO: 63720 - protein, 139 aa, Triticum aestivum
  peptide (1)..(139): Ceres Seq. ID no. 13585617
MASVGPTLESLVDREPPFPFLPSSLPKPSSLFQFQSHRLSFLFSVCMYVCMYVEVISVITNDGRNIVGTLRGFDQATNIILDESHERVYSTKEGVQQLVLGLYIIRGDNIGVVGEVDEELDAALDMSKLRAQPLKPVIH

SEQ ID NO: 63721 - protein, 120 aa, Triticum aestivum
  peptide (1)..(120): Ceres Seq. ID no. 13585618
SSIRFRRRRPSPRRTIRFRRRRPSRPSPRRTIRFRRRRPSRPSPRRTIRFHRRRRRPSPRRRGEERRGWRPWGRRSSPSSTVSLPSPSFLPPSLNLAACFSFNLTVFLSCFLYVCMYVCM

SEQ ID NO: 63722 - protein, 93 aa, Triticum aestivum
  peptide (1)..(93): Ceres Seq. ID no. 13585619
MYVCMYVEVISVITNDGRNIVGTLRGFDQATNIILDESHERVYSTKEGVQQLVLGLYIIRGDNIGVVGEVDEELDAALDMSKLRAQPLKPVIH

SEQ ID NO: 63723 - DNA, 1162 bp, Triticum aestivum
  misc_feature (1)..(1162): Ceres Seq. ID no. 13598468
aacacaaaaacgaaatgccactgctgcagctgccgaccgcgtgtggcgccgctgcggcgtcggcgtcggcgccgggccccttcttgctctcacggccgccgccctcgcggctgcgcgcgtcgcacgtcctcttcgccttccctcgcctgaggaaatacggccgccggagccgcgagccggtacccaccaccctcgacgacgacgacgaggaggaggcggatgaggacgacgacgacgacatggaggaggcggttgacgaggacatcttcctcaagaaccggcccaagccggccggtttcggcgtggggaagacctacaccaccgacgtcgaagagcagcttctccgggagatgggcatcggcggcgccgggcgcaagagcaaatcggctccgcccaagagcagcaaaaccaacggctcggccacagaaaccgccgcagattgcagtaatgatggcgttcatgttcgtatttggaacctcccgaaaaagaagaacatacataaggacctgaacctagctttcaaagggtttcctggcctggtaactataaacccagcaaactctggaactaagaagacccgtgatcctatttgtaagggttttgcatttgtcaaactggagtcagtggacgctgcgacgaggtttgttgaactgtactctcgtaaagctgtgtcgttcggcaaggttgagaagccaatcaagtgctgtattgttgaagggcacatctctacggatccttcaggtccagcatccagcagtcagccaccagggtcgaacccacaacggttggtagccgtaagatgagcagcacagttgatctgtcatcaatccagttgccactcggtacttcaacagacggagaattccgggaagaaggttcgctacatagatatcggcatgcttcgctcaagattgcgaagacacggaccgtttggtcggaattcccgattttgtagatgatatcaagcattgacattagcaggaaaccctttctccaatgggtttatttagaagataggcagggattagactcaggtatgcagtggttttttttagttaaattcacgtgaatgtattgtgtctaaattaggtccactgtttcggagaaggatttgaatctaaatccgcggcgtcgttataaatccccagattaaagttgctgc

SEQ ID NO: 63724 - protein, 266 aa, Triticum aestivum
  peptide (1)..(266): Ceres Seq. ID no. 13598469
HKNEMPLLQLPTACGAAAASASAPGPFLLSRPPPSRLRASHVLFAFPRLRKYGRRSREPVPTTLDDDDEEEADEDDDDDMEEAVDEDIFLKNRPKPAGFGVGKTYTTDVEEQLLREMGIGGAGRKSKSAPPKSSKTNGSATETAADCSNDGVHVRIWNLPKKKNIHKDLNLAFKGFPGLVTINPANSGTKKTRDPICKGFAFVKLESVDAATRFVELYSRKAVSFGKVEKPIKCCIVEGHISTDPSGPASSSQPPGSNPQRLVAVR

SEQ ID NO: 63725 - protein, 262 aa, Triticum aestivum
  peptide (1)..(262): Ceres Seq. ID no. 13598470
MPLLQLPTACGAAAASASAPGPFLLSRPPPSRLRASHVLFAFPRLRKYGRRSREPVPTTLDDDDEEEADEDDDDDMEEAVDEDIFLKNRPKPAGFGVGKTYTTDVEEQLLREMGIGGAGRKSKSAPPKSSKTNGSATETAADCSNDGVHVRIWNLPKKKNIHKDLNLAFKGFPGLVTINPANSGTKKTRDPICKGFAFVKLESVDAATRFVELYSRKAVSFGKVEKPIKCCIVEGHISTDPSGPASSSQPPGSNPQRLVAVR

SEQ ID NO: 63726 - protein, 187 aa, Triticum aestivum
  peptide (1)..(187): Ceres Seq. ID no. 13598471
MEEAVDEDIFLKNRPKPAGFGVGKTYTTDVEEQLLREMGIGGAGRKSKSAPPKSSKTNGSATETAADCSNDGVHVRIWNLPKKKNIHKDLNLAFKGFPGLVTINPANSGTKKTRDPICKGFAFVKLESVDAATRFVELYSRKAVSFGKVEKPIKCCIVEGHISTDPSGPASSSQPPGSNPQRLVAVR

SEQ ID NO: 63727 - DNA, 1623 bp, Triticum aestivum
  misc_feature (1)..(1623): Ceres Seq. ID no. 13655660
aaaaaccctccttcgcccattcattccccactcctttcgccccaaaccccctccacccgccgcattcccatggctaccaccgccgcggctgccgccgccgccgccgccaccgcctccacccgggcaaacagcctctcccgcatcttctcctcctcctcgccaatcgtacaaccacccaagcgcaatcccaagaccaagagcgcgccgaagccgaagccgacgccgaaaccgcccgccgccgatgccgtctccatcgcggacgagaagcccccgaagcccctcggcgcacagcccgccgccaaaggtgattccgacgggaagcacaagctcccgaagccccttgggcttctcgtcaaggccctcagccggcagcgcgaccctgacaagctgatctccggcttcatccaagcgtcaaccgtgtcgtcgcgcttccgcgaccggcaccgcgtgttcgagatagcggtgagccgcctcacttccctcggccgccaagacggcatcgaggccatcatcgaagcgcagatgcccttcctcgagacctcagccgagggattcgcctcgcgcctcatccgcctctacggccgtgcctccatgccatcccacgcggccgcaaccttccataaacttcccgcgcagcataaatccaacatgacattcaactcccttctttcctgttacgccgatgccggagattttgacgggctcactgctgcattccaggagatcccagccacttacccctcgattgttcccaccgtatactcttacaacgtactcatccacgcattgtgccggaagcccgacgtctcagctgctcttgacgctgtccatctcatggagaagatcggtgtttcacctgacattattactttcaacacgctgttgaatgggttttgcaacaatggccgcttggatgaagcagagacagtatgggagatgatcaaggagaggaatttggagcctgacgccaagtgctacaatgccaagctgcggggtttggttgcagaagggaggattgatgatgcagctgctgtgctggagggattggagaaggatgggccaaaacccgatacagtatcctacaatgagttgattcgaggatattgcaaagccgggaagttacaggaggccaagaagctgtatgatgatttggtaaaaaatgagtgtgccccaaataagggaacatatgagactcttctgccacaccttctgcaggctggggagctggattgtgcactgacgtactgttataaaatctttagtcataaaaggaaccttagagtggagtgtggtgtgctgcaggatgtagtgaatgcattggtagatgtattgagggtggaggaggctgccaagattattgtgctggggcggaagaagtactacccccgaaagggtttgaggatgcctgatagtacaaaaaggcagtgaattaagagctgaaactgatgaggaagaagcaatatcagaagaagagtgtgaagtggagcacgagactgaaaaataaattcataggtcagacttttactgatgcatgccaaatttcaccatggcctggtttactctgttcctctgttggcatgatacaacaaaaagtgcaagttaaagtagtggttaaactagtcc

SEQ ID NO: 63728 - protein, 475 aa, Triticum aestivum
  peptide (1)..(475): Ceres Seq. ID no. 13655661
KNPPSPIHSPLLSPQTPSTRRIPMATTAAAAAAAAATASTRANSLSRIFSSSSPIVQPPKRNPKTKSAPKPKPTPKPPAADAVSIADEKPPKPLGAQPAAKGDSDGKHKLPKPLGLLVKALSRQRDPDKLISGFIQASTVSSRFRDRHRVFEIAVSRLTSLGRQDGIEAIIEAQMPFLETSAEGFASRLIRLYGRASMPSHAAATFHKLPAQHKSNMTFNSLLSCYADAGDFDGLTAAFQEIPATYPSIVPTVYSYNVLIHALCRKPDVSAALDAVHLMEKIGVSPDIITFNTLLNGFCNNGRLDEAETVWEMIKERNLEPDAKCYNAKLRGLVAEGRIDDAAAVLEGLEKDGPKPDTVSYNELIRGYCKAGKLQEAKKLYDDLVKNECAPNKGTYETLLPHLLQAGELDCALTYCYKIFSHKRNLRVECGVLQDVVNALVDVLRVEEAAKIIVLGRKKYYPRKGLRMPDSTKRQ

SEQ ID NO: 63729 - protein, 452 aa, Triticum aestivum
  peptide (1)..(452): Ceres Seq. ID no. 13655662
MATTAAAAAAAAATASTRANSLSRIFSSSSPIVQPPKRNPKTKSAPKPKPTPKPPAADAVSIADEKPPKPLGAQPAAKGDSDGKHKLPKPLGLLVKALSRQRDPDKLISGFIQASTVSSRFRDRHRVFEIAVSRLTSLGRQDGIEAIIEAQMPFLETSAEGFASRLIRLYGRASMPSHAAATFHKLPAQHKSNMTFNSLLSCYADAGDFDGLTAAFQEIPATYPSIVPTVYSYNVLIHALCRKPDVSAALDAVHLMEKIGVSPDIITFNTLLNGFCNNGRLDEAETVWEMIKERNLEPDAKCYNAKLRGLVAEGRIDDAAAVLEGLEKDGPKPDTVSYNELIRGYCKAGKLQEAKKLYDDLVKNECAPNKGTYETLLPHLLQAGELDCALTYCYKIFSHKRNLRVECGVLQDVVNALVDVLRVEEAAKIIVLGRKKYYPRKGLRMPDSTKRQ

SEQ ID NO: 63730 - protein, 301 aa, Triticum aestivum
  peptide (1)..(301): Ceres Seq. ID no. 13655663
MPFLETSAEGFASRLIRLYGRASMPSHAAATFHKLPAQHKSNMTFNSLLSCYADAGDFDGLTAAFQEIPATYPSIVPTVYSYNVLIHALCRKPDVSAALDAVHLMEKIGVSPDIITFNTLLNGFCNNGRLDEAETVWEMIKERNLEPDAKCYNAKLRGLVAEGRIDDAAAVLEGLEKDGPKPDTVSYNELIRGYCKAGKLQEAKKLYDDLVKNECAPNKGTYETLLPHLLQAGELDCALTYCYKIFSHKRNLRVECGVLQDVVNALVDVLRVEEAAKIIVLGRKKYYPRKGLRMPDSTKRQ

SEQ ID NO: 63731 - DNA, 1071 bp, Triticum aestivum
  misc_feature (1)..(1071): Ceres Seq. ID no. 13655656
caaaaaaaaaaggtttcatctcttcaagcagggcaggccgagccacaggttcctccgcaccctcggccttccctcccatcaccagtttccagccgcgagcgaacccgacgcgagtgcggttcgagggagagagaagaggggactagcaccatggccgccaggctgctgctcctctccttcgattgcccggccgtcgctggcgggcggcggtctcgtctgtctgcaatgccacggatgtcttccggtgctcccctcgtgcggcccccagcctcatccgtcggcgcgttcgcggtcaccgccgccagaggcaacctgccgcaccacacctccgtggttgtggagggtggtggagtttacactgttcgtgactttatgactaaaagggaacaactccatgttgtgaaaccatccacttcagtagatgaagctcttgacaggctggtggagcatcgaataactggctttcctgttaccgatgatcactggaatttggttggtgtggtctcagattatgatctgttagcactggacttgatatcaggaaatggacaggctgaagcggacatatttcctgaggtggacagcacttggaagactttccatcagatacaaaagctcttaagcaaaaccaatgggaaagtagttagtgatgttatgacttctgcacctcttgtggtgcgtgaaactactaaccttgaagatgctgcaaggttacttcttgttactaaataccgcaggctgccagtagtcgacagttcgggcaaattggttggaatcatcacaagagggaacgtcgtcagagctgctcttgagtttaagaaaaatgttgaagggagtctttgaagtggaactgtagatgatcctttccgaaggtggaacttgaacatattgctagtaggcaagcatactgaaaaaattgtttacacaacatgctagtttaattgcagttgggatacatgtattgtgagcatcatgcatcatccttaaatttcaaaattttgaattgaaggaattttcaaagcctctgctaaataaagggcaaagaacccaaaaaaatgcattcaatgtttc

SEQ ID NO: 63732 - protein, 280 aa, Triticum aestivum
  peptide (1)..(280): Ceres Seq. ID no. 13655657
QKKKVSSLQAGQAEPQVPPHPRPSLPSPVSSRERTRRECGSREREEGTSTMAARLLLLSFDCPAVAGGRRSRLSAMPRMSSGAPLVRPPASSVGAFAVTAARGNLPHHTSVVVEGGGVYTVRDFMTKREQLHVVKPSTSVDEALDRLVEHRITGFPVTDDHWNLVGVVSDYDLLALDLISGNGQAEADIFPEVDSTWKTFHQIQKLLSKTNGKVVSDVMTSAPLVVRETTNLEDAARLLLVTKYRRLPVVDSSGKLVGIITRGNVVRAALEFKKNVEGSL

SEQ ID NO: 63733 - protein, 230 aa, Triticum aestivum
  peptide (1)..(230): Ceres Seq. ID no. 13655658
MAARLLLLSFDCPAVAGGRRSRLSAMPRMSSGAPLVRPPASSVGAFAVTAARGNLPHHTSVVVEGGGVYTVRDFMTKREQLHVVKPSTSVDEALDRLVEHRITGFPVTDDHWNLVGVVSDYDLLALDLISGNGQAEADIFPEVDSTWKTFHQIQKLLSKTNGKVVSDVMTSAPLVVRETTNLEDAARLLLVTKYRRLPVVDSSGKLVGIITRGNVVRAALEFKKNVEGSL

SEQ ID NO: 63734 - protein, 205 aa, Triticum aestivum
  peptide (1)..(205): Ceres Seq. ID no. 13655659
MPRMSSGAPLVRPPASSVGAFAVTAARGNLPHHTSVVVEGGGVYTVRDFMTKREQLHVVKPSTSVDEALDRLVEHRITGFPVTDDHWNLVGVVSDYDLLALDLISGNGQAEADIFPEVDSTWKTFHQIQKLLSKTNGKVVSDVMTSAPLVVRETTNLEDAARLLLVTKYRRLPVVDSSGKLVGIITRGNVVRAALEFKKNVEGSL

SEQ ID NO: 63735 - DNA, 667 bp, Triticum aestivum
  misc_feature (1)..(667): Ceres Seq. ID no. 13655537
acagtctcacacccgccgctcagccgtaacttcacaaagatgctgaggtccaccggccgccttctgctgctcgcgctagcggcgagccacctgctgctcaccgccgccggcgctggctgcgagccgagcggcacgctccggccgacccagagccacgcgtgccaggactgctgcaaggccgggcaggcgtacccgacgtacaggtgctcgccgccggtctcctcgtccacccgggcggtcatgactctgaacgacttcgacgcgggcggcgacggcggggacccgtccgagtgcgacggcgcgttccaccgcagctcggagcgcgtggcggcgctgtccacggggtggtacagcgggggctcccgctgcggcaagagcatacggatccgggccaacggcaggtccgtgctcgccaaggtcgtcgacgagtgcgacaccgtgaacgggtgcgaccgcgagcacgccttccagccgccgtgccgcaacaacgtcgtcgacgcctcccaggcggtctgggacgcgctgggcatcaccggggaggaggtcggcgagtacaacgtcacttggtcagatgcatgacctatatatgtgcatggacgaatagagtgtacacgcggacccaaaatgaataaacggaatttataagggccgcctatttaacagggct

SEQ ID NO: 63736 - protein, 192 aa, Triticum aestivum
  peptide (1)..(192): Ceres Seq. ID no. 13655538
TVSHPPLSRNFTKMLRSTGRLLLLALAASHLLLTAAGAGCEPSGTLRPTQSHACQDCCKAGQAYPTYRCSPPVSSSTRAVMTLNDFDAGGDGGDPSECDGAFHRSSERVAALSTGWYSGGSRCGKSIRIRANGRSVLAKVVDECDTVNGCDREHAFQPPCRNNVVDASQAVWDALGITGEEVGEYNVTWSDA

SEQ ID NO: 63737 - protein, 179 aa, Triticum aestivum
  peptide (1)..(179): Ceres Seq. ID no. 13655539
MLRSTGRLLLLALAASHLLLTAAGAGCEPSGTLRPTQSHACQDCCKAGQAYPTYRCSPPVSSSTRAVMTLNDFDAGGDGGDPSECDGAFHRSSERVAALSTGWYSGGSRCGKSIRIRANGRSVLAKVVDECDTVNGCDREHAFQPPCRNNVVDASQAVWDALGITGEEVGEYNVTWSDA

SEQ ID NO: 63738 - protein, 112 aa, Triticum aestivum
  peptide (1)..(112): Ceres Seq. ID no. 13655540
MTLNDFDAGGDGGDPSECDGAFHRSSERVAALSTGWYSGGSRCGKSIRIRANGRSVLAKVVDECDTVNGCDREHAFQPPCRNNVVDASQAVWDALGITGEEVGEYNVTWSDA

SEQ ID NO: 63739 - DNA, 1347 bp, Triticum aestivum
  misc_feature (1)..(1347): Ceres Seq. ID no. 13655547
tcctctctagacactgctgttgactccgccgttctctcaacccacatggctctcgaagcgcgcctccgcctcccgctcgccgggccaactccggccaccgctttcctctcaggatctaaccccaaacccagtcacatatccttctccctcaaacccacctccacttctctctccgccgccaatgcgccgcccatcgtcgtcgtgggctccgccaacgcggacatctacgtcgaggtcgaccgtctcccgctcgtcggcgagacggttgccgcgagtgccggtcacagcctcgccggcgggaagggcgccaatcaagctgcctgtggggggcggctggcgctggggcccacctacctcgtggcgcgcgtgggggacgacgccaacgggcgcctcctcgagggggcactcgcggacgccggcggcgtccgcctcgaccgcgtcgctcgcgcccccggcgcgccctcggggcacgctgttgtcatgctcatgcccgacgggcagaactccatcatcatcgttggcggcgccaacatggagagctgggcaccggaggtcgacccggaggacctggacctgatccggcaggccggcgtgctactgctgcaacgggagatacccgattgggtcaacattcaggtcgctcaggctgcaaaaggcgcaggtgtgcctgttatcttggatgcaggtggaatggatgctcctgtccccagagaactactcgaactggtggatatttttagtccaaatgagacagagctagcacgtttgactgggatgcctacagagacttttgaacaaatcagccaggctgcaggagcatgccataaaatgggtgtgaaagaagttttggttaaacttggatcacaaggatctgctctgtttgtcgagggagaggaaccaattaggcaggcgataatacctgccgcagaagtggtagacaccaccggcgctggtgacaccttcacctcagcttttgctgtagctctggtggaggggaagccaaagaaagagtgcatgaaatttgctgctgccgccgcctcactgtgtgttcgagtgaagggagccattcccagcatgcctgacaggaaaactgtgatgagccttctagaatctgtgcaagatgaataaccgtagaaacggtgactttagccctattcatcagcaataatgtgagctgttaagcttcaatctcctcgttcggttcatttatctcgggtatctatatatatttgtagccccttgtcaagttatggtagaggaaataagagaaaatggcattcctagcgccgtcctccgcagaaacagaatcgctggttcaggagttctaggtctgttgtttttatagcc

SEQ ID NO: 63740 - protein, 375 aa, Triticum aestivum
  peptide (1)..(375): Ceres Seq. ID no. 13655548
SSLDTAVDSAVLSTHMALEARLRLPLAGPTPATAFLSGSNPKPSHISFSLKPTSTSLSAANAPPIVVVGSANADIYVEVDRLPLVGETVAASAGHSLAGGKGANQAACGGRLALGPTYLVARVGDDANGRLLEGALADAGGVRLDRVARAPGAPSGHAVVMLMPDGQNSIIIVGGANMESWAPEVDPEDLDLIRQAGVLLLQREIPDWVNIQVAQAAKGAGVPVILDAGGMDAPVPRELLELVDIFSPNETELARLTGMPTETFEQISQAAGACHKMGVKEVLVKLGSQGSALFVEGEEPIRQAIIPAAEVVDTTGAGDTFTSAFAVALVEGKPKKECMKFAAAAASLCVRVKGAIPSMPDRKTVMSLLESVQDE

SEQ ID NO: 63741 - protein, 360 aa, Triticum aestivum
  peptide (1)..(360): Ceres Seq. ID no. 13655549
MALEARLRLPLAGPTPATAFLSGSNPKPSHISFSLKPTSTSLSAANAPPIVVVGSANADIYVEVDRLPLVGETVAASAGHSLAGGKGANQAACGGRLALGPTYLVARVGDDANGRLLEGALADAGGVRLDRVARAPGAPSGHAVVMLMPDGQNSIIIVGGANMESWAPEVDPEDLDLIRQAGVLLLQREIPDWVNIQVAQAAKGAGVPVILDAGGMDAPVPRELLELVDIFSPNETELARLTGMPTETFEQISQAAGACHKMGVKEVLVKLGSQGSALFVEGEEPIRQAIIPAAEVVDTTGAGDTFTSAFAVALVEGKPKKECMKFAAAAASLCVRVKGAIPSMPDRKTVMSLLESVQDE

SEQ ID NO: 63742 - protein, 215 aa, Triticum aestivum
  peptide (1)..(215): Ceres Seq. ID no. 13655550
MLMPDGQNSIIIVGGANMESWAPEVDPEDLDLIRQAGVLLLQREIPDWVNIQVAQAAKGAGVPVILDAGGMDAPVPRELLELVDIFSPNETELARLTGMPTETFEQISQAAGACHKMGVKEVLVKLGSQGSALFVEGEEPIRQAIIPAAEVVDTTGAGDTFTSAFAVALVEGKPKKECMKFAAAAASLCVRVKGAIPSMPDRKTVMSLLESVQDE

SEQ ID NO: 63743 - DNA, 1220 bp, Triticum aestivum
  misc_feature (1)..(1220): Ceres Seq. ID no. 13597295
atacataccggcccctccatcttcaacttcaagatggctgcgtctcacccaagcacagaaatggctgcgtcgccgatggtgcggccgacggtgcaggagctggcggcggccggcgccgaggagccgccgcggcagtacgtgctgccggagcaagaccgtcacggcgacctgctggccgccgacgagtttccggagcccatccccctcgtcgaccttagccggctcacggacgccgacgaggccgagaggctccgggcggctctgcagacctggggcttcttcctggccaccaaccatgggatcgaggactctctcatggacgccatgacgagcgtgtcgagggagttcttccggcagccggcggaggagaggcagaaatgcagcaacctggtggacggcaacggcaaggactaccaggtggaagggtatggcagtgacaaggtggtgtccgacgatcaggtcctcaactggagcgaccggttgcatctgagagtggagccggaggatgagaggaatttcgccaagtggcccagtcaccccgaatctttcagggatgtgctacaagagtatgcatcaagaatcaagaaaataagagacctcgtcttacggtcgatagccaagctcctggagattgacgaggactacttcgtcaaccagatatcaaacaaggcccccgggtttgctagattcaactactaccctccatgtccgaggcctgacctagttttgggcctcagggctcactccgacggtggtctccttaccatccttttcaacgatgacaccgtcggtggcttgcaagttcagagagatgggagatggtacaatgttccagcaaagcctcacacattgctgattaacctagcagactgcctagaaataatgaacaatggaatctttacgagcccggttcacagagtggtgacgaacgtcgagaaggataggctttccttggctgtgttttacgccgtggatgcagaaacgatgttggagccagcgcccggtttgctggatgacaagcgaccgccaagatataagaaaatggtggccaaggattttgtggctgggctctttgaacatttccgtcaagggaagagattcattgacaccctgaaaatataggttcgctgtttattatggagccgtagaagtgattgctataaagaataaagagatggttttatctattgtgccagtgggggtctaccttcgcctttctt

SEQ ID NO: 63744 - protein, 373 aa, Triticum aestivum
  peptide (1)..(373): Ceres Seq. ID no. 13597296
IHTGPSIFNFKMAASHPSTEMAASPMVRPTVQELAAAGAEEPPRQYVLPEQDRHGDLLAADEFPEPIPLVDLSRLTDADEAERLRAALQTWGFFLATNHGIEDSLMDAMTSVSREFFRQPAEERQKCSNLVDGNGKDYQVEGYGSDKVVSDDQVLNWSDRLHLRVEPEDERNFAKWPSHPESFRDVLQEYASRIKKIRDLVLRSIAKLLEIDEDYFVNQISNKAPGFARFNYYPPCPRPDLVLGLRAHSDGGLLTILFNDDTVGGLQVQRDGRWYNVPAKPHTLLINLADCLEIMNNGIFTSPVHRVVTNVEKDRLSLAVFYAVDAETMLEPAPGLLDDKRPPRYKKMVAKDFVAGLFEHFRQGKRFIDTLKI

SEQ ID NO: 63745 - protein, 362 aa, Triticum aestivum
  peptide (1)..(362): Ceres Seq. ID no. 13597297
MAASHPSTEMAASPMVRPTVQELAAAGAEEPPRQYVLPEQDRHGDLLAADEFPEPIPLVDLSRLTDADEAERLRAALQTWGFFLATNHGIEDSLMDAMTSVSREFFRQPAEERQKCSNLVDGNGKDYQVEGYGSDKVVSDDQVLNWSDRLHLRVEPEDERNFAKWPSHPESFRDVLQEYASRIKKIRDLVLRSIAKLLEIDEDYFVNQISNKAPGFARFNYYPPCPRPDLVLGLRAHSDGGLLTILFNDDTVGGLQVQRDGRWYNVPAKPHTLLINLADCLEIMNNGIFTSPVHRVVTNVEKDRLSLAVFYAVDAETMLEPAPGLLDDKRPPRYKKMVAKDFVAGLFEHFRQGKRFIDTLKI

SEQ ID NO: 63746 - protein, 353 aa, Triticum aestivum
  peptide (1)..(353): Ceres Seq. ID no. 13597298
MAASPMVRPTVQELAAAGAEEPPRQYVLPEQDRHGDLLAADEFPEPIPLVDLSRLTDADEAERLRAALQTWGFFLATNHGIEDSLMDAMTSVSREFFRQPAEERQKCSNLVDGNGKDYQVEGYGSDKVVSDDQVLNWSDRLHLRVEPEDERNFAKWPSHPESFRDVLQEYASRIKKIRDLVLRSIAKLLEIDEDYFVNQISNKAPGFARFNYYPPCPRPDLVLGLRAHSDGGLLTILFNDDTVGGLQVQRDGRWYNVPAKPHTLLINLADCLEIMNNGIFTSPVHRVVTNVEKDRLSLAVFYAVDAETMLEPAPGLLDDKRPPRYKKMVAKDFVAGLFEHFRQGKRFIDTLKI

SEQ ID NO: 63747 - DNA, 1054 bp, Triticum aestivum
  misc_feature (1)..(1054): Ceres Seq. ID no. 12617286
attacctagaacatcctaatcgaaaaaaacccagtggctgcagcggcagcagtggccatgggcgagaggctcccccagccgtcgccgccgccgccgccgcaattccagctcgggaaccccatgtccgccccggcgtcgccctactccgcgctccaccctctcctcctcccgtccacgaacccgcacctcctcctcaagcccaagacgctgaccctctcgctctcctcctcctccctcgcctccatgccctcctcctcctccccgcccgcccccgcctccgacgcatgggaactcgtccacccaaccgtccccgttgccgccgcctcccccatcgacggcggcctcgacgactgcgccatcttcccaccgcgcctccacgagggcctgggcctcgaggcggaggccgaggaggccgcgaccaaggaagagaaggaggaggagactgacgacgaggaggagtggctgtgggggtgggggaggtgccgcgcggcggcgaggcgcgcgtgggcggccggttcagaggccgtgctcgtgcatggagagtgcggatgtcccggggttaggccggccatatggtcggccgcggcggcggccgttgtggtcggcgcgctgttgtacgtgcgccggcgagacaggagggagagagacctcctcgtcatgctctcgcaggagaaggataagaggatagcgcaacttctgcatcaaattgctttactgagtgacatcagaggcggcagcgaagcaattaaaatcatgaggaactcttaaccgttgcttcactgtagaagaggtttggatgtaatactgtgtagcactttggttaggtagttgcagaatgttttcatccagaagtgctccaagaccgtgtagcttgatcaagtaattagctcagttgcatgatcttgcatatataagatgtttctgtaattgaagaactgcaaacatcagctctggaaacccccctttgttgttaagatttgtaaatagatgagtgataacattgtcacttataaatttgtggaaatatgttcaaattgtgctggactcaggtact

SEQ ID NO: 63748 - protein, 236 aa, Triticum aestivum
  peptide (1)..(236): Ceres Seq. ID no. 12617287
MGERLPQPSPPPPPQFQLGNPMSAPASPYSALHPLLLPSTNPHLLLKPKTLTLSLSSSSLASMPSSSSPPAPASDAWELVHPTVPVAAASPIDGGLDDCAIFPPRLHEGLGLEAEAEEAATKEEKEEETDDEEEWLWGWGRCRAAARRAWAAGSEAVLVHGECGCPGVRPAIWSAAAAAVVVGALLYVRRRDRRERDLLVMLSQEKDKRIAQLLHQIALLSDIRGGSEAIKIMRNS

SEQ ID NO: 63749 - protein, 215 aa, Triticum aestivum
  peptide (1)..(215): Ceres Seq. ID no. 12617288
MSAPASPYSALHPLLLPSTNPHLLLKPKTLTLSLSSSSLASMPSSSSPPAPASDAWELVHPTVPVAAASPIDGGLDDCAIFPPRLHEGLGLEAEAEEAATKEEKEEETDDEEEWLWGWGRCRAAARRAWAAGSEAVLVHGECGCPGVRPAIWSAAAAAVVVGALLYVRRRDRRERDLLVMLSQEKDKRIAQLLHQIALLSDIRGGSEAIKIMRNS

SEQ ID NO: 63750 - protein, 174 aa, Triticum aestivum
  peptide (1)..(174): Ceres Seq. ID no. 12617289
MPSSSSPPAPASDAWELVHPTVPVAAASPIDGGLDDCAIFPPRLHEGLGLEAEAEEAATKEEKEEETDDEEEWLWGWGRCRAAARRAWAAGSEAVLVHGECGCPGVRPAIWSAAAAAVVVGALLYVRRRDRRERDLLVMLSQEKDKRIAQLLHQIALLSDIRGGSEAIKIMRNS

SEQ ID NO: 63751 - DNA, 500 bp, Triticum aestivum
  misc_feature (1)..(500): Ceres Seq. ID no. 13584430
ataaagtactaataaacagagggagtacaagtacaacgcgtttgcatacgaaaatactacaaagttaacatacattttagtctcgcagctaggcacgaaaaattcttagccactgcaacactcttgacacaactaccggtgcaccagtgcatatacggcggactcgtcgtcatcgtcatgcgccggtcagcacctagcgtgctccagctgatcacagccgcacggcggtcctcccgcggccagcgcggccgaaggagagcacccggaccaggcggcgccacagcgccccgagcgacggcatccgccggctcgtccggaccgccggggtcgttgtcgccgccctcttcctccgccacagcgacggcatcgcgcgctagctagtcaagtcgagccttcttgcggagttccggttgtacggtgaaaggcttcaagatggcgagtgcacgagtggacaaatgggagatcgatggtggtgtctggtgttttttgattaggatgtt

SEQ ID NO: 63752 - protein, 67 aa, Triticum aestivum
  peptide (1)..(67): Ceres Seq. ID no. 13584431
MRRSAPSVLQLITAARRSSRGQRGRRRAPGPGGATAPRATASAGSSGPPGSLSPPSSSATATASRAS

SEQ ID NO: 63753 - DNA, 697 bp, Triticum aestivum
  misc_feature (1)..(697): Ceres Seq. ID no. 14302208
agacacccgcaagtccgactcatcgctcaacgtcagtgccaacctgccgttcagcaagagcacgcacgcttgcacctttatgtaaagcaaaacccgacgccgtcaccagctttggtctcttctcttcccattgctcaaaatacctcggcagagagtattctcaactcccggctcagccttcccttcccttccctctcctgcctccgcccactccactcagtgctccagaagctcggatggcggcccagaaggtggtgctcagggtcccgaccatgaccgacgacaaggccaagcagaaggccatcgaagcggtcgcggatatctacggcattgattccatagttgcggatctgaaggacaataagatgatcatcataggcgagatggacactgtggcaatcgcaaagaaattaaagaaggttgggaagattgacattgtgtccgttggacctgcaaaggaagaaaagaaagaagagaagaaagaagaaaagaaagaggagaaaaaagaggaaaagaaagaagagaagaaagaggagaagaaagaggagaaaaaatgataaagcataccacaccatcccatggcctttctcctctgtgcacttctaatagctttgtctacggatctatgtttctaagagatatgactttgtaccattatatctaaagtacatattagtgatatttctttacagaagat

SEQ ID NO: 63754 - protein, 184 aa, Triticum aestivum
  peptide (1)..(184): Ceres Seq. ID no. 14302209
TPASPTHRSTSVPTCRSARARTLAPLCKAKPDAVTSFGLFSSHCSKYLGREYSQLPAQPSLPFPLLPPPTPLSAPEARMAAQKVVLRVPTMTDDKAKQKAIEAVADIYGIDSIVADLKDNKMIIIGEMDTVAIAKKLKKVGKIDIVSVGPAKEEKKEEKKEEKKEEKKEEKKEEKKEEKKEEKK

SEQ ID NO: 63755 - protein, 106 aa, Triticum aestivum
  peptide (1)..(106): Ceres Seq. ID no. 14302210
MAAQKVVLRVPTMTDDKAKQKAIEAVADIYGIDSIVADLKDNKMIIIGEMDTVAIAKKLKKVGKIDIVSVGPAKEEKKEEKKEEKKEEKKEEKKEEKKEEKKEEKK

SEQ ID NO: 63756 - protein, 94 aa, Triticum aestivum
  peptide (1)..(94): Ceres Seq. ID no. 14302211
MTDDKAKQKAIEAVADIYGIDSIVADLKDNKMIIIGEMDTVAIAKKLKKVGKIDIVSVGPAKEEKKEEKKEEKKEEKKEEKKEEKKEEKKEEKK

SEQ ID NO: 63757 - DNA, 1112 bp, Triticum aestivum
  misc_feature (1)..(1112): Ceres Seq. ID no. 13591076
tttctcttccttcgttcgttctggtcgtttcggtgaatcgatctcgcccaccaaacccgaccacccgatcccccggacagccggagagcgaggcgaagcggcgaggcgtaccgcaaccatgctcagggtcgcaggtcgacgcatatcctcccacctcgcatggcgccccgccgcggccgcctccgccggcagcagccccctcgccggcggcctccctggcgacgacttcccccgggaccagaatccgcgcttcgccatcgaatcacccttctacgtcgctgccagaggcttttcggctgaatctcttgttccgaggaaccaggatgtagagttggctgagctcacaccaactacggcagctctgaagaatccctgtgccaaaattgtgtacgatgagtataaccacgagaggtacccacctggtgaccccagcaagcgtgcctttgcctactttgtgttgagtggtgggagatttgtgtacgcatccttgttgcgtttgctcgtcttaaagtttgtcctgagtatgtcagcaagtaaggatgtgcttgccctcgcttcccttgaggttgacctgtcaagtattgagcccggtaccactgtgactgtaaagtggcggggcaagccagttttcatcaggcgcaggaccgaagatgatgtgaagctggccaacagcgttgatgttacatctctccgtgacccacaggaggatgcggtgcgtgtcaagaaccctgagtggcttgttgtcattggtgtctgcactcacttgggctgcattcccctccccaactctggggacttcggtggctggttctgcccatgtcatggctcacactacgacatctcaggtagaatcaggaagggcccagcaccatacaacctggaggtcccgacctacagtttcttggaagataacaaaatgcttattggctaagagcactggccgtaagattaatccctatggtgctgtgctgccattttgtgttggtttgaccattcgtcttcttgttgctcggatagtcctatgatggactgttatcttagtgcagtactcttactagcactggatagtaaagaataatctgctgctactttggtacttttaattaatttcc

SEQ ID NO: 63758 - protein, 309 aa, Triticum aestivum
  peptide (1)..(309): Ceres Seq. ID no. 13591077
FSSFVRSGRFGESISPTKPDHPIPRTAGERGEAARRTATMLRVAGRRISSHLAWRPAAAASAGSSPLAGGLPGDDFPRDQNPRFAIESPFYVAARGFSAESLVPRNQDVELAELTPTTAALKNPCAKIVYDEYNHERYPPGDPSKRAFAYFVLSGGRFVYASLLRLLVLKFVLSMSASKDVLALASLEVDLSSIEPGTTVTVKWRGKPVFIRRRTEDDVKLANSVDVTSLRDPQEDAVRVKNPEWLVVIGVCTHLGCIPLPNSGDFGGWFCPCHGSHYDISGRIRKGPAPYNLEVPTYSFLEDNKMLIG

SEQ ID NO: 63759 - protein, 270 aa, Triticum aestivum
  peptide (1)..(270): Ceres Seq. ID no. 13591078
MLRVAGRRISSHLAWRPAAAASAGSSPLAGGLPGDDFPRDQNPRFAIESPFYVAARGFSAESLVPRNQDVELAELTPTTAALKNPCAKIVYDEYNHERYPPGDPSKRAFAYFVLSGGRFVYASLLRLLVLKFVLSMSASKDVLALASLEVDLSSIEPGTTVTVKWRGKPVFIRRRTEDDVKLANSVDVTSLRDPQEDAVRVKNPEWLVVIGVCTHLGCIPLPNSGDFGGWFCPCHGSHYDISGRIRKGPAPYNLEVPTYSFLEDNKMLIG

SEQ ID NO: 63760 - DNA, 860 bp, Triticum aestivum
  misc_feature (1)..(860): Ceres Seq. ID no. 13597399
atcgcattgccgcgccttcccttcattcccacccgcctacttcacgcgcaccaaccaccccctccgctgcttcagttcgtccgctccatccatcccgtttctattccgagtggacgccaggcgcataggtatatttggctgtagagagcctgatttagaagataggaggagcacatctttgagagggaggagcatgccgacgggaaccatgaggaggatgttcgtcgagtcgtcctcgtcctcctccgggagcggcagggaggcggagccggcggtggtgctgtgcgcgccccggccccgcagggtccacgcccagccctgcagcgccgacctcatcctcggccccccgcccttcctgctcaacgcctcctccggcagcataaagcagagacaagggaagagcaaaacgcgggaggaggagggggaggggggctgggcgctgttcggcggctcgccgccggcgcgcgcggacaacccgctcgtccacgacccccacttcctgctcaaccagcgccaccacgccgccgcggaattcaacctcgcggcggtttttgaccaccacctccaccaccacagccgcaaccaccaccacgccccaaccacatatagcaatagcggcaatagccacagttttgccccgtcgtacacgcacgccgcgccggcggtgaggatccaggggttcgacgtcgccgcctgccggggctcccacgccagcaacggcggaggccgcgtgctctccgcccgcgcatgagcctgagccctgcggaattgcatcatgttggttatgcagctgtaccatgtaatggaattgcatcaagttgattcaataatttctcctgagtttcgaaaaaaaaaaaaaa

SEQ ID NO: 63761 - protein, 249 aa, Triticum aestivum
  peptide (1)..(249): Ceres Seq. ID no. 13597400
SHCRAFPSFPPAYFTRTNHPLRCFSSSAPSIPFLFRVDARRIGIFGCREPDLEDRRSTSLRGRSMPTGTMRRMFVESSSSSSGSGREAEPAVVLCAPRPRRVHAQPCSADLILGPPPFLLNASSGSIKQRQGKSKTREEEGEGGWALFGGSPPARADNPLVHDPHFLLNQRHHAAAEFNLAAVFDHHLHHHSRNHHHAPTTYSNSGNSHSFAPSYTHAAPAVRIQGFDVAACRGSHASNGGGRVLSARA

SEQ ID NO: 63762 - protein, 185 aa, Triticum aestivum
  peptide (1)..(185): Ceres Seq. ID no. 13597401
MPTGTMRRMFVESSSSSSGSGREAEPAVVLCAPRPRRVHAQPCSADLILGPPPFLLNASSGSIKQRQGKSKTREEEGEGGWALFGGSPPARADNPLVHDPHFLLNQRHHAAAEFNLAAVFDHHLHHHSRNHHHAPTTYSNSGNSHSFAPSYTHAAPAVRIQGFDVAACRGSHASNGGGRVLSARA

SEQ ID NO: 63763 - protein, 180 aa, Triticum aestivum
  peptide (1)..(180): Ceres Seq. ID no. 13597402
MRRMFVESSSSSSGSGREAEPAVVLCAPRPRRVHAQPCSADLILGPPPFLLNASSGSIKQRQGKSKTREEEGEGGWALFGGSPPARADNPLVHDPHFLLNQRHHAAAEFNLAAVFDHHLHHHSRNHHHAPTTYSNSGNSHSFAPSYTHAAPAVRIQGFDVAACRGSHASNGGGRVLSARA

SEQ ID NO: 63764 - DNA, 1056 bp, Triticum aestivum
  misc_feature (1)..(1056): Ceres Seq. ID no. 13597418
actttattgtgtttaaacacgccaaaggccaaaagcggggaagaaagaggacgaaagaaagcgtcgccgccgcggagcaaatcgagcaagcagccggcgacgcgacgcggccgaatcggagcaggcagtctcgccggccggccgtcccatcgaccgaccccccgctcggccccccgaggaaccgatagggtccatctccctgccggcgatggcgtcgtccgcggatccgtgggtgcgggagtacggcgaggcggcgcgcctggcggacgacgtcgccgccatggtcgccgaccgggcggcgctcccgcagtccggcccggaggtcatgcgccacacctccgccattcgccggaagatcaccatcctcgggaccaggctggacagcctcgaggggatgctcgccaggcttccccccaaatccatcacggacaaggagctgaataagcaccgagacacgctttcaaatttgaaatctagagcaaaacagatggcagaaagtttcaacatgtcgacctttgccaacagggaggatttgcttggtcagagcaagaaagctgctgatgacatgaacagagtagccgggttggataaccaagggattgttggccttcagaggcaaatcatgaaagaacaagatgagggtcttgagaagctggaacagaccgtgctgagcacaaaacatattgcgttagcagtcaatgaggaacttgacctgcacgcaagactgattgatgacctagatgatcatgtggatggtacaaactcgcgccttcaacgtgtgcaaaagaggcttgcggttctgaacaagcgcgccaagggcggctgctcctgcatgtccctgctgctgtccaccgtcggtatagtgatgcttgtggttattgtctggctcctcatcaagtatctgtaacctctgcccaactcaaatcagtttcaagtgtgcagttctttcaaagacagtatggttacttccgcttcgccatcattttggcgagaaatggaaaatatgtatgccacatgtccccttatcgggttgaaatgtgaagttcagacttttgc

SEQ ID NO: 63765 - protein, 232 aa, Triticum aestivum
  peptide (1)..(232): Ceres Seq. ID no. 13597419
MASSADPWVREYGEAARLADDVAAMVADRAALPQSGPEVMRHTSAIRRKITILGTRLDSLEGMLARLPPKSITDKELNKHRDTLSNLKSRAKQMAESFNMSTFANREDLLGQSKKAADDMNRVAGLDNQGIVGLQRQIMKEQDEGLEKLEQTVLSTKHIALAVNEELDLHARLIDDLDDHVDGTNSRLQRVQKRLAVLNKRAKGGCSCMSLLLSTVGIVMLVVIVWLLIKYL

SEQ ID NO: 63766 - protein, 208 aa, Triticum aestivum
  peptide (1)..(208): Ceres Seq. ID no. 13597420
MVADRAALPQSGPEVMRHTSAIRRKITILGTRLDSLEGMLARLPPKSITDKELNKHRDTLSNLKSRAKQMAESFNMSTFANREDLLGQSKKAADDMNRVAGLDNQGIVGLQRQIMKEQDEGLEKLEQTVLSTKHIALAVNEELDLHARLIDDLDDHVDGTNSRLQRVQKRLAVLNKRAKGGCSCMSLLLSTVGIVMLVVIVWLLIKYL

SEQ ID NO: 63767 - protein, 193 aa, Triticum aestivum
  peptide (1)..(193): Ceres Seq. ID no. 13597421
MRHTSAIRRKITILGTRLDSLEGMLARLPPKSITDKELNKHRDTLSNLKSRAKQMAESFNMSTFANREDLLGQSKKAADDMNRVAGLDNQGIVGLQRQIMKEQDEGLEKLEQTVLSTKHIALAVNEELDLHARLIDDLDDHVDGTNSRLQRVQKRLAVLNKRAKGGCSCMSLLLSTVGIVMLVVIVWLLIKYL

SEQ ID NO: 63768 - DNA, 876 bp, Triticum aestivum
  misc_feature (1)..(876): Ceres Seq. ID no. 12586195
aaagccatttcatcagatcccagccaagtacatcacgcacccacgagcacgaccaggcacgcacggcagaagcgatgggcgtcgtctcggcggtggcggacgcggtggtcgtcctcttctccctcaccatcgcggtgggggtcccgctcatcgacgcgcaggccgtcctctcgcacgacgcctacccggcgcagctgcgggacctcaagcgctggtacgccgccgagttcgacgactacctcatggcccacccgccgcccttcttccgcggcctcttgtgcctcgagctcgccttcctctggccgctctccgtcgccaccgtctacggcgtcctcgcccgccgccgatgggccgccaccacctccctcatggtcggcgtcaccaccctcacctccctgtcggcaatatttggcgagatgctgggctcagggaaggcaacgacgaagctgcttcagatgtatgttccatacgccgtgtttgctgtcattgccatcctgcgcggtctctgctcatgctcggcgccggcgtcgccggcatcttctgctcggaagaagagggtctagatttgatttgcatttctgacatttttcatcgataaaacattcaagtttcactaggtgtaagatgctttcttctgaggctgtaccgtccaacctactccctccgttcgggattacttgtctcgaaaatagatgtaactagaactaaaatacgtctagatacatccatctctacgacaagtaatttcgaacggagggagtatcattcaacacccagtggaaatggaatgtccatactgccattgttaaattttgttcacaatttgaaaaagattgtactgcatctgttctacttctatgatagatcatgttcaag

SEQ ID NO: 63769 - protein, 198 aa, Triticum aestivum
  peptide (1)..(198): Ceres Seq. ID no. 12586196
KPFHQIPAKYITHPRARPGTHGRSDGRRLGGGGRGGRPLLPHHRGGGPAHRRAGRPLARRLPGAAAGPQALVRRRVRRLPHGPPAALLPRPLVPRARLPLAALRRHRLRRPRPPPMGRHHLPHGRRHHPHLPVGNIWRDAGLREGNDEAASDVCSIRRVCCHCHPARSLLMLGAGVAGIFCSEEEGLDLICISDIFHR

SEQ ID NO: 63770 - protein, 193 aa, Triticum aestivum
  peptide (1)..(193): Ceres Seq. ID no. 12586197
KAISSDPSQVHHAPTSTTRHARQKRWASSRRWRTRWSSSSPSPSRWGSRSSTRRPSSRTTPTRRSCGTSSAGTPPSSTTTSWPTRRPSSAASCASSSPSSGRSPSPPSTASSPAADGPPPPPSWSASPPSPPCRQYLARCWAQGRQRRSCFRCMFHTPCLLSLPSCAVSAHARRRRRRHLLLGRRGSRFDLHF

SEQ ID NO: 63771 - protein, 186 aa, Triticum aestivum
  peptide (1)..(186): Ceres Seq. ID no. 12586198
SHFIRSQPSTSRTHEHDQARTAEAMGVVSAVADAVVVLFSLTIAVGVPLIDAQAVLSHDAYPAQLRDLKRWYAAEFDDYLMAHPPPFFRGLLCLELAFLWPLSVATVYGVLARRRWAATTSLMVGVTTLTSLSAIFGEMLGSGKATTKLLQMYVPYAVFAVIAILRGLCSCSAPASPASSARKKRV

SEQ ID NO: 63772 - protein, 162 aa, Triticum aestivum
  peptide (1)..(162): Ceres Seq. ID no. 12586199
MGVVSAVADAVVVLFSLTIAVGVPLIDAQAVLSHDAYPAQLRDLKRWYAAEFDDYLMAHPPPFFRGLLCLELAFLWPLSVATVYGVLARRRWAATTSLMVGVTTLTSLSAIFGEMLGSGKATTKLLQMYVPYAVFAVIAILRGLCSCSAPASPASSARKKRV

SEQ ID NO: 63773 - DNA, 733 bp, Triticum aestivum
  misc_feature (1)..(733): Ceres Seq. ID no. 12586420
aaatccaattccaaccacaagctccaatcaaacacagcaaaccaatccagattaccatcggctatcaatcagcaggaggaggaaatcgctgctcgattggggaagaatcaagaggctcggcgaagatgcaggcggcgaaggagaaggtgaaggacggcgtgagcgcggtgaaggccaagaccaagatcacgcaggccaaggcgtcggagaaggcggaggcggccacggcgaggtcgcacgcggagcgggagctggcgcacgagcgcggcaaggccaaggtcgccgctgccaagatggagctgcaccaggacaaggcgctccaccgcgaggaggccatggagcaccgcatccacaagcacggcggccacggccggcaccaccacaagcacggcgtcggcatcgtggccgcgcccccgccggcgaccggggccggggcgggggcgtaccaccctcctcctgccgccggtggccactactactaattacagctaagcagctccatcgctagctagatgggcacatgcgtcgcgtgtgtgttatgcgatctcgcaagctaagtttgtattttgtactgttttgtgcttgacttacccacgcgtgctttttaagtttgcacttggtttgcacttaaagatgagagctgtatgtatgtatggatgcatgcaaccttgttgcttgctttcttttataatactctaaagagcggtaaatcaattacgtttgtttggcagcg

SEQ ID NO: 63774 - protein, 168 aa, Triticum aestivum
  peptide (1)..(168): Ceres Seq. ID no. 12586421
NPIPTTSSNQTQQTNPDYHRLSISRRRKSLLDWGRIKRLGEDAGGEGEGEGRRERGEGQDQDHAGQGVGEGGGGHGEVARGAGAGARARQGQGRRCQDGAAPGQGAPPRGGHGAPHPQARRPRPAPPQARRRHRGRAPAGDRGRGGGVPPSSCRRWPLLLITAKQLHR

SEQ ID NO: 63775 - protein, 159 aa, Triticum aestivum
  peptide (1)..(159): Ceres Seq. ID no. 12586422
IQFQPQAPIKHSKPIQITIGYQSAGGGNRCSIGEESRGSAKMQAAKEKVKDGVSAVKAKTKITQAKASEKAEAATARSHAERELAHERGKAKVAAAKMELHQDKALHREEAMEHRIHKHGGHGRHHHKHGVGIVAAPPPATGAGAGAYHPPPAAGGHYY

SEQ ID NO: 63776 - protein, 118 aa, Triticum aestivum
  peptide (1)..(118): Ceres Seq. ID no. 12586423
MQAAKEKVKDGVSAVKAKTKITQAKASEKAEAATARSHAERELAHERGKAKVAAAKMELHQDKALHREEAMEHRIHKHGGHGRHHHKHGVGIVAAPPPATGAGAGAYHPPPAAGGHYY

SEQ ID NO: 63777 - DNA, 1148 bp, Triticum aestivum
  misc_feature (1)..(1148): Ceres Seq. ID no. 12617350
atcccatcaccacagcaccagtcacaagcaaaagtaggagctcgatcaccgagtgttagctctcacagttcgcaagtgttttatttccaggggtgcagtttcagcaggtcggcaatggctacgattgctctgatagtggccatggtgctcagcctggcgcagctctccgctgggagcaggaggctgatggagctgtacgtgcctccggagagcgaccggctcacgtaccaccagggcggcgtgctcagcggcgacatctccgtgtccatcctctggtacggcaagttcacgcccgcgcagaggtccattgtctccgacttcgtcgtctcgctaaactccgcgccgaacggggccgccacgccctcggtcgggcagtggtggggcaccatcgagcagctctacctgtccaaggcggctgccgccaacggccaggccggcgccacgcacgtgctcctcgccgagcaggtgaccgacgagcagtgctccctcggcacgtcgctcactctggcccagatcgaccagctcgccgcgagcgtcggcgccaagaagggcggcatcgcgctggtgttcaccgacgaggacgtcgccgtggagggcttctgcagcagccggtgcggcaggcacgggtcgtccaccggcggcgactccacgcacatctgggtcggcaactccgtgaagcagtgccccgggcagtgcgcgtggccgttcgcgcagccgcagtacgggccgcagggcgcgcccctggtggcgcccaacggcaacgtcgggatggacggcatggtgatggtcctcgccaccatggtggccggcaccgtgagcaacccgtacggggacggctactaccagggccccaagggcgcgtccctggaggcgtgcacggcgtgccccggcgtctacggcagcggggcgtacccgggctacgccggcaacctgctcgtcgaccccagcaccggcgccagctacaatgccaacggcgccaacgggaggaagtacctgctcccggcgttgtacgaccccgccacggcctcctgcaacacgcttgtctagtccggtgcgtccatccgggcacgtacaggctttccctgtacgcttgagaagttgtacatagtgtaacgtgttggaagaaatggaaattgcttcgttcgttt

SEQ ID NO: 63778 - protein, 348 aa, Triticum aestivum
  peptide (1)..(348): Ceres Seq. ID no. 12617351
IPSPQHQSQAKVGARSPSVSSHSSQVFYFQGCSFSRSAMATIALIVAMVLSLAQLSAGSRRLMELYVPPESDRLTYHQGGVLSGDISVSILWYGKFTPAQRSIVSDFVVSLNSAPNGAATPSVGQWWGTIEQLYLSKAAAANGQAGATHVLLAEQVTDEQCSLGTSLTLAQIDQLAASVGAKKGGIALVFTDEDVAVEGFCSSRCGRHGSSTGGDSTHIWVGNSVKQCPGQCAWPFAQPQYGPQGAPLVAPNGNVGMDGMVMVLATMVAGTVSNPYGDGYYQGPKGASLEACTACPGVYGSGAYPGYAGNLLVDPSTGASYNANGANGRKYLLPALYDPATASCNTLV

SEQ ID NO: 63779 - protein, 310 aa, Triticum aestivum
  peptide (1)..(310): Ceres Seq. ID no. 12617352
MATIALIVAMVLSLAQLSAGSRRLMELYVPPESDRLTYHQGGVLSGDISVSILWYGKFTPAQRSIVSDFVVSLNSAPNGAATPSVGQWWGTIEQLYLSKAAAANGQAGATHVLLAEQVTDEQCSLGTSLTLAQIDQLAASVGAKKGGIALVFTDEDVAVEGFCSSRCGRHGSSTGGDSTHIWVGNSVKQCPGQCAWPFAQPQYGPQGAPLVAPNGNVGMDGMVMVLATMVAGTVSNPYGDGYYQGPKGASLEACTACPGVYGSGAYPGYAGNLLVDPSTGASYNANGANGRKYLLPALYDPATASCNTLV

SEQ ID NO: 63780 - protein, 301 aa, Triticum aestivum
  peptide (1)..(301): Ceres Seq. ID no. 12617353
MVLSLAQLSAGSRRLMELYVPPESDRLTYHQGGVLSGDISVSILWYGKFTPAQRSIVSDFVVSLNSAPNGAATPSVGQWWGTIEQLYLSKAAAANGQAGATHVLLAEQVTDEQCSLGTSLTLAQIDQLAASVGAKKGGIALVFTDEDVAVEGFCSSRCGRHGSSTGGDSTHIWVGNSVKQCPGQCAWPFAQPQYGPQGAPLVAPNGNVGMDGMVMVLATMVAGTVSNPYGDGYYQGPKGASLEACTACPGVYGSGAYPGYAGNLLVDPSTGASYNANGANGRKYLLPALYDPATASCNTLV

SEQ ID NO: 63781 - DNA, 599 bp, Triticum aestivum
  misc_feature (1)..(599): Ceres Seq. ID no. 15173361
actcggaaaaagatctccgctttgccctgcctgcctgcgccggacggagccaccccacccaccaaagcgatccgccggaccggcgagcggcgagcggcggagcaagggagagatggcggcgacgggggaggagacggtgcgtgcgtcgcacatcctgatcaagcacgaggggtcccggcgcaaggcgtcctggaaggaccccgagggccgggtcatctccgccaccacgcgcgccgacgccgccgcgcgcctcggcgacctccgcgcccagatcctcgccggccgcggctccttcgccgacctcgccgcgcagcactccgactgctcctccgcccgccgcggcggcgacctagggcctgcggctcttctcattctggcagccccaagcttgaatgaagaaaaatgtcttgtatcgtctcaccattttgctacggccatttgagctggttgataccatcatcacaggtcaatgtttgagcttatgatgtcttgatcgggaaatgtggaaatgtttttttttcttcatttcatctgtgataaatcatttcaaatgaatgttgtatgcaccatgaaatatctcctacttatagtaaggtttc

SEQ ID NO: 63782 - protein, 146 aa, Triticum aestivum
  peptide (1)..(146): Ceres Seq. ID no. 15173362
LGKRSPLCPACLRRTEPPHPPKRSAGPASGERRSKGEMAATGEETVRASHILIKHEGSRRKASWKDPEGRVISATTRADAAARLGDLRAQILAGRGSFADLAAQHSDCSSARRGGDLGPAALLILAAPSLNEEKCLVSSHHFATAI

SEQ ID NO: 63783 - protein, 131 aa, Triticum aestivum
  peptide (1)..(131): Ceres Seq. ID no. 15173363
TRKKISALPCLPAPDGATPPTKAIRRTGERRAAEQGRDGGDGGGDGACVAHPDQARGVPAQGVLEGPRGPGHLRHHARRRRRAPRRPPRPDPRRPRLLRRPRRAALRLLLRPPRRRPRACGSSHSGSPKLE

SEQ ID NO: 63784 - protein, 109 aa, Triticum aestivum
  peptide (1)..(109): Ceres Seq. ID no. 15173364
MAATGEETVRASHILIKHEGSRRKASWKDPEGRVISATTRADAAARLGDLRAQILAGRGSFADLAAQHSDCSSARRGGDLGPAALLILAAPSLNEEKCLVSSHHFATAI

SEQ ID NO: 63785 - DNA, 1006 bp, Triticum aestivum
  misc_feature (1)..(1006): Ceres Seq. ID no. 13597299
atactttcccctaccatcagcagagccacatcagggggcccgggtggaggtttgggtcgctcctactcagaaaccccagattcccaaattcctcctcgacctccatcccgtggaatccaaccaacgcggggaggcacccagcacgccggcggcgatgatccagctcctgttcgtggtgctcgtcgccgaggcggccgtggcgacggtgctgctattcaagacgccgctgcggaagctcgccatgctgggcctcgaccgcctcaagcgcggccgccgggcgcccgtcgccgtcaagaccgttgccggcgtcgtcatcacgctcctcgcctccacgctctacagcatggccgagatcagcggccgcgccggggaccccgaggccggaggcggcgccgccctctctcccaccgaccaggtcctcttctcgcgccacctcctcgaggcgtccctcatgggttacactttgtttcttgctctagttattgaccgactccaccaatatatcagagaactacgtgggctaaagaagaatgtcgaggctgtatcgaagcagaacaaaacgttagaggaaggaaaacatggaagatctcaggagatagcgaaataccaggaagaggttgccactctgaacgaggagatgaagaaactgaagctgcaagtacaagagaagaccgaggaggtccatgttgctgaggacaaggcacttgctattcaaaagcaatctgaaagcttgctgcttgaatatgaccggctcctggaggataaccaacatcttcgggagcagctgcagtcaattgatctcaggctctccaatccttcctgagagaagaatgtattgaagtagaacattatcctatcgtcaacctacttcgtgcttgaaattgtctgtttcacttttggtgcgaagtcgagtttactctttccgtaggatgttattacccagatgacatgctaatttagtaatgcctctcttatcggttttattgtcttacctaacaatatgttg

SEQ ID NO: 63786 - protein, 273 aa, Triticum aestivum
  peptide (1)..(273): Ceres Seq. ID no. 13597300
YFPLPSAEPHQGARVEVWVAPTQKPQIPKFLLDLHPVESNQRGEAPSTPAAMIQLLFVVLVAEAAVATVLLFKTPLRKLAMLGLDRLKRGRRAPVAVKTVAGVVITLLASTLYSMAEISGRAGDPEAGGGAALSPTDQVLFSRHLLEASLMGYTLFLALVIDRLHQYIRELRGLKKNVEAVSKQNKTLEEGKHGRSQEIAKYQEEVATLNEEMKKLKLQVQEKTEEVHVAEDKALAIQKQSESLLLEYDRLLEDNQHLREQLQSIDLRLSNPS

SEQ ID NO: 63787 - protein, 222 aa, Triticum aestivum
  peptide (1)..(222): Ceres Seq. ID no. 13597301
MIQLLFVVLVAEAAVATVLLFKTPLRKLAMLGLDRLKRGRRAPVAVKTVAGVVITLLASTLYSMAEISGRAGDPEAGGGAALSPTDQVLFSRHLLEASLMGYTLFLALVIDRLHQYIRELRGLKKNVEAVSKQNKTLEEGKHGRSQEIAKYQEEVATLNEEMKKLKLQVQEKTEEVHVAEDKALAIQKQSESLLLEYDRLLEDNQHLREQLQSIDLRLSNPS

SEQ ID NO: 63788 - protein, 193 aa, Triticum aestivum
  peptide (1)..(193): Ceres Seq. ID no. 13597302
MLGLDRLKRGRRAPVAVKTVAGVVITLLASTLYSMAEISGRAGDPEAGGGAALSPTDQVLFSRHLLEASLMGYTLFLALVIDRLHQYIRELRGLKKNVEAVSKQNKTLEEGKHGRSQEIAKYQEEVATLNEEMKKLKLQVQEKTEEVHVAEDKALAIQKQSESLLLEYDRLLEDNQHLREQLQSIDLRLSNPS

SEQ ID NO: 63789 - DNA, 760 bp, Triticum aestivum
  misc_feature (1)..(760): Ceres Seq. ID no. 13585373
gtggaccttttgtactagtacttcagacagacagaagcagaagcaaccagccgaagctcgttcctcgtagacagttggacagtcgtctcgatccatcgtccatcccgtctcgccagcagccgaccatggccgcgcaggcgccgccgccgccgccgccggagcagaagatgatggtggccatcgacgagagcgagtgcagccactacgcgctcgagtgggccctgcgcaacctcgcgccccgccgcctcatcctcttcaccgtccagcccttctcccctctcagctacctccccgtcggctccccgcttggcccgtcggtggcgtcgccggagctcatcaggtcggtgaccgagcaccagcggcagctcgcccaggcgctcgtcgacaaggccaaggccatctgcgccgagcacggggttgatgcagagaccgtcatcgaggtgggtgatcccaaggaaaccatatgcgaagctgcggagaagttgaatgttgatctgctcatcctgggaagccacagccgtgggcctgtacaaaggtttttccttggcagtgtgagcaactactgtagccaccacgcgaagtgcccggttcttgttgtgaagaagaaagaatgaaactccgctatctactgtattcatggacatcgtgtgaagaacccttgagatgtgtatctacatgttgtttgtcacagcatctagttgcatacttgcatatgaataaacatactttgccaatttgaaaacaactatatattcagtct

SEQ ID NO: 63790 - protein, 203 aa, Triticum aestivum
  peptide (1)..(203): Ceres Seq. ID no. 13585374
GPFVLVLQTDRSRSNQPKLVPRRQLDSRLDPSSIPSRQQPTMAAQAPPPPPPEQKMMVAIDESECSHYALEWALRNLAPRRLILFTVQPFSPLSYLPVGSPLGPSVASPELIRSVTEHQRQLAQALVDKAKAICAEHGVDAETVIEVGDPKETICEAAEKLNVDLLILGSHSRGPVQRFFLGSVSNYCSHHAKCPVLVVKKKE

SEQ ID NO: 63791 - protein, 162 aa, Triticum aestivum
  peptide (1)..(162): Ceres Seq. ID no. 13585375
MAAQAPPPPPPEQKMMVAIDESECSHYALEWALRNLAPRRLILFTVQPFSPLSYLPVGSPLGPSVASPELIRSVTEHQRQLAQALVDKAKAICAEHGVDAETVIEVGDPKETICEAAEKLNVDLLILGSHSRGPVQRFFLGSVSNYCSHHAKCPVLVVKKKE

SEQ ID NO: 63792 - protein, 148 aa, Triticum aestivum
  peptide (1)..(148): Ceres Seq. ID no. 13585376
MMVAIDESECSHYALEWALRNLAPRRLILFTVQPFSPLSYLPVGSPLGPSVASPELIRSVTEHQRQLAQALVDKAKAICAEHGVDAETVIEVGDPKETICEAAEKLNVDLLILGSHSRGPVQRFFLGSVSNYCSHHAKCPVLVVKKKE

SEQ ID NO: 63793 - DNA, 999 bp, Triticum aestivum
  misc_feature (1)..(999): Ceres Seq. ID no. 15173326
cctatcggcgagaagtgggggagatcttcgtcttccgcactcgcgcgcgcaagctcactcgctccagatcttcccttaccgtcgtagatctcacgaccccaagccgccaagcccccaacgaaaccctagctcgcgcccctccgccgcgtaggggcgccgtcatgggcatcgtgttcacgcggctcttctcgtcggtattcggaaaccgcgaggcccgcatcctcgtcctcggcctcgacaatgccggcaagactactatcctctatcggctgcagatggggggaggtcgtttccacgatcccaagtgggtttcctgttctgcgatcgggttcaacgtggagacggtgcagtacaataacatcaagttccaagtttgggatctcggtggtcaaacaagcatcaggccatactggagatgctacttttcaaacactcaggctatcatatatgttgttgattcaagtgatactgataggctggtaactgcaaaagaagaatttcattccatccttgaggagcatgagctgaaaggtgcggttgtccttgtatatgcaaataaacaggaccttccaggtgcacttaatgatgctgccataactgaatcattagaacttcacaagattaagagccgccaatgggcaattttcaaaacatctgctataaaaggggaggggctttttgaaggcttgaactggctcagtaatgcactcaagtccggaggcagctaatgtaggaggcccagcctccattccgtgaatcattgcttgatggtaaggaacagggacgatgacagccttctcgctagtctgcgtgaaaatgagaatctctttatttttactccggaagttatacacaatcagttttctgtagagtgcttgttgaagtttccagatacaacactaggtgtaccatgtcgagagcaagaatatatttgtagaaaataccgagcaaatgattacggtttgaaatatgtggcttcaccgcgtaaaatttcacccc

SEQ ID NO: 63794 - protein, 241 aa, Triticum aestivum
  peptide (1)..(241): Ceres Seq. ID no. 15173327
YRREVGEIFVFRTRARKLTRSRSSLTVVDLTTPSRQAPNETLARAPPPRRGAVMGIVFTRLFSSVFGNREARILVLGLDNAGKTTILYRLQMGGGRFHDPKWVSCSAIGFNVETVQYNNIKFQVWDLGGQTSIRPYWRCYFSNTQAIIYVVDSSDTDRLVTAKEEFHSILEEHELKGAVVLVYANKQDLPGALNDAAITESLELHKIKSRQWAIFKTSAIKGEGLFEGLNWLSNALKSGGS

SEQ ID NO: 63795 - protein, 188 aa, Triticum aestivum
  peptide (1)..(188): Ceres Seq. ID no. 15173328
MGIVFTRLFSSVFGNREARILVLGLDNAGKTTILYRLQMGGGRFHDPKWVSCSAIGFNVETVQYNNIKFQVWDLGGQTSIRPYWRCYFSNTQAIIYVVDSSDTDRLVTAKEEFHSILEEHELKGAVVLVYANKQDLPGALNDAAITESLELHKIKSRQWAIFKTSAIKGEGLFEGLNWLSNALKSGGS

SEQ ID NO: 63796 - protein, 150 aa, Triticum aestivum
  peptide (1)..(150): Ceres Seq. ID no. 15173329
MGGGRFHDPKWVSCSAIGFNVETVQYNNIKFQVWDLGGQTSIRPYWRCYFSNTQAIIYVVDSSDTDRLVTAKEEFHSILEEHELKGAVVLVYANKQDLPGALNDAAITESLELHKIKSRQWAIFKTSAIKGEGLFEGLNWLSNALKSGGS

SEQ ID NO: 63797 - DNA, 978 bp, Triticum aestivum
  misc_feature (1)..(978): Ceres Seq. ID no. 15173334
atcgtcttgagccggccctcttctccttcctcccactcaaggatacaaggggaacaaggcaggggtctaggtgctactccggcacggtggcacacccatctctcttcaagcttggcccgcccagcaatttgtttgtagctccgccactgctgagacccctacgttcccagccacgccttgcccactcgcgctgtgtgtgcctcggagatggccggcacgtcatgttgtgataggatggtttcccagcttcagtcgacatccaagtactacactggatatcccaaggatctagggccatcaagaatcataccgttcacatcagagcgtcagtttgtgcagctattacatgaaggacggcctgtagttgcggcctttaccattaagtgcacttatacacagcatcttgacaaagtactggaggaagctgctgctacattttatcctcatataacgtttgttcgggtggaatgcccaaagtatcctgggttttgcctcacgaggcaaaagactgagtatccatttcttgaagtattttacaacccagaacaggctgctaacccaggtaagatcgtggatccgagcatcacgaaatactccgcaaaagtcctacctttcaactatgaccagagcgtgtatggatttcgagagtattttaagaagtatgggttcaagtattccgaagcaaactaggtttgtcatggtggagccctgcagagtcagccagtccaactccaactggtttgaatttactttcagcctgtactaacagtgatactgcattcttaagaatcagcaccccctgcatactgggctggctctgccttggcaaatggttggaaaaatggccaagctgttagctaggtttccagtatgctcaagattgtagtagaatttctggatgttgcatgttgttctttgtcaaatctctgaactgcattatcagactcgctattaataaaatatattctgcggctcact

SEQ ID NO: 63798 - protein, 160 aa, Triticum aestivum
  peptide (1)..(160): Ceres Seq. ID no. 15173335
MAGTSCCDRMVSQLQSTSKYYTGYPKDLGPSRIIPFTSERQFVQLLHEGRPVVAAFTIKCTYTQHLDKVLEEAAATFYPHITFVRVECPKYPGFCLTRQKTEYPFLEVFYNPEQAANPGKIVDPSITKYSAKVLPFNYDQSVYGFREYFKKYGFKYSEAN

SEQ ID NO: 63799 - protein, 151 aa, Triticum aestivum
  peptide (1)..(151): Ceres Seq. ID no. 15173336
MVSQLQSTSKYYTGYPKDLGPSRIIPFTSERQFVQLLHEGRPVVAAFTIKCTYTQHLDKVLEEAAATFYPHITFVRVECPKYPGFCLTRQKTEYPFLEVFYNPEQAANPGKIVDPSITKYSAKVLPFNYDQSVYGFREYFKKYGFKYSEAN

SEQ ID NO: 63800 - DNA, 669 bp, Triticum aestivum
  misc_feature (1)..(669): Ceres Seq. ID no. 15173341
acaacactcaaatctgaattccccctcgccaaatctccccgcaccatcgcggatcgcgccaaatctcaaatccgctctagccgccatggacgcctcagccaccggcgccgtctccaaggtgaagaagtacgtggtgggcgcaagcttggcggcggccccaggaagcaggcggtggcgcggtccgtcaaggccgggctgcagttccccgtcggccgcatcggccgcttcctcaagaagggccgctacgcgcagcgcgtcggcatgggcgcccccgtctacctcgcctccgtcctcgagtacctcgccgccgagctgctcgagctcgccggcaacgccgccaaggacaacaagaagtcccgcatcatcccgcgccacctgctgctcgccatccggaacgaccaggagctcggcaagctgctcgccggcgtcaccatcgcgcacggcggtgtgcttcccaacatcaaccccgtgctgctccccaagaagacggccgagaaggagaccaagaaggccgccaagtcccccaagaaggcttagtcgattgtggcaggctatctagtgcatcgtaatagaattagtgtttgcagtttggctaatggtgttgatgtgatgttctgatctgctgagaaaaagatcgtcagaaatctctctgacttacagtaaattcat

SEQ ID NO: 63801 - protein, 185 aa, Triticum aestivum
  peptide (1)..(185): Ceres Seq. ID no. 15173342
QHSNLNSPSPNLPAPSRIAPNLKSALAAMDASATGAVSKVKKYVVGASLAAAPGSRRWRGPSRPGCSSPSAASAASSRRAATRSASAWAPPSTSPPSSSTSPPSCSSSPATPPRTTRSPASSRATCCSPSGTTRSSASCSPASPSRTAVCFPTSTPCCSPRRRPRRRPRRPPSPPRRLSRLWQAI

SEQ ID NO: 63802 - protein, 178 aa, Triticum aestivum
  peptide (1)..(178): Ceres Seq. ID no. 15173343
TTLKSEFPLAKSPRTIADRAKSQIRSSRHGRLSHRRRLQGEEVRGGRKLGGGPRKQAVARSVKAGLQFPVGRIGRFLKKGRYAQRVGMGAPVYLASVLEYLAAELLELAGNAAKDNKKSRIIPRHLLLAIRNDQELGKLLAGVTIAHGGVLPNINPVLLPKKTAEKETKKAAKSPKKA

SEQ ID NO: 63803 - protein, 157 aa, Triticum aestivum
  peptide (1)..(157): Ceres Seq. ID no. 15173344
MDASATGAVSKVKKYVVGASLAAAPGSRRWRGPSRPGCSSPSAASAASSRRAATRSASAWAPPSTSPPSSSTSPPSCSSSPATPPRTTRSPASSRATCCSPSGTTRSSASCSPASPSRTAVCFPTSTPCCSPRRRPRRRPRRPPSPPRRLSRLWQAI

SEQ ID NO: 63804 - protein, 91 aa, Triticum aestivum
  peptide (1)..(91): Ceres Seq. ID no. 15173345
MGAPVYLASVLEYLAAELLELAGNAAKDNKKSRIIPRHLLLAIRNDQELGKLLAGVTIAHGGVLPNINPVLLPKKTAEKETKKAAKSPKKA

SEQ ID NO: 63805 - DNA, 1065 bp, Triticum aestivum
  misc_feature (1)..(1065): Ceres Seq. ID no. 15225478
atcacctcgcgatccccagatcccacacgggaaaaatgtgcacagtggagaagcgcggccgcgtccacctcatcaccctcaccggcgccggtgagcaccgactcagcccatccctcatctcggccctccgcacagccgtggccaccgtccgcgcctcccccggtgccggtgccctcgtgctggccgccgagggcaagtacttctccaacggcttcgaccaagcctgggcgcgcacggtcccgccccacctccacgactccatgagaggagccttccgcgccctcgtggccgacctcctcgcgctgcccatgcccaccgtggccgccgtcacgggccacgcagccgccgccggctgcgcgctggccctcgcgcacgactccgtcgtcatgcgcgcctcccgcgggttcctgtacatgagcgaggtcgacgtcggcctcaagttcgccgactacttcggggagctactccggcagaaggtccccaacgcagcggccaggagggacatggtcctcggggggaagaagatgacggcggctgaggcggtgcggctgggcatcgtggacgcggccgcggacggcggcgtcgaagacgtggtggccgcgggcgtcgcggcagccgaggtgctcgcgacgaggggttgggacggggagatcgtggccgagatccggaaggcgatgtggcccgccgtgtggggcaaggtcaaggaccacggcgccgaggcagcggcagcgcggccgcgtctgtaggctccggtatatcgtacgaggccactccttgtgctcgagcattcgcgtagcctgaagaattgctctggatccacggcatgccgtggatctgggaacttcagctgagaacagagtaatgttcaggaactgctcgaacagaatcgtgtcgccaagaagatccgcaccggcgacatgtgatgagcgcaccgtgctggtggttttccttgtactcctattgatcttcgcatcgggtttcattgactgttgttactctgacggaagctcgttgctgatagacttctgaacttctgaagcatgactgaatgaagagatgaagatg

SEQ ID NO: 63806 - protein, 247 aa, Triticum aestivum
  peptide (1)..(247): Ceres Seq. ID no. 15225479
HLAIPRSHTGKMCTVEKRGRVHLITLTGAGEHRLSPSLISALRTAVATVRASPGAGALVLAAEGKYFSNGFDQAWARTVPPHLHDSMRGAFRALVADLLALPMPTVAAVTGHAAAAGCALALAHDSVVMRASRGFLYMSEVDVGLKFADYFGELLRQKVPNAAARRDMVLGGKKMTAAEAVRLGIVDAAADGGVEDVVAAGVAAAEVLATRGWDGEIVAEIRKAMWPAVWGKVKDHGAEAAAARPRL

SEQ ID NO: 63807 - protein, 236 aa, Triticum aestivum
  peptide (1)..(236): Ceres Seq. ID no. 15225480
MCTVEKRGRVHLITLTGAGEHRLSPSLISALRTAVATVRASPGAGALVLAAEGKYFSNGFDQAWARTVPPHLHDSMRGAFRALVADLLALPMPTVAAVTGHAAAAGCALALAHDSVVMRASRGFLYMSEVDVGLKFADYFGELLRQKVPNAAARRDMVLGGKKMTAAEAVRLGIVDAAADGGVEDVVAAGVAAAEVLATRGWDGEIVAEIRKAMWPAVWGKVKDHGAEAAAARPRL

SEQ ID NO: 63808 - protein, 161 aa, Triticum aestivum
  peptide (1)..(161): Ceres Seq. ID no. 15225481
MRGAFRALVADLLALPMPTVAAVTGHAAAAGCALALAHDSVVMRASRGFLYMSEVDVGLKFADYFGELLRQKVPNAAARRDMVLGGKKMTAAEAVRLGIVDAAADGGVEDVVAAGVAAAEVLATRGWDGEIVAEIRKAMWPAVWGKVKDHGAEAAAARPRL

SEQ ID NO: 63809 - DNA, 658 bp, Triticum aestivum
  misc_feature (1)..(658): Ceres Seq. ID no. 13655523
gtgccaagaaaggatatattcaggcgcagttctactcagatggtgaacgatccatacaccctggtgatagccctcaatagctcgggttctgcagaaggtgaactttatgtggatgatgggaaaagttatgattatcagcaaggggcattcatccatcggcgttttgtatttgcagacaataaactaacttcaatcaatattgcgcctgatagtctgggcaagaaggtgtattcaactgagtgtgtgattgaaagaattatagtgcttgggttatcatcgggagcaaagaaggctatcattgaacctgggaaccaagaagtggaaattgatctgggaccgattagtttaaggagtggttcaaagtctgttgcgccaacagtcaggaggcccaatgttcgtgttgtagatgattggacgataaggatcgcatgatatgcagcccattcacatctggagcctgatgtctccattgttcgctgtcaggctataaactcgagcaatgctagaagcgtagtttcagactcgtaaatgttatctgtggacacccaaatttcattgtttcagacttccagtggacccaaaatttctgcaggtgcctggtacgcatgctgtttgtactcccaattttgacataagtcgtgacataaattgctgatgc

SEQ ID NO: 63810 - protein, 143 aa, Triticum aestivum
  peptide (1)..(143): Ceres Seq. ID no. 13655524
VPRKDIFRRSSTQMVNDPYTLVIALNSSGSAEGELYVDDGKSYDYQQGAFIHRRFVFADNKLTSINIAPDSLGKKVYSTECVIERIIVLGLSSGAKKAIIEPGNQEVEIDLGPISLRSGSKSVAPTVRRPNVRVVDDWTIRIA

SEQ ID NO: 63811 - protein, 130 aa, Triticum aestivum
  peptide (1)..(130): Ceres Seq. ID no. 13655525
MVNDPYTLVIALNSSGSAEGELYVDDGKSYDYQQGAFIHRRFVFADNKLTSINIAPDSLGKKVYSTECVIERIIVLGLSSGAKKAIIEPGNQEVEIDLGPISLRSGSKSVAPTVRRPNVRVVDDWTIRIA

SEQ ID NO: 63812 - DNA, 804 bp, Triticum aestivum
  misc_feature (1)..(804): Ceres Seq. ID no. 15175453
aaaagggtcctcgaatcttgggctgcctccatcgccgccgcctagatcccacgcgtcgccgcagccggcgtcacaccccttccctccccgggttcgtcgccgaacttccccgccgcccgccgcagtctcctcccctccgacctcctgccaccaccgaccgccgccggctcctccccatcttcaactctaccgaccgccaccacccaagctaaaatatcgacccaggaatggcagtgtcctggacacgagtattgaagagtggagttattccaagagacacaactcaattggttgggacaagaggctttgccgttgtggccaagggaaagaaggacggaaaaggtggcgcggctgatgctaaacctgtgcccagcaaagaaatgaagagcacacgtgtgtttggggtgaatatcctgaaggagggttctgacccgaatatccaaccagactctgagtgccctggctggctgtggcacatgatcgacaagcatctggtgctgagcgagcttcggaggaaagatgccaagacgctgccctatgaagaccagaagcgtttcgtcaagctggacaaccggactcgggatcaaggagaacaatgctctcacagctaagaactgatcaggacaatctcatctcatcatagtgtcttcttatctggagtagttgattttgggaataatgtagcattgaagtcaagctcacagtagaatgtagcctatgcgaccgagcatattgtttgtcatgttcttgggaagatttaacttgtgtatcttgcagcaaatgctgtagcaagtttcccatgcc

SEQ ID NO: 63813 - protein, 127 aa, Triticum aestivum
  peptide (1)..(127): Ceres Seq. ID no. 15175454
MAVSWTRVLKSGVIPRDTTQLVGTRGFAVVAKGKKDGKGGAADAKPVPSKEMKSTRVFGVNILKEGSDPNIQPDSECPGWLWHMIDKHLVLSELRRKDAKTLPYEDQKRFVKLDNRTRDQGEQCSHS

SEQ ID NO: 63814 - protein, 117 aa, Triticum aestivum
  peptide (1)..(117): Ceres Seq. ID no. 15175455
KGSSNLGLPPSPPPRSHASPQPASHPFPPRVRRRTSPPPAAVSSPPTSCHHRPPPAPPHLQLYRPPPPKLKYRPRNGSVLDTSIEEWSYSKRHNSIGWDKRLCRCGQGKEGRKRWRG

SEQ ID NO: 63815 - protein, 76 aa, Triticum aestivum
  peptide (1)..(76): Ceres Seq. ID no. 15175456
MKSTRVFGVNILKEGSDPNIQPDSECPGWLWHMIDKHLVLSELRRKDAKTLPYEDQKRFVKLDNRTRDQGEQCSHS

SEQ ID NO: 63816 - DNA, 1052 bp, Triticum aestivum
  misc_feature (1)..(1052): Ceres Seq. ID no. 12617020
gtcataaattctctcccctttcccggatcacacaacctctctccgagtctcctctcttttccagcttttccctccccccaccaaacttccaccccttcctcgagacctccggccacccacccgccaaggcctccctccgctccgcgctgtccccgctggaccaccgcagcactcccctgtccgatcgggaacgaggagagtgtgccacaggagagcgcgatccgtccgtccggccccaagacgagcgccatggcagacgccggctctcatatcgccgccgtcgtcgccacctccatctgcgcccactgtcaacgagaaattccatcgtcaaacatcgacttgcattcctacactgtgctcgtaaccttcaaaagtgcgagcactgtggagaaatggttcccaggaagcttatggaagaacactacaatgaaaatcacgctccggtaaattgctccctgtgcaaagaaaccttgcgaccggagatacttgatcttcacaaaagtgaacagtgcacacagaggatggttgcgtgtgcatattgtgagtacgaattgcctgcaattgatattcatgaacatcaggatgtatgtggaaaccgaacggagttttgtcaaacatgcaagaagtatattagacttcgtgaatggatagggcatgaaatgcagtgccacgttagctcaaatggttctgaagaatcatcaagtgccagaaccattccagagagagaagtgcggcctcctccaccggtacgaccagcgcgtgctgtgcctgctgcacaacacaggcgacttctctttacgattgctgtaactggaatcgccgtcatggttggatcaatactgttccagaaggaggagagtttctaggtccggcagccatggacttcatatgccagagttgttttcaacagtagtatgataagataatataatcttttgatgtataatgttatccccatattcagttggcacgtcttgcttgcttaagagtacagttccagtcatggccttgttggaagaatcgaaataaccatccaaatatttgttgttctc

SEQ ID NO: 63817 - protein, 287 aa, Triticum aestivum
  peptide (1)..(287): Ceres Seq. ID no. 12617021
HKFSPLSRITQPLSESPLFSSFSLPPPNFHPFLETSGHPPAKASLRSALSPLDHRSTPLSDRERGECATGERDPSVRPQDERHGRRRLSYRRRRRHLHLRPLSTRNSIVKHRLAFLHCARNLQKCEHCGEMVPRKLMEEHYNENHAPVNCSLCKETLRPEILDLHKSEQCTQRMVACAYCEYELPAIDIHEHQDVCGNRTEFCQTCKKYIRLREWIGHEMQCHVSSNGSEESSSARTIPEREVRPPPPVRPARAVPAAQHRRLLFTIAVTGIAVMVGSILFQKEESF

SEQ ID NO: 63818 - protein, 157 aa, Triticum aestivum
  peptide (1)..(157): Ceres Seq. ID no. 12617022
MVPRKLMEEHYNENHAPVNCSLCKETLRPEILDLHKSEQCTQRMVACAYCEYELPAIDIHEHQDVCGNRTEFCQTCKKYIRLREWIGHEMQCHVSSNGSEESSSARTIPEREVRPPPPVRPARAVPAAQHRRLLFTIAVTGIAVMVGSILFQKEESF

SEQ ID NO: 63819 - protein, 151 aa, Triticum aestivum
  peptide (1)..(151): Ceres Seq. ID no. 12617023
MEEHYNENHAPVNCSLCKETLRPEILDLHKSEQCTQRMVACAYCEYELPAIDIHEHQDVCGNRTEFCQTCKKYIRLREWIGHEMQCHVSSNGSEESSSARTIPEREVRPPPPVRPARAVPAAQHRRLLFTIAVTGIAVMVGSILFQKEESF

SEQ ID NO: 63820 - DNA, 752 bp, Triticum aestivum
  misc_feature (1)..(752): Ceres Seq. ID no. 13591134
agcgcgtccccattccgatccgttggcttcctgttcatacattctcccctcccggcgccgcctccagcctagggtttcctcccgccgtccgccgccatggctcgccgcagcggaggaggaaggtcttcccgccctgctccacgtgctgctccagtgagaaacccaccagcgccagcccgtcaagctcctccacctgctactacccagaatagcggtggtggtatcatgagtggaattgggtccaccattgctcagggcatggctttcggtactggcagtgccatggcgcacagggctgttgatgctgtgatgggtccccgcaccattcagcatgagactgttgtcggtgaggctgctgcatctatgactccaatggacaatgctgctgatgacaagtgtggcaacccttccaaggccttccaagattgcatcaaccactacggaagcgacatcagcaagtgccagttctacctcgacatgctgaacgagtgccgccgtggaggagcaggagctggtgcaactctttaagctactatctttgcttgattgcggcttaattggtcggaacctgttttcagtcatgatgatgatgatatatatctcctaaataattcattggcaatattatgaacctatgccacagcttatgtctattacctaccctagtttgtggtctctgttgtcctgggagtatttccttgtattgatgttggaattaccttcatggcagtgggtttataaatatggagttt

SEQ ID NO: 63821 - protein, 143 aa, Triticum aestivum
  peptide (1)..(143): Ceres Seq. ID no. 13591135
MARRSGGGRSSRPAPRAAPVRNPPAPARQAPPPATTQNSGGGIMSGIGSTIAQGMAFGTGSAMAHRAVDAVMGPRTIQHETVVGEAAASMTPMDNAADDKCGNPSKAFQDCINHYGSDISKCQFYLDMLNECRRGGAGAGATL

SEQ ID NO: 63822 - protein, 100 aa, Triticum aestivum
  peptide (1)..(100): Ceres Seq. ID no. 13591136
MSGIGSTIAQGMAFGTGSAMAHRAVDAVMGPRTIQHETVVGEAAASMTPMDNAADDKCGNPSKAFQDCINHYGSDISKCQFYLDMLNECRRGGAGAGATL

SEQ ID NO: 63823 - protein, 89 aa, Triticum aestivum
  peptide (1)..(89): Ceres Seq. ID no. 13591137
MAFGTGSAMAHRAVDAVMGPRTIQHETVVGEAAASMTPMDNAADDKCGNPSKAFQDCINHYGSDISKCQFYLDMLNECRRGGAGAGATL

SEQ ID NO: 63824 - DNA, 882 bp, Triticum aestivum
  misc_feature (1)..(882): Ceres Seq. ID no. 13662677
ctcactttccccagcagagcaagcaaccacctcggagaggcagagcgcaatggcaatggcgtccatcctcgtgcaggtgtccgccctgctcctcaacctcatcgccttcggcctcgccgtcgccgccgagcagcgccgcagcaaggccacggtgacgccggatctggccaaggagtacgactactgcgtctacgactcggacgtcgccaccggctacggcgtcggcgcgctgctcctcctcgtcgccgcgcaggccgtcgtcatgctcgccagccgctgcttctgctgcggccgcgggctcaagccggggggctcgcgcgcctgcgccctcatgctcttcctcttctcatggttgaccttcctcgtcgcagcggcgtgtttgctggcaggatcagtccgtaatgcataccacacccggtacagggggatcttcaacggcgacccgctctcttgcgagacgctgcgcaagggcgtcttcgctgctggtgcagccttcaccttcttcaccgccatcctcagcgagttctactacatcagctactccaaatcccgggatgccgccggcggcgctccatacggcggctccagcatcggcatgggcccttacacttaaggagcttgtgtgctggaggtttatggaaaggttcagtccgtttcactttcagggcggatcatgcatatgtagttcgtggagtgcggtgttcttgtttttttttataaaggtgttcttgttaacattagagtggtagatacggtggaaatgagttcgctgtcttcactggttatgtatgagattgcctggtgtgcatccggacatttcgttgttgcagatgttgggtgtaattggtatctccaaatgatattaatatatttcatttgttc

SEQ ID NO: 63825 - protein, 203 aa, Triticum aestivum
  peptide (1)..(203): Ceres Seq. ID no. 13662678
SLSPAEQATTSERQSAMAMASILVQVSALLLNLIAFGLAVAAEQRRSKATVTPDLAKEYDYCVYDSDVATGYGVGALLLLVAAQAVVMLASRCFCCGRGLKPGGSRACALMLFLFSWLTFLVAAACLLAGSVRNAYHTRYRGIFNGDPLSCETLRKGVFAAGAAFTFFTAILSEFYYISYSKSRDAAGGAPYGGSSIGMGPYT

SEQ ID NO: 63826 - protein, 187 aa, Triticum aestivum
  peptide (1)..(187): Ceres Seq. ID no. 13662679
MAMASILVQVSALLLNLIAFGLAVAAEQRRSKATVTPDLAKEYDYCVYDSDVATGYGVGALLLLVAAQAVVMLASRCFCCGRGLKPGGSRACALMLFLFSWLTFLVAAACLLAGSVRNAYHTRYRGIFNGDPLSCETLRKGVFAAGAAFTFFTAILSEFYYISYSKSRDAAGGAPYGGSSIGMGPYT

SEQ ID NO: 63827 - protein, 185 aa, Triticum aestivum
  peptide (1)..(185): Ceres Seq. ID no. 13662680
MASILVQVSALLLNLIAFGLAVAAEQRRSKATVTPDLAKEYDYCVYDSDVATGYGVGALLLLVAAQAVVMLASRCFCCGRGLKPGGSRACALMLFLFSWLTFLVAAACLLAGSVRNAYHTRYRGIFNGDPLSCETLRKGVFAAGAAFTFFTAILSEFYYISYSKSRDAAGGAPYGGSSIGMGPYT

SEQ ID NO: 63828 - DNA, 735 bp, Triticum aestivum
  misc_feature (1)..(735): Ceres Seq. ID no. 12586244
atctcatccatcacacttcacacaagctactagaaagtactctgctcaatcggtcgatgagggtgtcaagcatggcgtccaagggtctcgttgtgtttgctgtcctgcttgctgcggctttcctcgtggccacagctgaacaaactcaggccaagaaggaagagactaaggccggtgttcagggttaccacggcggcggcagcggaggcggtggctaccatggcggcggcggcggcggcggggggtaccctggccacgggggcggcggcggcgggtatcctggccacggtggcggcggaggtggcggcggctaccctggccacggtggtggcggaggtggcggcggctaccctggccatgggggtggcggcggcggcggcggcagcggctgccggtaccagtgctgcgggcacgggcatagtggctgccgctgctgcgcaagccccaacgagatcccggagcccatgtatcgggcggaggtccgcaactaagtatcagatgctacatacggacgttgctacttgcctgcacgtagtaactactcgtatatgtggtcaataagaaggtaggtgcatgtatgtatgtatgtacgcatacgtatagattgcacagttatgttgatccaataatgccaggactctgtcctgatcgtgtattcaccctgtaagacttctctttcttgcataatacatgcaactgtcatgcatgtataacaaaatctcatgactcttgttc

SEQ ID NO: 63829 - protein, 162 aa, Triticum aestivum
  peptide (1)..(162): Ceres Seq. ID no. 12586245
LIHHTSHKLLESTLLNRSMRVSSMASKGLVVFAVLLAAAFLVATAEQTQAKKEETKAGVQGYHGGGSGGGGYHGGGGGGGGYPGHGGGGGGYPGHGGGGGGGGYPGHGGGGGGGGYPGHGGGGGGGGSGCRYQCCGHGHSGCRCCASPNEIPEPMYRAEVRN

SEQ ID NO: 63830 - protein, 144 aa, Triticum aestivum
  peptide (1)..(144): Ceres Seq. ID no. 12586246
MRVSSMASKGLVVFAVLLAAAFLVATAEQTQAKKEETKAGVQGYHGGGSGGGGYHGGGGGGGGYPGHGGGGGGYPGHGGGGGGGGYPGHGGGGGGGGYPGHGGGGGGGGSGCRYQCCGHGHSGCRCCASPNEIPEPMYRAEVRN

SEQ ID NO: 63831 - protein, 139 aa, Triticum aestivum
  peptide (1)..(139): Ceres Seq. ID no. 12586247
MASKGLVVFAVLLAAAFLVATAEQTQAKKEETKAGVQGYHGGGSGGGGYHGGGGGGGGYPGHGGGGGGYPGHGGGGGGGGYPGHGGGGGGGGYPGHGGGGGGGGSGCRYQCCGHGHSGCRCCASPNEIPEPMYRAEVRN

SEQ ID NO: 63832 - DNA, 951 bp, Triticum aestivum
  misc_feature (1)..(951): Ceres Seq. ID no. 12586030
atcaaagaaagtggcagtagggttcgagagagctgctctctgacgatggcgatgctccggtacgccgccagcctggcgctccgccggtcggcatctccacctgacaccgtggtctcgcgcttcttgggcagcgctggatgcggcaaccccgccgccggcctgccgctcctccggcggccgtcacctccgcctggtgttgctgctgctgcgacggcggcggcctctcgcttcttcagcaacggcagccggcctggatccagcaacaccaactcgacgcttggcaagcctattgaggacaccaaggaagatgtgtacccaaggacccgcaagtcacctgccaagatacgcataattctgaaatctttcaataaccagaagaacaatctgaaggagcttgcgccgtacatgcataaggtcgggttgcctgaatcgcggtccttatacaccgtgctgcgatcacctcatattgataagaaatccagggagcaattctcaacgcatgtgaagaaagtgtttgtggagaaaacagcggagacgcatgaactggccaagaagttctactggttgaaacggcttcgtatattgggggctcagtacgaagtcgtcattaatttcaagacacgcttgggtaagaagattggctgcagcaaaggtggtggcctgcttcgacatccaaaacagggttcaggcatagaataaaaaggaggtactagagctgctttcaggccacacacaagctatccatccaacttgtgtggatcttaatttctggccttggtctgatctagcatataagtagtactatatattctatgtaatgtcatatggaactaaggatgcatgtgacctatctgagaatgttcttgtttggtaatcatccatgtatttcgaaagatggtgataataatatgtggagaagaggatcgacgatgcctgtcttctttttttgcg

SEQ ID NO: 63833 - protein, 232 aa, Triticum aestivum
  peptide (1)..(232): Ceres Seq. ID no. 12586031
IKESGSRVRESCSLTMAMLRYAASLALRRSASPPDTVVSRFLGSAGCGNPAAGLPLLRRPSPPPGVAAAATAAASRFFSNGSRPGSSNTNSTLGKPIEDTKEDVYPRTRKSPAKIRIILKSFNNQKNNLKELAPYMHKVGLPESRSLYTVLRSPHIDKKSREQFSTHVKKVFVEKTAETHELAKKFYWLKRLRILGAQYEVVINFKTRLGKKIGCSKGGGLLRHPKQGSGIE

SEQ ID NO: 63834 - protein, 217 aa, Triticum aestivum
  peptide (1)..(217): Ceres Seq. ID no. 12586032
MAMLRYAASLALRRSASPPDTVVSRFLGSAGCGNPAAGLPLLRRPSPPPGVAAAATAAASRFFSNGSRPGSSNTNSTLGKPIEDTKEDVYPRTRKSPAKIRIILKSFNNQKNNLKELAPYMHKVGLPESRSLYTVLRSPHIDKKSREQFSTHVKKVFVEKTAETHELAKKFYWLKRLRILGAQYEVVINFKTRLGKKIGCSKGGGLLRHPKQGSGIE

SEQ ID NO: 63835 - protein, 215 aa, Triticum aestivum
  peptide (1)..(215): Ceres Seq. ID no. 12586033
MLRYAASLALRRSASPPDTVVSRFLGSAGCGNPAAGLPLLRRPSPPPGVAAAATAAASRFFSNGSRPGSSNTNSTLGKPIEDTKEDVYPRTRKSPAKIRIILKSFNNQKNNLKELAPYMHKVGLPESRSLYTVLRSPHIDKKSREQFSTHVKKVFVEKTAETHELAKKFYWLKRLRILGAQYEVVINFKTRLGKKIGCSKGGGLLRHPKQGSGIE

SEQ ID NO: 63836 - DNA, 1031 bp, Triticum aestivum
  misc_feature (1)..(1031): Ceres Seq. ID no. 13597220
acaagtcctcccgagtccacctccttccccttcccccgatcttatcctcggcgaagctgctctaatggcggatccgccggcgtcgtccccggccgacgaggcgcgggatccaggtagctcagaagctgctcctcatgggagtagtacgtcgcaagacacgaaagagcaggaagacatgaaaggagaagcggctgttgcgacctctgaacccgtgagggaggaactggtccagagtgccgttagttttctgagtcaccccaaagtcgtggcatcttccgatgtccagaggcgttccttcctggaaaataaagggctcaccatggacgaaattgaagaagcatttcgacgtttacttagcccaccttcaaactctacaaactcaaatatgtgtgaatctcaaggaagtcctgatcctgaaactttaacccctgtggtgccccggcacccaaaatcatatatggaggtcatggaaatgatacagaggggagagcggccagatgatatccaggatattaatgatgagccaccaaaccctgatcagccaatctcgaaacccagtatggcacccaagcccaagccgtgggagaagcaaggccaacaaagttccggcctggacctgaaagctcacacaagcaaccccagcgaatcgtcgtcaggagttcaaaccgatggcaccagccaggccacgggatcaaacaacagctccggtcacgggaacttgatgctgacggcagagccggctacaggctctgaagcccccgtggatggcgttgccacctcgccaaagcagtaactctggaaatgcatagacgaacggcggtgggatcaggacatgatgtgaatcagcgtcgacctgatgctgcttcagattccagcaccacattgttgcatcttccgttattatcagaaactagtttagtttagggggtcagcgacatttttgggaagctgggattggattcttgctggaaatgagcacctacaatatgtacttatcattggcattgggcaaaaaaaaaaaaaaaaaagct

SEQ ID NO: 63837 - protein, 263 aa, Triticum aestivum
  peptide (1)..(263): Ceres Seq. ID no. 13597221
QVLPSPPPSPSPDLILGEAALMADPPASSPADEARDPGSSEAAPHGSSTSQDTKEQEDMKGEAAVATSEPVREELVQSAVSFLSHPKVVASSDVQRRSFLENKGLTMDEIEEAFRRLLSPPSNSTNSNMCESQGSPDPETLTPVVPRHPKSYMEVMEMIQRGERPDDIQDINDEPPNPDQPISKPSMAPKPKPWEKQGQQSSGLDLKAHTSNPSESSSGVQTDGTSQATGSNNSSGHGNLMLTAEPATGSEAPVDGVATSPKQ

SEQ ID NO: 63838 - protein, 242 aa, Triticum aestivum
  peptide (1)..(242): Ceres Seq. ID no. 13597222
MADPPASSPADEARDPGSSEAAPHGSSTSQDTKEQEDMKGEAAVATSEPVREELVQSAVSFLSHPKVVASSDVQRRSFLENKGLTMDEIEEAFRRLLSPPSNSTNSNMCESQGSPDPETLTPVVPRHPKSYMEVMEMIQRGERPDDIQDINDEPPNPDQPISKPSMAPKPKPWEKQGQQSSGLDLKAHTSNPSESSSGVQTDGTSQATGSNNSSGHGNLMLTAEPATGSEAPVDGVATSPKQ

SEQ ID NO: 63839 - protein, 205 aa, Triticum aestivum
  peptide (1)..(205): Ceres Seq. ID no. 13597223
MKGEAAVATSEPVREELVQSAVSFLSHPKVVASSDVQRRSFLENKGLTMDEIEEAFRRLLSPPSNSTNSNMCESQGSPDPETLTPVVPRHPKSYMEVMEMIQRGERPDDIQDINDEPPNPDQPISKPSMAPKPKPWEKQGQQSSGLDLKAHTSNPSESSSGVQTDGTSQATGSNNSSGHGNLMLTAEPATGSEAPVDGVATSPKQ

SEQ ID NO: 63840 - DNA, 750 bp, Triticum aestivum
  misc_feature (1)..(750): Ceres Seq. ID no. 15175269
aacacctccaactcaaaaggcccccactttgccgtctctttcacctaacaataatatctgcctacctgtcttgcacaccatacaggtccaagcccgcccgcccgcccatagagctcgccgcctccctccctgtctccttccccgcctctctctcgtcgtcgtcccccgcagcgccggccgaagcaaagcacggggacttaaccgccgccatgagctactacggccagcagcagccgcccgtcggcgcgcctccaccgcaagggtatccaggaaaagaggagtacccgccggcaggctaccctccggccgggtacccaccgccggggcagggacaaggctaccctccccagggatacccgccgcagcaggggggttatccgccgcagcaggggtatccgccacagcagggagggtacccgccgcagcaagggtacccgcagcaggggtacccgcctcagtacgcgcagcagccgccgcggcagcagcagagcagtggcccgtccttcatggagggatgcctggccgccctttgttgctgctgtctgttggatgcttgcttctaagttgatttctaagcggcagggaacagacttggtgcagctgctatgtgttccatattggaaattgggattggcttgttgattaatagtagtacttcgtagaggagattacaagaactccttaccgtcatgtttgtatgttcagatgattggtgtaccttttcgcataaaaaaagatgtttgttgtaag

SEQ ID NO: 63841 - protein, 188 aa, Triticum aestivum
  peptide (1)..(188): Ceres Seq. ID no. 15175270
TPPTQKAPTLPSLSPNNNICLPVLHTIQVQARPPAHRARRLPPCLLPRLSLVVVPRSAGRSKARGLNRRHELLRPAAAARRRASTARVSRKRGVPAGRLPSGRVPTAGAGTRLPSPGIPAAAGGLSAAAGVSATAGRVPAAARVPAAGVPASVRAAAAAAAAEQWPVLHGGMPGRPLLLLSVGCLLLS

SEQ ID NO: 63842 - protein, 186 aa, Triticum aestivum
  peptide (1)..(186): Ceres Seq. ID no. 15175271
HLQLKRPPLCRLFHLTIISAYLSCTPYRSKPARPPIELAASLPVSFPASLSSSSPAAPAEAKHGDLTAAMSYYGQQQPPVGAPPPQGYPGKEEYPPAGYPPAGYPPPGQGQGYPPQGYPPQQGGYPPQQGYPPQQGGYPPQQGYPQQGYPPQYAQQPPRQQQSSGPSFMEGCLAALCCCCLLDACF

SEQ ID NO: 63843 - protein, 117 aa, Triticum aestivum
  peptide (1)..(117): Ceres Seq. ID no. 15175272
MSYYGQQQPPVGAPPPQGYPGKEEYPPAGYPPAGYPPPGQGQGYPPQGYPPQQGGYPPQQGYPPQQGGYPPQQGYPQQGYPPQYAQQPPRQQQSSGPSFMEGCLAALCCCCLLDACF

SEQ ID NO: 63844 - DNA, 2292 bp, Triticum aestivum
  misc_feature (1)..(2292): Ceres Seq. ID no. 13655640
acagccgacgaatacaaaacatttcctgattctggcagccgagacggcactgtcaaaccaaggctcctagcaacaagaaagaatgtcgtcccttgtacgccttatcctgacaatctccttgggcctaaacctcgcagccttgatcaccaccgccaacgaccaattcatctactccggattcagtggttccaacctcgccgtcgacgacaccgccaccatcacgccggacgggctcctggagctgacaaacggcacggcgtaccagaaaggccacgcgttccacccggccccgttccgcctccgcgactccacggccaacggcgtcggcgatggcaaggtgcggtccttctccgtcgccttcgtgttcggcatcgtctccgcctaccccgacttcagcgcccacggcatggccttcgtcatcgccccgcggaggaacttctccgatgctcttcctgccaagtatctgggccttaccaacgtccagaacgatggcaacgccagcaacagcatcttcgccgtggagctggacaccatccagagcgtggagttcaaggacatcaacgccaaccacgtcggcatcgacatcaacggcctgcagtccctacggtcatacaacgccggctactacgatgacgagagcggcgacttccgaggcatgaagctcatcagccgcgaggccatgcaagtgtggattgattaccacggggagaggaaggagatcaacgtgacactggctcccttcgacatggccaagcctgctaggccactcctctcggccagctacgacctctccacggtgctcactgagctggtgtatctcgggttctcagcggcgaccggtcgtgtcaactcgcggcatttcgttctcggttggagcttgggcgtgagcagacaagctccggccatcgacatggccaagctgcccaagttgcctcgggttggccccaagcctcggtccaaggtcctggacatcgttctaccaatagttacggccacatttgtacttggtttgggtggtatccttgtcctggtcatgcggaggagatcaaggtacgctgaactgcgggaagattgggaggttgagttcggaccacaccgcttcttgtacaaggatttattccgtgcaactgacggattcaaggacaagcatctacttggcgcaggggggtttggaagggtatacagaggcgtgcttgagacatctaaactggaggttgcggtgaagagggtgtctcacgagtcaagacaggggatgagggagttcatagctgagattacaagcatcggccgcatccgacatcgtaatcttgtagagttgctcggttactgccgtcgaaaaggtgaacttcttttggtgtacgcctacatgcccaacggaagcctggataaacatctatacaacactagagaggatcagcctactctgaattgggctttgaggtttcagaccgtcaaagatgtcgcgtccggcttgctttatctgcatgagaggtgggagaaagttgtcatccacagagacatcaaggccagcaacgtgctcctcgacaaagacatgaacgcccagcttggtgactttgggctagcaaggctgtacgaccatggggcagactcgcaaaccacgcacgtggtcggcaccatgggttacttggctccggagctcatacgcacgggcagggcgtcccctctgaccgatatgttcgcctttggcatattccttcttgaggttgcatgcggacagaaacccatcaaggagaatgcgcaaggcggacagatagcgctcgtcgactgggtgctggagcactggcgtgatggtacgctcatggagacggtggacgcgaggctccagggtgagttcgacatcgaccaggcagggctggtgctcacgctagcgctcatgtgctcacaccttctcgctagcgcgaggcctggcattggacaagtcatgcgctatctgaccggtgttacgcccctccctgagctcacaccaacagatgtgctcaccttgatgcaaaacaaggggtttgacgaatccgccatgtcatatccggatctggtgtcgagctttggcacaatttccaccctctcgggaggaagataacctcagtgctagcttaattcacggcttcaataagttttactagtattatgcatgtgtagtgccagaagttcgtaattagaattgtaaacccaataattatcctttggccgcagtacactttcaaattaccgtggccaacatgtaagaagttatattgttcaaaactcagaactcgaaacaaggtgatacggggc

SEQ ID NO: 63845 - protein, 671 aa, Triticum aestivum
  peptide (1)..(671): Ceres Seq. ID no. 13655641
MSSLVRLILTISLGLNLAALITTANDQFIYSGFSGSNLAVDDTATITPDGLLELTNGTAYQKGHAFHPAPFRLRDSTANGVGDGKVRSFSVAFVFGIVSAYPDFSAHGMAFVIAPRRNFSDALPAKYLGLTNVQNDGNASNSIFAVELDTIQSVEFKDINANHVGIDINGLQSLRSYNAGYYDDESGDFRGMKLISREAMQVWIDYHGERKEINVTLAPFDMAKPARPLLSASYDLSTVLTELVYLGFSAATGRVNSRHFVLGWSLGVSRQAPAIDMAKLPKLPRVGPKPRSKVLDIVLPIVTATFVLGLGGILVLVMRRRSRYAELREDWEVEFGPHRFLYKDLFRATDGFKDKHLLGAGGFGRVYRGVLETSKLEVAVKRVSHESRQGMREFIAEITSIGRIRHRNLVELLGYCRRKGELLLVYAYMPNGSLDKHLYNTREDQPTLNWALRFQTVKDVASGLLYLHERWEKVVIHRDIKASNVLLDKDMNAQLGDFGLARLYDHGADSQTTHVVGTMGYLAPELIRTGRASPLTDMFAFGIFLLEVACGQKPIKENAQGGQIALVDWVLEHWRDGTLMETVDARLQGEFDIDQAGLVLTLALMCSHLLASARPGIGQVMRYLTGVTPLPELTPTDVLTLMQNKGFDESAMSYPDLVSSFGTISTLSGGR

SEQ ID NO: 63846 - protein, 563 aa, Triticum aestivum
  peptide (1)..(563): Ceres Seq. ID no. 13655642
MAFVIAPRRNFSDALPAKYLGLTNVQNDGNASNSIFAVELDTIQSVEFKDINANHVGIDINGLQSLRSYNAGYYDDESGDFRGMKLISREAMQVWIDYHGERKEINVTLAPFDMAKPARPLLSASYDLSTVLTELVYLGFSAATGRVNSRHFVLGWSLGVSRQAPAIDMAKLPKLPRVGPKPRSKVLDIVLPIVTATFVLGLGGILVLVMRRRSRYAELREDWEVEFGPHRFLYKDLFRATDGFKDKHLLGAGGFGRVYRGVLETSKLEVAVKRVSHESRQGMREFIAEITSIGRIRHRNLVELLGYCRRKGELLLVYAYMPNGSLDKHLYNTREDQPTLNWALRFQTVKDVASGLLYLHERWEKVVIHRDIKASNVLLDKDMNAQLGDFGLARLYDHGADSQTTHVVGTMGYLAPELIRTGRASPLTDMFAFGIFLLEVACGQKPIKENAQGGQIALVDWVLEHWRDGTLMETVDARLQGEFDIDQAGLVLTLALMCSHLLASARPGIGQVMRYLTGVTPLPELTPTDVLTLMQNKGFDESAMSYPDLVSSFGTISTLSGGR

SEQ ID NO: 63847 - protein, 480 aa, Triticum aestivum
  peptide (1)..(480): Ceres Seq. ID no. 13655643
MKLISREAMQVWIDYHGERKEINVTLAPFDMAKPARPLLSASYDLSTVLTELVYLGFSAATGRVNSRHFVLGWSLGVSRQAPAIDMAKLPKLPRVGPKPRSKVLDIVLPIVTATFVLGLGGILVLVMRRRSRYAELREDWEVEFGPHRFLYKDLFRATDGFKDKHLLGAGGFGRVYRGVLETSKLEVAVKRVSHESRQGMREFIAEITSIGRIRHRNLVELLGYCRRKGELLLVYAYMPNGSLDKHLYNTREDQPTLNWALRFQTVKDVASGLLYLHERWEKVVIHRDIKASNVLLDKDMNAQLGDFGLARLYDHGADSQTTHVVGTMGYLAPELIRTGRASPLTDMFAFGIFLLEVACGQKPIKENAQGGQIALVDWVLEHWRDGTLMETVDARLQGEFDIDQAGLVLTLALMCSHLLASARPGIGQVMRYLTGVTPLPELTPTDVLTLMQNKGFDESAMSYPDLVSSFGTISTLSGGR

SEQ ID NO: 63848 - DNA, 1866 bp, Triticum aestivum
  misc_feature (1)..(1866): Ceres Seq. ID no. 12465371
cccgaataacctcggattccaggattcccattcggtgataccgcgaggggctccacctccggctcgcctcaaccctaaccccctgcccccctcccctccggcgagatgcccaccggcgcctcggcgtgacgcgacccctcgtcggcggcgaggagcgcgaaccggtggcggcggagggtggatcgagatggaggcgaggcctcggccttccggcgtgcggagggtgaccgccaagaagcggccgaggccggatgcgtcctccaacagcgcgcggaagctacagcgccgggagattgccgcattccccgagcgcaccttcgccgccagcaccacgcgggagcggttccgcaacatccagctccaggaagaatttgatacatatgatcctaaggagaacagttcgctactaccttacttgaggaagcggtctgaaattatcgagatagttggagcccgtgatattatctttgctttatcacagctgggagtatgtgctgcgttcagtagagtgacaaaccagcggatttgctttctgaatggaagtccagatgaagtcatccgtagtttgttctataacaagaacaatgactcgcttataaccgtatcagtttatggttctgaaaatttcagtgctttaagatgcaggacaactcgaatcgagtatatacgccgtggaaagccagatgctggtttccctctttttgagacagaatcgttaaggtggcctggtttcgtggaatttgatgatgtaaacggaaaagtgctgacttactctgctcaagacagtacttacaaggtgtttgacttgaagaattacacacttctgtatacgatatctgataaagatgttcaagagataaaaatcagccctggtataatgctattgatatactctagaaaaaagggctatattcctcttgagattctttctattgaagatggtaagcgcttgaagtcattcaggcatcttcttcatcgcaacaagaagatcgatttcatcgagcaattcaatgaaaagcttctagttaagcaggatggggagaaccttcaaattcttgatgtaacaaactctaagatcacagaagtgagcagcaatgagtttgtgactccatcagcttttatttttctgtacgagatgcagttgttcctgaccttccgtaatcgatcagtatcagtttggaatttccgtggtgaactggtgacatcctttgaggatcatttgttgtggcatcctgattgcaatacaaacagtatttacataactagcaaccaagacctcattatctcttactgcaaagctgaaccggatgatccatcttcagaagacaatgcctgttctataaacatcagcgacatattgaccgggaaatgcatggccaagataaaggcagggaacctgtgcaaacagaagtcgtcgaagttcctgtgcacgcctctagaggccctgggcgacattacatctctgtactacgacgaagagcgtgaggagatcatcaccggcaaccatcaaggcctcatccatgtgtggtcaaattaacagcttggtccagtgcaggcaggttacatcaggcaccaggggatcttcgttagcatttagctagtagtggcaccagtttagtgggcagcctgacctagccgtgggtatctttcgccgcatgggccttcatgttgggaatgtttgtgtatagtactgtagttcatccatcgccagcctgttagctatttgacatttgtcatgtgttttttgggggatccgtgtagctttaggagatgcttatcataggggtcatcgaagagggaaagtttcgggtgcatcgcatgtaagcattattgacctttaagctatttatctgattctgatttccg

SEQ ID NO: 63849 - protein, 511 aa, Triticum aestivum
  peptide (1)..(511): Ceres Seq. ID no. 12465372
PNNLGFQDSHSVIPRGAPPPARLNPNPLPPSPPARCPPAPRRDATPRRRRGARTGGGGGWIEMEARPRPSGVRRVTAKKRPRPDASSNSARKLQRREIAAFPERTFAASTTRERFRNIQLQEEFDTYDPKENSSLLPYLRKRSEIIEIVGARDIIFALSQLGVCAAFSRVTNQRICFLNGSPDEVIRSLFYNKNNDSLITVSVYGSENFSALRCRTTRIEYIRRGKPDAGFPLFETESLRWPGFVEFDDVNGKVLTYSAQDSTYKVFDLKNYTLLYTISDKDVQEIKISPGIMLLIYSRKKGYIPLEILSIEDGKRLKSFRHLLHRNKKIDFIEQFNEKLLVKQDGENLQILDVTNSKITEVSSNEFVTPSAFIFLYEMQLFLTFRNRSVSVWNFRGELVTSFEDHLLWHPDCNTNSIYITSNQDLIISYCKAEPDDPSSEDNACSINISDILTGKCMAKIKAGNLCKQKSSKFLCTPLEALGDITSLYYDEEREEIITGNHQGLIHVWSN

SEQ ID NO: 63850 - protein, 449 aa, Triticum aestivum
  peptide (1)..(449): Ceres Seq. ID no. 12465373
MEARPRPSGVRRVTAKKRPRPDASSNSARKLQRREIAAFPERTFAASTTRERFRNIQLQEEFDTYDPKENSSLLPYLRKRSEIIEIVGARDIIFALSQLGVCAAFSRVTNQRICFLNGSPDEVIRSLFYNKNNDSLITVSVYGSENFSALRCRTTRIEYIRRGKPDAGFPLFETESLRWPGFVEFDDVNGKVLTYSAQDSTYKVFDLKNYTLLYTISDKDVQEIKISPGIMLLIYSRKKGYIPLEILSIEDGKRLKSFRHLLHRNKKIDFIEQFNEKLLVKQDGENLQILDVTNSKITEVSSNEFVTPSAFIFLYEMQLFLTFRNRSVSVWNFRGELVTSFEDHLLWHPDCNTNSIYITSNQDLIISYCKAEPDDPSSEDNACSINISDILTGKCMAKIKAGNLCKQKSSKFLCTPLEALGDITSLYYDEEREEIITGNHQGLIHVWSN

SEQ ID NO: 63851 - DNA, 830 bp, Triticum aestivum
  misc_feature (1)..(830): Ceres Seq. ID no. 13597309
ccaaattagttagagctttctctcttctcttctcttctcttctcttctcttctcttctctgctctccactgtccaggaacagcaggagcaggaaaaagaaaaagaggaggaagaagatgtcgatcaagcactgcgacaagcacgactgcgagcggcggcggctgtaccgccagttctgcgccgccctggtggccgtcatcctgctcatcctgctcatcgtcctcatcgtctggctcgtgctccgccccaccaggccgcgcttctacctcaacggcctcaccgtggcgtgcctcaacgccacctcctccccggcgtcctacctcaccgtgacgctgcaagcgacgatcgccgcccgcaaccccaactcccgcgtcggcatctacttcgaccggatggacgcctacgccgagtacaaggggcagcaggtgaccgtccccaccgcgcttcccgtggtgtaccagggccacctcgacgtgtccgtgtggtcgccgttcctggtggggtcgaacgtgccgctggccccctacctggcggtggcgctggcgcaggacgagacggccggctacgtgctgctcacggtgcgggtggacggctggatcaggtggaaggccggggccttcatcaccgggcactaccacctccgggtcaggtgccccgccctgctcaccgtcaacggagggcagggcagctacggctccatcgccggcggcggcgggaacggctacttcaacttccagcgcgccgcgccatgcgttgtcgacgtctgaacccaaccgttctctgaaatccagagcccttttggttctgctgggccgtccctgaaactaatt

SEQ ID NO: 63852 - protein, 254 aa, Triticum aestivum
  peptide (1)..(254): Ceres Seq. ID no. 13597310
KLVRAFSLLFSSLLFSSLLCSPLSRNSRSRKKKKRRKKMSIKHCDKHDCERRRLYRQFCAALVAVILLILLIVLIVWLVLRPTRPRFYLNGLTVACLNATSSPASYLTVTLQATIAARNPNSRVGIYFDRMDAYAEYKGQQVTVPTALPVVYQGHLDVSVWSPFLVGSNVPLAPYLAVALAQDETAGYVLLTVRVDGWIRWKAGAFITGHYHLRVRCPALLTVNGGQGSYGSIAGGGGNGYFNFQRAAPCVVDV

SEQ ID NO: 63853 - protein, 216 aa, Triticum aestivum
  peptide (1)..(216): Ceres Seq. ID no. 13597311
MSIKHCDKHDCERRRLYRQFCAALVAVILLILLIVLIVWLVLRPTRPRFYLNGLTVACLNATSSPASYLTVTLQATIAARNPNSRVGIYFDRMDAYAEYKGQQVTVPTALPVVYQGHLDVSVWSPFLVGSNVPLAPYLAVALAQDETAGYVLLTVRVDGWIRWKAGAFITGHYHLRVRCPALLTVNGGQGSYGSIAGGGGNGYFNFQRAAPCVVDV

SEQ ID NO: 63854 - DNA, 547 bp, Triticum aestivum
  misc_feature (1)..(547): Ceres Seq. ID no. 13597312
tcgttcgtttcagatcagatccagcgagagagagagacagagaaatccccaatccaccaaaccctaacccacacccactaggagagatcggcgagagagatcaggcgatggccgttgagaagatgcagtttgccatgccgatggccaccggcttcgagggatttccctacatcccgttccaggcggagaaggagcaggcgcaggcgttcgtcagggccagggcggagccggaggaggaggcggcgctcgtcatggtcaggacgaagccagaggcggcgatccgcaatgccaagtccaaggcgtccctgaaggccaaggccaaggcagagaaggaggcggaggtcctcaaggccaaggcggagaaggaagcggcgatcctcaaggccaaggcggaggcagagaaggaggaagcgatcaaggccaaggccaaggcggcgaaggaggagacgatcatcaaggccaactgctgctgcggctcggacgaggacgatgtgccgtacgacaagctgtgccacgactccgactcggaggaagacccggatataat

SEQ ID NO: 63855 - protein, 181 aa, Triticum aestivum
  peptide (1)..(181): Ceres Seq. ID no. 13597313
VRFRSDPARERDREIPNPPNPNPHPLGEIGERDQAMAVEKMQFAMPMATGFEGFPYIPFQAEKEQAQAFVRARAEPEEEAALVMVRTKPEAAIRNAKSKASLKAKAKAEKEAEVLKAKAEKEAAILKAKAEAEKEEAIKAKAKAAKEETIIKANCCCGSDEDDVPYDKLCHDSDSEEDPDI

SEQ ID NO: 63856 - protein, 146 aa, Triticum aestivum
  peptide (1)..(146): Ceres Seq. ID no. 13597314
MAVEKMQFAMPMATGFEGFPYIPFQAEKEQAQAFVRARAEPEEEAALVMVRTKPEAAIRNAKSKASLKAKAKAEKEAEVLKAKAEKEAAILKAKAEAEKEEAIKAKAKAAKEETIIKANCCCGSDEDDVPYDKLCHDSDSEEDPDI

SEQ ID NO: 63857 - protein, 141 aa, Triticum aestivum
  peptide (1)..(141): Ceres Seq. ID no. 13597315
MQFAMPMATGFEGFPYIPFQAEKEQAQAFVRARAEPEEEAALVMVRTKPEAAIRNAKSKASLKAKAKAEKEAEVLKAKAEKEAAILKAKAEAEKEEAIKAKAKAAKEETIIKANCCCGSDEDDVPYDKLCHDSDSEEDPDI

SEQ ID NO: 63858 - DNA, 1500 bp, Triticum aestivum
  misc_feature (1)..(1500): Ceres Seq. ID no. 13597254
atatatattaatactggcagccgctgccagtgctccgagctcgacgccatcgcgatctccctccagtctcccctccgcccatcacccgtcgccgtcgcagccccgcccctaaaatactcccgcgcccctcctagccgccacccgccatccgtcccccgaaaatctcccagcgcagccgaactgaggtcacccgccctccccctcggccgatttactcctcggcttccctcccctgtttgaggcaatggcggcggcggagaacggcgggggcggggagagcaaggcggcgttcgcgcggatctacgacgcgctcaaggcggagctgctccgggaccccgccttcgagtacacggagtcgtcgcacgagtggatcgaccgcatgctggactacaatgtactgggaggaaagtgcaaccgtgggctctccgtggtcgatagctataagctgttgaaaggtgtcgatgttcttagtgaggaggagatgtttcttgcctccactctcggttggtgcattgaatggctccaagccttctttcttgtgcttgatgatatcatggacgactcccacactcgacgtgggcagccttgttggtttagggtgtctcgggttggcttgattgctgtaaatgatgggattctccttcgcaaccatatttcgagaatgcttcggctccactttaagaagaagccttactatgccgatctccttgatttattcaacgaggttgagttcaagacagcttctggtcaaatgctggatcttattacaacccacgagggagaaaaagatctaacaaaatataacattggagtccaccgccgaattgttcaattcaagacagcctactattcattttatctgccggttgcatgtgcgctgctactctctggtgagagtttggagaactacggtgctgtagagaacatacttgtcgagatgggaacttacttccaagttcaggatgattatctagactgttatggtgatcctgaatttattggcaagattggcaccgacattgaagattacaagtgctcctggctagttgtccaagctcttgagcgtgctgatgagagccaaaagagcattctatttgaaaactatggaaagaaagatccagcatgcgtggcaaaagtgaaggatctctacaaagaacttgaccttgaggcggtatttcatgagtacgagagcgagagctacaagaagctgattgctggtatcgaagcccagccgagcgacgctgttcagaaggttctgaagtccttcttgcacaagatctacaagaggcagaagtagggtgtctcttgggcaggaaatctgctccattgtcgcatgtttgatagatgactagtggtgttgattttatggtttagtgcttcatgttgtatgttgcgccttgctgctcccagtagtaataatgatgcaaggcgctatttcgggtttaatggaccgccttggtgtagacgactgatggttctgtaatttgcaccttgcccttt

SEQ ID NO: 63859 - protein, 350 aa, Triticum aestivum
  peptide (1)..(350): Ceres Seq. ID no. 15222057
MAAAENGGGGESKAAFARIYDALKAELLRDPAFEYTESSHEWIDRMLDYNVLGGKCNRGLSVVDSYKLLKGVDVLSEEEMFLASTLGWCIEWLQAFFLVLDDIMDDSHTRRGQPCWFRVSRVGLIAVNDGILLRNHISRMLRLHFKKKPYYADLLDLFNEVEFKTASGQMLDLITTHEGEKDLTKYNIGVHRRIVQFKTAYYSFYLPVACALLLSGESLENYGAVENILVEMGTYFQVQDDYLDCYGDPEFIGKIGTDIEDYKCSWLVVQALERADESQKSILFENYGKKDPACVAKVKDLYKELDLEAVFHEYESESYKKLIAGIEAQPSDAVQKVLKSFLHKIYKRQK

SEQ ID NO: 63860 - protein, 305 aa, Triticum aestivum
  peptide (1)..(305): Ceres Seq. ID no. 15222058
MLDYNVLGGKCNRGLSVVDSYKLLKGVDVLSEEEMFLASTLGWCIEWLQAFFLVLDDIMDDSHTRRGQPCWFRVSRVGLIAVNDGILLRNHISRMLRLHFKKKPYYADLLDLFNEVEFKTASGQMLDLITTHEGEKDLTKYNIGVHRRIVQFKTAYYSFYLPVACALLLSGESLENYGAVENILVEMGTYFQVQDDYLDCYGDPEFIGKIGTDIEDYKCSWLVVQALERADESQKSILFENYGKKDPACVAKVKDLYKELDLEAVFHEYESESYKKLIAGIEAQPSDAVQKVLKSFLHKIYKRQK

SEQ ID NO: 63861 - protein, 271 aa, Triticum aestivum
  peptide (1)..(271): Ceres Seq. ID no. 15222059
MFLASTLGWCIEWLQAFFLVLDDIMDDSHTRRGQPCWFRVSRVGLIAVNDGILLRNHISRMLRLHFKKKPYYADLLDLFNEVEFKTASGQMLDLITTHEGEKDLTKYNIGVHRRIVQFKTAYYSFYLPVACALLLSGESLENYGAVENILVEMGTYFQVQDDYLDCYGDPEFIGKIGTDIEDYKCSWLVVQALERADESQKSILFENYGKKDPACVAKVKDLYKELDLEAVFHEYESESYKKLIAGIEAQPSDAVQKVLKSFLHKIYKRQK

SEQ ID NO: 63862 - DNA, 1571 bp, Triticum aestivum
  misc_feature (1)..(1571): Ceres Seq. ID no. 13598488
caccctaatcgaaaaaacttttgcttcgccgtggaagggatcgtcgtagctggcttagcttgctgctttgcttccaagtgttgctgctggtggtgctgtggtagtgtggtgtgaggtgtgatggagctgcaggggctggggaggtactggggcgtgggcggcaggaggtgcgggtcgtgccgggggtcgccggcggcggtgcactgccggacgtgcgatgggggcagtggggacggggcgtacctgtgcgcgggctgtggcgaggggcacgcgcgggcggggcacgagagggtgtgggtctgcgaggtgtgcgagctcgcgccggccgcggtcacctgcaaggccgacgccgccgcgctctgcgccgcctgcgacgccgacatccaccacgccaacccgctcgcgcgccgccacgagcgcgtccccgtgcagcccatcgggtcctcgtcacccgaggggcaggagcaggagcaggatgcgttcgtgatgtcgttcggcggctcggtcgacggggagaagcagcagaaccccgtggtgaacctgaacgacgctctggaggccggcgccggcgggaaggagaacgtgaagctggacttcctgttcgcggacatgatggaccctttcttcggctccgagctcccgcgcttcccgcacgccgacagcgttgtccccagcggcggcgcggtggagctggacttcggtggcgtcgccgcccccgtcgtcgtctccaacccgtcctacagctcctacacggcggcgtcgctcggtggaagtggctcgtcgtcggaggtcggcttggtgccggacgcgatctgtggccgaggcggcggcatcatcgagctggacttcgcacagtccaaggccgcgtacctgccctacacccccacaccaagccacagtaccgtctcctcggtggatgttgggtcggtgccggagcggagcgacagcgccgtcgcggcggcgacgccggcgacgggggaggggagggaggcgcgtctgatgcggtaccgcgagaagcgcaagaaccggcggttcgagaagaccatccggtacgcgtcccggaaggcctacgccgagagcaggccgcgcgtcaagggccgcttcgccaagcgcgccgacgacgcggacaccgacgccgtcgcggcggccacgatcaccacgccggggccatgcgtgctcgacttcggcagctacggcgtcgtgcccaccttctgaggcggcgcctgatttcgtgtccatttcctccggcgagcgtgccggctgggtgcctaattaaatccggcaccgccatggccggcacgagcgcgccgacgtgcatgcgtcgtgttccctcttgtataattgcatgtaatgtttttcgagctggctgatcgctggctggcgtgtagtatactgtaatcaacatgcacgcacgcacgcacgcatgttttgctagaactagaataatacagatagttctagttgactagtctactaccctgtaccctttccctgggctagcttgatgccaaattaggctagggcaatgtaacgtgtttgctggaacagcttagttctagttttggatccgc

SEQ ID NO: 63863 - protein, 364 aa, Triticum aestivum
  peptide (1)..(364): Ceres Seq. ID no. 13598489
MELQGLGRYWGVGGRRCGSCRGSPAAVHCRTCDGGSGDGAYLCAGCGEGHARAGHERVWVCEVCELAPAAVTCKADAAALCAACDADIHHANPLARRHERVPVQPIGSSSPEGQEQEQDAFVMSFGGSVDGEKQQNPVVNLNDALEAGAGGKENVKLDFLFADMMDPFFGSELPRFPHADSVVPSGGAVELDFGGVAAPVVVSNPSYSSYTAASLGGSGSSSEVGLVPDAICGRGGGIIELDFAQSKAAYLPYTPTPSHSTVSSVDVGSVPERSDSAVAAATPATGEGREARLMRYREKRKNRRFEKTIRYASRKAYAESRPRVKGRFAKRADDADTDAVAAATITTPGPCVLDFGSYGVVPTF

SEQ ID NO: 63864 - protein, 242 aa, Triticum aestivum
  peptide (1)..(242): Ceres Seq. ID no. 13598490
MSFGGSVDGEKQQNPVVNLNDALEAGAGGKENVKLDFLFADMMDPFFGSELPRFPHADSVVPSGGAVELDFGGVAAPVVVSNPSYSSYTAASLGGSGSSSEVGLVPDAICGRGGGIIELDFAQSKAAYLPYTPTPSHSTVSSVDVGSVPERSDSAVAAATPATGEGREARLMRYREKRKNRRFEKTIRYASRKAYAESRPRVKGRFAKRADDADTDAVAAATITTPGPCVLDFGSYGVVPTF

SEQ ID NO: 63865 - protein, 201 aa, Triticum aestivum
  peptide (1)..(201): Ceres Seq. ID no. 13598491
MMDPFFGSELPRFPHADSVVPSGGAVELDFGGVAAPVVVSNPSYSSYTAASLGGSGSSSEVGLVPDAICGRGGGIIELDFAQSKAAYLPYTPTPSHSTVSSVDVGSVPERSDSAVAAATPATGEGREARLMRYREKRKNRRFEKTIRYASRKAYAESRPRVKGRFAKRADDADTDAVAAATITTPGPCVLDFGSYGVVPTF

SEQ ID NO: 63866 - DNA, 1413 bp, Triticum aestivum
  misc_feature (1)..(1413): Ceres Seq. ID no. 13655684
acccgcgacgaattccgcaaggagagaacgcgaaatatagatccgccgtgaaggcccaacggcggctcaccgaaacccggggccgccgccggcgctcgcacccgaagcccccactccgcacgggcagtccaggcagagatggtggcgatctcgatgtaccgcggcaacctccaccggggcggggacgacgccgcgcgccgctggccggtgcccccacccacgctctccgcgtcccagttccgccgcctcctccaccgccggtccctcgccgtctcccgcctcgccggggctccccggcccaactcccccaactcccgcccggacgacggcgccgcggggcccgtggccgtgggggaggcgccggaggtggacgggggtcagcagcagcatcaggccgagcggcaggaggaggaggggcatgatgtgcagatgcagcagcagcagcagcagggggaggaagaggggcagggtgtgcaggatcaacagggggagggagatggccaagacgagcagcagcaaggagatgaggaggagcaggaggagggggcggtggaggatgtggaaatggacgatgcggnggaggtggtcgccggagatgctgatgccggcggcaatggtgaccctgaagaagggcaaggcgaaagcgaaggcttcgaccccaactcggaggtgggtcaacctgatggagttgaagaaaggaagagagagttgactgacaagctggataccttaagtaagaaaaagcatgatcttgtgcagatgctgaagcagattttaaatgccgaagaagaaatcagaacacgtagcatgcaggtttcgctgcgtgctgccatgcctcagccgccagaaaacacagctgatggaagtgttcctagacaggtgccgagaatgaccgttgatgtcaatttcagcgagtttgctggggagtcagatgctggttccaaccagggcactcctgggcgccccttgcatcatgtccacagtatttctccttcaacagcctcctttgctaggtctccattcggttctcgcaaccacaaacctcgcaacactccaagaagtccagcacctttctttacagcaagcccgtctcgcttcgcaggtaccgggcatcaaggacaccacccctcggcatcattaccagcaggcaactttgtagcatcgtcgccttcccctgctgcatccggtggctcttcctctgtattcagggactatcgcccgcccagttcaacataattccacaaaacccgaatgaaggccaatgtacatgagtcaccctgaatagtttgaatgctctttgtgctcctccttgcattgttactttattgacaatattatcagattgcgaagagcaactcagggagaacaaggtcatgttgaagtatcattttgtatatctgngccagtgctgct

SEQ ID NO: 63867 - protein, 365 aa, Triticum aestivum
  peptide (1)..(365): Ceres Seq. ID no. 13655685
  misc_feature (147)..(147): Xaa is any aa, unknown or other
MVAISMYRGNLHRGGDDAARRWPVPPPTLSASQFRRLLHRRSLAVSRLAGAPRPNSPNSRPDDGAAGPVAVGEAPEVDGGQQQHQAERQEEEGHDVQMQQQQQQGEEEGQGVQDQQGEGDGQDEQQQGDEEEQEEGAVEDVEMDDAXEVVAGDADAGGNGDPEEGQGESEGFDPNSEVGQPDGVEERKRELTDKLDTLSKKKHDLVQMLKQILNAEEEIRTRSMQVSLRAAMPQPPENTADGSVPRQVPRMTVDVNFSEFAGESDAGSNQGTPGRPLHHVHSISPSTASFARSPFGSRNHKPRNTPRSPAPFFTASPSRFAGTGHQGHHPSASLPAGNFVASSPSPAASGGSSSVFRDYRPPSST

SEQ ID NO: 63868 - protein, 360 aa, Triticum aestivum
  peptide (1)..(360): Ceres Seq. ID no. 13655686
  misc_feature (142)..(142): Xaa is any aa, unknown or other
MYRGNLHRGGDDAARRWPVPPPTLSASQFRRLLHRRSLAVSRLAGAPRPNSPNSRPDDGAAGPVAVGEAPEVDGGQQQHQAERQEEEGHDVQMQQQQQQGEEEGQGVQDQQGEGDGQDEQQQGDEEEQEEGAVEDVEMDDAXEVVAGDADAGGNGDPEEGQGESEGFDPNSEVGQPDGVEERKRELTDKLDTLSKKKHDLVQMLKQILNAEEEIRTRSMQVSLRAAMPQPPENTADGSVPRQVPRMTVDVNFSEFAGESDAGSNQGTPGRPLHHVHSISPSTASFARSPFGSRNHKPRNTPRSPAPFFTASPSRFAGTGHQGHHPSASLPAGNFVASSPSPAASGGSSSVFRDYRPPSST

SEQ ID NO: 63869 - protein, 268 aa, Triticum aestivum
  peptide (1)..(268): Ceres Seq. ID no. 13655687
  misc_feature (50)..(50): Xaa is any aa, unknown or other
MQQQQQQGEEEGQGVQDQQGEGDGQDEQQQGDEEEQEEGAVEDVEMDDAXEVVAGDADAGGNGDPEEGQGESEGFDPNSEVGQPDGVEERKRELTDKLDTLSKKKHDLVQMLKQILNAEEEIRTRSMQVSLRAAMPQPPENTADGSVPRQVPRMTVDVNFSEFAGESDAGSNQGTPGRPLHHVHSISPSTASFARSPFGSRNHKPRNTPRSPAPFFTASPSRFAGTGHQGHHPSASLPAGNFVASSPSPAASGGSSSVFRDYRPPSST

SEQ ID NO: 63870 - DNA, 1208 bp, Triticum aestivum
  misc_feature (1)..(1208): Ceres Seq. ID no. 13597245
tcgcatccctagctacaaacaactcccttgcatttggagaccgacctattgctatctgtcacagtagtagtacaacaagcgccaccggtaagatggaattccaggggcagcagggcaaccgcgtggaccagcacggcaacccggtcgccgccgcacctggagccaccgccgtgacgggggcgcccgccggcgggcagctgcagcccggcagggaggagcacaagacccgcggcatactccaccggtccagcagctccagctccagctcgtccgaggacgatggcatgggtggacggaggaagaagggcatcaaggagaagatcaaggataagcttcccggggctcgcaagcagacttacggccagcccgccgcgcccgcgggcatgaccggcaccggggcgaccggcggcccttactacgtgcagcccgctccggctggcaccggagcgcacgggaccacggcgacgaccggcacctacgggcagcccgctccggctggcatgaccggcaccggggcgcacgggaccacggcgactggtgagaagaagggcatgaaggacaagatcatggagaaactcccgggaggtcacaagaacgagcagcacaccatgcccaccgccggcgcctacggacagcccgggatgactggcaccggagtgcatgggaacaccgctcccggtgggggctatggtggtcagccagggcacgctggtatgatcggcactggaacgcatgggagcgggacaacgggcggtccttacgatcatcaagggcaccccggagtgaccggcaccggagcacacgggaccacggcgaccggcggtgcttacaaccagcaaggtcacgctggggtgacaggcaccggcgagaagaaaggtattatgggcaagatcaaggaaaagctgcctggccagcactaggcgccagtcagcgtgtttgtgaacaataggtacgagcggaggtggagcaataagcctataagtggctcacgtttgtgtgtagcgttggagtagttggtatgctgcagtactgtactgtgacgtagtgcggatgacacgtggagtcaggtgctagagtccacacgacagcgatcgtatcgtactgcagaagatctcaaccctatgtcgatgtatgagcatgttgtaagttgtaaccgttgtgtgaagtttcactatgttaaatattactttgtgtgcgcacaataatgg

SEQ ID NO: 63871 - protein, 305 aa, Triticum aestivum
  peptide (1)..(305): Ceres Seq. ID no. 13597246
ASLATNNSLAFGDRPIAICHSSSTTSATGKMEFQGQQGNRVDQHGNPVAAAPGATAVTGAPAGGQLQPGREEHKTRGILHRSSSSSSSSSEDDGMGGRRKKGIKEKIKDKLPGARKQTYGQPAAPAGMTGTGATGGPYYVQPAPAGTGAHGTTATTGTYGQPAPAGMTGTGAHGTTATGEKKGMKDKIMEKLPGGHKNEQHTMPTAGAYGQPGMTGTGVHGNTAPGGGYGGQPGHAGMIGTGTHGSGTTGGPYDHQGHPGVTGTGAHGTTATGGAYNQQGHAGVTGTGEKKGIMGKIKEKLPGQH

SEQ ID NO: 63872 - protein, 275 aa, Triticum aestivum
  peptide (1)..(275): Ceres Seq. ID no. 13597247
MEFQGQQGNRVDQHGNPVAAAPGATAVTGAPAGGQLQPGREEHKTRGILHRSSSSSSSSSEDDGMGGRRKKGIKEKIKDKLPGARKQTYGQPAAPAGMTGTGATGGPYYVQPAPAGTGAHGTTATTGTYGQPAPAGMTGTGAHGTTATGEKKGMKDKIMEKLPGGHKNEQHTMPTAGAYGQPGMTGTGVHGNTAPGGGYGGQPGHAGMIGTGTHGSGTTGGPYDHQGHPGVTGTGAHGTTATGGAYNQQGHAGVTGTGEKKGIMGKIKEKLPGQH

SEQ ID NO: 63873 - protein, 211 aa, Triticum aestivum
  peptide (1)..(211): Ceres Seq. ID no. 13597248
MGGRRKKGIKEKIKDKLPGARKQTYGQPAAPAGMTGTGATGGPYYVQPAPAGTGAHGTTATTGTYGQPAPAGMTGTGAHGTTATGEKKGMKDKIMEKLPGGHKNEQHTMPTAGAYGQPGMTGTGVHGNTAPGGGYGGQPGHAGMIGTGTHGSGTTGGPYDHQGHPGVTGTGAHGTTATGGAYNQQGHAGVTGTGEKKGIMGKIKEKLPGQH

SEQ ID NO: 63874 - DNA, 1244 bp, Triticum aestivum
  misc_feature (1)..(1244): Ceres Seq. ID no. 13597255
gggaagagaggagcggacagaaaagcctggaaagccaaaaaagaaatcaccaacgcaaaggggaaaggagagagaggcgaggcgaggctagggtttcgtccaattccgccatggattccggcgacgcgtggggccgctcctcctccacctcctccgccgccgccgccgccgcgaggcgcctgcagtcccgctacgatctgtacatggggttcgacgacgcggacgccggcggggacgaggtggaggcgcgcggggcggaggcatacaactgccccttttgcggcgaggactttgacttcgtcgggctctgctgccacatcgacgacgagcacgccgtcgaggccaagagcggggtatgccccatctgtgctacaagggttggggcggacttgataggccacctgacaatgcagcatggaagttacttcaagatgcaacgcaggcgcagagtccgaaaagtatcttctgggtcccattctttgctgtctttgttgagaaaggatttaagagacggcagtttgcagtcctttcttggtggatcatcctatgtatctaatcctcctgctgccgcccctgatccatttttgcaatctttaatttgtagtttgcctgtggctgaaccatcgaaagattttcgttcagagtcatctgacaaaacatttttgctaaataaattcccagatgaaaagatcgtagagagagctgaaacatctctgtctgataaggatcagaaggagcgggctcaaaggagtgcatttgcccgtgggcttgtgctttccacaatatttgatgatgataccatgtaagggaaatcgactttgagagtggttgcatgacatagtcaagggcactcaacacaagagaatttatctagagcaatgcaaccttgtcatgcagccactgccgctcacaggcgttaacgaccaaccggaggtccatccagttatgaatgtatatgtatttatgtatgccttgccgagagcgcatcatgagaatagtggaggaaggccttgtgttgcagctttccacatggaataaggggatactatccttagtggcattgtgcatatacaaaagaggggcgagctactcgtcatgtattagattatattctgttcatcaatgtaataagtgtgttgtaaactcatctcatccttagtatgtgagattgctttgatgttttctgtatatattcgattgtggtacatttgacatttgaggaaagggaatggagtgaatttaac

SEQ ID NO: 63875 - protein, 267 aa, Triticum aestivum
  peptide (1)..(267): Ceres Seq. ID no. 13597256
EERSGQKSLESQKRNHQRKGERRERRGEARVSSNSAMDSGDAWGRSSSTSSAAAAAARRLQSRYDLYMGFDDADAGGDEVEARGAEAYNCPFCGEDFDFVGLCCHIDDEHAVEAKSGVCPICATRVGADLIGHLTMQHGSYFKMQRRRRVRKVSSGSHSLLSLLRKDLRDGSLQSFLGGSSYVSNPPAAAPDPFLQSLICSLPVAEPSKDFRSESSDKTFLLNKFPDEKIVERAETSLSDKDQKERAQRSAFARGLVLSTIFDDDTM

SEQ ID NO: 63876 - protein, 231 aa, Triticum aestivum
  peptide (1)..(231): Ceres Seq. ID no. 13597257
MDSGDAWGRSSSTSSAAAAAARRLQSRYDLYMGFDDADAGGDEVEARGAEAYNCPFCGEDFDFVGLCCHIDDEHAVEAKSGVCPICATRVGADLIGHLTMQHGSYFKMQRRRRVRKVSSGSHSLLSLLRKDLRDGSLQSFLGGSSYVSNPPAAAPDPFLQSLICSLPVAEPSKDFRSESSDKTFLLNKFPDEKIVERAETSLSDKDQKERAQRSAFARGLVLSTIFDDDTM

SEQ ID NO: 63877 - protein, 200 aa, Triticum aestivum
  peptide (1)..(200): Ceres Seq. ID no. 13597258
MGFDDADAGGDEVEARGAEAYNCPFCGEDFDFVGLCCHIDDEHAVEAKSGVCPICATRVGADLIGHLTMQHGSYFKMQRRRRVRKVSSGSHSLLSLLRKDLRDGSLQSFLGGSSYVSNPPAAAPDPFLQSLICSLPVAEPSKDFRSESSDKTFLLNKFPDEKIVERAETSLSDKDQKERAQRSAFARGLVLSTIFDDDTM

SEQ ID NO: 63878 - DNA, 1563 bp, Triticum aestivum
  misc_feature (1)..(1563): Ceres Seq. ID no. 13590241
aggacaccgcggacggagagcgtcaggtcctcccccgctccgctcatcttgggaaggaagcaaagcagagccgcgccgccgaggaggatatggccgaggccgacgacgccgccgccgcccgccggcgcacggtcatcacggagtaccgcaacaagctcctgaactgccgcgagctggagacgagggtccgcacaggtagggaaaacctaaagaaggcgaagaaagattacgatataactgaagatgatttgaagtccttgcagagtgtgggccaaatcattggtgaagtacttcgaccattggacagtgaaagatttatcgtcaaagccagtagtggcccacgttatgtggttggctgcagaagcaaagttgacaaagaaaagctgacagctgcaacacgagttgtccttgacatgacaacattaacaataatgcgcactctaccacgtgaggttgatcccgtggtctataacatgctacacgaagaccccggcaatgtcagttactcagctgtaggtggactgtcggatcaaataagggagctgcgggagtccatcgagttacctcttatgaatccagaattgtttcttcgtgttgggattaaaccaccaaagggcgttctgctctatggcccacctggaacgggaaagacattgcttgctagagccattgctagcaacatcgatgctaactttttaaagattgtttcaagtgctatcattgacaaatatattggtgaaagtgcacgtcttataagagaaatgtttaactatgcacgtgagcatcaaccatgtattattttcatggatgagattgatgccattggtggccgaagattcagtgagggcactagtgcagatcgtgaaatacaacggacattgatggagctcctaaatcagttggatggattcgatgagctcggaaaggtgaagatgatcatggcgacgaaccggcctgatgtcttggaccctgcgctccttcgtcctggacgcctagaccggaagatagagattccgctgccgaatgagcaatccaggacggaggtcctgaaaatccatgcagctggtatcgccaagcatggcgaaattgattacgaggctgtggttaagctggccgagggcttcaatggcgctgatcttcgcaatgtctgcactgaggctggcatggccgccattcgagcagagcgtgactacgtcatccacgaagacttcatgaaggcagttcggaagttgaatgacgccaagaagctcgagtccagcgcacactacagcgccgactttggcaaggactaagatgagagtaggagactatcaggcgacgcgctgtctgttttcttgtaccatggcggagtttgtcacaccgaccccgacgatatagaacatcatgtgtttctaccttttatatgttgtgggacgactgcctttgccgcgcaagttgatgtaatgaaaagttgaaacaggtctgaaaccgactggtttcttagatttacaaaattgtttccttcaagttactgtgccttgattgtggaatcaaaaaaatgtggaaacattcgcgatttcttcc

SEQ ID NO: 63879 - protein, 429 aa, Triticum aestivum
  peptide (1)..(429): Ceres Seq. ID no. 13590242
DTADGERQVLPRSAHLGKEAKQSRAAEEDMAEADDAAAARRRTVITEYRNKLLNCRELETRVRTGRENLKKAKKDYDITEDDLKSLQSVGQIIGEVLRPLDSERFIVKASSGPRYVVGCRSKVDKEKLTAATRVVLDMTTLTIMRTLPREVDPVVYNMLHEDPGNVSYSAVGGLSDQIRELRESIELPLMNPELFLRVGIKPPKGVLLYGPPGTGKTLLARAIASNIDANFLKIVSSAIIDKYIGESARLIREMFNYAREHQPCIIFMDEIDAIGGRRFSEGTSADREIQRTLMELLNQLDGFDELGKVKMIMATNRPDVLDPALLRPGRLDRKIEIPLPNEQSRTEVLKIHAAGIAKHGEIDYEAVVKLAEGFNGADLRNVCTEAGMAAIRAERDYVIHEDFMKAVRKLNDAKKLESSAHYSADFGKD

SEQ ID NO: 63880 - protein, 400 aa, Triticum aestivum
  peptide (1)..(400): Ceres Seq. ID no. 13590243
MAEADDAAAARRRTVITEYRNKLLNCRELETRVRTGRENLKKAKKDYDITEDDLKSLQSVGQIIGEVLRPLDSERFIVKASSGPRYVVGCRSKVDKEKLTAATRVVLDMTTLTIMRTLPREVDPVVYNMLHEDPGNVSYSAVGGLSDQIRELRESIELPLMNPELFLRVGIKPPKGVLLYGPPGTGKTLLARAIASNIDANFLKIVSSAIIDKYIGESARLIREMFNYAREHQPCIIFMDEIDAIGGRRFSEGTSADREIQRTLMELLNQLDGFDELGKVKMIMATNRPDVLDPALLRPGRLDRKIEIPLPNEQSRTEVLKIHAAGIAKHGEIDYEAVVKLAEGFNGADLRNVCTEAGMAAIRAERDYVIHEDFMKAVRKLNDAKKLESSAHYSADFGKD

SEQ ID NO: 63881 - protein, 292 aa, Triticum aestivum
  peptide (1)..(292): Ceres Seq. ID no. 13590244
MTTLTIMRTLPREVDPVVYNMLHEDPGNVSYSAVGGLSDQIRELRESIELPLMNPELFLRVGIKPPKGVLLYGPPGTGKTLLARAIASNIDANFLKIVSSAIIDKYIGESARLIREMFNYAREHQPCIIFMDEIDAIGGRRFSEGTSADREIQRTLMELLNQLDGFDELGKVKMIMATNRPDVLDPALLRPGRLDRKIEIPLPNEQSRTEVLKIHAAGIAKHGEIDYEAVVKLAEGFNGADLRNVCTEAGMAAIRAERDYVIHEDFMKAVRKLNDAKKLESSAHYSADFGKD

SEQ ID NO: 63882 - DNA, 1108 bp, Triticum aestivum
  misc_feature (1)..(1108): Ceres Seq. ID no. 13598492
aatcgaaaaatcgaccccagccacagccagatccgagagcagcagctactagctagtgagcatggcgtccaacaccgcacccgacgacaacgaggtggcgcacgactacggcctcgtccgcgtctacaagagcggccgcgtcgagcgccccctggtggctccgccagcggcggccggcctcgatcccgccaccggcgtcgagtccaaggacgtccagctcggcgactactccgcccgcctctacctgcccccggccgcgtccacggccacagacaagttccctgtcatcgtctacgtccacgggggcggcttcgtggccgagtccgtcgcgtcccccaacggccaccgcttcctcaacagcctcaccgccgcctgccctgccctcgccgtctccgtcgagtaccgcctcgccccggagcacccgctccccgcggcctacgaggactgcgtcgctgccctcacgtgggtgctctcggccgccgacccgtgggtcgccgagcacggcgacctgggccgcgtcttcgtggccggggacagcgccggggccaacgcctgccaccacctcgtcattcagccgggcgccgtgcgcctcaagggcgcggtgctgatccacccctggttctggggttccgaggccgtcggcgaggagacgcgcaaccccgcgtggcgcgccatgggcgggcggctgtgggagttcgcgtgccccggctcgagcggcgtcgacgacgcgcggatgaacccgatggcgcccggcgcgccggggctggaaacgctcgcgtgcgagagggtcatggtgtgcgtcgcggagggcgacttcctcaggtggcgcggccgcgcgtacgcggaggccgtggccgcggcgaggggcggcgaggggcagggcgtcgagctgctggagacggagggggtggggcacgtcttccacctcttcaagcccgactgcgacaaagccaaggagatgttcgacaggatagtcgccttcgttaacgcgccgtgatgctcgtgtggatgtgcccgcttattatcaggccggcagctttgtgtgtcgcgggggcgccacctactgaaataaatggattgcgataaatgatgaaataaatttggttgg

SEQ ID NO: 63883 - protein, 328 aa, Triticum aestivum
  peptide (1)..(328): Ceres Seq. ID no. 13598493
NRKIDPSHSQIREQQLLASEHGVQHRTRRQRGGARLRPRPRLQERPRRAPPGGSASGGRPRSRHRRRVQGRPARRLLRPPLPAPGRVHGHRQVPCHRLRPRGRLRGRVRRVPQRPPLPQQPHRRLPCPRRLRRVPPRPGAPAPRGLRGLRRCPHVGALGRRPVGRRARRPGPRLRGRGQRRGQRLPPPRHSAGRRAPQGRGADPPLVLGFRGRRRGDAQPRVARHGRAAVGVRVPRLERRRRRADEPDGARRAGAGNARVREGHGVRRGGRLPQVARPRVRGGRGRGEGRRGAGRRAAGDGGGGARLPPLQARLRQSQGDVRQDSRLR

SEQ ID NO: 63884 - protein, 311 aa, Triticum aestivum
  peptide (1)..(311): Ceres Seq. ID no. 13598494
MASNTAPDDNEVAHDYGLVRVYKSGRVERPLVAPPAAAGLDPATGVESKDVQLGDYSARLYLPPAASTATDKFPVIVYVHGGGFVAESVASPNGHRFLNSLTAACPALAVSVEYRLAPEHPLPAAYEDCVAALTWVLSAADPWVAEHGDLGRVFVAGDSAGANACHHLVIQPGAVRLKGAVLIHPWFWGSEAVGEETRNPAWRAMGGRLWEFACPGSSGVDDARMNPMAPGAPGLETLACERVMVCVAEGDFLRWRGRAYAEAVAAARGGEGQGVELLETEGVGHVFHLFKPDCDKAKEMFDRIVAFVNAP

SEQ ID NO: 63885 - DNA, 1458 bp, Triticum aestivum
  misc_feature (1)..(1458): Ceres Seq. ID no. 13597260
agcgaatcgggcggaaacacaacgacgcagtcacgcaccggctctttcctccacccctcgtagggctagctagggtttctccgcccaaatcgtgtaataataacccacttgaagattcgcgcgaaagctgcggcgatggccaccaccgtccaaccccactccccggacccaacagccatcaccaccacccctgcccctccccctcctccttctccacctcgccaggagaacccgaccgccgcgggggaaggcgtagagatcgcggcgctcgatgagcagcctgccgccgtcgccgtcgccgacaaggggaatacggcccccggcggcgggaagctggtggcggaggccatgcgcaagtgcgcggcgccccggtcgtcgcgctaccacggcgtgacgaggctcaagtggagcggcaagtacgaggcacacctctgggacaacaccagccaggttgaggggcgcaagcgcaagggcaagcatgtgtacttgggaagctatgttactgaagagaatgctgcaagggcacatgaccttgcagccctgaaatattggggcataactcaacccaccaaactaaacttcaatatttctgattatgcaaaagaaattgagatcatgaagagcatgaatcaagatgaatttgtggcctacataaggaggcagagtagttgtttctcaagaggaacatcgtcatacaggggtgtaacaagacgaaaggatggtaaatggcaagcacgtattggtaggattggtgagagtagagacactaaagacatctatcttgggacctttgaaactgaagtggaggcagctgaagcgtatgacctagcagcaattcagctccgtggtgttcatgctgtgaccaactttgatatcagcaactactccgaagaaggtttgaagaaactagaaggctcatctgaggtagtgaacctggaggaccaatcagaagtcactaagttagctgtgaccaacttggatattagcaaacactgcgaagatggtttgaagaaactagatggcgcatcccaggtagtgaacctggagggccaatcagaagtcaccaagttatctgtgactaactttgatattagcaactgctgtgaagatggtttgaagaaactagaaggctcatccgaggtagcgaacctggaggaccaatcagaagtcacaaagttagctggacaatagatattagaatagcaacatgtaaattatttatttcttcctttttatcttttctctgatcgtcaatctctccacctttctcttttcttgattgatgatgagagtgtcttttcttcgtctgcctttcctgaaacttttttttcccaaggaatttcccttcgctggttgccaactctattatttaccagctccagagtaggatcgtgtgatgctgtactctgtattctcatgtacactgattacaaaccattgatagtatttgtagacatt

SEQ ID NO: 63886 - protein, 351 aa, Triticum aestivum
  peptide (1)..(351): Ceres Seq. ID no. 13597261
MATTVQPHSPDPTAITTTPAPPPPPSPPRQENPTAAGEGVEIAALDEQPAAVAVADKGNTAPGGGKLVAEAMRKCAAPRSSRYHGVTRLKWSGKYEAHLWDNTSQVEGRKRKGKHVYLGSYVTEENAARAHDLAALKYWGITQPTKLNFNISDYAKEIEIMKSMNQDEFVAYIRRQSSCFSRGTSSYRGVTRRKDGKWQARIGRIGESRDTKDIYLGTFETEVEAAEAYDLAAIQLRGVHAVTNFDISNYSEEGLKKLEGSSEVVNLEDQSEVTKLAVTNLDISKHCEDGLKKLDGASQVVNLEGQSEVTKLSVTNFDISNCCEDGLKKLEGSSEVANLEDQSEVTKLAGQ

SEQ ID NO: 63887 - protein, 280 aa, Triticum aestivum
  peptide (1)..(280): Ceres Seq. ID no. 13597262
MRKCAAPRSSRYHGVTRLKWSGKYEAHLWDNTSQVEGRKRKGKHVYLGSYVTEENAARAHDLAALKYWGITQPTKLNFNISDYAKEIEIMKSMNQDEFVAYIRRQSSCFSRGTSSYRGVTRRKDGKWQARIGRIGESRDTKDIYLGTFETEVEAAEAYDLAAIQLRGVHAVTNFDISNYSEEGLKKLEGSSEVVNLEDQSEVTKLAVTNLDISKHCEDGLKKLDGASQVVNLEGQSEVTKLSVTNFDISNCCEDGLKKLEGSSEVANLEDQSEVTKLAGQ

SEQ ID NO: 63888 - protein, 191 aa, Triticum aestivum
  peptide (1)..(191): Ceres Seq. ID no. 13597263
MKSMNQDEFVAYIRRQSSCFSRGTSSYRGVTRRKDGKWQARIGRIGESRDTKDIYLGTFETEVEAAEAYDLAAIQLRGVHAVTNFDISNYSEEGLKKLEGSSEVVNLEDQSEVTKLAVTNLDISKHCEDGLKKLDGASQVVNLEGQSEVTKLSVTNFDISNCCEDGLKKLEGSSEVANLEDQSEVTKLAGQ

SEQ ID NO: 63889 - DNA, 1412 bp, Triticum aestivum
  misc_feature (1)..(1412): Ceres Seq. ID no. 13585382
gaaaatcccccttccattcctcctcccctccttgtccccaccctctctctctctctctccctccgtctgtccgtccgcgcgcgctctgcgttcttggggagggaggaaatggcggcaaagcgcgagctggtggtcagcttcggggagatgctgatagacttcgtgccgacggtggccggggtgtcgctggcggaggcgccggccttcgtcaaggcgcccgggggcgcccccgccaacgtcgccatcgccgtcgcgcgcctcggcggcggggccgccttcgtcggcaagctcggcgacgacgagttcggccgcatgctcgccaaaatcctccgcgaaaacggcgtcgacgccggcggcgtcgtcttcgactcgggcgcgcgcaccgcgctcgccttcgtcacgctccgcgccgacggggagcgcgagttcatgttctaccgcaaccccagcgccgacatgctcctcaccgccgacgagctcaaggtcgacgtcatcaagagggctgcagtcttccactatggatcaataagcttgatcgccgagccttgccggacagcgcatctgcacgccatgaaggttgccaaagaggccggcgcgcttctctcgtatgacccgaacctgagggaggcattgtggccctcccttgaggaggctcgcaccaagatcttgagcatctgggaccaggcagacattgtcaaggtcagcgaggtcgagcttgagtttttgactggcatcaactcggtggaggatgatgttgccatgaagctgtggcgccctacctttaagctcatgcttgtcactcttggagatcaaggatgcaagtactataccaaggatttccgtggaactgtcccatcctacaaggtacagcaagttgatacgacaggtgctggtgatgcatttattggttctctgctccgaaaaattgtccaagatccatcggcattgcaagataaaacaaagcttgagggggcgatcaaatttgccaatgcatgtggagcaatcaccgccacgaagaaaggggcaatcccttcattgcccaaggaagacgaggtgttgcggctgatggagaaggcgtagacgcggcttatgatttccagtagcttcgaattctgcaaattgtattgtaagctgttctggatcaggagcaaggtgtactcctcccaggatgcccctgcctttttgtttgctcccctttacgaaagggtttttgttttggaattcttctcatctgaataagcagatccttcaatattactgtgtcatttctgtaccaagtccttgatggtagtgttcttttttccttgttctgtcatcttatttgggttccaactgtattgggaatttgtggtttagcccctgaggtggtttctgttctcaattttcgacaagtgaaacgcatgtacaacgcc

SEQ ID NO: 63890 - protein, 359 aa, Triticum aestivum
  peptide (1)..(359): Ceres Seq. ID no. 13585383
ENPPSIPPPLLVPTLSLSLSLRLSVRARSAFLGREEMAAKRELVVSFGEMLIDFVPTVAGVSLAEAPAFVKAPGGAPANVAIAVARLGGGAAFVGKLGDDEFGRMLAKILRENGVDAGGVVFDSGARTALAFVTLRADGEREFMFYRNPSADMLLTADELKVDVIKRAAVFHYGSISLIAEPCRTAHLHAMKVAKEAGALLSYDPNLREALWPSLEEARTKILSIWDQADIVKVSEVELEFLTGINSVEDDVAMKLWRPTFKLMLVTLGDQGCKYYTKDFRGTVPSYKVQQVDTTGAGDAFIGSLLRKIVQDPSALQDKTKLEGAIKFANACGAITATKKGAIPSLPKEDEVLRLMEKA

SEQ ID NO: 63891 - protein, 323 aa, Triticum aestivum
  peptide (1)..(323): Ceres Seq. ID no. 13585384
MAAKRELVVSFGEMLIDFVPTVAGVSLAEAPAFVKAPGGAPANVAIAVARLGGGAAFVGKLGDDEFGRMLAKILRENGVDAGGVVFDSGARTALAFVTLRADGEREFMFYRNPSADMLLTADELKVDVIKRAAVFHYGSISLIAEPCRTAHLHAMKVAKEAGALLSYDPNLREALWPSLEEARTKILSIWDQADIVKVSEVELEFLTGINSVEDDVAMKLWRPTFKLMLVTLGDQGCKYYTKDFRGTVPSYKVQQVDTTGAGDAFIGSLLRKIVQDPSALQDKTKLEGAIKFANACGAITATKKGAIPSLPKEDEVLRLMEKA

SEQ ID NO: 63892 - protein, 310 aa, Triticum aestivum
  peptide (1)..(310): Ceres Seq. ID no. 13585385
MLIDFVPTVAGVSLAEAPAFVKAPGGAPANVAIAVARLGGGAAFVGKLGDDEFGRMLAKILRENGVDAGGVVFDSGARTALAFVTLRADGEREFMFYRNPSADMLLTADELKVDVIKRAAVFHYGSISLIAEPCRTAHLHAMKVAKEAGALLSYDPNLREALWPSLEEARTKILSIWDQADIVKVSEVELEFLTGINSVEDDVAMKLWRPTFKLMLVTLGDQGCKYYTKDFRGTVPSYKVQQVDTTGAGDAFIGSLLRKIVQDPSALQDKTKLEGAIKFANACGAITATKKGAIPSLPKEDEVLRLMEKA

SEQ ID NO: 63893 - DNA, 1201 bp, Triticum aestivum
  misc_feature (1)..(1201): Ceres Seq. ID no. 13584271
agacagacagagaaaaaaaaaacccagagaaagagatcgagaccctctccaccctccttccccatccccgtcgtcgctcttcgattccgccggcgatccgtgccacagtctagccggaggagaggcgagcagcagggggagcgcgtgcggtctagcgggggctagggtttcctcgcgtgtgagggacgggagaggaggagcagggatggcgcaggcggtggaggagtggtaccggcagatgcccatcatcacgcgctcctacctcaccgccgccgtcctcaccaccgtcggatgcaccctcgagatcatctcgccctaccacctgtacctgaaccccaagctggtggtgcagcactacgagatctggcgcctcgtcaccaacttcctctacttccgcaagatggatttggatttcctgttccacatgttttttcttgcgcgctactgcaaacttctcgaggagaactcattcaggggaagaacagctgactttttctacatgctcttgtttggtgctactgtcctaaccagcatcgttctgattggtgggacaataccttacatttctgagacgtttgccaggattctgttcctcagcaattcattgacgtttatgatggtttatgtctggagcaagcacaatcccttcattcacatgagcttcttgggtctgttcaccttcactgctgcctacttaccttgggtccttcttggcttctctattctggtggggagcagcacatgggttgatcttttgggtatgattgctggccatgtgtattacttcctggaagacgtgtaccctcggatgacgggccgtcgccccctgaagaccccttccttcatcaaggcgctgttcgccgacgacaatgtggtcgtggcggcgcggccccccaacgctggtgtcgcggctgcaaggtttggtggtgtgggtgcagcagacccccagttccagtgatggtctacatgcagtttgttggatataattttgtacacccgtgtccgtgatgatatgtgcaaaaatacatagagagtataattctcagttaggggttgggcttgatgccaatgcgctgctaaccaaagtgtatgtagctgggctcgtgaagccgtctggttgttggttaactttgacttaacgtacttgtctcatcttgcgtggcaccttcgttaattaggcgaaaaaacacgctgaagcctc

SEQ ID NO: 63894 - protein, 318 aa, Triticum aestivum
  peptide (1)..(318): Ceres Seq. ID no. 13584272
DRQRKKKPRERDRDPLHPPSPSPSSLFDSAGDPCHSLAGGEASSRGSACGLAGARVSSRVRDGRGGAGMAQAVEEWYRQMPIITRSYLTAAVLTTVGCTLEIISPYHLYLNPKLVVQHYEIWRLVTNFLYFRKMDLDFLFHMFFLARYCKLLEENSFRGRTADFFYMLLFGATVLTSIVLIGGTIPYISETFARILFLSNSLTFMMVYVWSKHNPFIHMSFLGLFTFTAAYLPWVLLGFSILVGSSTWVDLLGMIAGHVYYFLEDVYPRMTGRRPLKTPSFIKALFADDNVVVAARPPNAGVAAARFGGVGAADPQFQ

SEQ ID NO: 63895 - protein, 250 aa, Triticum aestivum
  peptide (1)..(250): Ceres Seq. ID no. 13584273
MAQAVEEWYRQMPIITRSYLTAAVLTTVGCTLEIISPYHLYLNPKLVVQHYEIWRLVTNFLYFRKMDLDFLFHMFFLARYCKLLEENSFRGRTADFFYMLLFGATVLTSIVLIGGTIPYISETFARILFLSNSLTFMMVYVWSKHNPFIHMSFLGLFTFTAAYLPWVLLGFSILVGSSTWVDLLGMIAGHVYYFLEDVYPRMTGRRPLKTPSFIKALFADDNVVVAARPPNAGVAAARFGGVGAADPQFQ

SEQ ID NO: 63896 - protein, 239 aa, Triticum aestivum
  peptide (1)..(239): Ceres Seq. ID no. 13584274
MPIITRSYLTAAVLTTVGCTLEIISPYHLYLNPKLVVQHYEIWRLVTNFLYFRKMDLDFLFHMFFLARYCKLLEENSFRGRTADFFYMLLFGATVLTSIVLIGGTIPYISETFARILFLSNSLTFMMVYVWSKHNPFIHMSFLGLFTFTAAYLPWVLLGFSILVGSSTWVDLLGMIAGHVYYFLEDVYPRMTGRRPLKTPSFIKALFADDNVVVAARPPNAGVAAARFGGVGAADPQFQ

SEQ ID NO: 63897 - DNA, 1032 bp, Triticum aestivum
  misc_feature (1)..(1032): Ceres Seq. ID no. 13597264
atcgatcaaggatcagacgacacgagctagtagccacaaagccaacgatctcgaccgctcgggtcatcagcaacgaaccatggcgcgggtgctggctctcggcgccgccgcggctttcctcctcctggcagtggcatcgaccatggcggctgcgcagaactgcgggtgcgcggcgagtcagtgctgcagccgctgggggttctgcggcgccaccagcgagtactgcggcacgggctgccgctcgggtccctgcaccgtgcccgtcaccaacaacgtgtccgtgcccgccatcgtcacgccggccttcttcggcgcgctcgtcgcccaggccgccgacgactgcgccgccaagggcttctacacccgcgacgccttcctcacggcgctcggcgggtaccccgccttcggccgcaccggctccgacgacgactccaagcgcgagatcgccgccttcttcgcccacgtcaaccacgagaccataaagttctgctacatcgacgagatcaacgggccgagcaagaactactgcgacccgacgaacgcggagtggccgtgcgccgccgggaagggctactacggccgcgggccgctgcagatctcgtggaactacaactacggggcggcagggcagagcctcggcttcgacgggctcaacgacccggacgcggtggcgcggagccccgtcttggcgttccaagcggcgctctggtactggatgaacagcgtgcacgacgtcatcgtctccggccaggggttcggcgccaccatcagggccatcaatggcgcgctcgagtgcaacggcaagaaccccagcgccgtcaacgaccgcgtcgccttctacaagcagttctgccagcagttcggcgtcgacccggggaccagcctcacctgctaagctcactatctaggacatcgcgtggacttggttgtggcatatgtgcgtgcatctgattcggacagacatattcaggataaaattgctttctgatttgatactatacctgttaatttaatactaccttcgtctcgatg

SEQ ID NO: 63898 - protein, 297 aa, Triticum aestivum
  peptide (1)..(297): Ceres Seq. ID no. 13597265
SIKDQTTRASSHKANDLDRSGHQQRTMARVLALGAAAAFLLLAVASTMAAAQNCGCAASQCCSRWGFCGATSEYCGTGCRSGPCTVPVTNNVSVPAIVTPAFFGALVAQAADDCAAKGFYTRDAFLTALGGYPAFGRTGSDDDSKREIAAFFAHVNHETIKFCYIDEINGPSKNYCDPTNAEWPCAAGKGYYGRGPLQISWNYNYGAAGQSLGFDGLNDPDAVARSPVLAFQAALWYWMNSVHDVIVSGQGFGATIRAINGALECNGKNPSAVNDRVAFYKQFCQQFGVDPGTSLTC

SEQ ID NO: 63899 - protein, 271 aa, Triticum aestivum
  peptide (1)..(271): Ceres Seq. ID no. 13597266
MARVLALGAAAAFLLLAVASTMAAAQNCGCAASQCCSRWGFCGATSEYCGTGCRSGPCTVPVTNNVSVPAIVTPAFFGALVAQAADDCAAKGFYTRDAFLTALGGYPAFGRTGSDDDSKREIAAFFAHVNHETIKFCYIDEINGPSKNYCDPTNAEWPCAAGKGYYGRGPLQISWNYNYGAAGQSLGFDGLNDPDAVARSPVLAFQAALWYWMNSVHDVIVSGQGFGATIRAINGALECNGKNPSAVNDRVAFYKQFCQQFGVDPGTSLTC

SEQ ID NO: 63900 - protein, 250 aa, Triticum aestivum
  peptide (1)..(250): Ceres Seq. ID no. 13597267
MAAAQNCGCAASQCCSRWGFCGATSEYCGTGCRSGPCTVPVTNNVSVPAIVTPAFFGALVAQAADDCAAKGFYTRDAFLTALGGYPAFGRTGSDDDSKREIAAFFAHVNHETIKFCYIDEINGPSKNYCDPTNAEWPCAAGKGYYGRGPLQISWNYNYGAAGQSLGFDGLNDPDAVARSPVLAFQAALWYWMNSVHDVIVSGQGFGATIRAINGALECNGKNPSAVNDRVAFYKQFCQQFGVDPGTSLTC

SEQ ID NO: 63901 - DNA, 1311 bp, Triticum aestivum
  misc_feature (1)..(1311): Ceres Seq. ID no. 13597320
gatttcccccagaaattaataaaccaccaaagccatagcttgaggcggcgagaagcagagccggagaaggaggggagtcggagaagatggttgttctcgtggtagcgacggcgtccgacccggcgtccatcggccccgccgccgcgttcctggctatgcctggctggtcccccggcccgcccatccccgaggggatggagagctttacaaatgggaatgttaggttattgaagcatgaacgcagcattgttgcagaggatgatcttgaccgtcggtggcaggaagccactggagaggctgtttctgaggtcatattcctcagcaaacacactgcagtctccaaccgccctgcactcactgtccatccaatcggtgtgccacatctgagggaggatgagaccccccctcaaggagggaggcctggatgggcaggggtgccaaaccctcgaattggcccatggttccggttgatgcaaaaggttgctgccgaccaaggtcttgttccagagtttgagattacacttgaagctactcaccatggaccacttaccagtacacccacgatgtttgttgagataggaagtacacaagaatactggggtagacaagatgctgcacaggccattgctctagttctatggaaaggtcttggccttgaggaaggaaatgctgttggaacttggctggggagtggtgaaaaggttctactaggtatcggtggtggtcactatgcccctcgccatatggatattgtcatcaaagacggtgtctgggtgggtcatctcctgtctggttactctttgccgatggaggctccacctcaagtaaatggaaagagttctggtgaggttggtgggatgtggaagcattccatcaaagtttcgtatgaagccacaaaggcaggatttcccggtggtgaagttatagcacatcttgatcagaagagcttcaagggctggcaaaagaacgccatcacgagctatttgcaggagcaaaatatcaagataggaaaacccaatgatttcctctgcaaaaaaatttaaccgcgtccgcaaggcaagtcgtcgaagtgacttcaccctccctagggcctggcacatacaaatggagtaaatatagagcactgtattttcgtaacccgatttcaagatgtagagtactccctccccgttcgtcttagaaggcctgacttgtgccaaaaaaaaaaacaggaatatactacgagagagacatatcttaaggacacgactatgcgtgcttgtggttcccagagttggcaggcaaatgggggctatcattatccatattttt

SEQ ID NO: 63902 - protein, 318 aa, Triticum aestivum
  peptide (1)..(318): Ceres Seq. ID no. 13597321
MVVLVVATASDPASIGPAAAFLAMPGWSPGPPIPEGMESFTNGNVRLLKHERSIVAEDDLDRRWQEATGEAVSEVIFLSKHTAVSNRPALTVHPIGVPHLREDETPPQGGRPGWAGVPNPRIGPWFRLMQKVAADQGLVPEFEITLEATHHGPLTSTPTMFVEIGSTQEYWGRQDAAQAIALVLWKGLGLEEGNAVGTWLGSGEKVLLGIGGGHYAPRHMDIVIKDGVWVGHLLSGYSLPMEAPPQVNGKSSGEVGGMWKHSIKVSYEATKAGFPGGEVIAHLDQKSFKGWQKNAITSYLQEQNIKIGKPNDFLCKKI

SEQ ID NO: 63903 - protein, 295 aa, Triticum aestivum
  peptide (1)..(295): Ceres Seq. ID no. 13597322
MPGWSPGPPIPEGMESFTNGNVRLLKHERSIVAEDDLDRRWQEATGEAVSEVIFLSKHTAVSNRPALTVHPIGVPHLREDETPPQGGRPGWAGVPNPRIGPWFRLMQKVAADQGLVPEFEITLEATHHGPLTSTPTMFVEIGSTQEYWGRQDAAQAIALVLWKGLGLEEGNAVGTWLGSGEKVLLGIGGGHYAPRHMDIVIKDGVWVGHLLSGYSLPMEAPPQVNGKSSGEVGGMWKHSIKVSYEATKAGFPGGEVIAHLDQKSFKGWQKNAITSYLQEQNIKIGKPNDFLCKKI

SEQ ID NO: 63904 - protein, 282 aa, Triticum aestivum
  peptide (1)..(282): Ceres Seq. ID no. 13597323
MESFTNGNVRLLKHERSIVAEDDLDRRWQEATGEAVSEVIFLSKHTAVSNRPALTVHPIGVPHLREDETPPQGGRPGWAGVPNPRIGPWFRLMQKVAADQGLVPEFEITLEATHHGPLTSTPTMFVEIGSTQEYWGRQDAAQAIALVLWKGLGLEEGNAVGTWLGSGEKVLLGIGGGHYAPRHMDIVIKDGVWVGHLLSGYSLPMEAPPQVNGKSSGEVGGMWKHSIKVSYEATKAGFPGGEVIAHLDQKSFKGWQKNAITSYLQEQNIKIGKPNDFLCKKI

SEQ ID NO: 63905 - DNA, 1488 bp, Triticum aestivum
  misc_feature (1)..(1488): Ceres Seq. ID no. 13584275
cacttgcacacaacattcttcctcgcaccactcagctagcagctgccaaacacaagctcgcaagctcacggccgggtacgtgcgaagcattgaacatgggagatgcgctgtgcgatcagctcctcgtggacgtcgacggtgagttccagctccccaccgacgccgaagacctattcagcatcctcgagacttgggaggactgcgtccacggcgccgctgcagcgttgagccccaccgccggcgccagcagccgtggtgagctgatgggcggttctgcgccggggaacaaaagcagcaagcggcgagcgcggccggacgaatgtgacggaatagcgcagacgcagaagaggcagaagtgctccccggaggagggaggcggcgcggcgccgaagacagcccacatcacggtggagcgcaaccgccggaagcagatgaacgagcacctgaccgtgctgcggtcgctcatgccctgcttctatgtcaagcgtggtgaccaagcatccatcataggaggagtggtggactacatcaaggagctgcagcaagtgaagcagtcgctggaggccaagaagcagcgcaaggcctacaccgagcacgtcctcagcccgcgtccgcccccgacgtcctacagcccacgcctacctctcagcccgctccacaaatccacgccgccgctcagcccattgctcaggtccactccgccgctcagcccgcgcctcgccgtcccgatcagccctgccaggacgccgccgacgccaggcagcccctacaagctccgccccctgccgccgccgatctccggctccacctacgtgtccccggcgatgacgccgaccggctacgagccgggctcctcctacctcccgtcgctcgacgccatcgccgccgagctgtcggtgtacgccaacaggcaggcgctgcagctgcccccgactgacccactccccgacgtgagggtggagttcgcaggcgcgaacctggtgctgaagacggtgtcgcaccgcgcgccggggcaggtggtgaagatcatcgccgcgctcgagtcacgggcgccggcgctggagattctccacgccaagatcagcaccatcgacgacactgacgtcaacgccttcaccgtcaagattggaatcgagtgttcgctcagcgctgaagagctggtgcaagagattcagcaaacgttctcgtaagcgtttagttaaggtccccgcttcgagttaaactctttcttgtttttcccaacagggctgaaactcgtcgaattagacggtgaagatgcatgtattggtaagcatgcataagtttgtgcatgtgtgtgtcttgtaagatcgaaactgaggatgagctgaggagccgggcacttgaatggtcgtggtacaggtcgtactctagctatagctaactagctagatcgatcatttcttgtgctacctgcgtacgtatgtaactgcagttgttcaatggcacgtgcatttattttcacaactc

SEQ ID NO: 63906 - protein, 395 aa, Triticum aestivum
  peptide (1)..(395): Ceres Seq. ID no. 13584276
LAHNILPRTTQLAAAKHKLASSRPGTCEALNMGDALCDQLLVDVDGEFQLPTDAEDLFSILETWEDCVHGAAAALSPTAGASSRGELMGGSAPGNKSSKRRARPDECDGIAQTQKRQKCSPEEGGGAAPKTAHITVERNRRKQMNEHLTVLRSLMPCFYVKRGDQASIIGGVVDYIKELQQVKQSLEAKKQRKAYTEHVLSPRPPPTSYSPRLPLSPLHKSTPPLSPLLRSTPPLSPRLAVPISPARTPPTPGSPYKLRPLPPPISGSTYVSPAMTPTGYEPGSSYLPSLDAIAAELSVYANRQALQLPPTDPLPDVRVEFAGANLVLKTVSHRAPGQVVKIIAALESRAPALEILHAKISTIDDTDVNAFTVKIGIECSLSAEELVQEIQQTFS

SEQ ID NO: 63907 - protein, 364 aa, Triticum aestivum
  peptide (1)..(364): Ceres Seq. ID no. 13584277
MGDALCDQLLVDVDGEFQLPTDAEDLFSILETWEDCVHGAAAALSPTAGASSRGELMGGSAPGNKSSKRRARPDECDGIAQTQKRQKCSPEEGGGAAPKTAHITVERNRRKQMNEHLTVLRSLMPCFYVKRGDQASIIGGVVDYIKELQQVKQSLEAKKQRKAYTEHVLSPRPPPTSYSPRLPLSPLHKSTPPLSPLLRSTPPLSPRLAVPISPARTPPTPGSPYKLRPLPPPISGSTYVSPAMTPTGYEPGSSYLPSLDAIAAELSVYANRQALQLPPTDPLPDVRVEFAGANLVLKTVSHRAPGQVVKIIAALESRAPALEILHAKISTIDDTDVNAFTVKIGIECSLSAEELVQEIQQTFS

SEQ ID NO: 63908 - protein, 308 aa, Triticum aestivum
  peptide (1)..(308): Ceres Seq. ID no. 13584278
MGGSAPGNKSSKRRARPDECDGIAQTQKRQKCSPEEGGGAAPKTAHITVERNRRKQMNEHLTVLRSLMPCFYVKRGDQASIIGGVVDYIKELQQVKQSLEAKKQRKAYTEHVLSPRPPPTSYSPRLPLSPLHKSTPPLSPLLRSTPPLSPRLAVPISPARTPPTPGSPYKLRPLPPPISGSTYVSPAMTPTGYEPGSSYLPSLDAIAAELSVYANRQALQLPPTDPLPDVRVEFAGANLVLKTVSHRAPGQVVKIIAALESRAPALEILHAKISTIDDTDVNAFTVKIGIECSLSAEELVQEIQQTFS

SEQ ID NO: 63909 - DNA, 1196 bp, Triticum aestivum
  misc_feature (1)..(1196): Ceres Seq. ID no. 12616895
atcacacaattcccagatcacaccgtgcgccacgcccccttccccaaaaacctttcgaaaaccgccgcgccaaccgccacccagccccgtccaagaaaccgcacgccaccgcggacgcgaccccccgccggcgccaagatggtgcggctaagcaacacggtgatcgggatcctgaacgcggtgaccttcctgctctcggtgcccatcctggcgggcggcatctggctgcgggcgcgcgccgacggcaccgagtgcgagcgctacctggcggcgccggtgatcgcggtgggggtgttcctcatgctcgtctccatcgcggggctcgtcggcgcctgctgccgcgtcacctgcctcctctggttctacctcgtcgccatgttcctgctcatcgtcgtcctcctcggcctcaccgtcttcgccttcgtcgtcacgcacaagggcaccggggaggccgtctccggccgcggattcaaggagtacaggctcggggactactccaactggctgcagaagcgggtggagaacgacaagaactggaacaggatcaagggctgcctccaggacgccaaggtctgcaagtcgctcgaggacaagacggtcgaccagttcatgtcctccgatctctcccccatccagtccggctgctgcaagcctccgatcagctgcggcttcacctacgtcaacagcacgcaatggaccggccccgccaagtcgacggagcccgactgcggcgcgtggtccaacgacggggcgctctgctacggctgccagtcgtgcaaggccggcgtggtggccaccctcaagcgcaattggaagcgctccgccatcatcaacatcgtcttcctcgtcttcatcatcattgtctactccgtcggctgctgcgccttcaggaacaaccgccgcgaccaccgcaacggcggcgggtacaagcagcagggcgcgtacgcctgatcgtttggctcggttatttattgcttggattggatggatgcgatcgtcgtgtcattttcattcatcgtcgtgcttctcttaggatggcctgatctagctttgtacaggcgagattattctgtgctctgatcatctactagttaggttctatactccgtggtcatgaggagggttgtgtatatatcttttctgttctttgatatgtatggcagaccattatatatgtaacagattattctggagtc

SEQ ID NO: 63910 - protein, 346 aa, Triticum aestivum
  peptide (1)..(346): Ceres Seq. ID no. 12616896
HTIPRSHRAPRPLPQKPFENRRANRHPAPSKKPHATADATPRRRQDGAAKQHGDRDPERGDLPALGAHPGGRHLAAGARRRHRVRALPGGAGDRGGGVPHARLHRGARRRLLPRHLPPLVLPRRHVPAHRRPPRPHRLRLRRHAQGHRGGRLRPRIQGVQARGLLQLAAEAGGERQELEQDQGLPPGRQGLQVARGQDGRPVHVLRSLPHPVRLLQASDQLRLHLRQQHAMDRPRQVDGARLRRVVQRRGALLRLPVVQGRRGGHPQAQLEALRHHQHRLPRLHHHCLLRRLLRLQEQPPRPPQRRRVQAAGRVRLIVWLGYLLLGLDGCDRRVIFIHRRASLRMA

SEQ ID NO: 63911 - protein, 316 aa, Triticum aestivum
  peptide (1)..(316): Ceres Seq. ID no. 12616897
ITQFPDHTVRHAPFPKNLSKTAAPTATQPRPRNRTPPRTRPPAGAKMVRLSNTVIGILNAVTFLLSVPILAGGIWLRARADGTECERYLAAPVIAVGVFLMLVSIAGLVGACCRVTCLLWFYLVAMFLLIVVLLGLTVFAFVVTHKGTGEAVSGRGFKEYRLGDYSNWLQKRVENDKNWNRIKGCLQDAKVCKSLEDKTVDQFMSSDLSPIQSGCCKPPISCGFTYVNSTQWTGPAKSTEPDCGAWSNDGALCYGCQSCKAGVVATLKRNWKRSAIINIVFLVFIIIVYSVGCCAFRNNRRDHRNGGGYKQQGAYA

SEQ ID NO: 63912 - protein, 270 aa, Triticum aestivum
  peptide (1)..(270): Ceres Seq. ID no. 12616898
MVRLSNTVIGILNAVTFLLSVPILAGGIWLRARADGTECERYLAAPVIAVGVFLMLVSIAGLVGACCRVTCLLWFYLVAMFLLIVVLLGLTVFAFVVTHKGTGEAVSGRGFKEYRLGDYSNWLQKRVENDKNWNRIKGCLQDAKVCKSLEDKTVDQFMSSDLSPIQSGCCKPPISCGFTYVNSTQWTGPAKSTEPDCGAWSNDGALCYGCQSCKAGVVATLKRNWKRSAIINIVFLVFIIIVYSVGCCAFRNNRRDHRNGGGYKQQGAYA

SEQ ID NO: 63913 - DNA, 855 bp, Triticum aestivum
  misc_feature (1)..(855): Ceres Seq. ID no. 15178538
tcctctcttatcccgattcacccctcgtctccctcccatcccacgctaccgccgcccaccaccccggcgacctccccactggcgatccccggcctctccctctccttctcccctgcatcttcctccgaggcgcggcaaggggaggccgccgtcgtcgccgccgccgcgcgcgatccgggagggcaagaggggaggcggacgcgggcgaggagatggcatcggaggacgtggtggggaagagcaggggcggcacggccatcaacaccatcgtcaacctggctgaggaggccaagctcgcgcgcgagggcgtcaagggccccggccaccaggtcctcaccgtctgcaagtccctcttcgccggaggcgtcgccggcggcctttcattgatgacagccaagggttcatgctcggaaacgactacatcttgctctacgttgtcggctcagctagagtccttaatcatgaggagatgggacacgtcgattgttagagtacacttgacaggggtgaccgacgctgactagcgcagccggtgggcgttgtgctcttcaaccactcagaggcggacttctccgtgaagctggtggccatgtcgcatagatgattgtccaggtgatttcaacgccggaggtcgccgaggtggtggacctcgacgccaccgtccgggggagggaggattcgggtccaccgacgtctaagctccgagccttggtagatacatctagggaagttgtctgtttaggttgatgatggaacaccagggaaggtacccacctttcgatgatcattgtgtgtgtctgaagttaaatggaatcttgagaatgttatgtgatgttggcaaaaaaaaaaaaaaaa

SEQ ID NO: 63914 - protein, 173 aa, Triticum aestivum
  peptide (1)..(173): Ceres Seq. ID no. 15178539
LSYPDSPLVSLPSHATAAHHPGDLPTGDPRPLPLLLPCIFLRGAARGGRRRRRRRARSGRARGEADAGEEMASEDVVGKSRGGTAINTIVNLAEEAKLAREGVKGPGHQVLTVCKSLFAGGVAGGLSLMTAKGSCSETTTSCSTLSAQLESLIMRRWDTSIVRVHLTGVTDAD

SEQ ID NO: 63915 - protein, 128 aa, Triticum aestivum
  peptide (1)..(128): Ceres Seq. ID no. 15178540
SSLIPIHPSSPSHPTLPPPTTPATSPLAIPGLSLSFSPASSSEARQGEAAVVAAAARDPGGQEGRRTRARRWHRRTWWGRAGAARPSTPSSTWLRRPSSRARASRAPATRSSPSASPSSPEASPAAFH

SEQ ID NO: 63916 - protein, 103 aa, Triticum aestivum
  peptide (1)..(103): Ceres Seq. ID no. 15178541
MASEDVVGKSRGGTAINTIVNLAEEAKLAREGVKGPGHQVLTVCKSLFAGGVAGGLSLMTAKGSCSETTTSCSTLSAQLESLIMRRWDTSIVRVHLTGVTDAD

SEQ ID NO: 63917 - DNA, 1144 bp, Triticum aestivum
  misc_feature (1)..(1144): Ceres Seq. ID no. 12616903
agcatcggctagccaagtccagtaagcatcagcaaatctgacgtaccccattcgtgccccgtctccactcccgctaccgactccggcgaccaccatggccactcgccggagccccgccaccacccaccaccgactcctcctactcctcctccccttgctgctaatcggctcgttcctcctccccctctcgtccgcctaccgccccggcgacatcatccccatgctccgctccggccagtaccacggctcgaggtcggtgtggttcgacgtcatcggccgccactgcccggtcttcgcggtcaaccgggaggtgctgatgccgatccccaagccgacggggttcaccggtgcggatccgtataagataacatttcagattggacacgaaaagttccatgttccttggctttatgttattaatcgcaaaagctctgaagttccactgattgatttccatttaaaatacactggaaacgatttgcttggtgttacggctaaagtagtggacatgcctcaccattttgtggaacttcatcctgacataaagaagaatttctgggatccacagaattggccaaaatatgtacttgttagttatacatgggaggaacaatcagagatagatgttactgcaggattctatgtgttatttggatctggccttgttctttcgttcatccttgcaatctatgtattgcaatcatctcaagataaattaacaaggtttgtacgagaagcggtttctgatagcagtctacctgaaggaggggttgcaaaggttgagtgatgtttccgcgaggggctgttggattatcaacaaatgtccacttatggaaacaccgacaaagacattgtgaacttgagctttcttgggagcgtggacaatagcatgcatctgaagaaccggtgaaccatagcgagttaaatgagagatgaattataggtttttccttgctataacggaacatttagcaaactgaagtatgtgcagttgctagctcattacagttttgatatatgacctgtgtgatttcaatgttgcaagaatttgtcttctacatctacattttgtagaatgtgtaagtagaaacaggcaccgtgtacacctctacagaggaaaagattggtgcaaatgttcattctt

SEQ ID NO: 63918 - protein, 230 aa, Triticum aestivum
  peptide (1)..(230): Ceres Seq. ID no. 12616904
MATRRSPATTHHRLLLLLLPLLLIGSFLLPLSSAYRPGDIIPMLRSGQYHGSRSVWFDVIGRHCPVFAVNREVLMPIPKPTGFTGADPYKITFQIGHEKFHVPWLYVINRKSSEVPLIDFHLKYTGNDLLGVTAKVVDMPHHFVELHPDIKKNFWDPQNWPKYVLVSYTWEEQSEIDVTAGFYVLFGSGLVLSFILAIYVLQSSQDKLTRFVREAVSDSSLPEGGVAKVE

SEQ ID NO: 63919 - protein, 188 aa, Triticum aestivum
  peptide (1)..(188): Ceres Seq. ID no. 12616905
MLRSGQYHGSRSVWFDVIGRHCPVFAVNREVLMPIPKPTGFTGADPYKITFQIGHEKFHVPWLYVINRKSSEVPLIDFHLKYTGNDLLGVTAKVVDMPHHFVELHPDIKKNFWDPQNWPKYVLVSYTWEEQSEIDVTAGFYVLFGSGLVLSFILAIYVLQSSQDKLTRFVREAVSDSSLPEGGVAKVE

SEQ ID NO: 63920 - protein, 156 aa, Triticum aestivum
  peptide (1)..(156): Ceres Seq. ID no. 12616906
MPIPKPTGFTGADPYKITFQIGHEKFHVPWLYVINRKSSEVPLIDFHLKYTGNDLLGVTAKVVDMPHHFVELHPDIKKNFWDPQNWPKYVLVSYTWEEQSEIDVTAGFYVLFGSGLVLSFILAIYVLQSSQDKLTRFVREAVSDSSLPEGGVAKVE

SEQ ID NO: 63921 - DNA, 1467 bp, Triticum aestivum
  misc_feature (1)..(1467): Ceres Seq. ID no. 15224513
cccggccgtcatggcgtcggcggacgaagcgaatgcggcggccgaaggtacggaggggaagaattggcagcggaaggggaagcacaagaaggagaagccgtgggacgatgaccccaacatcgaccgctggacggtggagaagttcgacccctcctggaacgagggcggcctgctggaagtcagctccttctccaccctcttcccccagtaccgagagaagtacctgcaggagacatggccgatcgtcaagggcgcactgaaggagtttggagtctcatgcgagctcaatttggtggaaggatccatgacggtttccaccaccaggaagaccagggacccctacattattcttaaggccagggacctgataaagctcttgtcgcgaagtgtccctgcaccccaagcaattaaagtgctcaatgatgagatgaactgtgatattgtcaagattggtagcatcataagaaacaaggaaagatttgtcaaaaggagagaacgccttttgggccctaacctgtccacccttaaggctatagagattttgactggctgctacatcttagtacagggaaatactgtggctgccatgggttcctttaagggactgaaacaggtccggaagattgtagaggattgcataaagaacataaagcatccagtgtaccacattaaggaactccttattaaacgtgagctggctaaaaatcctgccctagccactgaaagttgggacaggtttctaccgaactttaagaaaaagaatgtcaagcaaaagaagcccaatactaaggagaagaaacaatacacaccctttccgccgcctcagcagcctagcaagattgatcttgaactggagagtggtgagtatttcatgagtgacaagaagaagtcagctaagaaatggcaagagaagctagataagcaatcagagaaatcagaagaaaagaaaagaaagagagaagctgcatttgttccaccaaaggagaacactgctggtctatctgaatctgccaaaagtactaatgacaacgagattgctgatatcacaaaatccttaaagaaaaaggcaaagaaattcagaaatagtgaagctgaggaaaatgtgaaaatcgagtcatatgttgcgagcaacgaagaatcacgctccaaaaagaagcgcagatcgtcatccaagtaaccgcaatatgtcagctactgggatgacaattttaattgtttcaagtagttgaacacctgccattgaagtaggttttcaagcttcaagctttagtggtgaaacagacaaaccttcaaccttaagtggtgaacattgtagtctgtttgttggctactgccgtctgattactccaggagtattgcagctttcctgcatagtccacggcttctaatttacaagatcagatccgtcagcagtctttttagaaacatatgaagagcagttaatgataagtccgttaattcttcttt

SEQ ID NO: 63922 - protein, 391 aa, Triticum aestivum
  peptide (1)..(391): Ceres Seq. ID no. 15224514
PAVMASADEANAAAEGTEGKNWQRKGKHKKEKPWDDDPNIDRWTVEKFDPSWNEGGLLEVSSFSTLFPQYREKYLQETWPIVKGALKEFGVSCELNLVEGSMTVSTTRKTRDPYIILKARDLIKLLSRSVPAPQAIKVLNDEMNCDIVKIGSIIRNKERFVKRRERLLGPNLSTLKAIEILTGCYILVQGNTVAAMGSFKGLKQVRKIVEDCIKNIKHPVYHIKELLIKRELAKNPALATESWDRFLPNFKKKNVKQKKPNTKEKKQYTPFPPPQQPSKIDLELESGEYFMSDKKKSAKKWQEKLDKQSEKSEEKKRKREAAFVPPKENTAGLSESAKSTNDNEIADITKSLKKKAKKFRNSEAEENVKIESYVASNEESRSKKKRRSSSK

SEQ ID NO: 63923 - protein, 388 aa, Triticum aestivum
  peptide (1)..(388): Ceres Seq. ID no. 15224515
MASADEANAAAEGTEGKNWQRKGKHKKEKPWDDDPNIDRWTVEKFDPSWNEGGLLEVSSFSTLFPQYREKYLQETWPIVKGALKEFGVSCELNLVEGSMTVSTTRKTRDPYIILKARDLIKLLSRSVPAPQAIKVLNDEMNCDIVKIGSIIRNKERFVKRRERLLGPNLSTLKAIEILTGCYILVQGNTVAAMGSFKGLKQVRKIVEDCIKNIKHPVYHIKELLIKRELAKNPALATESWDRFLPNFKKKNVKQKKPNTKEKKQYTPFPPPQQPSKIDLELESGEYFMSDKKKSAKKWQEKLDKQSEKSEEKKRKREAAFVPPKENTAGLSESAKSTNDNEIADITKSLKKKAKKFRNSEAEENVKIESYVASNEESRSKKKRRSSSK

SEQ ID NO: 63924 - protein, 290 aa, Triticum aestivum
  peptide (1)..(290): Ceres Seq. ID no. 15224516
MTVSTTRKTRDPYIILKARDLIKLLSRSVPAPQAIKVLNDEMNCDIVKIGSIIRNKERFVKRRERLLGPNLSTLKAIEILTGCYILVQGNTVAAMGSFKGLKQVRKIVEDCIKNIKHPVYHIKELLIKRELAKNPALATESWDRFLPNFKKKNVKQKKPNTKEKKQYTPFPPPQQPSKIDLELESGEYFMSDKKKSAKKWQEKLDKQSEKSEEKKRKREAAFVPPKENTAGLSESAKSTNDNEIADITKSLKKKAKKFRNSEAEENVKIESYVASNEESRSKKKRRSSSK

SEQ ID NO: 63925 - DNA, 1022 bp, Triticum aestivum
  misc_feature (1)..(1022): Ceres Seq. ID no. 13597163
aaccccagacaccacagccagcaatcagaccatggacggcggcggcggcgtgcggccatcgctccagcccgcggcggccggaggaggggcgtcgggcagcccggacgagccccgcgacgcgcgcgtggtgcgggagctcctccgctccatggggctcggcgagggcgagtacgagccgcgcgtcgtgcaccagttcctcgacctcgcctaccgctacgccggggacgtgctcggcgacgcccaggtctacgccgaccacgccggcaagccccagctcgacgccgacgacgtccgcctcgccatccaggccaaggtcaacttctccttctcccagccgccgccccgcgaggttctactcgagctggcacgcagcaggaacaaaatcccgctgcccaagtctattgctccacctggctcgattcctctgccacctgagcaggacaccttgctgagccagaactaccagctcctacccgcattgaagccgccaactcagaccgaggaagcagaagatgacgaggagggtgccaacgcggacgctgccaatcctaacccgaactccttgcaggatcagacgggcaacgagcagcagcagcagcctcagagccagagccagggccagagggtttctttccagctgaacgccgtggccgccgcagctgcaaagcgtctccgaatgacgattgatcagctgaacatgggctgactggatgttgtagatcgttggctggtccctggtactttgtgtcattggtgttgtagattgttggctggtccctgggatcgctatcgccctcctatttcaccatgtgattagtttaaaaaagtaataattcaccatgagaaacgctgatgcttcaggaaacggagcagccttgcaaataagtgtatgttgttgccgtgcaccccgggttgattagtttctgtccatcgttgtcaacttggtttgttttgtagatggtgttgacttgtcaaacttgaactgttccattgttgtttctgaataccaaatcagtgttccc

SEQ ID NO: 63926 - protein, 234 aa, Triticum aestivum
  peptide (1)..(234): Ceres Seq. ID no. 13597164
TPDTTASNQTMDGGGGVRPSLQPAAAGGGASGSPDEPRDARVVRELLRSMGLGEGEYEPRVVHQFLDLAYRYAGDVLGDAQVYADHAGKPQLDADDVRLAIQAKVNFSFSQPPPREVLLELARSRNKIPLPKSIAPPGSIPLPPEQDTLLSQNYQLLPALKPPTQTEEAEDDEEGANADAANPNPNSLQDQTGNEQQQQPQSQSQGQRVSFQLNAVAAAAAKRLRMTIDQLNMG

SEQ ID NO: 63927 - protein, 224 aa, Triticum aestivum
  peptide (1)..(224): Ceres Seq. ID no. 13597165
MDGGGGVRPSLQPAAAGGGASGSPDEPRDARVVRELLRSMGLGEGEYEPRVVHQFLDLAYRYAGDVLGDAQVYADHAGKPQLDADDVRLAIQAKVNFSFSQPPPREVLLELARSRNKIPLPKSIAPPGSIPLPPEQDTLLSQNYQLLPALKPPTQTEEAEDDEEGANADAANPNPNSLQDQTGNEQQQQPQSQSQGQRVSFQLNAVAAAAAKRLRMTIDQLNMG

SEQ ID NO: 63928 - protein, 185 aa, Triticum aestivum
  peptide (1)..(185): Ceres Seq. ID no. 13597166
MGLGEGEYEPRVVHQFLDLAYRYAGDVLGDAQVYADHAGKPQLDADDVRLAIQAKVNFSFSQPPPREVLLELARSRNKIPLPKSIAPPGSIPLPPEQDTLLSQNYQLLPALKPPTQTEEAEDDEEGANADAANPNPNSLQDQTGNEQQQQPQSQSQGQRVSFQLNAVAAAAAKRLRMTIDQLNMG

SEQ ID NO: 63929 - DNA, 1314 bp, Triticum aestivum
  misc_feature (1)..(1314): Ceres Seq. ID no. 13597268
aatccattcatctcagatctcaactacatcccctcctggtgttctcttctcagcttggatcccgcaccaactgttcatcttcaaggtgctcattaaatcccacctctggttttctacccagcttggatctctaatcaggcttttctccaagttagagttgctcacctcaataacttcatacatcgtcagcaatggccaccggaggtataaccatagaaaccataccagaggaacttccacttgactttctgaagaaaattacgaataacttctccagcgacagtgatcatctgattggaacaggatcatttgggtcagtttatagggggtttctggataatggcgaggtgattgctgtgaagaaactcggggaagaatcacctgtgccacgtgacaaagtatttgcaaatgaggttaagaatattatggtgctcgaacatgaaaatattgtcaagttgatagcatactgctatgacacaaacaacagattggtgctgagcaatggaagacacattattgcagagattactgaaactttactctgctatgaatacttagctaagggcggcctcgacaagaatcttttcggtgaacccagtattgactgggatacacggttcaaaataataaaggggatttgtgaaggtgtacattttatacataccttacctagtcccattctccatttgggtctgaagactcaaaatatattgctggatgacaacttgacaccaaaactttcggattttggattcgccagaatatttggggaagaatacacccgaataaacacaagaagtgttgtgggacatgttggatacatggccccagagtatctatataatggtgaaatctcggcccgttcggacatatatagtttaggcctaattatattggagatctgcacgaaagagaagaatagttccagcactgaccagaagcatgcaaggaaatatattgacggggtaaaaaaacattggttccaaatagaacaaataatggccgagtattccgatttagaagaacattgttttgaccaaatagaaggctgcatacatattggactagaatgtgtggagcttgatcagaagaagagaccttccatagagcacattgtgaacaagctcaataatctcccaactgagaatagttaattccattagattgtaagacaatatactatgataggttagcaagtgcctacgtacaaagccacactcgtgtcattttttaagttttaagaatgattaaaattcattcctatgtggttattggaaggaagttaaacaagcgaaagggttgaccaaaaaccag

SEQ ID NO: 63930 - protein, 320 aa, Triticum aestivum
  peptide (1)..(320): Ceres Seq. ID no. 15222062
MATGGITIETIPEELPLDFLKKITNNFSSDSDHLIGTGSFGSVYRGFLDNGEVIAVKKLGEESPVPRDKVFANEVKNIMVLEHENIVKLIAYCYDTNNRLVLSNGRHIIAEITETLLCYEYLAKGGLDKNLFGEPSIDWDTRFKIIKGICEGVHFIHTLPSPILHLGLKTQNILLDDNLTPKLSDFGFARIFGEEYTRINTRSVVGHVGYMAPEYLYNGEISARSDIYSLGLIILEICTKEKNSSSTDQKHARKYIDGVKKHWFQIEQIMAEYSDLEEHCFDQIEGCIHIGLECVELDQKKRPSIEHIVNKLNNLPTENS

SEQ ID NO: 63931 - protein, 242 aa, Triticum aestivum
  peptide (1)..(242): Ceres Seq. ID no. 15222063
MVLEHENIVKLIAYCYDTNNRLVLSNGRHIIAEITETLLCYEYLAKGGLDKNLFGEPSIDWDTRFKIIKGICEGVHFIHTLPSPILHLGLKTQNILLDDNLTPKLSDFGFARIFGEEYTRINTRSVVGHVGYMAPEYLYNGEISARSDIYSLGLIILEICTKEKNSSSTDQKHARKYIDGVKKHWFQIEQIMAEYSDLEEHCFDQIEGCIHIGLECVELDQKKRPSIEHIVNKLNNLPTENS

SEQ ID NO: 63932 - DNA, 1354 bp, Triticum aestivum
  misc_feature (1)..(1354): Ceres Seq. ID no. 13597269
aacctatcaccagtcaccaccattataaaccaacggccagctaggtagctaaagtgacctcctgtgagcaagaaaagctcgccaagatcagtagtgctaagcgacaggtagtgagccaagccagagcaacgaaggatggcgtccgagacgagcgtcgccgacgagaaggcgcccgctgggctgagccgctacgaggcggacgcggaggacgggcaggagggcggcggcgacgaaaagtcccggctgtccggcctgctgtggcacggcgggtcggcgtacgacgcgtggttcagctgcgcgtcgaaccaggtcgcgcaggtcctgctgacgctgccctactcgttcgcgcagctgggcatggtgagcggcatcctgttccagctcttctacggcctcctcggcagctggaccgcctacctcatcagcatcctctacctcgagtaccgcacccgcaaggagaaggacaaggtcgacttccgcaaccacgtcatccagtggttcgaggtgctggacgggctgctggggcggcactggcggaacgtggggctggccttcaactgcacgttcctgctgttcgggtcggtgatccagctcatcggctgcgctagcaacatctactacgtgaacgaccacctggacaagcggacgtggacctacatcttcggcgcctgctgcgccaccaccgtcttcatcccctccttccacaactaccgcgtctggtccttcctcggcctcctcatgaccacctacaccgcctggtacatcgccgtcgcctccctcatgcacggccaggccgacgccgtcaagcactccggccccaccaccatcatgctctacttcaccggcgccaccaacatcctctacaccttcggggggcacgctgtcaccgtgtaagccgacacgccccaccccgccccatcgtcccacctgctcacttttcacttgcatgccctaatctttttccaaagctgatcatctagtttatccgtcgtatatatacaatgttgtaacggtcactggtcacggagcgtgcacgctactactgcccagctcggggtcacgtgcaacgggaatgtcgtctgacatgcggggccgtcctgtgtataagcaacgggcgtcacctggggaccacctagacctagacatgcacgcacggtgcccatatgcgtacatgcagtatatcccaagagcacacacgtgctacccacacatcaaccgagcacaatgctcgtggatgctggagcggaacatatacgtttctgaattttcaacataaacaaagttgaaacctgagctagcaggataatatatctatctacgattttcgttaccctcaaaaaagaatttagggtcc

SEQ ID NO: 63933 - protein, 252 aa, Triticum aestivum
  peptide (1)..(252): Ceres Seq. ID no. 13597270
MASETSVADEKAPAGLSRYEADAEDGQEGGGDEKSRLSGLLWHGGSAYDAWFSCASNQVAQVLLTLPYSFAQLGMVSGILFQLFYGLLGSWTAYLISILYLEYRTRKEKDKVDFRNHVIQWFEVLDGLLGRHWRNVGLAFNCTFLLFGSVIQLIGCASNIYYVNDHLDKRTWTYIFGACCATTVFIPSFHNYRVWSFLGLLMTTYTAWYIAVASLMHGQADAVKHSGPTTIMLYFTGATNILYTFGGHAVTV

SEQ ID NO: 63934 - protein, 178 aa, Triticum aestivum
  peptide (1)..(178): Ceres Seq. ID no. 13597271
MVSGILFQLFYGLLGSWTAYLISILYLEYRTRKEKDKVDFRNHVIQWFEVLDGLLGRHWRNVGLAFNCTFLLFGSVIQLIGCASNIYYVNDHLDKRTWTYIFGACCATTVFIPSFHNYRVWSFLGLLMTTYTAWYIAVASLMHGQADAVKHSGPTTIMLYFTGATNILYTFGGHAVTV

SEQ ID NO: 63935 - DNA, 1725 bp, Triticum aestivum
  misc_feature (1)..(1725): Ceres Seq. ID no. 13597325
ttttttttcgagcggcgacgaaatgcagtccacctccgtttgctacccacgcacgcggccgcgggcccacggccggaggagctagaaagacctatcgccaccaggcccggtcccgagggaaaggaatccagcaaggcagccaggagcgcgcccccacccgccggcgacggccacatgccgaccgcctcctgcctccgcccgcctctccgcagcggccgctccgccgcggcgggcctcaggttccctcccccggcggggctggcgattgggagctggcggaggaggctcgccggggtcggggtggcggccgcctccgcctcgcccttcgacgagctctacgcgcggggaaggcccatccacggcccctccaagaaatctaccttgtggaatttgatccaagacatagagcctttggatcttagtgtcattcagaaagatgttcctcttgaaacggttgatgcaatgaagaggaccatctctggcatgttgggtctgcttccatctgatcagttccgtgttgttgtagaagccctttggagtccatttttcaagttattggtatcttcaatcatgactgggtatactctacgtaatgctgaatgcaggctctcttttgaaaggaacctagaactttctgaagaagatgctgaatgtgagaaaagagacacgactgaagataatcttcatgatatcaatttgggtaggcctgttacaattttcagattatcggaagacgacatgccccaggactctggaaaaagtgacgaagaatcatctggtgagagtatgggggaaatgttaagtaacttaacaccccaagtggaagagcagattattcggttgcaatctcgtttggatgcgatgaaaaaggagttgcatgacctgaagaggaaaaattctgcccttcaaatgcaacagtttgttggagaagagaaaaatgatctgctagactatctaagatccctaacaccagagaaggttgctgaactctcggaatccacctgtcccggtgtgcaagaggctatccagtctgttgtgcatggtttgcttgctactctttcccccaaggtacactcaaagtctcctccgccactagagaatgctgggggagccctaaatcgtgggggtgaggacgatgactgtgcagagcttgtcgagaatacttccctcccgtttcagcccctaatatctgtcccacgtgattatcttgcacgtttgctattctggtgcatgttgctgggtcactacatccggggtctggaataccggttagagctggcacaccttctcagaatatctagcgacgtggggtctttccccattgatgacaatcattttatttgagaaagcttcgctggcttattgagatccatcagcgaagaggatggaaatgcactggccaagaggccgcagaagttgctgtttggggcatttcctgacaatgaaacagggagttctgggccatagctcctgttgtagttcttgtaaagtcggaacgaaggcgttcgggtgtaaagttagtgttacatatcaatgtgaacaatatattttatttccttctatttattgtgtcgtatacaaaataaacatgttgttcttgctgctaatctcgtggtagcatggtggatactgggtattaggcatcccttgtactcataggttgtatgtatttgtctaatgtttatcacgtgaatgatattatattgtcgagtcgtatcaaggttc

SEQ ID NO: 63936 - protein, 447 aa, Triticum aestivum
  peptide (1)..(447): Ceres Seq. ID no. 13597326
FFFERRRNAVHLRLLPTHAAAGPRPEELERPIATRPGPEGKESSKAARSAPPPAGDGHMPTASCLRPPLRSGRSAAAGLRFPPPAGLAIGSWRRRLAGVGVAAASASPFDELYARGRPIHGPSKKSTLWNLIQDIEPLDLSVIQKDVPLETVDAMKRTISGMLGLLPSDQFRVVVEALWSPFFKLLVSSIMTGYTLRNAECRLSFERNLELSEEDAECEKRDTTEDNLHDINLGRPVTIFRLSEDDMPQDSGKSDEESSGESMGEMLSNLTPQVEEQIIRLQSRLDAMKKELHDLKRKNSALQMQQFVGEEKNDLLDYLRSLTPEKVAELSESTCPGVQEAIQSVVHGLLATLSPKVHSKSPPPLENAGGALNRGGEDDDCAELVENTSLPFQPLISVPRDYLARLLFWCMLLGHYIRGLEYRLELAHLLRISSDVGSFPIDDNHFI

SEQ ID NO: 63937 - protein, 389 aa, Triticum aestivum
  peptide (1)..(389): Ceres Seq. ID no. 13597327
MPTASCLRPPLRSGRSAAAGLRFPPPAGLAIGSWRRRLAGVGVAAASASPFDELYARGRPIHGPSKKSTLWNLIQDIEPLDLSVIQKDVPLETVDAMKRTISGMLGLLPSDQFRVVVEALWSPFFKLLVSSIMTGYTLRNAECRLSFERNLELSEEDAECEKRDTTEDNLHDINLGRPVTIFRLSEDDMPQDSGKSDEESSGESMGEMLSNLTPQVEEQIIRLQSRLDAMKKELHDLKRKNSALQMQQFVGEEKNDLLDYLRSLTPEKVAELSESTCPGVQEAIQSVVHGLLATLSPKVHSKSPPPLENAGGALNRGGEDDDCAELVENTSLPFQPLISVPRDYLARLLFWCMLLGHYIRGLEYRLELAHLLRISSDVGSFPIDDNHFI

SEQ ID NO: 63938 - protein, 293 aa, Triticum aestivum
  peptide (1)..(293): Ceres Seq. ID no. 13597328
MKRTISGMLGLLPSDQFRVVVEALWSPFFKLLVSSIMTGYTLRNAECRLSFERNLELSEEDAECEKRDTTEDNLHDINLGRPVTIFRLSEDDMPQDSGKSDEESSGESMGEMLSNLTPQVEEQIIRLQSRLDAMKKELHDLKRKNSALQMQQFVGEEKNDLLDYLRSLTPEKVAELSESTCPGVQEAIQSVVHGLLATLSPKVHSKSPPPLENAGGALNRGGEDDDCAELVENTSLPFQPLISVPRDYLARLLFWCMLLGHYIRGLEYRLELAHLLRISSDVGSFPIDDNHFI

SEQ ID NO: 63939 - DNA, 1460 bp, Triticum aestivum
  misc_feature (1)..(1460): Ceres Seq. ID no. 13598495
aggtatcgtgcacttcactcgcttggcatttcgtcacgtctcttccttcctttctcagttccccgcagccgcttcgctcgcttgccttctctcgccgtctccgcctcctcctccagtcctccgtcccacccctcgacgattcctcggcgatgggcggcgcggcggcggcgacgggcgccgccaggtggatccagcggctgagcgcggccaggatctcgacggaggcgctggagcggggccagagccgcgtcatcgacgcctccctcaccctcatccgcgagcgcgccaagctcaagggcgagctgctgcgtgctatgggcggtgtcaaagcttctgcaacactcttaggagtaccccttgggcacaactcgtctttcttgcaggggcctgcgtttgctcctcctcgcataagggaggccatttggtgtggaagcaccaactctagcacagaagaaggcaaggaattaaatgatccaagggtgctaactgatgtcggtgatgtccccatacaagagattcgtgactgtggtgttgaagatgacagattgatgcatgtaatcagcgagtctgtcaaaacagtaatggacgaagatcctcttcggccgttggtcttaggaggcgatcactcgatatcttatccagttgttagggctgtgtctgaaaagcttggcggacctgttgacattcttcatcttgacgcacatccagatatctatgactgttttgaaggcaacacttactcacacgcttcttcatttgcaagaataatggaaggaggttatgcgaggcgacttttgcaggttggacttagatcaattaccaaagaaggacgtgagcaagggaagagatttggtgtggaacagtatgagatgcgcaccttctccagagatcgggagaagcttgagaatctgaaacttggggaaggtgtgaagggggtgtatgtctccgttgacgtggactgcctcgaccccgcattcgctcctggcgtgtctcatatcgagccgggaggcctctcatttcgcgacgtgctcaacatcctccagaatctgcaaggcgatgtcgtcgccggagatgtggtggagttcaacccgcagcgcgacacggtcgacgggatgacggctatggtcgccgcgaagctggtccgggagctgagcgccaagatctcaaaatgagcagcgacagtcaggacagaggcagcagcagagaggattttcaggcacagtggtcgttgatcttagttcctgccaatcattcagttgtgccacgttttagtctgacaatcttctataaataataaaatcaggctgcaaaacgacttcgaatttggtatgtgctctgtggtatttgttggttctcctttcacatgcacgcatccaagattaagctcgtaggtgcctagtagtcgataagaacatcgtctctcacgcaaaggatatgttgaaaaatctgaaatgaatttg

SEQ ID NO: 63940 - protein, 389 aa, Triticum aestivum
  peptide (1)..(389): Ceres Seq. ID no. 13598496
VSCTSLAWHFVTSLPSFLSSPQPLRSLAFSRRLRLLLQSSVPPLDDSSAMGGAAAATGAARWIQRLSAARISTEALERGQSRVIDASLTLIRERAKLKGELLRAMGGVKASATLLGVPLGHNSSFLQGPAFAPPRIREAIWCGSTNSSTEEGKELNDPRVLTDVGDVPIQEIRDCGVEDDRLMHVISESVKTVMDEDPLRPLVLGGDHSISYPVVRAVSEKLGGPVDILHLDAHPDIYDCFEGNTYSHASSFARIMEGGYARRLLQVGLRSITKEGREQGKRFGVEQYEMRTFSRDREKLENLKLGEGVKGVYVSVDVDCLDPAFAPGVSHIEPGGLSFRDVLNILQNLQGDVVAGDVVEFNPQRDTVDGMTAMVAAKLVRELSAKISK

SEQ ID NO: 63941 - protein, 340 aa, Triticum aestivum
  peptide (1)..(340): Ceres Seq. ID no. 13598497
MGGAAAATGAARWIQRLSAARISTEALERGQSRVIDASLTLIRERAKLKGELLRAMGGVKASATLLGVPLGHNSSFLQGPAFAPPRIREAIWCGSTNSSTEEGKELNDPRVLTDVGDVPIQEIRDCGVEDDRLMHVISESVKTVMDEDPLRPLVLGGDHSISYPVVRAVSEKLGGPVDILHLDAHPDIYDCFEGNTYSHASSFARIMEGGYARRLLQVGLRSITKEGREQGKRFGVEQYEMRTFSRDREKLENLKLGEGVKGVYVSVDVDCLDPAFAPGVSHIEPGGLSFRDVLNILQNLQGDVVAGDVVEFNPQRDTVDGMTAMVAAKLVRELSAKISK

SEQ ID NO: 63942 - protein, 285 aa, Triticum aestivum
  peptide (1)..(285): Ceres Seq. ID no. 13598498
MGGVKASATLLGVPLGHNSSFLQGPAFAPPRIREAIWCGSTNSSTEEGKELNDPRVLTDVGDVPIQEIRDCGVEDDRLMHVISESVKTVMDEDPLRPLVLGGDHSISYPVVRAVSEKLGGPVDILHLDAHPDIYDCFEGNTYSHASSFARIMEGGYARRLLQVGLRSITKEGREQGKRFGVEQYEMRTFSRDREKLENLKLGEGVKGVYVSVDVDCLDPAFAPGVSHIEPGGLSFRDVLNILQNLQGDVVAGDVVEFNPQRDTVDGMTAMVAAKLVRELSAKISK

SEQ ID NO: 63943 - DNA, 1317 bp, Triticum aestivum
  misc_feature (1)..(1317): Ceres Seq. ID no. 12617080
atccagtccagcgctttctcctcgctcccaccccacccttcccctccaatagccaagcaagaactgggacacaagcaaagctttgccaagaggactaccaccagaggaggagacaaggaatccgccgcgctcgcttcccctccagcccaaccccaaccccaaccaggccccgcggcgaccacaagctcctccgctccccgcaacctcgcctcgccacgctcaggctgttgagtggccagaaatctggatatggatgtgcctgcggctccagccatggcatttaaagcctacaagtacaaagaggttcttgtcagggactacttgctcgcagactcgtatgctccatacgctgctgtgctcggggggatcctgatgtgcaaattggcctatgatttcacgcgcattatcagttcatttaacttcaaaggttatgcttctcttaacaatatgcagaagatcgaatggaacaacagggggatgtccactgtccatgcaatattcattacagttatgtcagtatacctagtgttcttctcgggtatgttttctgaccagctggatggaccagtaacagtgagaagttcaagcctctccagttttacattaggggtctctattgggtatttcattacagacattgccatgatatattggctttaccctgcccttggtggaatggagtatgttatccaccacatgctgtcacttatgtctacaatgtacgctatgctttctggggaagcacatgtatacatatacatgggtctcatcactgagactacaacgccaggaatcaatctaagatggttccttgatgttgctggaatgaagaactccaaagcttaccttgttaacggagttgcaatggttgttacttggctggttgcaaggataatcctgttcatgtacttgttttaccacatgtttgtacattatgaccagattaagaagatgaacaccttcggctattttctggtacttattgcgccttgcataatcttcgtgatgaatgtgctttggttctccaagatcctaaaaggcctcaagaagacgatggccaagaggcatgctgagtagtggaatgtgtgttcatgattaacgtacggccaccatccgatcatctgtagatttggttacatctgcatatagcttatgagtagtcagtcactactgtagcccatacctgtgatttcagctcggctgtcatgtttcggtgtatgactacccagccagcctttcctagacgctcgatttgtatatatgtttggttacggctgcatttacctatttgcatgttaataaatcttttagttgtgt

SEQ ID NO: 63944 - protein, 275 aa, Triticum aestivum
  peptide (1)..(275): Ceres Seq. ID no. 12617081
MDVPAAPAMAFKAYKYKEVLVRDYLLADSYAPYAAVLGGILMCKLAYDFTRIISSFNFKGYASLNNMQKIEWNNRGMSTVHAIFITVMSVYLVFFSGMFSDQLDGPVTVRSSSLSSFTLGVSIGYFITDIAMIYWLYPALGGMEYVIHHMLSLMSTMYAMLSGEAHVYIYMGLITETTTPGINLRWFLDVAGMKNSKAYLVNGVAMVVTWLVARIILFMYLFYHMFVHYDQIKKMNTFGYFLVLIAPCIIFVMNVLWFSKILKGLKKTMAKRHAE

SEQ ID NO: 63945 - protein, 267 aa, Triticum aestivum
  peptide (1)..(267): Ceres Seq. ID no. 12617082
MAFKAYKYKEVLVRDYLLADSYAPYAAVLGGILMCKLAYDFTRIISSFNFKGYASLNNMQKIEWNNRGMSTVHAIFITVMSVYLVFFSGMFSDQLDGPVTVRSSSLSSFTLGVSIGYFITDIAMIYWLYPALGGMEYVIHHMLSLMSTMYAMLSGEAHVYIYMGLITETTTPGINLRWFLDVAGMKNSKAYLVNGVAMVVTWLVARIILFMYLFYHMFVHYDQIKKMNTFGYFLVLIAPCIIFVMNVLWFSKILKGLKKTMAKRHAE

SEQ ID NO: 63946 - protein, 234 aa, Triticum aestivum
  peptide (1)..(234): Ceres Seq. ID no. 12617083
MCKLAYDFTRIISSFNFKGYASLNNMQKIEWNNRGMSTVHAIFITVMSVYLVFFSGMFSDQLDGPVTVRSSSLSSFTLGVSIGYFITDIAMIYWLYPALGGMEYVIHHMLSLMSTMYAMLSGEAHVYIYMGLITETTTPGINLRWFLDVAGMKNSKAYLVNGVAMVVTWLVARIILFMYLFYHMFVHYDQIKKMNTFGYFLVLIAPCIIFVMNVLWFSKILKGLKKTMAKRHAE

SEQ ID NO: 63947 - DNA, 1672 bp, Triticum aestivum
  misc_feature (1)..(1672): Ceres Seq. ID no. 15225196
ttgctacacagaacatcctcaccgcataccactcttccctttccctgtacccgaatcatcatccgttccccatctcatccgttcccttgagagctgcagcggcgacatgggcggcggcggcgcagccggggatgccgatgggtgggcggatcaggaccaggggaacggcgggagccgcggcgggggtgaggcgaagcggtcggagatctatacctacgaggccggttggcacatctacggtatgaactggagcgtgcggcgggacaagaagtaccgactcgccatcgcaagttttctcgagcagctcgtcaatcgcgtggaggtggtccagctcgacgagtccacaggtgacatcgcccccgtgctctccttcgaccaccctttccctccccccaagtccatgttcgtcccggacccccaaggcctccgccccgatctgcttgccacctctgcagacctccttcgcatatggcgcatcacggacgacgacgccgctgccccgggcgctgccgactccaacaatggctccgtccgctgcaacggcgtggggagccccgctggtcagcagccgggcgtcaagctgtgctgcgagctcaacggcaaccgcaacagcgacttctgcggcccgctcacctcctttgactggaacgacgccgacccacgccgcatcggaacatcatccatcgataccacttgcaccatctgggacgttgaacgtgaggtagtcgacacccagctcatagcccatgacaaagaggtctatgacatagcctggggtggcgctggtgtctttgcatctgtttctgcggatggctcggtccgcgtgtttgatcttcgggataaggaacattccacaatcatctatgagagtagttctggcggcggctccaattctgctgctacggatggtggggctgtgttgccgacaccattggttaggctggggtggaacaagcaggacccaaggtatatggcaacaatcatcatggatagccccaaggtggtcgtgcttgacattcgctacccaacactgcctgtcgttgaactccaccgccatcatgctcctgtgaatgcaatcgcatgggcgcctcactcttcttgccacatttgcacagctggggatgactcgcaagcactgatatgggacctctcctccatgggcacggggaacaatagcggaggcaatggaaatggaaatggcaatgctgctgcagctgcagcagcagagggtggtcttgaccctatattggcttacactgcaggggcggaggtggagcagctgcagtggtcagctacccagcctgactgggttgccattgtattcgccaataaactgcagattctcagggtctgatttcttcattctagctttatcaatggtggggcagaaagaggcaaagaagcccatcatggatgatgagagttcaggcaatgggaggacggtaattttgcttttgctttagtgatgtatgttgcagacagctgatatgtgtgctgagttgctgatagaaatgatggttcactaggtagaagctggaattgacaatgaactgagttattaagagtaattagacttataggattagtgttggtgatactgaactaaattgctgttatttaaattgctcgactctagtactgctgttaacttgcttattgctgcaattgtcac

SEQ ID NO: 63948 - protein, 450 aa, Triticum aestivum
  peptide (1)..(450): Ceres Seq. ID no. 15225197
CYTEHPHRIPLFPFPVPESSSVPHLIRSLESCSGDMGGGGAAGDADGWADQDQGNGGSRGGGEAKRSEIYTYEAGWHIYGMNWSVRRDKKYRLAIASFLEQLVNRVEVVQLDESTGDIAPVLSFDHPFPPPKSMFVPDPQGLRPDLLATSADLLRIWRITDDDAAAPGAADSNNGSVRCNGVGSPAGQQPGVKLCCELNGNRNSDFCGPLTSFDWNDADPRRIGTSSIDTTCTIWDVEREVVDTQLIAHDKEVYDIAWGGAGVFASVSADGSVRVFDLRDKEHSTIIYESSSGGGSNSAATDGGAVLPTPLVRLGWNKQDPRYMATIIMDSPKVVVLDIRYPTLPVVELHRHHAPVNAIAWAPHSSCHICTAGDDSQALIWDLSSMGTGNNSGGNGNGNGNAAAAAAAEGGLDPILAYTAGAEVEQLQWSATQPDWVAIVFANKLQILRV

SEQ ID NO: 63949 - protein, 415 aa, Triticum aestivum
  peptide (1)..(415): Ceres Seq. ID no. 15225198
MGGGGAAGDADGWADQDQGNGGSRGGGEAKRSEIYTYEAGWHIYGMNWSVRRDKKYRLAIASFLEQLVNRVEVVQLDESTGDIAPVLSFDHPFPPPKSMFVPDPQGLRPDLLATSADLLRIWRITDDDAAAPGAADSNNGSVRCNGVGSPAGQQPGVKLCCELNGNRNSDFCGPLTSFDWNDADPRRIGTSSIDTTCTIWDVEREVVDTQLIAHDKEVYDIAWGGAGVFASVSADGSVRVFDLRDKEHSTIIYESSSGGGSNSAATDGGAVLPTPLVRLGWNKQDPRYMATIIMDSPKVVVLDIRYPTLPVVELHRHHAPVNAIAWAPHSSCHICTAGDDSQALIWDLSSMGTGNNSGGNGNGNGNAAAAAAAEGGLDPILAYTAGAEVEQLQWSATQPDWVAIVFANKLQILRV

SEQ ID NO: 63950 - protein, 370 aa, Triticum aestivum
  peptide (1)..(370): Ceres Seq. ID no. 15225199
MNWSVRRDKKYRLAIASFLEQLVNRVEVVQLDESTGDIAPVLSFDHPFPPPKSMFVPDPQGLRPDLLATSADLLRIWRITDDDAAAPGAADSNNGSVRCNGVGSPAGQQPGVKLCCELNGNRNSDFCGPLTSFDWNDADPRRIGTSSIDTTCTIWDVEREVVDTQLIAHDKEVYDIAWGGAGVFASVSADGSVRVFDLRDKEHSTIIYESSSGGGSNSAATDGGAVLPTPLVRLGWNKQDPRYMATIIMDSPKVVVLDIRYPTLPVVELHRHHAPVNAIAWAPHSSCHICTAGDDSQALIWDLSSMGTGNNSGGNGNGNGNAAAAAAAEGGLDPILAYTAGAEVEQLQWSATQPDWVAIVFANKLQILRV

SEQ ID NO: 63951 - DNA, 1212 bp, Triticum aestivum
  misc_feature (1)..(1212): Ceres Seq. ID no. 13597272
aaacacaactcgtgcccgtccgtcccggcggctctctcaaacccacactccccaccttcttgcggcacaagccggagccgacgatccccccacccgcgccgccgtcgacgcggcctcctccgcccgccgggatcggagagaactgtataaacgttttagtggttgaagcgacttgagtctttaaccatgagtagcattggaaccgggtatgatctgtccgtcaccactttttccccggacggccgtgtcttccaggtcgagtatgctggcaaggccgtcgacaacagcgggacgattgttgggatcaagtgcaaagatggaattgtcctcggtgtggagaagctgataacgtcgaagatgatacttgctgggtcgaatcggagacttcactctgttcaccggaactctggcttggctgtggctgggttagcagcagacggtaggcaggtggtctcaagagcaaagtcagaagcagccaattatgaaaaggtatacggagaacccatgcctgtgaaggaattagctgatcgtgtagctagctacgttcatctgtgtacactctactggtggctcaggccttttggctgtggagttattcttggaggttatgatagggatgggccacagctctacatgatcgaaccttcagggctctcatataaatattttggtgctgctctgggtaaaggaagacaggctgcaaaaacggagatagagaaattgaagctttctgagctaacctgcagggaaggcattgttgaggttgccaagataatttatggtgtacacgacgaagcgaaagacaaatcttttgagctggaactgagctgggtgtgcgatgaatctaaccgtcagcatgagaaggttccaaatgatcttctggagcaggccaaggcagcagcgcaggcagcgttggaagagatggatgccgactaagaagagaccatgagctctgcttcccatttacttctacgtgcggcataacagatacaggagtggagcggtttgtttccagtgcaaaaaaactaccttcagggcgttgttgcttccagttccatgattccatcccagtcgaggtagcaagcaggttctcgtgttttggggggttgtagtgaatcgtattctccttgctgttggtcacacactgaatcttaatctattgaattccgaacatatttgtcacatatcttaatcacgcgtggcctaagagat

SEQ ID NO: 63952 - protein, 249 aa, Triticum aestivum
  peptide (1)..(249): Ceres Seq. ID no. 15222064
MSSIGTGYDLSVTTFSPDGRVFQVEYAGKAVDNSGTIVGIKCKDGIVLGVEKLITSKMILAGSNRRLHSVHRNSGLAVAGLAADGRQVVSRAKSEAANYEKVYGEPMPVKELADRVASYVHLCTLYWWLRPFGCGVILGGYDRDGPQLYMIEPSGLSYKYFGAALGKGRQAAKTEIEKLKLSELTCREGIVEVAKIIYGVHDEAKDKSFELELSWVCDESNRQHEKVPNDLLEQAKAAAQAALEEMDAD

SEQ ID NO: 63953 - protein, 192 aa, Triticum aestivum
  peptide (1)..(192): Ceres Seq. ID no. 15222065
MILAGSNRRLHSVHRNSGLAVAGLAADGRQVVSRAKSEAANYEKVYGEPMPVKELADRVASYVHLCTLYWWLRPFGCGVILGGYDRDGPQLYMIEPSGLSYKYFGAALGKGRQAAKTEIEKLKLSELTCREGIVEVAKIIYGVHDEAKDKSFELELSWVCDESNRQHEKVPNDLLEQAKAAAQAALEEMDAD

SEQ ID NO: 63954 - protein, 143 aa, Triticum aestivum
  peptide (1)..(143): Ceres Seq. ID no. 15222066
MPVKELADRVASYVHLCTLYWWLRPFGCGVILGGYDRDGPQLYMIEPSGLSYKYFGAALGKGRQAAKTEIEKLKLSELTCREGIVEVAKIIYGVHDEAKDKSFELELSWVCDESNRQHEKVPNDLLEQAKAAAQAALEEMDAD

SEQ ID NO: 63955 - DNA, 1440 bp, Triticum aestivum
  misc_feature (1)..(1440): Ceres Seq. ID no. 13597162
gcaggaattcgccmcsmkmccrttmcmactwkawyrtgyytaatcgaaaaaagacaacatccggtagtagctagagcaacaaggacgaattaaacaacaacacaactactcttaggaatggccggcgaggaggagatgcaggtggtggagtcctgcttcgtgacgccggtggcggacgcaccgagcagggcgatccggctctcgccgttcgacctcatgctagccagcagaggctacaccccactcgtccacttctaccgcccaccagaaaccgtgggcgacgacttcttcgacgtgacaaggttgaagacggcgttgggcaaggcgcttgtgcccttctaccccctggccggccgcttgagggcgggcggcgacggcaggttggagatcgactgcaacggcaagggcatgctcttccttgtggctcagtctcgtctcaccatggatgacttcagcgacttcaagccatcatcaaagcagaggaggctgtttgttcctcatgtcagcgactcagatggcctcttatgggcaacccaggtgacattcttaaagtgtggtggggtggtcttagggtcggcaatccatcatgctggtatggacggatctgttgtattccacttcttaaggacatgatcagctttctccagagacggcgaccgggctatggtgaacctcccctgccatgatcgctcgcgcttgtctgcgcgtgatccacctgttgttcatccctatgctctttccatttttagccccaagataaacctacccccacagccagggctggtcgtcaacgaggttgtagccctcacccttgccaaggaccaactttccactctcaagcacatatctggtggcgatggcgtgagcaccttcagcgccttgagcgcccacctgtggcaatgcatgtgtttagcccggcagctacccccggatgctacgacgcagcttatgttctcggccaacatccgccgcatcatgaggccaccactcccagacggctacttcggcaacgcgataataaacctaagtgtcggcgacaaagcgcgtgcaatcgcctcgcgcgagctgagctacattgcgcggcgaataagagacacccacagacggttgaacgacgagctagtgcattcagcaatcgactacctcgagctagcaaagagggacgacgagcgcccgactacaggcaatttgccggtgactgacattagagttgtcagctggcttggcatgccgtcgtacgatgcggatttcagctggggaaggccattggctatgttccgtgctgaaccaaaccgcggaggttttgttcacctgattgacagcgcacagggtgatggcagtgtgcgcatcatcatgtctatagaggctgcaattctcagcgagttgaagcgtttgttgtatgccaaattcgacaccatgttgtattctaagttttaacct

SEQ ID NO: 63956 - protein, 257 aa, Triticum aestivum
  peptide (1)..(257): Ceres Seq. ID no. 15222043
MVNLPCHDRSRLSARDPPVVHPYALSIFSPKINLPPQPGLVVNEVVALTLAKDQLSTLKHISGGDGVSTFSALSAHLWQCMCLARQLPPDATTQLMFSANIRRIMRPPLPDGYFGNAIINLSVGDKARAIASRELSYIARRIRDTHRRLNDELVHSAIDYLELAKRDDERPTTGNLPVTDIRVVSWLGMPSYDADFSWGRPLAMFRAEPNRGGFVHLIDSAQGDGSVRIIMSIEAAILSELKRLLYAKFDTMLYSKF

SEQ ID NO: 63957 - protein, 177 aa, Triticum aestivum
  peptide (1)..(177): Ceres Seq. ID no. 15222044
MCLARQLPPDATTQLMFSANIRRIMRPPLPDGYFGNAIINLSVGDKARAIASRELSYIARRIRDTHRRLNDELVHSAIDYLELAKRDDERPTTGNLPVTDIRVVSWLGMPSYDADFSWGRPLAMFRAEPNRGGFVHLIDSAQGDGSVRIIMSIEAAILSELKRLLYAKFDTMLYSKF

SEQ ID NO: 63958 - protein, 171 aa, Triticum aestivum
  peptide (1)..(171): Ceres Seq. ID no. 15222045
MAGEEEMQVVESCFVTPVADAPSRAIRLSPFDLMLASRGYTPLVHFYRPPETVGDDFFDVTRLKTALGKALVPFYPLAGRLRAGGDGRLEIDCNGKGMLFLVAQSRLTMDDFSDFKPSSKQRRLFVPHVSDSDGLLWATQVTFLKCGGVVLGSAIHHAGMDGSVVFHFLRT

SEQ ID NO: 63959 - DNA, 789 bp, Triticum aestivum
  misc_feature (1)..(789): Ceres Seq. ID no. 12625648
tactttgtagctagccatgtcgagccatagatcttgtggcctggtggtggtgctcgcctgcgccgctctcatggcggcggtggccggcacggcgcagtacaacgtcggcggcgacaacgggtggggcgtgcccggcgccggcgccgagtcctacaacacctgggccgagaagaccaccttccaggtcggcgaccagctcgtgttcgtgtaccccaaggacaaggactcggtgctgctggtggcgccggccgactacaacgcctgcaacaccaacacctacgacaagcagttcagcgacggcaacaccgtcttcgacctcgaccgcgccggcgccttcttcttcatcagcggcgtcgacgccaactgccgcgccaacgagaagctcatcgtcatggtcgccgccgccgccaagggcgctcccacgcccagccaggggtcgcctgcagcaacagcaacgaccccgccgtctgctccctcaggtggcgccccgccaaactccccagcaaccccaaatgctccggcgggtgaggcgagtaactcaacgccggccaagggcgcacctcctggagccgccagcggcgccggtctcacggtggcaggcctcgccggctcgttcgtggcattgtttggatacgccatgcttgctttctagtactgctttccaaagctatcttttactgctccttttcaaagccggaagactatttgctccttttcagagggcaacgtgtctctgctcagattcttttccgttatgatcaatgacaaatgcaatatgatggttcctgg

SEQ ID NO: 63960 - protein, 211 aa, Triticum aestivum
  peptide (1)..(211): Ceres Seq. ID no. 12625649
MSSHRSCGLVVVLACAALMAAVAGTAQYNVGGDNGWGVPGAGAESYNTWAEKTTFQVGDQLVFVYPKDKDSVLLVAPADYNACNTNTYDKQFSDGNTVFDLDRAGAFFFISGVDANCRANEKLIVMVAAAAKGAPTPSQGSPAATATTPPSAPSGGAPPNSPATPNAPAGEASNSTPAKGAPPGAASGAGLTVAGLAGSFVALFGYAMLAF

SEQ ID NO: 63961 - protein, 193 aa, Triticum aestivum
  peptide (1)..(193): Ceres Seq. ID no. 12625650
MAAVAGTAQYNVGGDNGWGVPGAGAESYNTWAEKTTFQVGDQLVFVYPKDKDSVLLVAPADYNACNTNTYDKQFSDGNTVFDLDRAGAFFFISGVDANCRANEKLIVMVAAAAKGAPTPSQGSPAATATTPPSAPSGGAPPNSPATPNAPAGEASNSTPAKGAPPGAASGAGLTVAGLAGSFVALFGYAMLAF

SEQ ID NO: 63962 - DNA, 971 bp, Triticum aestivum
  misc_feature (1)..(971): Ceres Seq. ID no. 12616929
attccccatctccctccctcaccatggccgccgccgccgccgcttccatggcccgcaggctgctctcccccaccaccaccacctcctactcgaccaccgcccgcctcctcatctcccgccgcctcgcctccgccgcgtccgtcccgcgcgccccggcggcggcggcgaaggagatgctgcgcccggcggccgtcgcctcctcctctctattcttccgcggcgtcgggggcgccaggggcatggcgcggcggcccgggggcggcgacgggtacgcccccgcgcggggcgggggcggagggggcgcgccgacggagatggcgccgctgttccccgggtgcgactacgagcactggctgatcgtcatggacaagcccggcggcgagggcgcctccaagcaccagatgatcgactgctacgtccacaccctcgccaaggtcctcggcagcgaggaggaggccaagaggaagatttacaacgtctcgtgcgagcgctacttcgggttcgggtgcgagatcgacgaggagacatccaacaagcttgaagggattcctggtgttctctttgtgctccctgattcctatgttgaccctgaacacaaggactacggagcggagctgtttgtgaatggggagatcgtgcagagatctcccgagaggcagaggagggtggagcccgtgccgcagagagcgtcggacaggccgaggtacaacgacaggacccggtacgcgcggcggagggagaaccagcagcagcagcagccgcagcgatgatccatcacatgaccgaggcggaggccagagctggaggcaacctgctgtgctggtttcatcccctcgacatagcgagcagttgttattgcttggttttagtaatccgtttcatgttgccactactctgttatctgtatgtatttgacatcttggaacctgaaactgtgaatcttgatagcataaaagaattttagagccggg

SEQ ID NO: 63963 - protein, 255 aa, Triticum aestivum
  peptide (1)..(255): Ceres Seq. ID no. 12616930
SPSPSLTMAAAAAASMARRLLSPTTTTSYSTTARLLISRRLASAASVPRAPAAAAKEMLRPAAVASSSLFFRGVGGARGMARRPGGGDGYAPARGGGGGGAPTEMAPLFPGCDYEHWLIVMDKPGGEGASKHQMIDCYVHTLAKVLGSEEEAKRKIYNVSCERYFGFGCEIDEETSNKLEGIPGVLFVLPDSYVDPEHKDYGAELFVNGEIVQRSPERQRRVEPVPQRASDRPRYNDRTRYARRRENQQQQQPQR

SEQ ID NO: 63964 - protein, 248 aa, Triticum aestivum
  peptide (1)..(248): Ceres Seq. ID no. 12616931
MAAAAAASMARRLLSPTTTTSYSTTARLLISRRLASAASVPRAPAAAAKEMLRPAAVASSSLFFRGVGGARGMARRPGGGDGYAPARGGGGGGAPTEMAPLFPGCDYEHWLIVMDKPGGEGASKHQMIDCYVHTLAKVLGSEEEAKRKIYNVSCERYFGFGCEIDEETSNKLEGIPGVLFVLPDSYVDPEHKDYGAELFVNGEIVQRSPERQRRVEPVPQRASDRPRYNDRTRYARRRENQQQQQPQR

SEQ ID NO: 63965 - protein, 240 aa, Triticum aestivum
  peptide (1)..(240): Ceres Seq. ID no. 12616932
MARRLLSPTTTTSYSTTARLLISRRLASAASVPRAPAAAAKEMLRPAAVASSSLFFRGVGGARGMARRPGGGDGYAPARGGGGGGAPTEMAPLFPGCDYEHWLIVMDKPGGEGASKHQMIDCYVHTLAKVLGSEEEAKRKIYNVSCERYFGFGCEIDEETSNKLEGIPGVLFVLPDSYVDPEHKDYGAELFVNGEIVQRSPERQRRVEPVPQRASDRPRYNDRTRYARRRENQQQQQPQR

SEQ ID NO: 63966 - DNA, 456 bp, Triticum aestivum
  misc_feature (1)..(456): Ceres Seq. ID no. 15173081
agtcgagagggatgactccagagccaagaaccaggatattggtgaaagcaatacatatgaagaaggatgggcctgagactgaagatcgatccccaagtatgactgggaaaaatctaaaattggatcgtcgatcaggacttttccatgttcgtaaatagtcaccggaagatcctgcttaattatcctagcagaagatgctgagcatctgggcttatggaacatcatccagtgactttcaaccttgggctaaaagaaatccacaagagaagagtcattgacaatacgatgccccaaaatttatgctgtttgaaatgtcacagcaggatatgtttaggatgtattgggcaattcaattgcaggtacttgcttagatgcttgtattctggagatgtatgtgtaatacttacatatgtttgtttcttcttgcattatatatgtcgttcgtagttgtttctg

SEQ ID NO: 63967 - protein, 77 aa, Triticum aestivum
  peptide (1)..(77): Ceres Seq. ID no. 15173082
MEHHPVTFNLGLKEIHKRRVIDNTMPQNLCCLKCHSRICLGCIGQFNCRYLLRCLYSGDVCVILTYVCFFLHYICRS

SEQ ID NO: 63968 - protein, 53 aa, Triticum aestivum
  peptide (1)..(53): Ceres Seq. ID no. 15173083
MPQNLCCLKCHSRICLGCIGQFNCRYLLRCLYSGDVCVILTYVCFFLHYICRS

SEQ ID NO: 63969 - protein, 51 aa, Triticum aestivum
  peptide (1)..(51): Ceres Seq. ID no. 15173084
SRGMTPEPRTRILVKAIHMKKDGPETEDRSPSMTGKNLKLDRRSGLFHVRK

SEQ ID NO: 63970 - DNA, 1831 bp, Triticum aestivum
  misc_feature (1)..(1831): Ceres Seq. ID no. 14307995
ctgcatccactctcagccatagtgttagaggatgcgaggcgatatggctcaagtactcaccatcttctccccggaagttctgctctcactcttgctctgcttcttcgtactacgccgctactacttggcaagacgatctgcgaacaattgcagtgatcatggccgccgtctcccgccgtcgcctccgaagctccctctcataggccacctgcacctcgtcggccccgacccgcacatctccctcgccgagctctcaaggaagcacgccggccgcgacggcctcatgctcctccgcctcggccaggtgcccaacctcgtcgtctcctccccgagcgccgccgaggccgtcctgcgcacgcacgaccacgtcttcgcctcccgcccgccgtccatcgtcgccggcgtcctcctcagcggcccctccgacgtcgccctcaccccctacggcgagtactggcggcaggccaggaagctcgttaccacccacctgctgagcgcccggaaggtgcgcgcgctccagggcggccgcgaggaggaggtgcgccttgtggtggccaaactccgggcggccgcggccgcccgctctgccgtcgacatgaccgagctgctcggcggcttcaccaacgacgtcgtatgccgcgccgtgtccgggaagttcttcagggaggaaggcaggaacgagctgttccgggagctcatcgccgggaacgtggctgcgataggggggttcaacctggaggactacttcccgagcttggccaaggtaggtcttctccggcgagtggtgctcggcaagacgaggaggctgaagaagagatgggacgagttgctcgacaagatcatagacgaccacgcgaccaaatcaccatggctagtaggagtacatcagcatcaacccaatgagcaagagcaaaaccaacaagatgaagacagagacttggtagatgttctcctctctcttcaacacgagtacagtctcactagagacaacgtcaaggccatcttgttggacatgttctctgcgggcacagacacgtcatccatcgtcctggagttcgccatggcggagctcatgcggaagccacacctcatggccaaactccaggccgacgtgaggagcaagacacccaagacccagcaaacagtcaaggaggacgatctgggcaacatgtcctacctcaaggctgtggtgaaggagacgctccggctccacccaccggcgccgctcctcctcccacacctctccatggccgagtgcgacgacgtcaacggctacatggtcccggcagggacacgcgtcatcatcaacgcgtgggctctctgcagagacaccgagtcctgggggatgaaggcggaggagttctggccggagaggttcatagacggggccaaagcagctgccgacttcaaagggagggatttccaattcctgccgtttggagccgggcggaggatttgccccgggatgggctttgggctcgccacggtcgaggccatgcttgccaaccttgtttattgcttcgactgggagctccccgatgggatgcgggaggaggacgttgacatggccgacgtgtttggagtgacgatgcgtcggaaggagaagcttgttcttgtcccaagaataccacaagatgcaaacatatagtgcatgcgcaccattccatactatcagttagtatagccgcaataaaaatttagaccaactcaaatatgaacatctcctagttatgcttctctcctacagaatgtaaaaaacgcaggaactgtactttttgcaggaattgtttctttaggagagataaagacacatgttgcattggacttctcg

SEQ ID NO: 63971 - protein, 538 aa, Triticum aestivum
  peptide (1)..(538): Ceres Seq. ID no. 14307996
MRGDMAQVLTIFSPEVLLSLLLCFFVLRRYYLARRSANNCSDHGRRLPPSPPKLPLIGHLHLVGPDPHISLAELSRKHAGRDGLMLLRLGQVPNLVVSSPSAAEAVLRTHDHVFASRPPSIVAGVLLSGPSDVALTPYGEYWRQARKLVTTHLLSARKVRALQGGREEEVRLVVAKLRAAAAARSAVDMTELLGGFTNDVVCRAVSGKFFREEGRNELFRELIAGNVAAIGGFNLEDYFPSLAKVGLLRRVVLGKTRRLKKRWDELLDKIIDDHATKSPWLVGVHQHQPNEQEQNQQDEDRDLVDVLLSLQHEYSLTRDNVKAILLDMFSAGTDTSSIVLEFAMAELMRKPHLMAKLQADVRSKTPKTQQTVKEDDLGNMSYLKAVVKETLRLHPPAPLLLPHLSMAECDDVNGYMVPAGTRVIINAWALCRDTESWGMKAEEFWPERFIDGAKAAADFKGRDFQFLPFGAGRRICPGMGFGLATVEAMLANLVYCFDWELPDGMREEDVDMADVFGVTMRRKEKLVLVPRIPQDANI

SEQ ID NO: 63972 - protein, 534 aa, Triticum aestivum
  peptide (1)..(534): Ceres Seq. ID no. 14307997
MAQVLTIFSPEVLLSLLLCFFVLRRYYLARRSANNCSDHGRRLPPSPPKLPLIGHLHLVGPDPHISLAELSRKHAGRDGLMLLRLGQVPNLVVSSPSAAEAVLRTHDHVFASRPPSIVAGVLLSGPSDVALTPYGEYWRQARKLVTTHLLSARKVRALQGGREEEVRLVVAKLRAAAAARSAVDMTELLGGFTNDVVCRAVSGKFFREEGRNELFRELIAGNVAAIGGFNLEDYFPSLAKVGLLRRVVLGKTRRLKKRWDELLDKIIDDHATKSPWLVGVHQHQPNEQEQNQQDEDRDLVDVLLSLQHEYSLTRDNVKAILLDMFSAGTDTSSIVLEFAMAELMRKPHLMAKLQADVRSKTPKTQQTVKEDDLGNMSYLKAVVKETLRLHPPAPLLLPHLSMAECDDVNGYMVPAGTRVIINAWALCRDTESWGMKAEEFWPERFIDGAKAAADFKGRDFQFLPFGAGRRICPGMGFGLATVEAMLANLVYCFDWELPDGMREEDVDMADVFGVTMRRKEKLVLVPRIPQDANI

SEQ ID NO: 63973 - protein, 454 aa, Triticum aestivum
  peptide (1)..(454): Ceres Seq. ID no. 14307998
MLLRLGQVPNLVVSSPSAAEAVLRTHDHVFASRPPSIVAGVLLSGPSDVALTPYGEYWRQARKLVTTHLLSARKVRALQGGREEEVRLVVAKLRAAAAARSAVDMTELLGGFTNDVVCRAVSGKFFREEGRNELFRELIAGNVAAIGGFNLEDYFPSLAKVGLLRRVVLGKTRRLKKRWDELLDKIIDDHATKSPWLVGVHQHQPNEQEQNQQDEDRDLVDVLLSLQHEYSLTRDNVKAILLDMFSAGTDTSSIVLEFAMAELMRKPHLMAKLQADVRSKTPKTQQTVKEDDLGNMSYLKAVVKETLRLHPPAPLLLPHLSMAECDDVNGYMVPAGTRVIINAWALCRDTESWGMKAEEFWPERFIDGAKAAADFKGRDFQFLPFGAGRRICPGMGFGLATVEAMLANLVYCFDWELPDGMREEDVDMADVFGVTMRRKEKLVLVPRIPQDANI

SEQ ID NO: 63974 - DNA, 1233 bp, Triticum aestivum
  misc_feature (1)..(1233): Ceres Seq. ID no. 13597333
gaatccgaccacaaatccgcacccccaggaccagcagcagcagccatgacgccctccgccgtcgccaacctagccggcgcctccccgctgcccgccttcgcgccgaggcccaggtccaggcccaactcggccagcccgggcccgttcgggcccgcgccgcgccggctcgccgtcgccgccccgccgcgggccttcttctcctccgcgccctaccagccgccggagccggagggctactcctccgtccgcgagtacggcctcgtgcccatggtcgtcgagaccacctcccgcggggagcgcgcctacgacatcttctcccgcctgctcaaggagcggatcgtctgcatccacgggcccatcgccgacgagacggcctcgctcgtcgtcgcgcagctgctcttcctcgagtccgagaacccgctcaagcccatcagcctctacatcaactcccccgggggcgtcgtcaccgccgggctcgccatctacgacaccatgcagtacatccgctgccccgtcaacaccatctgcatcggccaggccgcctccatgggctccctcctcctcgccgccggcgcgcgcggggagaggcgggcgctgcccaacgccagggtcatgatccaccagccctccggcggggcccagggccaggccaccgacatcgccatccaggccaaggagatcctcaagctgcgcgaccgcctcaacaagatctacgccaagcacacgggccagaacatcgacaagatcgagcagtgcatggagcgtgaccttttcatggaccccgaggaggcgcgcgaatgggggcttatagacgaggtcatcgagaaccgcccggcctccctcatgcctgagggcctcagtgccgttgacccgcctcaccacggtgggggcgccggcgccaacggccgtggcagggacagggatatggaggagccctccgctgtatgaggggtggccacgaaggtgaaaccttttcctgagtccggtggctatgttgtttgttgttagatctaagttttgatgattcctaatacaacaggtcaacttggtatcttctccctgttgtttcaattgcctgaactgagctattgctgatattattgcaactcgtaaaagggatttcattcctttggtactgataaattgatagtgtgttgaatgtccgttatacgatcaatttcaggttacagcatcaaaaacatgctgttcttttttatgcataggattttcttt

SEQ ID NO: 63975 - protein, 315 aa, Triticum aestivum
  peptide (1)..(315): Ceres Seq. ID no. 15222076
ESDHKSAPPGPAAAAMTPSAVANLAGASPLPAFAPRPRSRPNSASPGPFGPAPRRLAVAAPPRAFFSSAPYQPPEPEGYSSVREYGLVPMVVETTSRGERAYDIFSRLLKERIVCIHGPIADETASLVVAQLLFLESENPLKPISLYINSPGGVVTAGLAIYDTMQYIRCPVNTICIGQAASMGSLLLAAGARGERRALPNARVMIHQPSGGAQGQATDIAIQAKEILKLRDRLNKIYAKHTGQNIDKIEQCMERDLFMDPEEAREWGLIDEVIENRPASLMPEGLSAVDPPHHGGGAGANGRGRDRDMEEPSAV

SEQ ID NO: 63976 - protein, 300 aa, Triticum aestivum
  peptide (1)..(300): Ceres Seq. ID no. 15222077
MTPSAVANLAGASPLPAFAPRPRSRPNSASPGPFGPAPRRLAVAAPPRAFFSSAPYQPPEPEGYSSVREYGLVPMVVETTSRGERAYDIFSRLLKERIVCIHGPIADETASLVVAQLLFLESENPLKPISLYINSPGGVVTAGLAIYDTMQYIRCPVNTICIGQAASMGSLLLAAGARGERRALPNARVMIHQPSGGAQGQATDIAIQAKEILKLRDRLNKIYAKHTGQNIDKIEQCMERDLFMDPEEAREWGLIDEVIENRPASLMPEGLSAVDPPHHGGGAGANGRGRDRDMEEPSAV

SEQ ID NO: 63977 - protein, 254 aa, Triticum aestivum
  peptide (1)..(254): Ceres Seq. ID no. 15222078
IRPQIRTPRTSSSSHDALRRRQPSRRLPAARLRAEAQVQAQLGQPGPVRARAAPARRRRPAAGLLLLRALPAAGAGGLLLRPRVRPRAHGRRDHLPRGARLRHLLPPAQGADRLHPRAHRRRDGLARRRAAALPRVREPAQAHQPLHQLPRGRRHRRARHLRHHAVHPLPRQHHLHRPGRLHGLPPPRRRRARGEAGAAQRQGHDPPALRRGPGPGHRHRHPGQGDPQAARPPQQDLRQAHGPEHRQDRAVHGA

SEQ ID NO: 63978 - DNA, 1121 bp, Triticum aestivum
  misc_feature (1)..(1121): Ceres Seq. ID no. 13585609
aaccatccagatccaggtccttcctcgttatctttcaccatgccttcagcagcttcccgactcgtgcggatcggccgtgccgctcgctcagctgcggcgaccacatctcgcttcgcccaattcgttgaagcagcgaccctctccacgaaggcggtggcgaccaaacctcacgctatcttaggttcagatcgtgccgcctccgtagatctgcgtatgaaccaatccactgtccatgctcctccacgcgccatggcacctgcctccctgacactcagtcacccagaagaacaaaggcaggaaggtaaggtgaagtttgtggtagaggagaaagaccttgagtcagaagcagccctttgggccttgtatgagcgctggtgcaaagatttcaaccaaaagcgtgatcatgatgagatggttcactggttcaacacattcaaggagactgtcctgcttgtccaccgtcggaacaatgctaatctgccctacaaattgggaataaacaaattcgcggatgggaagctaaggaagctctgttgctgtcatgatcctattcttaaaaagattgatgaggagtttggcgacaaaccaggtgaatttattctaggtgatggtgacaaacttctcaagcgagtcttcgctgattataaggtggttcatggcagactgtatgttcatttaccaaagggagttgatgtggaaaccatcaccaccaatcctgaatgggtcgagctggaagcgaccaccaaccctccataccgataccctacttacatctagtggtgctatcattattgctactaagctgtgcttctgccaacggttgcatactaggacttggatgttgtccttcttgctaataaaacatactccctccgtccggaaatacttgtcatcgaaatggataaaagagatgtatttagacgtattttagttttagatacatctcttttgatccattttgatgacaagtattttaggacggagggcgtatgcataataagctaaccgtgagcatatgaggattacgttaatgcttttgtaagatattttaaactttgactaaggtgttgtaatattccagattcatcgttatgtgctcattagtcaggttttttcctctc

SEQ ID NO: 63979 - protein, 258 aa, Triticum aestivum
  peptide (1)..(258): Ceres Seq. ID no. 13585610
NHPDPGPSSLSFTMPSAASRLVRIGRAARSAAATTSRFAQFVEAATLSTKAVATKPHAILGSDRAASVDLRMNQSTVHAPPRAMAPASLTLSHPEEQRQEGKVKFVVEEKDLESEAALWALYERWCKDFNQKRDHDEMVHWFNTFKETVLLVHRRNNANLPYKLGINKFADGKLRKLCCCHDPILKKIDEEFGDKPGEFILGDGDKLLKRVFADYKVVHGRLYVHLPKGVDVETITTNPEWVELEATTNPPYRYPTYI

SEQ ID NO: 63980 - protein, 245 aa, Triticum aestivum
  peptide (1)..(245): Ceres Seq. ID no. 13585611
MPSAASRLVRIGRAARSAAATTSRFAQFVEAATLSTKAVATKPHAILGSDRAASVDLRMNQSTVHAPPRAMAPASLTLSHPEEQRQEGKVKFVVEEKDLESEAALWALYERWCKDFNQKRDHDEMVHWFNTFKETVLLVHRRNNANLPYKLGINKFADGKLRKLCCCHDPILKKIDEEFGDKPGEFILGDGDKLLKRVFADYKVVHGRLYVHLPKGVDVETITTNPEWVELEATTNPPYRYPTYI

SEQ ID NO: 63981 - protein, 187 aa, Triticum aestivum
  peptide (1)..(187): Ceres Seq. ID no. 13585612
MNQSTVHAPPRAMAPASLTLSHPEEQRQEGKVKFVVEEKDLESEAALWALYERWCKDFNQKRDHDEMVHWFNTFKETVLLVHRRNNANLPYKLGINKFADGKLRKLCCCHDPILKKIDEEFGDKPGEFILGDGDKLLKRVFADYKVVHGRLYVHLPKGVDVETITTNPEWVELEATTNPPYRYPTYI

SEQ ID NO: 63982 - DNA, 2156 bp, Triticum aestivum
  misc_feature (1)..(2156): Ceres Seq. ID no. 12597287
ctcccgttcccctttttcgaatcgagcccaaccgcatcgtgcgtgcgcacccccactcctcccccctagggtttcgaggttctccgacgatgtcgctgcggcccaacgagcgggccgaggtgcggcgcagccgctacaaggcgtccgtcgacgccgaggacgggcgccggcggcgggaggatcagatggtggagatccggaagaatcagcgcgacgcgaacctccagaagaagcgccgcgacgggttcccggccggcgccgcgtccgctgccggtggcgcgccgcagatgggccactcctcggctctccagcagaagctggagggcttgcccgcgatggtgcaggcggttctctcggacgacaacgccgtgcagctcgaggccaccacccagttccggaagctgctctccatcgagcgaagccctccaattgaggaagtgatcaacacaggcgtggtgcctcgcttcattgagttcctcacacgggaggactatccccaactccagtttgaggctgcatgggcgctcaccaacatcgcgtcaggcacatcagacaacaccaaagtggtggttgagtatggtgctgtgcccatctttgtcaagctactcagctctcctagtgaggatgtccgcgaacaggctgtttgggctctggggaatgttgctggtgactctccaaagtgccgtgaccttgtgcttggaagtggtggtctgttccctttgttgcagcagctcaatgagcatgccaagctctcgatgctcaggaatgccacatggacactctccaacttctgccgtgggaaaccacagccaaattttgaacaggtcaaaccggctctctcagcactgcagcgccttatccactctcaggatgaggaggtgctaactgatgcctgctgggctctctcgtacctttctgatggaactaatgacaagatccaatccgtgattgagtctggtgtttttcctcggcttgtggagcttctcttgcacccttcggcttctgttctcattccagctctgcgcacggtgggtaacattgtcactggtgatgatttgcagactcagtgtgtcattgatcaccaagcacttccctgtctcttgaacctcttgactaccaaccacaagaaaagcatcaagaaagaagcatgctggacaatctcaaacatcacagctggtaaccgggaccagattcaggctgttatccaggcaaacattattggtccgctggtccatctcctgcaaggtgctgaatttgacattaagaaggagacagcttgggcaatttcaaatgccacttctggtggaacacatgatcagattaagtatcttgttgcccagggttgcatcaagccgctctgtgatctgctcatttgcccggatcccagaattgtaacagtttgcttggaaggtcttgagaacatcctgaaggttggggaggcagaaaagaaccttggagcaggggatgtcaacaactatgcgcagatgattgatgacgctgagggactggaaaagattgagaaccttcagagccatgacaacacagaaatatatgagaaggcagtgaagatgcttgagtcctactggttggaggaggaagatgaggtcatgccctcaggtgataatgcccagaatggcttcaactttggaagtcagcagaactcggttccatcgggtgggttcaactttggctgaagatacccggttggacgtgtaccttagctacttgcttgggactagtcagatttggggaggtctttgtcgttcgagtcattgttgggtcctgtcggtctggtctcaagcagtcgtcaagtcagtctaagcagggtcagtccttgggctgcatcgtcggtggtgcagcttggtcaatggtcagtcttcaaggtcaaccggtcggatcatttgggttctgcctcaccagaggacgtccagagccgcatgtgttgtcgggagagtcgggttttgcctcctaatatagcttgaaccaaaattatattgatatatctgtgtgaggtaaaaagaaccttgaaagatagggttttcacggttgttggttgtgtcggtttttgtcagaagtgtttctgtgctgtattaacttgacgaaagagtatggagcacaccttataaacatcaaaagcaactgggttttgggagtcc

SEQ ID NO: 63983 - protein, 563 aa, Triticum aestivum
  peptide (1)..(563): Ceres Seq. ID no. 12597288
PVPLFRIEPNRIVRAHPHSSPLGFRGSPTMSLRPNERAEVRRSRYKASVDAEDGRRRREDQMVEIRKNQRDANLQKKRRDGFPAGAASAAGGAPQMGHSSALQQKLEGLPAMVQAVLSDDNAVQLEATTQFRKLLSIERSPPIEEVINTGVVPRFIEFLTREDYPQLQFEAAWALTNIASGTSDNTKVVVEYGAVPIFVKLLSSPSEDVREQAVWALGNVAGDSPKCRDLVLGSGGLFPLLQQLNEHAKLSMLRNATWTLSNFCRGKPQPNFEQVKPALSALQRLIHSQDEEVLTDACWALSYLSDGTNDKIQSVIESGVFPRLVELLLHPSASVLIPALRTVGNIVTGDDLQTQCVIDHQALPCLLNLLTTNHKKSIKKEACWTISNITAGNRDQIQAVIQANIIGPLVHLLQGAEFDIKKETAWAISNATSGGTHDQIKYLVAQGCIKPLCDLLICPDPRIVTVCLEGLENILKVGEAEKNLGAGDVNNYAQMIDDAEGLEKIENLQSHDNTEIYEKAVKMLESYWLEEEDEVMPSGDNAQNGFNFGSQQNSVPSGGFNFG

SEQ ID NO: 63984 - protein, 534 aa, Triticum aestivum
  peptide (1)..(534): Ceres Seq. ID no. 12597289
MSLRPNERAEVRRSRYKASVDAEDGRRRREDQMVEIRKNQRDANLQKKRRDGFPAGAASAAGGAPQMGHSSALQQKLEGLPAMVQAVLSDDNAVQLEATTQFRKLLSIERSPPIEEVINTGVVPRFIEFLTREDYPQLQFEAAWALTNIASGTSDNTKVVVEYGAVPIFVKLLSSPSEDVREQAVWALGNVAGDSPKCRDLVLGSGGLFPLLQQLNEHAKLSMLRNATWTLSNFCRGKPQPNFEQVKPALSALQRLIHSQDEEVLTDACWALSYLSDGTNDKIQSVIESGVFPRLVELLLHPSASVLIPALRTVGNIVTGDDLQTQCVIDHQALPCLLNLLTTNHKKSIKKEACWTISNITAGNRDQIQAVIQANIIGPLVHLLQGAEFDIKKETAWAISNATSGGTHDQIKYLVAQGCIKPLCDLLICPDPRIVTVCLEGLENILKVGEAEKNLGAGDVNNYAQMIDDAEGLEKIENLQSHDNTEIYEKAVKMLESYWLEEEDEVMPSGDNAQNGFNFGSQQNSVPSGGFNFG

SEQ ID NO: 63985 - protein, 502 aa, Triticum aestivum
  peptide (1)..(502): Ceres Seq. ID no. 12597290
MVEIRKNQRDANLQKKRRDGFPAGAASAAGGAPQMGHSSALQQKLEGLPAMVQAVLSDDNAVQLEATTQFRKLLSIERSPPIEEVINTGVVPRFIEFLTREDYPQLQFEAAWALTNIASGTSDNTKVVVEYGAVPIFVKLLSSPSEDVREQAVWALGNVAGDSPKCRDLVLGSGGLFPLLQQLNEHAKLSMLRNATWTLSNFCRGKPQPNFEQVKPALSALQRLIHSQDEEVLTDACWALSYLSDGTNDKIQSVIESGVFPRLVELLLHPSASVLIPALRTVGNIVTGDDLQTQCVIDHQALPCLLNLLTTNHKKSIKKEACWTISNITAGNRDQIQAVIQANIIGPLVHLLQGAEFDIKKETAWAISNATSGGTHDQIKYLVAQGCIKPLCDLLICPDPRIVTVCLEGLENILKVGEAEKNLGAGDVNNYAQMIDDAEGLEKIENLQSHDNTEIYEKAVKMLESYWLEEEDEVMPSGDNAQNGFNFGSQQNSVPSGGFNFG

SEQ ID NO: 63986 - DNA, 1988 bp, Triticum aestivum
  misc_feature (1)..(1988): Ceres Seq. ID no. 13597375
aaaaaaccctaatcccctcgcagccgccacagcccccggagcccgcccgcccgaacccaccgccatggccgacgacgcggcatcggccccgccgacggcgcagctggccgccgcctccatctcctcgccgccctcctcggacctcgagccaccgacctcccgcacccgcatccgcgccatcctggacgccggcgacgccatggccggggagcgcgtggtcgtcggcggctgggtcaagaccggccgccagcagggcaagggcgagttcgccttcctcgaggtcaacgacgggtcctgccaggggaacctccaggtcatggtcgaaaaggacgtgcatccgctcgcaagcctcacccacacgggcacctccgtgctcgtcgagggcgtgctcaagaagccccccgcggaagccaagcagcgtatcgagttgaaggtggagcgggtcatcgagctcggggaggtggacgccgccgcctacccgctgcccaagaccaagatcacgctcgagacactcagggactttgtccacctccgcgcacgcaccaacacgataggcgcagttgctcggataaggcaccagcttgcctatgcaacccacagttttttcgatgaaaatggatttttgtatattcacacccccataataaccaccagcgactgtgagggtgcaggtgagatgttccaagtcactgccttattcagccaggctgaaaaggtggagaaggagcttaaggagaaccctgcaccatcagaagctgacgttgaggctgctaagcttgttgttaaagagaaaggagatgcagttgctcaactgaaagcagcaaaagctagcaagcaagagataactgctgctgtttccgtgcttacaaaagctaaagagaatgtgttaagggtggaagagaggtctaagttgaaacctggacttccactcaagggtgatgggaaaattgcgtttgagaatgacttcttcaagcgtcaagcttttctgaccgtttcaggccaacttcaggtcgaaacttatgcttgtgctctcagtaatgtgtatacctttggaccgacattccgggcagagaactcacatacatcaagacatttggcagagttttggatggttgaaccagaaattgcatttgcaaacttgcaggatgatatgaactgtgctgaaaggtatgtacagtacctgtgcaaatggttactcaagcattgccgagaagacatggaattcatggttaaacatgtggacaagaccgcaattgagcgtctggagcttgtttcctctactccgtttgaacgcatttcatatacaaaggctgtggagatcttagaaggtgtagataagaagtttgagaacaaggttgaatggggaattgatttagcgtctgagcatgagaggtatttgactgaggtgatatttaagaggccagttattgtgtataactacccaaaaggaataaaggcattttacatgaggctcaatgatgaccagaagacagtagctgcaatggatgttcttgttcccaaggttggtgaattaatcggtggaagccaaagggaggagcgtcttgatattcttaagcaaaggatactggacgcagatcttcctctggagccgtatgagtggtacctggacctccgacgctttggctcagtgaagcacagcgggttcggcctggggttcgagaggatgatccttttcgccaccggcctggagaacatcagagatgtcatcccgttcccacgataccccgggagggccgatctttgaagggttgcagatttctgccttgaaatataagaacgtcaattacactttcgttagcgtttttggaatagtgttggccgcccggttagattgatatatatacgcatgctgatatcatttgatatgcctcgtgtcttggcttgttgtgattctaaaaagaagtatcaggcttgttttatgattagaatattgaagtattattggtccttagcatcttcttttttgt

SEQ ID NO: 63987 - protein, 587 aa, Triticum aestivum
  peptide (1)..(587): Ceres Seq. ID no. 15222085
KNPNPLAAATAPGARPPEPTAMADDAASAPPTAQLAAASISSPPSSDLEPPTSRTRIRAILDAGDAMAGERVVVGGWVKTGRQQGKGEFAFLEVNDGSCQGNLQVMVEKDVHPLASLTHTGTSVLVEGVLKKPPAEAKQRIELKVERVIELGEVDAAAYPLPKTKITLETLRDFVHLRARTNTIGAVARIRHQLAYATHSFFDENGFLYIHTPIITTSDCEGAGEMFQVTALFSQAEKVEKELKENPAPSEADVEAAKLVVKEKGDAVAQLKAAKASKQEITAAVSVLTKAKENVLRVEERSKLKPGLPLKGDGKIAFENDFFKRQAFLTVSGQLQVETYACALSNVYTFGPTFRAENSHTSRHLAEFWMVEPEIAFANLQDDMNCAERYVQYLCKWLLKHCREDMEFMVKHVDKTAIERLELVSSTPFERISYTKAVEILEGVDKKFENKVEWGIDLASEHERYLTEVIFKRPVIVYNYPKGIKAFYMRLNDDQKTVAAMDVLVPKVGELIGGSQREERLDILKQRILDADLPLEPYEWYLDLRRFGSVKHSGFGLGFERMILFATGLENIRDVIPFPRYPGRADL

SEQ ID NO: 63988 - protein, 566 aa, Triticum aestivum
  peptide (1)..(566): Ceres Seq. ID no. 15222086
MADDAASAPPTAQLAAASISSPPSSDLEPPTSRTRIRAILDAGDAMAGERVVVGGWVKTGRQQGKGEFAFLEVNDGSCQGNLQVMVEKDVHPLASLTHTGTSVLVEGVLKKPPAEAKQRIELKVERVIELGEVDAAAYPLPKTKITLETLRDFVHLRARTNTIGAVARIRHQLAYATHSFFDENGFLYIHTPIITTSDCEGAGEMFQVTALFSQAEKVEKELKENPAPSEADVEAAKLVVKEKGDAVAQLKAAKASKQEITAAVSVLTKAKENVLRVEERSKLKPGLPLKGDGKIAFENDFFKRQAFLTVSGQLQVETYACALSNVYTFGPTFRAENSHTSRHLAEFWMVEPEIAFANLQDDMNCAERYVQYLCKWLLKHCREDMEFMVKHVDKTAIERLELVSSTPFERISYTKAVEILEGVDKKFENKVEWGIDLASEHERYLTEVIFKRPVIVYNYPKGIKAFYMRLNDDQKTVAAMDVLVPKVGELIGGSQREERLDILKQRILDADLPLEPYEWYLDLRRFGSVKHSGFGLGFERMILFATGLENIRDVIPFPRYPGRADL

SEQ ID NO: 63989 - protein, 521 aa, Triticum aestivum
  peptide (1)..(521): Ceres Seq. ID no. 15222087
MAGERVVVGGWVKTGRQQGKGEFAFLEVNDGSCQGNLQVMVEKDVHPLASLTHTGTSVLVEGVLKKPPAEAKQRIELKVERVIELGEVDAAAYPLPKTKITLETLRDFVHLRARTNTIGAVARIRHQLAYATHSFFDENGFLYIHTPIITTSDCEGAGEMFQVTALFSQAEKVEKELKENPAPSEADVEAAKLVVKEKGDAVAQLKAAKASKQEITAAVSVLTKAKENVLRVEERSKLKPGLPLKGDGKIAFENDFFKRQAFLTVSGQLQVETYACALSNVYTFGPTFRAENSHTSRHLAEFWMVEPEIAFANLQDDMNCAERYVQYLCKWLLKHCREDMEFMVKHVDKTAIERLELVSSTPFERISYTKAVEILEGVDKKFENKVEWGIDLASEHERYLTEVIFKRPVIVYNYPKGIKAFYMRLNDDQKTVAAMDVLVPKVGELIGGSQREERLDILKQRILDADLPLEPYEWYLDLRRFGSVKHSGFGLGFERMILFATGLENIRDVIPFPRYPGRADL

SEQ ID NO: 63990 - DNA, 1266 bp, Triticum aestivum
  misc_feature (1)..(1266): Ceres Seq. ID no. 12617235
catcctaatcgaaaaaaaaatatcaaaaccaattcaactccctcagatcctagtcttgcagtccacccacggcggcgatggcggagctcaagagccggcgggtgatcctcaaggactacgtggagggctaccccacggaggcgcacatggagctgctccccgccgcgcccgtcgacgaggccgaggagggctcggtgctggtcaagaacctctacctctcctgcgacccctacatgcgccccaagatgtcccgcccgctgcaccagtcctacaccgccgccttcgtcccgggcgccgccatcaccggttacggcgtgtcccaggtcgtccgctcctcgcgccccgggctcgccgccggcgacctcgtctggggcatgaccggctgggaggactacagcgtcatcaagccgcccttcacggccatactcaccaagatccagcccgacgacggcgtgccgctgtcctactacaccggcatcctcggcatgccggggctcacggcctacgtgggattccaccacatctgctcccccaaggccggcgagacggtgttcgtctccgcggcctccggcgccgtcggccagctcgtcggccagttcgccaggctcctcggctgccacgtcgtcggcagtgcgggctccaaggagaaggtggacctactcatcaacaagttcggcttccacgacgccttcaactacaaggaggaggacgccgacctcgccggcgcgctcaagaagcgcttccccgacggcatcgacgtctacttcgagaacgttggcggcaagatgctcgaggccgtgctgctcaacatgaaggtgcacggacgcatcgccgtctgcggcctcatctcccagtacaacctcaccgccggcgagaaggacgccgacgtcggcgtgcgcaacctcacctccctcgtctccaagcgcatcaagatgcagggcttcatcgagcccgaccacaagcacctctacccggagtacatggcgtgggtgctcccgcacatcaaggagggcagggtcgtctacgtcgaggacgtcgccgacgggctcgacgccgcgcccgcagcgctcatcggcctctaccacggccgcaacgtcggcaagcaggtcgtcaggctcaccaaccccgaccccaagtgactcacacactgtactgtagtagcagatcaattatcaaccacgcgtcaatctattcacatcgcaatcgcatcttggtggttggatggcaacgaaagagtcaaattaaataaaagatccttgctttctc

SEQ ID NO: 63991 - protein, 415 aa, Triticum aestivum
  peptide (1)..(415): Ceres Seq. ID no. 12617236
ILIEKKISKPIQLPQILVLQSTHGGDGGAQEPAGDPQGLRGGLPHGGAHGAAPRRARRRGRGGLGAGQEPLPLLRPLHAPQDVPPAAPVLHRRLRPGRRHHRLRRVPGRPLLAPRARRRRPRLGHDRLGGLQRHQAALHGHTHQDPARRRRAAVLLHRHPRHAGAHGLRGIPPHLLPQGRRDGVRLRGLRRRRPARRPVRQAPRLPRRRQCGLQGEGGPTHQQVRLPRRLQLQGGGRRPRRRAQEALPRRHRRLLRERWRQDARGRAAQHEGARTHRRLRPHLPVQPHRRREGRRRRRAQPHLPRLQAHQDAGLHRARPQAPLPGVHGVGAPAHQGGQGRLRRGRRRRARRRARSAHRPLPRPQRRQAGRQAHQPRPQVTHTLYCSSRSIINHASIYSHRNRILVVGWQRKSQIK

SEQ ID NO: 63992 - protein, 353 aa, Triticum aestivum
  peptide (1)..(353): Ceres Seq. ID no. 12617237
MAELKSRRVILKDYVEGYPTEAHMELLPAAPVDEAEEGSVLVKNLYLSCDPYMRPKMSRPLHQSYTAAFVPGAAITGYGVSQVVRSSRPGLAAGDLVWGMTGWEDYSVIKPPFTAILTKIQPDDGVPLSYYTGILGMPGLTAYVGFHHICSPKAGETVFVSAASGAVGQLVGQFARLLGCHVVGSAGSKEKVDLLINKFGFHDAFNYKEEDADLAGALKKRFPDGIDVYFENVGGKMLEAVLLNMKVHGRIAVCGLISQYNLTAGEKDADVGVRNLTSLVSKRIKMQGFIEPDHKHLYPEYMAWVLPHIKEGRVVYVEDVADGLDAAPAALIGLYHGRNVGKQVVRLTNPDPK

SEQ ID NO: 63993 - protein, 330 aa, Triticum aestivum
  peptide (1)..(330): Ceres Seq. ID no. 12617238
MELLPAAPVDEAEEGSVLVKNLYLSCDPYMRPKMSRPLHQSYTAAFVPGAAITGYGVSQVVRSSRPGLAAGDLVWGMTGWEDYSVIKPPFTAILTKIQPDDGVPLSYYTGILGMPGLTAYVGFHHICSPKAGETVFVSAASGAVGQLVGQFARLLGCHVVGSAGSKEKVDLLINKFGFHDAFNYKEEDADLAGALKKRFPDGIDVYFENVGGKMLEAVLLNMKVHGRIAVCGLISQYNLTAGEKDADVGVRNLTSLVSKRIKMQGFIEPDHKHLYPEYMAWVLPHIKEGRVVYVEDVADGLDAAPAALIGLYHGRNVGKQVVRLTNPDPK

SEQ ID NO: 63994 - DNA, 1394 bp, Triticum aestivum
  misc_feature (1)..(1394): Ceres Seq. ID no. 13597225
cccacaccgtccccctcgtctctcctcatctcgcctgtgctctccacacgaccacaccaaaaatccagacctgcccgcccgcctcgcctcctcgtctgcctcctctcctgcgcttcagtttccaggctaggttgctgctgttgttcacatggattcctttttccaaagagctttcggcgacccaatgtgctcggaagacagtaatgttgtccaacaaggaattgagaaatgcccattcctgaggaacatcaacgagcctacgagtttttccttgacatccgttaattttcccgctccggcaaccggagccaagggtccaatttttgaagacgggcccaactttgacacggcatttcgagttttccacggcagagacggggttgttccactttcagaaggagcctttgcacatattgagaagcctctgccaaagcccactcctgaatttaaccccttggcagccaaagcagctaccatcagtctctcgggattcggaggctttttcagcttcggtgatttctcaaacaagcgcaataagcagaactccaacaagaagaatcccaacaacctcccccagaataaaggccagtctaataacaatcatgaagcgatgagcaatgactggctggaaaatggtcaatgccctcttgcaaagtcatatagagcaatcggtggagtcgtgcctcttgtcgcaaagctgctgacacccccagctggtatgaaactgacgtgccctcctgcgattgttgctgcccgtgcagcaatatcccgcacggcgtttgcgaaggggcttcgccctcagcccctaccgacaaaagtagtggtgatcgcactgctcggtatggcagcaaatgttcctcttggcatctggagggagcacactacgaagttttcagtgcaatggtttgcggcggtccatgctgcagtgcctttcatagggatgctgaggaagtccatcctgatgccgaagagcgccatggcccttaccatagctgcctctatattgggtcagacaattggttcaagagctgaacgtatcagattgaagagggcaaaattagcagcagagggccatggccatgaacatgctacccggattgaagctccggtgaccctgaaaactgggagctcaggtgctgtccagctctgggatccgcttggcctcagagtcaaaggcgccgtgtccccagccctggttccgactgttggtgccatgtactgatgagatgatcatgcttcactgcggcggctgcgagaattgtatcaagagttccagaaattgtttcttgtattcattgttattgtgtcttgtaaaggattactggctacattggattcttatccccacatgagtttgggtgcaatcaataaatttcaccatgtcctttggtttc

SEQ ID NO: 63995 - protein, 357 aa, Triticum aestivum
  peptide (1)..(357): Ceres Seq. ID no. 13597226
MDSFFQRAFGDPMCSEDSNVVQQGIEKCPFLRNINEPTSFSLTSVNFPAPATGAKGPIFEDGPNFDTAFRVFHGRDGVVPLSEGAFAHIEKPLPKPTPEFNPLAAKAATISLSGFGGFFSFGDFSNKRNKQNSNKKNPNNLPQNKGQSNNNHEAMSNDWLENGQCPLAKSYRAIGGVVPLVAKLLTPPAGMKLTCPPAIVAARAAISRTAFAKGLRPQPLPTKVVVIALLGMAANVPLGIWREHTTKFSVQWFAAVHAAVPFIGMLRKSILMPKSAMALTIAASILGQTIGSRAERIRLKRAKLAAEGHGHEHATRIEAPVTLKTGSSGAVQLWDPLGLRVKGAVSPALVPTVGAMY

SEQ ID NO: 63996 - protein, 345 aa, Triticum aestivum
  peptide (1)..(345): Ceres Seq. ID no. 13597227
MCSEDSNVVQQGIEKCPFLRNINEPTSFSLTSVNFPAPATGAKGPIFEDGPNFDTAFRVFHGRDGVVPLSEGAFAHIEKPLPKPTPEFNPLAAKAATISLSGFGGFFSFGDFSNKRNKQNSNKKNPNNLPQNKGQSNNNHEAMSNDWLENGQCPLAKSYRAIGGVVPLVAKLLTPPAGMKLTCPPAIVAARAAISRTAFAKGLRPQPLPTKVVVIALLGMAANVPLGIWREHTTKFSVQWFAAVHAAVPFIGMLRKSILMPKSAMALTIAASILGQTIGSRAERIRLKRAKLAAEGHGHEHATRIEAPVTLKTGSSGAVQLWDPLGLRVKGAVSPALVPTVGAMY

SEQ ID NO: 63997 - protein, 203 aa, Triticum aestivum
  peptide (1)..(203): Ceres Seq. ID no. 13597228
MSNDWLENGQCPLAKSYRAIGGVVPLVAKLLTPPAGMKLTCPPAIVAARAAISRTAFAKGLRPQPLPTKVVVIALLGMAANVPLGIWREHTTKFSVQWFAAVHAAVPFIGMLRKSILMPKSAMALTIAASILGQTIGSRAERIRLKRAKLAAEGHGHEHATRIEAPVTLKTGSSGAVQLWDPLGLRVKGAVSPALVPTVGAMY

SEQ ID NO: 63998 - DNA, 1790 bp, Triticum aestivum
  misc_feature (1)..(1790): Ceres Seq. ID no. 13597161
agaagcctacgagaaccacagtccagccgaccagccgccgccgcgcgataaccggagttaatggagacgccgcccccatggagggtcctcgagttctacagcggtatcggcggcatgcggtactcccttgcgtcgtcgggcgttcgagcggaggtggtggaggcctttgacatcaacgacgtcgccaacgacgtctacgagcacaacttcggccaccgcccctgccagggaaacattcaaacactcactgctggtgatctagacaagtacaaggcacatgcatggctcctttctcctccatgtcaaccatatacacggcaaggacttcagaaacattcagctgatgctcgggcattttcatttataaagattttaaaccttatgcaaaacatgagctttcctccacaaatgttatttgtggaaaatgttgtcggattcgaggtatctgatacacatgaccagttgctagcggtcctttcaactctcagtttcaacacacaagaattcatcctaagccccttgcagtttggtgtcccatattctagaccgcgctacttctgtttggcaaaacaggaatctatgtgttttccaaatccatcagtcaatgacaagctgcttaggacacctacatgcctaacattgaacactacgagaactcagaatagctatgaccagaatgaagatgatctggaagtagtatgtaatccaataagaaacttccttgaagcacagagtattggagataaggaatcttcagccatcatctctgactttaaggaggctgatggatgcactccgattgaaactgcttcacatgactacacagttccactaagcttgattgaacggtggggaaatgctatggatattgtataccctgaatcaaaacggtgctgctgttttactaaaagttattatcgctatgtgaagggcacaggctctgtactggttacatctaaaagcctcaaaccagttccaaaagagaaccttgaaatgtcttcactgagtgagttgggtctacggtttttcacccctcgagaggtcgctaatttgcattcatttcccccgagtttccgttttccggatcagataagcctcagacaacagtatgccatgctgggtaatagtctgagcatagcggttgtggctcctttgttgtgctatctgtttgccgagacatagacaagttctcaatcatttggcaggtgatattcaccttggcccgccatctgatatttgtcaaaatcttgccacacttgagttgcaagtatgatattttatccatcagtttttgtgtgtctccgatctgtgcattgttgtgagttgtgatcatgctcatccttcacgccacggtgcagtttcaccgagcttgaggacgtgcggtcaattcgctgacggcctagcaggtagtattacagtgaagaggtgggtgcgtccaaaataaggcggcatgtacggccgaagctcaacctttggatctattgtagcatataccaataccagtcccaagtactccctccgtcccaaaataaaactagtacaaagttgagtcacttatttgtaaaattagtacaaagttgagtcatttattttgggatggagggaatattaggggtcgacctctgctttgtgccttccactccacagccatatttatgttgcaacattgcatgttttgaggcccagttagtaatgtgataattttgttttgggcaagtgtaatgtgatactatgtgatgacttatcgtattgcgtgcaataaatggatgcaaatcaaatcccactatatg

SEQ ID NO: 63999 - protein, 373 aa, Triticum aestivum
  peptide (1)..(373): Ceres Seq. ID no. 15222040
METPPPWRVLEFYSGIGGMRYSLASSGVRAEVVEAFDINDVANDVYEHNFGHRPCQGNIQTLTAGDLDKYKAHAWLLSPPCQPYTRQGLQKHSADARAFSFIKILNLMQNMSFPPQMLFVENVVGFEVSDTHDQLLAVLSTLSFNTQEFILSPLQFGVPYSRPRYFCLAKQESMCFPNPSVNDKLLRTPTCLTLNTTRTQNSYDQNEDDLEVVCNPIRNFLEAQSIGDKESSAIISDFKEADGCTPIETASHDYTVPLSLIERWGNAMDIVYPESKRCCCFTKSYYRYVKGTGSVLVTSKSLKPVPKENLEMSSLSELGLRFFTPREVANLHSFPPSFRFPDQISLRQQYAMLGNSLSIAVVAPLLCYLFAET

SEQ ID NO: 64000 - protein, 355 aa, Triticum aestivum
  peptide (1)..(355): Ceres Seq. ID no. 15222041
MRYSLASSGVRAEVVEAFDINDVANDVYEHNFGHRPCQGNIQTLTAGDLDKYKAHAWLLSPPCQPYTRQGLQKHSADARAFSFIKILNLMQNMSFPPQMLFVENVVGFEVSDTHDQLLAVLSTLSFNTQEFILSPLQFGVPYSRPRYFCLAKQESMCFPNPSVNDKLLRTPTCLTLNTTRTQNSYDQNEDDLEVVCNPIRNFLEAQSIGDKESSAIISDFKEADGCTPIETASHDYTVPLSLIERWGNAMDIVYPESKRCCCFTKSYYRYVKGTGSVLVTSKSLKPVPKENLEMSSLSELGLRFFTPREVANLHSFPPSFRFPDQISLRQQYAMLGNSLSIAVVAPLLCYLFAET

SEQ ID NO: 64001 - protein, 266 aa, Triticum aestivum
  peptide (1)..(266): Ceres Seq. ID no. 15222042
MQNMSFPPQMLFVENVVGFEVSDTHDQLLAVLSTLSFNTQEFILSPLQFGVPYSRPRYFCLAKQESMCFPNPSVNDKLLRTPTCLTLNTTRTQNSYDQNEDDLEVVCNPIRNFLEAQSIGDKESSAIISDFKEADGCTPIETASHDYTVPLSLIERWGNAMDIVYPESKRCCCFTKSYYRYVKGTGSVLVTSKSLKPVPKENLEMSSLSELGLRFFTPREVANLHSFPPSFRFPDQISLRQQYAMLGNSLSIAVVAPLLCYLFAET

SEQ ID NO: 64002 - DNA, 1548 bp, Triticum aestivum
  misc_feature (1)..(1548): Ceres Seq. ID no. 13597376
aaaacaagaagaagagacgcacaagtccccctctctctccctctctcacaaacaaacaaacaaaccgctcttgtctcccattccaatctcgccccgtcggtcgaattacaagttagaagaagaagaagaggaatcagaggaagaagaagatggtgtctgcggtgcttcggacgatcctggtgacgggcggcgcggggtacatcggcagccacacggtgctgcagctgctgctccagggcttccgcgtcctcgtcgtcgacagcctcgacaacgcctccgaggaggccatccgccgcgtccggcaactcgccaacgccccgcaaaacagcctcgacttccgcaaggtggaccttcgtgacaaggaggcgctggacgaaatcttctcgacccaaaggttcgaggctgtgatccactttgccgggctgaaagccgtgggggagagcgtgcagaagcccctgctttactacgacaacaacctcatcggcaccatcaccctcctccaagtcatggcagcacatggatgcaacaagcttgtgttctcatcatcagccactgtgtacgggtggcccaaggaggtgccctgcaccgaggagttcccgctctccgcgaccaacccttacggccgaactaagcttgtcattgaagacatctgccgcgacctccagcgctcggaccccgactggaagatcatcctgctgaggtacttcaacccggtcggcgcgcacccgagtggctacatcggggaagaccccctcggagtccccaacaacctgatgccctatgtccagcaagtcgctgtcgggaggcggcccgcgctgacggtttatgggaccgactacaacaccaaggatggaacaggggtacgtgactacatccatgttgttgacctggctgacggccacatcgccgccctgaggaagctctacgaagattctgacagaatagggtgcgaggtgtacaatctgggcactggaaaggggacgtccgtgctggaaatggttgctgcattcgagaaggcttgcggaaagaaaatccctctggtttatgctggaagaagagctggagatgccgagactgtgtacgctgccaccgccaaagctgagaaggagctcaagtggaaggccaagtatggggtggaggagatgtgcagagacctgtggaactgggccagcaagaacccctacggctacggatccagcgacaacggccactgattaatagtcaccagagcaagtagtaatagcagcatatatacgccaccatccatctatatatttatccaccaccaccaccacagagagcagagagaagaagaggaagactactactgatgtgtatagggaaggagtgagtgagtcggatccatcagtagcttataattaattatattgttcgcgttagaaagctaatcatatccatctcccttatggagtaagtagaagaaataaggttggttcccttgccttgtagaaatatatatatagatatcttgtcggtcatggaataacttactttacctactgatataaatatatatatgcttggttc

SEQ ID NO: 64003 - protein, 354 aa, Triticum aestivum
  peptide (1)..(354): Ceres Seq. ID no. 13597377
MVSAVLRTILVTGGAGYIGSHTVLQLLLQGFRVLVVDSLDNASEEAIRRVRQLANAPQNSLDFRKVDLRDKEALDEIFSTQRFEAVIHFAGLKAVGESVQKPLLYYDNNLIGTITLLQVMAAHGCNKLVFSSSATVYGWPKEVPCTEEFPLSATNPYGRTKLVIEDICRDLQRSDPDWKIILLRYFNPVGAHPSGYIGEDPLGVPNNLMPYVQQVAVGRRPALTVYGTDYNTKDGTGVRDYIHVVDLADGHIAALRKLYEDSDRIGCEVYNLGTGKGTSVLEMVAAFEKACGKKIPLVYAGRRAGDAETVYAATAKAEKELKWKAKYGVEEMCRDLWNWASKNPYGYGSSDNGH

SEQ ID NO: 64004 - protein, 235 aa, Triticum aestivum
  peptide (1)..(235): Ceres Seq. ID no. 13597378
MAAHGCNKLVFSSSATVYGWPKEVPCTEEFPLSATNPYGRTKLVIEDICRDLQRSDPDWKIILLRYFNPVGAHPSGYIGEDPLGVPNNLMPYVQQVAVGRRPALTVYGTDYNTKDGTGVRDYIHVVDLADGHIAALRKLYEDSDRIGCEVYNLGTGKGTSVLEMVAAFEKACGKKIPLVYAGRRAGDAETVYAATAKAEKELKWKAKYGVEEMCRDLWNWASKNPYGYGSSDNGH

SEQ ID NO: 64005 - DNA, 1412 bp, Triticum aestivum
  misc_feature (1)..(1412): Ceres Seq. ID no. 12617090
attagtagcatctcaggagcagcaacaggagatggaatctctccccgtcccgagcgtgcaggccatggtggcggccaccggcggagccgatgtgccaccgaggtatctccggcctgcggaggcggtcaccggcatcgtcgacggcgagggtgaggcccagatccccatcatcgactaccggaggctgctgctggagctggatcgccgcggcgaggagtccgcgcgcctccacagcgcctgccaggaatggggcttcttccagctggttaaccacagtgtcccggccgatgtggtggagggaatgaaggccaacattcagcaattctttcagctacccgcagagacaaagaaacgattcgcgcaggagcgagggcagctggaaggctacggtcagctgttcgtcgtctcggaggatcagaagcttgactgggccgatatgctttacctgtacacacagccacctgagagcaggaacaccaagttctggcctgaccagcctgttaacttcagatcgacgctggatagatactctggtgctgtgaaggagatagcggattcccttttggcgacgatggcggagaacttgggactgaaacaagaggtgattgctgacagatgcgtgggcggagtgcagtctgtcaggatgaactactacccgccgtgcgctcaagcagagaaagtcgtcggcttctccccgcactctgacgctgatctcctgaccctcgtcctccaagtgaaccatgtccaaggcctgcagatcaagaggaacggcagctggttccccgtcaggcctgtcgagggcgctctcatcgtcaacattggggatatctttgagatcttcacaaatgggaggtacaggagcatcgagcaccgtgcggtcgtcgaccccaaggaggaacggctgtcggccgcggcgttccactccccgaacatccacgccacgataggcccgctgaaggagcttacggcggacgaagacgaggcctacaagacggtggaccacgagaacttcatgaggcttttcttcgcgacgaagctggaggggaagagcttcttggatcggatgaagctgaagtagctagcagctgattgctacgtacccagcatagcaggtaaactgtgtcgttggtcctcgcatcattgtcagatattcaggtagttcatgctctctggaatttagttcctgatggccgtcttgttggagcacaagagagctgaacttggcaaacataataataatactgtggtttcttcagtagttgcttgtgttctgcaaacatttgatagatttgctcctatgtgcttgatgtcgtgtacaaagtgggctatgtgctgctgtgtcatttcagtttctgtccagtgtgaaaacagttgattcccagaaaataagataagaatggaagttgatcccc

SEQ ID NO: 64006 - protein, 358 aa, Triticum aestivum
  peptide (1)..(358): Ceres Seq. ID no. 12617091
LVASQEQQQEMESLPVPSVQAMVAATGGADVPPRYLRPAEAVTGIVDGEGEAQIPIIDYRRLLLELDRRGEESARLHSACQEWGFFQLVNHSVPADVVEGMKANIQQFFQLPAETKKRFAQERGQLEGYGQLFVVSEDQKLDWADMLYLYTQPPESRNTKFWPDQPVNFRSTLDRYSGAVKEIADSLLATMAENLGLKQEVIADRCVGGVQSVRMNYYPPCAQAEKVVGFSPHSDADLLTLVLQVNHVQGLQIKRNGSWFPVRPVEGALIVNIGDIFEIFTNGRYRSIEHRAVVDPKEERLSAAAFHSPNIHATIGPLKELTADEDEAYKTVDHENFMRLFFATKLEGKSFLDRMKLK

SEQ ID NO: 64007 - protein, 348 aa, Triticum aestivum
  peptide (1)..(348): Ceres Seq. ID no. 12617092
MESLPVPSVQAMVAATGGADVPPRYLRPAEAVTGIVDGEGEAQIPIIDYRRLLLELDRRGEESARLHSACQEWGFFQLVNHSVPADVVEGMKANIQQFFQLPAETKKRFAQERGQLEGYGQLFVVSEDQKLDWADMLYLYTQPPESRNTKFWPDQPVNFRSTLDRYSGAVKEIADSLLATMAENLGLKQEVIADRCVGGVQSVRMNYYPPCAQAEKVVGFSPHSDADLLTLVLQVNHVQGLQIKRNGSWFPVRPVEGALIVNIGDIFEIFTNGRYRSIEHRAVVDPKEERLSAAAFHSPNIHATIGPLKELTADEDEAYKTVDHENFMRLFFATKLEGKSFLDRMKLK

SEQ ID NO: 64008 - protein, 337 aa, Triticum aestivum
  peptide (1)..(337): Ceres Seq. ID no. 12617093
MVAATGGADVPPRYLRPAEAVTGIVDGEGEAQIPIIDYRRLLLELDRRGEESARLHSACQEWGFFQLVNHSVPADVVEGMKANIQQFFQLPAETKKRFAQERGQLEGYGQLFVVSEDQKLDWADMLYLYTQPPESRNTKFWPDQPVNFRSTLDRYSGAVKEIADSLLATMAENLGLKQEVIADRCVGGVQSVRMNYYPPCAQAEKVVGFSPHSDADLLTLVLQVNHVQGLQIKRNGSWFPVRPVEGALIVNIGDIFEIFTNGRYRSIEHRAVVDPKEERLSAAAFHSPNIHATIGPLKELTADEDEAYKTVDHENFMRLFFATKLEGKSFLDRMKLK

SEQ ID NO: 64009 - DNA, 1508 bp, Triticum aestivum
  misc_feature (1)..(1508): Ceres Seq. ID no. 15226269
cccgagtccagtcctcccggcggcgccgcctctgcgcgctttgggcaggaggccgacgccaccattgccggagacctcgcaccccttcggacccaagtaggagtccagtgtctttactctggagagcgatggattctccagaaattccgccctctgaccgcagagaagagcggccgccagcgtcgctgccgctgccggcggcctttctcgagttcctcggcgagaatggcctggaccccgcgctctactccaaggcggacaccatcccgcgctacatcaggttaaaaccaggcatggagtccagtgtggtgacagagatcgaaagcgagctcaagtgtgatctcatgagggtgtcgtggctgccggacttctatgcgatcccgcctgaaattcagattgctggatccaaggcttatcagcaagggaagatctatgggattgatgcagcttctggagctgccatcttagcactcgatgttcaatcaggagaccatgttcttgacctctgtgctgcaccaggtgcaaagctttgcatgcttgcagatatgcttggtagctcaggttctttgactggtgttgatgttgcaaagcaccgtcttgcagcctgtcgtacgatgttgcagaagtattctcttggagatcgtagtcgactctttgttgctgatgggacttcgttttccatattgcctgtgaactccaatctggggagcatggaagcttttgttggaattgaggataatggaagcatattctcagaatggacttcaaagagatcatggaaagacagacagaagtctaaaaaggcaaaagcagccggttcacctcatctaccatcaacttccgaacctgaactgatatactatggcaaagattcaggattagttggattgcaaaaacgttatgttcttcacccatcaactgatgctgctgcctgtacatctgggtatgataaggtcctagtggatgcagaatgtactcatgatggatcgataaaacacattcagaagtttgagttctggggatggaaaacattagaccgccgtgtactcaacgtagaaagaactggcaacctacttcatcttcagttagggcttctcacaaatggttttaaattattgaaaacaggcggatcacttgtctatagtacttgcagcttgactgttgcacaaaacgagaatgtggttcagcaattcctctcaaaacatccttcagcagagctgctaaagatcaatccagccgatagctggccctgcagaagcggcggcatccagaaaaccttgcggttcgatcccgcgacgtcacaaactagtggacttttcgttgccaagttcgtcaagttgtgatgttctttatgagatgctcgcaacttcgtataagttaatttcatatgaaaccaggatgtcgtgagtaaattttgctaggttttactctagttctttaaacaacaggttgtcgaagtctgcttgttgtttatttattttactctaatttgaaataagcttcttggg

SEQ ID NO: 64010 - protein, 446 aa, Triticum aestivum
  peptide (1)..(446): Ceres Seq. ID no. 15226270
RVQSSRRRRLCALWAGGRRHHCRRPRTPSDPSRSPVSLLWRAMDSPEIPPSDRREERPPASLPLPAAFLEFLGENGLDPALYSKADTIPRYIRLKPGMESSVVTEIESELKCDLMRVSWLPDFYAIPPEIQIAGSKAYQQGKIYGIDAASGAAILALDVQSGDHVLDLCAAPGAKLCMLADMLGSSGSLTGVDVAKHRLAACRTMLQKYSLGDRSRLFVADGTSFSILPVNSNLGSMEAFVGIEDNGSIFSEWTSKRSWKDRQKSKKAKAAGSPHLPSTSEPELIYYGKDSGLVGLQKRYVLHPSTDAAACTSGYDKVLVDAECTHDGSIKHIQKFEFWGWKTLDRRVLNVERTGNLLHLQLGLLTNGFKLLKTGGSLVYSTCSLTVAQNENVVQQFLSKHPSAELLKINPADSWPCRSGGIQKTLRFDPATSQTSGLFVAKFVKL

SEQ ID NO: 64011 - protein, 404 aa, Triticum aestivum
  peptide (1)..(404): Ceres Seq. ID no. 15226271
MDSPEIPPSDRREERPPASLPLPAAFLEFLGENGLDPALYSKADTIPRYIRLKPGMESSVVTEIESELKCDLMRVSWLPDFYAIPPEIQIAGSKAYQQGKIYGIDAASGAAILALDVQSGDHVLDLCAAPGAKLCMLADMLGSSGSLTGVDVAKHRLAACRTMLQKYSLGDRSRLFVADGTSFSILPVNSNLGSMEAFVGIEDNGSIFSEWTSKRSWKDRQKSKKAKAAGSPHLPSTSEPELIYYGKDSGLVGLQKRYVLHPSTDAAACTSGYDKVLVDAECTHDGSIKHIQKFEFWGWKTLDRRVLNVERTGNLLHLQLGLLTNGFKLLKTGGSLVYSTCSLTVAQNENVVQQFLSKHPSAELLKINPADSWPCRSGGIQKTLRFDPATSQTSGLFVAKFVKL

SEQ ID NO: 64012 - protein, 349 aa, Triticum aestivum
  peptide (1)..(349): Ceres Seq. ID no. 15226272
MESSVVTEIESELKCDLMRVSWLPDFYAIPPEIQIAGSKAYQQGKIYGIDAASGAAILALDVQSGDHVLDLCAAPGAKLCMLADMLGSSGSLTGVDVAKHRLAACRTMLQKYSLGDRSRLFVADGTSFSILPVNSNLGSMEAFVGIEDNGSIFSEWTSKRSWKDRQKSKKAKAAGSPHLPSTSEPELIYYGKDSGLVGLQKRYVLHPSTDAAACTSGYDKVLVDAECTHDGSIKHIQKFEFWGWKTLDRRVLNVERTGNLLHLQLGLLTNGFKLLKTGGSLVYSTCSLTVAQNENVVQQFLSKHPSAELLKINPADSWPCRSGGIQKTLRFDPATSQTSGLFVAKFVKL

SEQ ID NO: 64013 - DNA, 1291 bp, Triticum aestivum
  misc_feature (1)..(1291): Ceres Seq. ID no. 13598499
gaagcttctacatggaacacctcaacctagggccggcagccgcaggagaagaagacaagccgcggtagacatcgagatcagccggagagaaaaatcgaggggacacgatacgagagcaggaagccatggccttcctcctccccaagctcaccacgcctccctgcagatcgccgccgcccagtcccctcaagccccagctcggcctgcccagccacggaggcggcaggctccacggggccggctcggcgcaggccgcggcgccgacccacctcaacctcccgctcctcctcagcgcctcgcagcaagaagcccccacggccaagtccgccgagaccaggaacagggctgcgagcggcggcggcggcggcggcggggacccgcgaaggtcggatttttacctcaaccttggggcggcggtgcgcgcgctgcgggacgacctgccggccgtgtttctccgggaacccaactacgacatctaccgcgaagacatcacatttgttgatccgctgaacactttccatgggattgacaactacaaaacaatcttctgggctctcagattccacggacgtctactattcagtgaaattgggctcgacgtatcacgcatttggcaactaacagaaacctcgatagttgtccggtgggaactgtggggcacaccgcgtgtcccgtgggaatcatatggctgcttcagtggcacatccaggtacaaagtcgacaggaacgggaaaatttacgagcataaagtcgacaacctggcattggacttcccccggccggctgtcaaagtgagcagcattactaacttagtagttgctgcatacccaccgagccccaatccaactttctgggatgtagttgggacaggcgatggatgctcatggacaaagctttaccgagcggtgctggagacagtagagcgggaaggtgacattcccgcaggcatttgcatggaaggtctactcacttgttcatagatggaatcaacttcaggactagctgcttcggtagtgagttttgctagaaaaaatgtatagaatgtggatacatattaatcacatcactgtcagttctctgtttgtataatgtagctcagcactagaacaactttagatcaaattcatggtagatgactatacctcatcatcattgttgtgtattttaggatattactgccacttgcttacatcttatgagatatgaatacaaagttgtagattttctcatgggttaggaaaactctgttccctaaattatttaggaaaatggaagatcttgaagactcaat

SEQ ID NO: 64014 - protein, 284 aa, Triticum aestivum
  peptide (1)..(284): Ceres Seq. ID no. 15222352
MAFLLPKLTTPPCRSPPPSPLKPQLGLPSHGGGRLHGAGSAQAAAPTHLNLPLLLSASQQEAPTAKSAETRNRAASGGGGGGGDPRRSDFYLNLGAAVRALRDDLPAVFLREPNYDIYREDITFVDPLNTFHGIDNYKTIFWALRFHGRLLFSEIGLDVSRIWQLTETSIVVRWELWGTPRVPWESYGCFSGTSRYKVDRNGKIYEHKVDNLALDFPRPAVKVSSITNLVVAAYPPSPNPTFWDVVGTGDGCSWTKLYRAVLETVEREGDIPAGICMEGLLTCS

SEQ ID NO: 64015 - protein, 166 aa, Triticum aestivum
  peptide (1)..(166): Ceres Seq. ID no. 15222353
KLLHGTPQPRAGSRRRRRQAAVDIEISRREKSRGHDTRAGSHGLPPPQAHHASLQIAAAQSPQAPARPAQPRRRQAPRGRLGAGRGADPPQPPAPPQRLAARSPHGQVRRDQEQGCERRRRRRRGPAKVGFLPQPWGGGARAAGRPAGRVSPGTQLRHLPRRHHIC

SEQ ID NO: 64016 - DNA, 1374 bp, Triticum aestivum
  misc_feature (1)..(1374): Ceres Seq. ID no. 13597160
aagacttcatcaccctgtacgtgcgcctctctccactcccatgttcaggaagcgaaaatttcaggggcgttttatctgattggatacctgatgcaaactttactagagtatattcggttcttgctagattgggatatttgggggcacgcggctgatgctagacttggtttatgccggagaaggctgctgtgcttgctgaccgggtgctcacggagctcgttaaggaactgaatattagaccagtacctgttgtgtttgcatccttttcgggaggaccaaaaggttgcacatacaaggttcttcagctgatccagagaaggtgcaaagggcagctgagtttggatgactatcaacttgtacgggactgcgtatgtggacaaatatatgactcgagtcctgtagattttgtgagtgatttaggcacccgctttcttcttcacccaagtgtcctgaagatgcctgaacctccacgtgtcttatcatggatgactagaggcattgcctcgggtctagacactcttttcattggcaagtttgaagcacagcgcaaagaatattgggagacactatactcatcagtgcatgttggcccaatactcatattctgttcagaggatgatgaacttgctccatgttcggccgttcaaaattttggacggcgtctgctggagctgggtggtgatgtgaatttagttaaatggcacagttctccacatgtaggacattacaagcatcacactgaggaataccgagctgcagtgactgagctgctcatgaaggcttcagcgctttacacaagcagaaaacgactcaatgactacagtgtcggcacgagtgaggacagtgacacaccttattcgtctcgcaatctacataagactgctgtaagctccagtgataggctagggagggtttcagttgatccagccaatcatttcttcttaccgagttccatggagtaccatgaaagcaggagtgaagtgctaaaacccgagttgttcaacatgccgagtgttgaaagcgcgaagaaccctgatggcgtgttggggacgatgctctatgatgcatgtgtcccaaagaacgtggaaggctgggacttcaagcttgcatcaatagatggacagcgtatgcattttactgcccgtcagcatggtacttccaatccaacaaaatgtatacgccgctcaagattgtaatgattttgactcaacatctaagtgcattccagcagactgctctatactgccagagtatacttgtttcaggagaatgttattgtgttgaccttttctggaaattttagagtatactgccagagtatactaatgcttttttatggaaattttagttgccgcaaagatggcaaattccttt

SEQ ID NO: 64017 - protein, 341 aa, Triticum aestivum
  peptide (1)..(341): Ceres Seq. ID no. 15222037
MPEKAAVLADRVLTELVKELNIRPVPVVFASFSGGPKGCTYKVLQLIQRRCKGQLSLDDYQLVRDCVCGQIYDSSPVDFVSDLGTRFLLHPSVLKMPEPPRVLSWMTRGIASGLDTLFIGKFEAQRKEYWETLYSSVHVGPILIFCSEDDELAPCSAVQNFGRRLLELGGDVNLVKWHSSPHVGHYKHHTEEYRAAVTELLMKASALYTSRKRLNDYSVGTSEDSDTPYSSRNLHKTAVSSSDRLGRVSVDPANHFFLPSSMEYHESRSEVLKPELFNMPSVESAKNPDGVLGTMLYDACVPKNVEGWDFKLASIDGQRMHFTARQHGTSNPTKCIRRSRL

SEQ ID NO: 64018 - protein, 246 aa, Triticum aestivum
  peptide (1)..(246): Ceres Seq. ID no. 15222038
MPEPPRVLSWMTRGIASGLDTLFIGKFEAQRKEYWETLYSSVHVGPILIFCSEDDELAPCSAVQNFGRRLLELGGDVNLVKWHSSPHVGHYKHHTEEYRAAVTELLMKASALYTSRKRLNDYSVGTSEDSDTPYSSRNLHKTAVSSSDRLGRVSVDPANHFFLPSSMEYHESRSEVLKPELFNMPSVESAKNPDGVLGTMLYDACVPKNVEGWDFKLASIDGQRMHFTARQHGTSNPTKCIRRSRL

SEQ ID NO: 64019 - protein, 236 aa, Triticum aestivum
  peptide (1)..(236): Ceres Seq. ID no. 15222039
MTRGIASGLDTLFIGKFEAQRKEYWETLYSSVHVGPILIFCSEDDELAPCSAVQNFGRRLLELGGDVNLVKWHSSPHVGHYKHHTEEYRAAVTELLMKASALYTSRKRLNDYSVGTSEDSDTPYSSRNLHKTAVSSSDRLGRVSVDPANHFFLPSSMEYHESRSEVLKPELFNMPSVESAKNPDGVLGTMLYDACVPKNVEGWDFKLASIDGQRMHFTARQHGTSNPTKCIRRSRL

SEQ ID NO: 64020 - DNA, 1384 bp, Triticum aestivum
  misc_feature (1)..(1384): Ceres Seq. ID no. 12587535
acactaaacttagatcacagcctgctctagttctcaaagcaccactgcttcactcgctgtgccgtaagacatcgtagatgatggtgagggcaagagagatggtgcaaggtccccgttgcgtcgcgctgttgctgctcgtctgcatggctgctctcgtagcttcggacaccaccgatggcctcctgccgaacggcaacttcgaggaggcgccggaccggtcgcagatggacgggacgagggtgacgggccgctacgcgataccgcggtgggaggcctgcgggtgcgtggagtacatctgctcgggccagaagcagggggacatggtgctgccggtccccgagggcgcccacgccgtgcggctcggcaacgacgcctccgtccagcagcagctcagcgtgacgccggggacgcactacgcgatcaccttcagcgcggcgcgcacctgcgcccaggccgagaagctgaacgtgacggtcggggcgcagtccggcgagctccccatccagacggtgtacaccagcagcggctgggactcctactcctgggcgttcgaggccaaggagagcgtcgtaacgctcaccgtccacaaccccggatatgatgaagacgccgcctgcggccccgtcgtcgactccttcgccatcaggaccctcctgccaccacaaagcaacgaatataacatgctgaagaacggggacttcgaggagggcccgtacatctgccccagcacgtcgtgcggggtgatggtgccgcccatggacgaggacagctactccccgctgttcccgtgggtgatcctgtcgtcgaccaagtccgtccggtacgtggacgcggcgcactacgcggtgccgcagggcgcccgggccgtgcagctggtgttcggcgcggagagcgcgctggtgcaggaggtgtgcaccgtgccgggggtgtcttacaggatggagttctcgatcggggacgcggccgacgggtgcacgggctccctcgccgtggaggcgtacgcggcgggcgggagggtgacggtcccgtacgagtcccagggcacgggcgggttcacgcgcggcgtgctcgagttcacggcgacggaggaccggacgcgggtggtgttcgtcagcgcgagctacaacatgaagtccgacggcacggtctgcgggcccgtcgtcgacgacgcctcgctcgtctgcgcgcagagccacgctcgccggctgcttctgtgattgtgcggcgccgcaatgtacggtccgttggtttgtgacacgaacaatttgacctcttccgttatggagtaggatctaaaattccggacggtcggcagttgtaaaccagggttctgtaatgtatcgtggataatttgcattagggaacatcattttaacatttcttt

SEQ ID NO: 64021 - protein, 379 aa, Triticum aestivum
  peptide (1)..(379): Ceres Seq. ID no. 12587536
MMVRAREMVQGPRCVALLLLVCMAALVASDTTDGLLPNGNFEEAPDRSQMDGTRVTGRYAIPRWEACGCVEYICSGQKQGDMVLPVPEGAHAVRLGNDASVQQQLSVTPGTHYAITFSAARTCAQAEKLNVTVGAQSGELPIQTVYTSSGWDSYSWAFEAKESVVTLTVHNPGYDEDAACGPVVDSFAIRTLLPPQSNEYNMLKNGDFEEGPYICPSTSCGVMVPPMDEDSYSPLFPWVILSSTKSVRYVDAAHYAVPQGARAVQLVFGAESALVQEVCTVPGVSYRMEFSIGDAADGCTGSLAVEAYAAGGRVTVPYESQGTGGFTRGVLEFTATEDRTRVVFVSASYNMKSDGTVCGPVVDDASLVCAQSHARRLLL

SEQ ID NO: 64022 - protein, 378 aa, Triticum aestivum
  peptide (1)..(378): Ceres Seq. ID no. 12587537
MVRAREMVQGPRCVALLLLVCMAALVASDTTDGLLPNGNFEEAPDRSQMDGTRVTGRYAIPRWEACGCVEYICSGQKQGDMVLPVPEGAHAVRLGNDASVQQQLSVTPGTHYAITFSAARTCAQAEKLNVTVGAQSGELPIQTVYTSSGWDSYSWAFEAKESVVTLTVHNPGYDEDAACGPVVDSFAIRTLLPPQSNEYNMLKNGDFEEGPYICPSTSCGVMVPPMDEDSYSPLFPWVILSSTKSVRYVDAAHYAVPQGARAVQLVFGAESALVQEVCTVPGVSYRMEFSIGDAADGCTGSLAVEAYAAGGRVTVPYESQGTGGFTRGVLEFTATEDRTRVVFVSASYNMKSDGTVCGPVVDDASLVCAQSHARRLLL

SEQ ID NO: 64023 - protein, 372 aa, Triticum aestivum
  peptide (1)..(372): Ceres Seq. ID no. 12587538
MVQGPRCVALLLLVCMAALVASDTTDGLLPNGNFEEAPDRSQMDGTRVTGRYAIPRWEACGCVEYICSGQKQGDMVLPVPEGAHAVRLGNDASVQQQLSVTPGTHYAITFSAARTCAQAEKLNVTVGAQSGELPIQTVYTSSGWDSYSWAFEAKESVVTLTVHNPGYDEDAACGPVVDSFAIRTLLPPQSNEYNMLKNGDFEEGPYICPSTSCGVMVPPMDEDSYSPLFPWVILSSTKSVRYVDAAHYAVPQGARAVQLVFGAESALVQEVCTVPGVSYRMEFSIGDAADGCTGSLAVEAYAAGGRVTVPYESQGTGGFTRGVLEFTATEDRTRVVFVSASYNMKSDGTVCGPVVDDASLVCAQSHARRLLL

SEQ ID NO: 64024 - DNA, 1380 bp, Triticum aestivum
  misc_feature (1)..(1380): Ceres Seq. ID no. 13584217
acaggacgtgtaccccaagaaccagagagccaaccaacccaacccctgagcatctccggccacgcatcggctaagcacacgcaaacagccgcccccacgatactcacgaggctccttcccctccgtgcgctctcttgtttcccccatcccatggccaccccaaccacgacgccggcgacgatgcgggccgtgcagtacgacgcctgcggcggaggcgccgccggcctcaagcatgtagaagtccccgtcccttctgcaaagaagaatgaggtcctgctgaaactgcaagctgcaaccatcaacccagttgactggaagatacagaaaggggacttgaggcctctgctgcctcgtagactgccttttatcccagtgactgatgttgcaggagtagttgttgatgttggtcctggagtgaaaggtctcacagcgggtgatcaagtcgtcgccatgttgaactcttttaacggaggtggactggcagagtatgctgtagcatccgcaaacctgaccgtcaaaaggccagctgaggtttctgcagctgagggtgctgggcttcccattgctgcaggcactgcgctccaggcactaaggtccattggtgccaagtttgacggcaccggcaagccattaaacgtgttggtcaccgctgcctctggcggcgtaggcctgtacgcggtgcagcttgcaaagctagcgaaccttcatgttaccgccacctgcggcgcacgcaacatggatcttgtgaagagcttgggcgcagacgaggtgatggactacaggaccccagagggggcgagcctgcagagtccctccggcaggaagtacgacggcgtggttcactgcaccgtcggtgtcagctggtcgtctttccagccattgctcagtgatgccgggcgagtgatcgatatcacccccaacttctcggccatcctcacatctgcgctgcacaggatgacattttccaagaagcgcctggtgcccctgctcctgtcgcccaacaaggcggacctggagttattggttgggttgctcaaggaaggcaagctgaagacggtggtcgactcgaagttcccgttgagcgaggcagacaaggcgtggcagagcagtatcgatggccactggtaagattgtcgttgagatggagagctgatcgtcgtcaatgcttcctagtattaaggacttgcatacagacggtggacgtgaatacttagatgtaatcatacagactagtcacttgtgcgtttgtttattgggtgatggttcgtttattcagtttatattatattatatcttacagtatattattaaaagggtattgagaactatgagttgcaaaaaactgtatggctatcggtaaacaatagcattgtgctgtct

SEQ ID NO: 64025 - protein, 375 aa, Triticum aestivum
  peptide (1)..(375): Ceres Seq. ID no. 15222782
TGRVPQEPESQPTQPLSISGHASAKHTQTAAPTILTRLLPLRALSCFPHPMATPTTTPATMRAVQYDACGGGAAGLKHVEVPVPSAKKNEVLLKLQAATINPVDWKIQKGDLRPLLPRRLPFIPVTDVAGVVVDVGPGVKGLTAGDQVVAMLNSFNGGGLAEYAVASANLTVKRPAEVSAAEGAGLPIAAGTALQALRSIGAKFDGTGKPLNVLVTAASGGVGLYAVQLAKLANLHVTATCGARNMDLVKSLGADEVMDYRTPEGASLQSPSGRKYDGVVHCTVGVSWSSFQPLLSDAGRVIDITPNFSAILTSALHRMTFSKKRLVPLLLSPNKADLELLVGLLKEGKLKTVVDSKFPLSEADKAWQSSIDGHW

SEQ ID NO: 64026 - protein, 325 aa, Triticum aestivum
  peptide (1)..(325): Ceres Seq. ID no. 15222783
MATPTTTPATMRAVQYDACGGGAAGLKHVEVPVPSAKKNEVLLKLQAATINPVDWKIQKGDLRPLLPRRLPFIPVTDVAGVVVDVGPGVKGLTAGDQVVAMLNSFNGGGLAEYAVASANLTVKRPAEVSAAEGAGLPIAAGTALQALRSIGAKFDGTGKPLNVLVTAASGGVGLYAVQLAKLANLHVTATCGARNMDLVKSLGADEVMDYRTPEGASLQSPSGRKYDGVVHCTVGVSWSSFQPLLSDAGRVIDITPNFSAILTSALHRMTFSKKRLVPLLLSPNKADLELLVGLLKEGKLKTVVDSKFPLSEADKAWQSSIDGHW

SEQ ID NO: 64027 - protein, 315 aa, Triticum aestivum
  peptide (1)..(315): Ceres Seq. ID no. 15222784
MRAVQYDACGGGAAGLKHVEVPVPSAKKNEVLLKLQAATINPVDWKIQKGDLRPLLPRRLPFIPVTDVAGVVVDVGPGVKGLTAGDQVVAMLNSFNGGGLAEYAVASANLTVKRPAEVSAAEGAGLPIAAGTALQALRSIGAKFDGTGKPLNVLVTAASGGVGLYAVQLAKLANLHVTATCGARNMDLVKSLGADEVMDYRTPEGASLQSPSGRKYDGVVHCTVGVSWSSFQPLLSDAGRVIDITPNFSAILTSALHRMTFSKKRLVPLLLSPNKADLELLVGLLKEGKLKTVVDSKFPLSEADKAWQSSIDGHW

SEQ ID NO: 64028 - DNA, 883 bp, Triticum aestivum
  misc_feature (1)..(883): Ceres Seq. ID no. 12586351
ctaacagtcaagtcaagcaccaagccaccaaccacacaagagccgatcaagacaccagcaatggccggaggaggaagcgacgaagtgaagctgctgggcatgtgggcgagcccgttcgtccttcgcgtccagctcgcgctcagcctcaagggcgtcggctacgagtacgtcgaagaggacctcaagagcaagagcgagctgctcctcaagtccaaccccgtgctccagaaggtgccggtgctgatccacgacggcaagcccgtgtgcgagtcgtcggtcatcctgcagtacatcgacgaggctttcgccggcgtcggcccctcgctcctcccggaggaaccccacggccgcgccgttgctcgcttctgggccgcttacatcgacggcacgctcgtgaaagcgtcgtcccaggcgtccatggccaagacggaggaggagaaggccgaggggaagaagcaggtgaccgccgcggtggagaccttggagggggccctgagggactgctctaacggcaaacccttcttcggcggcgacaccgcggggtacgtcgacgtgatgctcggcggcctcctcgcatgggtgcacgcgggcgataagatgaagggcgtcaagaccttcgatcccgccaccactccgctcttggctgcgtgggcggacaacttcggatcgttggacgcggtggaggcggtcatgccggacgtgggcaagctggtcgagtttgccatggcgatgcacgctcgcgccgcagccgccgctacaaactaaagagacgtgcctacaatcatatattgttttctgtatatcgtttgtgttatctctgtggaatttgtgtgcctatccatataatacgtcaatatgtcacattcgtcgactttaaatgttg

SEQ ID NO: 64029 - protein, 254 aa, Triticum aestivum
  peptide (1)..(254): Ceres Seq. ID no. 12586352
LTVKSSTKPPTTQEPIKTPAMAGGGSDEVKLLGMWASPFVLRVQLALSLKGVGYEYVEEDLKSKSELLLKSNPVLQKVPVLIHDGKPVCESSVILQYIDEAFAGVGPSLLPEEPHGRAVARFWAAYIDGTLVKASSQASMAKTEEEKAEGKKQVTAAVETLEGALRDCSNGKPFFGGDTAGYVDVMLGGLLAWVHAGDKMKGVKTFDPATTPLLAAWADNFGSLDAVEAVMPDVGKLVEFAMAMHARAAAAATN

SEQ ID NO: 64030 - protein, 234 aa, Triticum aestivum
  peptide (1)..(234): Ceres Seq. ID no. 12586353
MAGGGSDEVKLLGMWASPFVLRVQLALSLKGVGYEYVEEDLKSKSELLLKSNPVLQKVPVLIHDGKPVCESSVILQYIDEAFAGVGPSLLPEEPHGRAVARFWAAYIDGTLVKASSQASMAKTEEEKAEGKKQVTAAVETLEGALRDCSNGKPFFGGDTAGYVDVMLGGLLAWVHAGDKMKGVKTFDPATTPLLAAWADNFGSLDAVEAVMPDVGKLVEFAMAMHARAAAAATN

SEQ ID NO: 64031 - protein, 221 aa, Triticum aestivum
  peptide (1)..(221): Ceres Seq. ID no. 12586354
MWASPFVLRVQLALSLKGVGYEYVEEDLKSKSELLLKSNPVLQKVPVLIHDGKPVCESSVILQYIDEAFAGVGPSLLPEEPHGRAVARFWAAYIDGTLVKASSQASMAKTEEEKAEGKKQVTAAVETLEGALRDCSNGKPFFGGDTAGYVDVMLGGLLAWVHAGDKMKGVKTFDPATTPLLAAWADNFGSLDAVEAVMPDVGKLVEFAMAMHARAAAAATN

SEQ ID NO: 64032 - DNA, 1627 bp, Triticum aestivum
  misc_feature (1)..(1627): Ceres Seq. ID no. 13655744
tctccctctccctatccatcccatcctctcccccgaccccgcgcacccgccagagaagccgcctccatggcctccctcgccgccgcctccgcctccacggcgctcctcttcccctccacctcctcctccaagccccgcctcccgctctccacatcccttggcttctccgcgcccgcgcggtcacgccgcgccactgcggtggcggggagctccggcaggcgcccggggctgctcgtcgtgcgcgccgccaggggcaagttcgagcggaacaagccccacgtcaacatcggcaccatcggccacgtcgaccacggcaagaccaccctcaccgccgcgctcaccatggtgctcgcctccgtcgggggcagcgcgcccaagaagtacgacgagatcgacgccgcccctgaggagcgcgcccgtggtatcaccatcaacaccgccaccgtcgagtacgagacggagacgcgccactacgcgcacgtcgactgccccggtcacgccgactacgtcaagaacatgattaccggggccgcccagatggacggcgccatcctcgtcgtctccggcgccgacggccccatgccgcagaccaaggagcacatcctgctcgccaaccaggtcggtgtccccagcattgttgttttcctcaacaagaaggaccaggtcgacgacgaggagctgctcgagctcgtcgatctcgaggtccgcgagctgctcacggcctatgaatacgatggtgacaatgtgccaatcgtctccggctctgcactcagagcgctcgaggccctcatggccacccctggcctcaagcgtggggataacgagtgggtggatggcatcttctccttgattgattccgtggatacccacatccctgtcccgcagaggcagaccgacctccccttcttgctcgctgttgaggatgttttctccatcactggtcgtggtacagttgccactggccgtatcgagcgtggcaccgtcaaggttggggacccagtcgacctcgtcggcatcagggagacccgcaatgccacggtcactggtgttgagatgttccagaagaccatggatgatgccattgctggggacaatgttgggcttctgctccgtggtatgcagaaggaagacattgagagaggcatggtgttggcaaagcccggttccatcacgccacacaccaagtttgaggctgttgtgtatgtgctcaagaaggaggagggtggccggcactccccatttttccctggttaccgtccgcaattctacatgcggactactgatgtcacggggaatgtgacaaacattatgaacgacaaggatgaggaggcgaagatgtgcatgccaggtgaccgtatcaagatggttgtggagctcatccagcctgtggcttgtgagcagggaatgaggtttgccatccgtgaaggtggcaagaccgtcggtgccggtgtcatcaataatatcattcagtaatgtggatggaggatatccaccgtgagaattttcctcatttactcttttgcgaaatgctatgtagttgttattatgcgtttagggaaggctcttgtgaaattgtagtatggcacatttttcttcaagtgaaattgcatactttgtagtattcacg

SEQ ID NO: 64033 - protein, 490 aa, Triticum aestivum
  peptide (1)..(490): Ceres Seq. ID no. 13655745
SPSPYPSHPLPRPRAPAREAASMASLAAASASTALLFPSTSSSKPRLPLSTSLGFSAPARSRRATAVAGSSGRRPGLLVVRAARGKFERNKPHVNIGTIGHVDHGKTTLTAALTMVLASVGGSAPKKYDEIDAAPEERARGITINTATVEYETETRHYAHVDCPGHADYVKNMITGAAQMDGAILVVSGADGPMPQTKEHILLANQVGVPSIVVFLNKKDQVDDEELLELVDLEVRELLTAYEYDGDNVPIVSGSALRALEALMATPGLKRGDNEWVDGIFSLIDSVDTHIPVPQRQTDLPFLLAVEDVFSITGRGTVATGRIERGTVKVGDPVDLVGIRETRNATVTGVEMFQKTMDDAIAGDNVGLLLRGMQKEDIERGMVLAKPGSITPHTKFEAVVYVLKKEEGGRHSPFFPGYRPQFYMRTTDVTGNVTNIMNDKDEEAKMCMPGDRIKMVVELIQPVACEQGMRFAIREGGKTVGAGVINNIIQ

SEQ ID NO: 64034 - protein, 468 aa, Triticum aestivum
  peptide (1)..(468): Ceres Seq. ID no. 13655746
MASLAAASASTALLFPSTSSSKPRLPLSTSLGFSAPARSRRATAVAGSSGRRPGLLVVRAARGKFERNKPHVNIGTIGHVDHGKTTLTAALTMVLASVGGSAPKKYDEIDAAPEERARGITINTATVEYETETRHYAHVDCPGHADYVKNMITGAAQMDGAILVVSGADGPMPQTKEHILLANQVGVPSIVVFLNKKDQVDDEELLELVDLEVRELLTAYEYDGDNVPIVSGSALRALEALMATPGLKRGDNEWVDGIFSLIDSVDTHIPVPQRQTDLPFLLAVEDVFSITGRGTVATGRIERGTVKVGDPVDLVGIRETRNATVTGVEMFQKTMDDAIAGDNVGLLLRGMQKEDIERGMVLAKPGSITPHTKFEAVVYVLKKEEGGRHSPFFPGYRPQFYMRTTDVTGNVTNIMNDKDEEAKMCMPGDRIKMVVELIQPVACEQGMRFAIREGGKTVGAGVINNIIQ

SEQ ID NO: 64035 - protein, 376 aa, Triticum aestivum
  peptide (1)..(376): Ceres Seq. ID no. 13655747
MVLASVGGSAPKKYDEIDAAPEERARGITINTATVEYETETRHYAHVDCPGHADYVKNMITGAAQMDGAILVVSGADGPMPQTKEHILLANQVGVPSIVVFLNKKDQVDDEELLELVDLEVRELLTAYEYDGDNVPIVSGSALRALEALMATPGLKRGDNEWVDGIFSLIDSVDTHIPVPQRQTDLPFLLAVEDVFSITGRGTVATGRIERGTVKVGDPVDLVGIRETRNATVTGVEMFQKTMDDAIAGDNVGLLLRGMQKEDIERGMVLAKPGSITPHTKFEAVVYVLKKEEGGRHSPFFPGYRPQFYMRTTDVTGNVTNIMNDKDEEAKMCMPGDRIKMVVELIQPVACEQGMRFAIREGGKTVGAGVINNIIQ

SEQ ID NO: 64036 - DNA, 1231 bp, Triticum aestivum
  misc_feature (1)..(1231): Ceres Seq. ID no. 12627139
cggggagaggcttgcgttgcgtgctggaggagcggaggaggcaggagccggcgtcgtgtttgagtaggagtaggataagcggattgctctctcgtctcggagatttccggcgagaaggactcgagcggatcgagtgcgcccgcccgcccgccggcctcgccgatcagccgcgatgaactgcgagacgtgccacctcaacgaactggagctggagccgctggagatcaaagacgtgctgcgatgcatcttgcataccatattctttcatcgaaccctcactcttgttcggcccaaggatgttgactgcgacctctttgagatcacatatgttcaatgtggacttgcagaactagaaaaggaggtcgatgaaaagatcaaccagttcattgcttgggctgaaaagcatccaaatcggaaaagccaggtgtgcctctctttcttcgatgagaagaacaagcacccgggctggttcagcagcaagactgagagggtttactgggaacaatggttcatcaatttgcatgtcacaagccctaaaggacaaggcaaatcacgtggctccaaagcaccggcaaatactaaaggacaagcattggaagagaccagctcaagacgtgatgcgctgagcttgctgatccaagaagtcctgttccagatcattaactacgccaatgagaaaaaagaccatattcctccaatctctgacagaatattcaatcatgagattttggtccccaggtgacaccttttccttggacgtgtgttcacagctcttctgattctgtattcgggtggaacgccgacgttcttcggagggcattgagtagtggacattcgtactcactgaactgaagatctttgttagaaactgcactaaacgaagatgttggtatcgatgtgctacctttcgcagtgatgccacattgcccctttctcacctctccattgatcgtttggttataagacgttgtcagagctgctgactcatggaagcaatgttgtgtacagaataatgtagaactgctagtgaactgactctgttatccatccaatcatgtaattcccacttgtttagctgtaaatatttctcttgacagtctgtgtccaaaaattattaccatgttattatgcagatgtgaaaaatatgtgtattctggatgttatgtgcactggtgtttattcagtgtgctgacataagggagaaacctggagtgggaagctgttttgactg

SEQ ID NO: 64037 - protein, 189 aa, Triticum aestivum
  peptide (1)..(189): Ceres Seq. ID no. 12627140
MNCETCHLNELELEPLEIKDVLRCILHTIFFHRTLTLVRPKDVDCDLFEITYVQCGLAELEKEVDEKINQFIAWAEKHPNRKSQVCLSFFDEKNKHPGWFSSKTERVYWEQWFINLHVTSPKGQGKSRGSKAPANTKGQALEETSSRRDALSLLIQEVLFQIINYANEKKDHIPPISDRIFNHEILVPR

SEQ ID NO: 64038 - DNA, 1540 bp, Triticum aestivum
  misc_feature (1)..(1540): Ceres Seq. ID no. 13597427
cctggaacatcctaatcgaaaacattccagtccaggacggcagcaggaaagggaagaaccaatcaaccgattccccctccccactccaccccgcgccgcagcgagagcgaactggtgcctgccttccactgccggccgcgtcgtcgtcgtcccttccttccctcaatccctccctcccgctgcgctcccgtccgagactgtgaacatgtcagatagtgcattgcaagatctcaacgctgcccaatcagttgtgctcgagaaaagcaaagacagttctgtggaaccctgcagttctaagcccgtgttaaacgggaacaaatgtgtcaagaaggaaggaaatgctgtacctgatgtgaccaatggatgtgatgctgtagttgtagatatcgagtatattgattctgagaatctcacagatcttccagatgttgacacaagcctgagtactttgcttgcaaggttggattcaaaggattggatcaagacatgtgaagctcttaataatgttcgtcagttggcgatatatcacaagcaaaggttgcaggagctgctggagcctctagttcctcttattgtgaaatctgttaagaatccaaggagtgctctatgcaaaaccgcacttatgacctgcgctgacatctttaaggcatacggtgaacaaatggtcgacttgattgatcagctgctaatgccgctatttctgaaatcttcacaagacaagcgctttgtttgtgaagcagctgaggcagcccttatgtcaatgacaagctggatctccccctctatattgttaccaaaaatgcagccctacctcaaaaacaggaatccacgaattcgagcaaaagcatctgtttgtttcagtaagagtgtaccacgccttggtctggagggaatcaaagaatacggaatggacaagctcattcaggtcgcagcaacccagctcagcgaccagcttcctgaatcaagggaggctgctcgtaacctttcattggagcttcaagcattctatgagaagtctcaagcctctggtttaggcgaagatgacagcgcacctgctatttcaccagaagctgaaacctgggaggctttctgcctatctaagctttctgctttaagcgcccaagcaatcctccgtgtcactgtgggtgtccctgttgccccaaaagaaggcggcatctctgctgctctgaaagaaggcggcatccctgctgccctgaaagaaggtggcatctctgttgtcgttgctccaaaagaaggtggcgcccctgttgctacgaaagaaggtgctgcggccgtgggctgctagcgttgggagttggccgacacaagcgatgttgcgatttttccacatccaattcacgtttttgctgtacatgatttatgggttgctcggtcggtaaatcgaatctccttttgctggagttcttcaggcttgagggcctggggtgggtgttaatattggtgcgagatatagtcccttatagttgactgtataatcctttggttccgtcactacttatcagtttggcattgattggcc

SEQ ID NO: 64039 - protein, 434 aa, Triticum aestivum
  peptide (1)..(434): Ceres Seq. ID no. 13597428
LEHPNRKHSSPGRQQEREEPINRFPLPTPPRAAARANWCLPSTAGRVVVVPSFPQSLPPAALPSETVNMSDSALQDLNAAQSVVLEKSKDSSVEPCSSKPVLNGNKCVKKEGNAVPDVTNGCDAVVVDIEYIDSENLTDLPDVDTSLSTLLARLDSKDWIKTCEALNNVRQLAIYHKQRLQELLEPLVPLIVKSVKNPRSALCKTALMTCADIFKAYGEQMVDLIDQLLMPLFLKSSQDKRFVCEAAEAALMSMTSWISPSILLPKMQPYLKNRNPRIRAKASVCFSKSVPRLGLEGIKEYGMDKLIQVAATQLSDQLPESREAARNLSLELQAFYEKSQASGLGEDDSAPAISPEAETWEAFCLSKLSALSAQAILRVTVGVPVAPKEGGISAALKEGGIPAALKEGGISVVVAPKEGGAPVATKEGAAAVGC

SEQ ID NO: 64040 - protein, 366 aa, Triticum aestivum
  peptide (1)..(366): Ceres Seq. ID no. 13597429
MSDSALQDLNAAQSVVLEKSKDSSVEPCSSKPVLNGNKCVKKEGNAVPDVTNGCDAVVVDIEYIDSENLTDLPDVDTSLSTLLARLDSKDWIKTCEALNNVRQLAIYHKQRLQELLEPLVPLIVKSVKNPRSALCKTALMTCADIFKAYGEQMVDLIDQLLMPLFLKSSQDKRFVCEAAEAALMSMTSWISPSILLPKMQPYLKNRNPRIRAKASVCFSKSVPRLGLEGIKEYGMDKLIQVAATQLSDQLPESREAARNLSLELQAFYEKSQASGLGEDDSAPAISPEAETWEAFCLSKLSALSAQAILRVTVGVPVAPKEGGISAALKEGGIPAALKEGGISVVVAPKEGGAPVATKEGAAAVGC

SEQ ID NO: 64041 - protein, 227 aa, Triticum aestivum
  peptide (1)..(227): Ceres Seq. ID no. 13597430
MTCADIFKAYGEQMVDLIDQLLMPLFLKSSQDKRFVCEAAEAALMSMTSWISPSILLPKMQPYLKNRNPRIRAKASVCFSKSVPRLGLEGIKEYGMDKLIQVAATQLSDQLPESREAARNLSLELQAFYEKSQASGLGEDDSAPAISPEAETWEAFCLSKLSALSAQAILRVTVGVPVAPKEGGISAALKEGGIPAALKEGGISVVVAPKEGGAPVATKEGAAAVGC

SEQ ID NO: 64042 - DNA, 1299 bp, Triticum aestivum
  misc_feature (1)..(1299): Ceres Seq. ID no. 15226458
attaacactacccgcctcaagctaggcactagctccgatgagtagctgcttcaacggtggcgccggctggccggagcccgtggtgcgcgtgcaggccgtgtcggacacctgcggcgagacaatacctgagtggtacgtcaagctgccgttggatcggccgtcggcgacgaccctccaaccggcggtctcacatgggggcggcagcctaaacatcccggtagtggacatgtcaatgccggactcgggcgagacagtccgtgccgtggacgcggcgtgccgggagtgggggttcttccaggcggtgaaccacggcgtgagccctgagctgctgcggcgggcgcgctcgtcgtggcgcggcttcttcaggcagccagccgaggtgcgcgagcggtacgccaactcgccggcgacgtacgagggctacggcagccgtctcggtaccaccaagggtgggcacctcgactggggcgactactatttcttgcacctcctcccgccgtcgatcaagagccacgacaagtggccgtcccttccgtccaccctacgggacgcgacggaggagtacggcgaggaggtggtgaagctgtgccggagggtatcaaaggtgctgtccaaggggctgggactcgacggcgggaggctgcaggcagcgttcggcggggagggcggcgagggggcatgcatgagggttaacttctacccgaggtgcccgcagccggagctgacgctgggcgtggcggcgcactccgaccccggcggcatgaccatgctgctcgtcgacgaccacgttcgggggctgcaggtgctgagcaacgcggcgtacaagagcgtggagcaccgggtgacggtgagcgcagcggaggagcggctatcgctcgccttcttctacaacccgcggagcgacgtgcccgtggcgcccatggcggagctggtggcgccgggacgcccggcgctgtacccggagatgaccttcgacgagtaccgggcccacatccggcagcgcggcctcagcggcaaggcgcagctacagtctctgcagaacgccaacaacagcgtcgcctcctgacactaggcacggccagccggccggccgggcggcctgctactcccttgtcctgtgcatgcgcaccactccattgtatgcgtggccggtgaagacgtgcatatgtatgtataatagacgtttccgctaataaatatacacggaatagtctcgtacgtatgccattcatgttaacttgatcagtttgtttaccctatatgacgtatataattaaggagactgctcattcgttatgc

SEQ ID NO: 64043 - protein, 342 aa, Triticum aestivum
  peptide (1)..(342): Ceres Seq. ID no. 15226459
MSSCFNGGAGWPEPVVRVQAVSDTCGETIPEWYVKLPLDRPSATTLQPAVSHGGGSLNIPVVDMSMPDSGETVRAVDAACREWGFFQAVNHGVSPELLRRARSSWRGFFRQPAEVRERYANSPATYEGYGSRLGTTKGGHLDWGDYYFLHLLPPSIKSHDKWPSLPSTLRDATEEYGEEVVKLCRRVSKVLSKGLGLDGGRLQAAFGGEGGEGACMRVNFYPRCPQPELTLGVAAHSDPGGMTMLLVDDHVRGLQVLSNAAYKSVEHRVTVSAAEERLSLAFFYNPRSDVPVAPMAELVAPGRPALYPEMTFDEYRAHIRQRGLSGKAQLQSLQNANNSVAS

SEQ ID NO: 64044 - protein, 279 aa, Triticum aestivum
  peptide (1)..(279): Ceres Seq. ID no. 15226460
MSMPDSGETVRAVDAACREWGFFQAVNHGVSPELLRRARSSWRGFFRQPAEVRERYANSPATYEGYGSRLGTTKGGHLDWGDYYFLHLLPPSIKSHDKWPSLPSTLRDATEEYGEEVVKLCRRVSKVLSKGLGLDGGRLQAAFGGEGGEGACMRVNFYPRCPQPELTLGVAAHSDPGGMTMLLVDDHVRGLQVLSNAAYKSVEHRVTVSAAEERLSLAFFYNPRSDVPVAPMAELVAPGRPALYPEMTFDEYRAHIRQRGLSGKAQLQSLQNANNSVAS

SEQ ID NO: 64045 - protein, 277 aa, Triticum aestivum
  peptide (1)..(277): Ceres Seq. ID no. 15226461
MPDSGETVRAVDAACREWGFFQAVNHGVSPELLRRARSSWRGFFRQPAEVRERYANSPATYEGYGSRLGTTKGGHLDWGDYYFLHLLPPSIKSHDKWPSLPSTLRDATEEYGEEVVKLCRRVSKVLSKGLGLDGGRLQAAFGGEGGEGACMRVNFYPRCPQPELTLGVAAHSDPGGMTMLLVDDHVRGLQVLSNAAYKSVEHRVTVSAAEERLSLAFFYNPRSDVPVAPMAELVAPGRPALYPEMTFDEYRAHIRQRGLSGKAQLQSLQNANNSVAS

SEQ ID NO: 64046 - DNA, 1016 bp, Triticum aestivum
  misc_feature (1)..(1016): Ceres Seq. ID no. 15173174
aaatgcagaaacaccacacgatctggaaaaaaaaaatcgacagaacatgtcgtcggagaaacaggagacggcggcggtgcgcgtgctgggcaggtggccgagcccgttcgtgatccgggtgctgatagttcttgggctcaagggcgtggaccacgagctcgtggaggaggccgtgggcaacaagagcgagctgctgctcgcctccaaccccgtgcacaagatgatccccgtgctcctgcaccacggcaggcccgtctccgagtccctcatcatcgtccagtacgtcgacgaggcctgggcctcccacgccccggcgctcctcccgtccgacccctacgcccgggcggccgagcggttctgggcccactacgtcgacgacaaggtaaaaggattaggcaatccagttttgattttcgctttgaacttctcagttctcagcgacaaaatgatagcctacgcagtttcccctgaacaaacgtgtgctgactgctcaatggatacgtagtttcctactgcgatccgggtcctgaggggaaggctggacggagacaaggacgaagcggcggctcaggtgtgcgctgctctgcagcgcctggaggtggccttcgtcgagtgcggccaagggaaggattacttcggcggcgacaacgtcggttacctggacattgctctggggtcgcacctcggatgggtcagggcggtagagaggatcgctgaaatcaggctgctcgacgcggccaaggttcctaagctggcggcgtgggcggatcggttctgcgcccacccagcggtggcggacgccatgcctgacgtggacaggttcgtggagttcagcctcaagaatgacggcgctctgaaggcggctagtgctaattccaagtgaacgaactgttgtggacactagacagtgctcgatggcatcacatagcggttagtgctaattctaatgatgcaaatggaataacataatatgttaccatagtagttcttaatgtataatgagtctacaaagtaac

SEQ ID NO: 64047 - protein, 167 aa, Triticum aestivum
  peptide (1)..(167): Ceres Seq. ID no. 15173175
NAETPHDLEKKNRQNMSSEKQETAAVRVLGRWPSPFVIRVLIVLGLKGVDHELVEEAVGNKSELLLASNPVHKMIPVLLHHGRPVSESLIIVQYVDEAWASHAPALLPSDPYARAAERFWAHYVDDKVKGLGNPVLIFALNFSVLSDKMIAYAVSPEQTCADCSMDT

SEQ ID NO: 64048 - protein, 156 aa, Triticum aestivum
  peptide (1)..(156): Ceres Seq. ID no. 15173176
KCRNTTRSGKKKSTEHVVGETGDGGGARAGQVAEPVRDPGADSSWAQGRGPRARGGGRGQQERAAARLQPRAQDDPRAPAPRQARLRVPHHRPVRRRGLGLPRPGAPPVRPLRPGGRAVLGPLRRRQGKRIRQSSFDFRFELLSSQRQNDSLRSFP

SEQ ID NO: 64049 - protein, 152 aa, Triticum aestivum
  peptide (1)..(152): Ceres Seq. ID no. 15173177
MSSEKQETAAVRVLGRWPSPFVIRVLIVLGLKGVDHELVEEAVGNKSELLLASNPVHKMIPVLLHHGRPVSESLIIVQYVDEAWASHAPALLPSDPYARAAERFWAHYVDDKVKGLGNPVLIFALNFSVLSDKMIAYAVSPEQTCADCSMDT

SEQ ID NO: 64050 - DNA, 1497 bp, Triticum aestivum
  misc_feature (1)..(1497): Ceres Seq. ID no. 12617368
ccccaatccccaaatcctccatggacgaacacgccggcggccgccgccgcgccgatccgcctccgtggtctcccccgcttcagcttcccccagacgacatgctcctggagatcctcctccgcctcccgccggagcccatccacctgttccgcgcctccttcgtctccaagcactggcgcggcctcgtccacgacgcccgcttccgccgccgcttccgcgagttccacggggggacgcctcccatgctcggcttcttcaacagctgcccaggggctcccatcttcgtccccacctccggcggcttcgcgctctccaccgccaacatgtccctcgattggcgggccctcgattgccgccacggccgcgccctcctgcacaactacggtaccaggacgctcctcgtctgggaccccatgaccggcgacgagcgctacctaccgttccccacgcgagcccatctggagaacgtccattacaatggcgcggttctctgcgcggctggccacacgggccacggggactgccattcctgcccgttcctcgtggcattcgtgttcagcagctacagatattgcatcacctctgcctgcgtctactcgtccgtgaccggcgtctggggtgagatcacttcgattcatacaccagattcattagttgatgcaaagccgacagctctggttggaaacacactctactgcctgttgagtaatgaggatagcatcattgagtttaatttggataagaatagcttggatttaattgaggttccatacggcggaaattttatcatcacactggcacaggatggtcccctaggtttcgccagtgttgatcgattcagcctacatttgtggtcaagggtagctagcatcgatggggtggcatcatgggaacatatcagggtcattgatctggagaagctttttgcgccacaagtattggcagcgtgtatggatcgaatgtggcctgttggctatgctgaagatgcgaatgtgatcttcattcatgtgtatcctcgcacctacatgatccatctcaagtccatgcagattgaggggattttagaggaagcaactggctggtccatttttccttatgcaagtttctacactccaggaccaggaatcaccactggtggtggagatgatcaagttgaactgttaaatggcacttgagatgattgggctttcacatcttctgtcatgcttttttggcctaagaggtacctaggattattggttgccgtgatcctgcaactacatgcagaaacaatttactcatgctggttcttcagtattttgtaaacgtcgacagctcaatgtggctgtaaagaaattcgtacaagttgccgaatgtggtgctaatcttacaaaatgtgctgaattttgaatgttatctttgccaattactatatgtggtaacaaaccggcagcacttggtaaaaattatttcatacttctgaatattgctgttgagaatatgacatttgtttggccc

SEQ ID NO: 64051 - protein, 390 aa, Triticum aestivum
  peptide (1)..(390): Ceres Seq. ID no. 12617369
PIPKSSMDEHAGGRRRADPPPWSPPLQLPPDDMLLEILLRLPPEPIHLFRASFVSKHWRGLVHDARFRRRFREFHGGTPPMLGFFNSCPGAPIFVPTSGGFALSTANMSLDWRALDCRHGRALLHNYGTRTLLVWDPMTGDERYLPFPTRAHLENVHYNGAVLCAAGHTGHGDCHSCPFLVAFVFSSYRYCITSACVYSSVTGVWGEITSIHTPDSLVDAKPTALVGNTLYCLLSNEDSIIEFNLDKNSLDLIEVPYGGNFIITLAQDGPLGFASVDRFSLHLWSRVASIDGVASWEHIRVIDLEKLFAPQVLAACMDRMWPVGYAEDANVIFIHVYPRTYMIHLKSMQIEGILEEATGWSIFPYASFYTPGPGITTGGGDDQVELLNGT

SEQ ID NO: 64052 - protein, 384 aa, Triticum aestivum
  peptide (1)..(384): Ceres Seq. ID no. 12617370
MDEHAGGRRRADPPPWSPPLQLPPDDMLLEILLRLPPEPIHLFRASFVSKHWRGLVHDARFRRRFREFHGGTPPMLGFFNSCPGAPIFVPTSGGFALSTANMSLDWRALDCRHGRALLHNYGTRTLLVWDPMTGDERYLPFPTRAHLENVHYNGAVLCAAGHTGHGDCHSCPFLVAFVFSSYRYCITSACVYSSVTGVWGEITSIHTPDSLVDAKPTALVGNTLYCLLSNEDSIIEFNLDKNSLDLIEVPYGGNFIITLAQDGPLGFASVDRFSLHLWSRVASIDGVASWEHIRVIDLEKLFAPQVLAACMDRMWPVGYAEDANVIFIHVYPRTYMIHLKSMQIEGILEEATGWSIFPYASFYTPGPGITTGGGDDQVELLNGT

SEQ ID NO: 64053 - protein, 358 aa, Triticum aestivum
  peptide (1)..(358): Ceres Seq. ID no. 12617371
MLLEILLRLPPEPIHLFRASFVSKHWRGLVHDARFRRRFREFHGGTPPMLGFFNSCPGAPIFVPTSGGFALSTANMSLDWRALDCRHGRALLHNYGTRTLLVWDPMTGDERYLPFPTRAHLENVHYNGAVLCAAGHTGHGDCHSCPFLVAFVFSSYRYCITSACVYSSVTGVWGEITSIHTPDSLVDAKPTALVGNTLYCLLSNEDSIIEFNLDKNSLDLIEVPYGGNFIITLAQDGPLGFASVDRFSLHLWSRVASIDGVASWEHIRVIDLEKLFAPQVLAACMDRMWPVGYAEDANVIFIHVYPRTYMIHLKSMQIEGILEEATGWSIFPYASFYTPGPGITTGGGDDQVELLNGT

SEQ ID NO: 64054 - DNA, 1430 bp, Triticum aestivum
  misc_feature (1)..(1430): Ceres Seq. ID no. 13597380
agatcgtgcgcttctcctcacaagataatcacagactcgatcaagagcttgtcttggttctgcaatgggggtgaggtgcctgctgctcctggctgtgctcctcttggctggggatcatggcggggaggcgcagccgctcgtgcccggggtcttcacgttcggcgactcgtcggtggatataggtaacaacgactacctccacaccctcatcaaggcggacttccctccctacggcagggacttccccaaccgcgtggccaccgggaggttttgcaacggcaagctggccaccgacatcactgctgatacactggggttcacgagctacccgcccgcgtatctcagcccgcaggcgtcagggaagaaccttctgatcggcgtcaacttcgcatctgctggatcaggctactacgatcacaccgcgcttatgtatcatgccgtccctttctcccaacaactggagtacttcagggagtaccaatccaagctgacggcgttcgctgggagcagccaggccaagtccatcatcagtggctcattgtacatcgtcagcttcggtgcaagtgactttgtgcagaactactacatcaaccctctgctcttcaagacccagaccgtcgaccagttctcggaccggctcgtcagcatcttcgtcaacagcgcgacgcaactttacggcatgggagcgcggcgcatcgcggtgaccacgctgccgcccctgggctgcctccccgcggcgatcacgctgttcgggcacgggagtaccggttgcgtgtcgaggctcaacagcgactcccagcggttcaacgggaagatgagcgcggccgtcagctcgctgtcgaagcggtaccacgacctcaagatcgccgtctttgacatctacacgccgctcttcagcctcgtcacctctcctggagatcaagggttcacggaggcgaagcggggatgctgcgggacgggaaaggtggagttcacggtgttcctctgcaaccccaagtcggtggggacgtgctcgaacgcgtcaacctacgtgttctgggacgccgtccacccgtcggaggcggccaaccaagtgatcgccgacgccctcctcgtcactggcatcgacctcgtcacataatgaaccacgcactggtcggctaacgtcgtcggtcggaggacgacgatggcacacgcttttcaggcgtcctgaagggaaaataatgtgtgcccagagctcccgtgccaagcgtgtcgttgtggcgggaggggttactttctcgggctgtgccactcaccatatcgccagcgtttgtagctagggactgggacacatggaaacatggtttatacgtacgaaaagctcgaagttatgggtgcaagcactggatcttttcttcttttttctttcattcatgtccttcaaatttgatgataactgtgtttttttc

SEQ ID NO: 64055 - protein, 351 aa, Triticum aestivum
  peptide (1)..(351): Ceres Seq. ID no. 13597381
MGVRCLLLLAVLLLAGDHGGEAQPLVPGVFTFGDSSVDIGNNDYLHTLIKADFPPYGRDFPNRVATGRFCNGKLATDITADTLGFTSYPPAYLSPQASGKNLLIGVNFASAGSGYYDHTALMYHAVPFSQQLEYFREYQSKLTAFAGSSQAKSIISGSLYIVSFGASDFVQNYYINPLLFKTQTVDQFSDRLVSIFVNSATQLYGMGARRIAVTTLPPLGCLPAAITLFGHGSTGCVSRLNSDSQRFNGKMSAAVSSLSKRYHDLKIAVFDIYTPLFSLVTSPGDQGFTEAKRGCCGTGKVEFTVFLCNPKSVGTCSNASTYVFWDAVHPSEAANQVIADALLVTGIDLVT

SEQ ID NO: 64056 - protein, 230 aa, Triticum aestivum
  peptide (1)..(230): Ceres Seq. ID no. 13597382
MYHAVPFSQQLEYFREYQSKLTAFAGSSQAKSIISGSLYIVSFGASDFVQNYYINPLLFKTQTVDQFSDRLVSIFVNSATQLYGMGARRIAVTTLPPLGCLPAAITLFGHGSTGCVSRLNSDSQRFNGKMSAAVSSLSKRYHDLKIAVFDIYTPLFSLVTSPGDQGFTEAKRGCCGTGKVEFTVFLCNPKSVGTCSNASTYVFWDAVHPSEAANQVIADALLVTGIDLVT

SEQ ID NO: 64057 - DNA, 1302 bp, Triticum aestivum
  misc_feature (1)..(1302): Ceres Seq. ID no. 12616772
acaacagccaacaatggcggactctccctccttccgccgccacccgctccccttctcgatcgacatcgtccgctggctcccgtcctccgcctcctccggccgccacctcgcggcggccgtccacgacccctccgtgcccgcctcctcgcgcctcagcctcctaccgctccacgaccccgcctccccgctcgcctccctcccgctcccctcccggcccacggccctccgctgctccccttccgtcctcgccgccgccacctcctccggctccctccacctcctcccctcctccttcgacaccgactcggcggtgtccgtccccggcggcgcggggttccatgtggggcccgtgcgcgggctcgactgcggcggcgaggggtgggtgacggcgggggaggacgggagggtgcacgtggtgtcggacggcgacggcagggtggtggccaggagggtgtgggatgggaagggcatgtcagggtacggggcggcgagatgggcctcgtcggcggagttcgccaccggcggcgccggctgcggcgtgcagtggtgggaccgcaggaaaggggacgccgtggtggcgcagtgcaagggcgtctggggtcatggtgtcgccaccggcatggtgcactccattgatatacatccatcaagaaagcatgtctgtgtggtgggaggctcctcaggaacaatatttgcttgggacctacgctgggcacagcagccaataccactctctggtgtaggccttgacgaaacggcacaacccgtgtgcgagagtgaggtctgggaggttctttttgacaactacacacagtcttctgatattatctcgtctgtctcaacaagaatattacctgtgatgctgtgctcagaggatggaatccttgcaatcgtcgaacaagatgagaggcctcttgaattgcttgccgagccctgtgctatcaactcctttgatatcgatcctcagaacccttctgatgtcgtctgtgccctggaatgggaatcgattggtgtgcttacacgtggaagagatgcaatggcagaggaatgaatgcattcactccccaacaattctattgaatttccatgcataactttctgtgatggcccgtggcgtgactactcacgctgtccttttgttgctcatcagctatcaatgatggaagaggcgtgctcggcgtgtatcatttgcggttttgtgtgaaatcacggatcgtgtaaaacttactgtaactctggatcatacttagctgtgaattggtgttcagcataggtgaaatcggaagcttacttttactgttc

SEQ ID NO: 64058 - protein, 349 aa, Triticum aestivum
  peptide (1)..(349): Ceres Seq. ID no. 12616773
QQPTMADSPSFRRHPLPFSIDIVRWLPSSASSGRHLAAAVHDPSVPASSRLSLLPLHDPASPLASLPLPSRPTALRCSPSVLAAATSSGSLHLLPSSFDTDSAVSVPGGAGFHVGPVRGLDCGGEGWVTAGEDGRVHVVSDGDGRVVARRVWDGKGMSGYGAARWASSAEFATGGAGCGVQWWDRRKGDAVVAQCKGVWGHGVATGMVHSIDIHPSRKHVCVVGGSSGTIFAWDLRWAQQPIPLSGVGLDETAQPVCESEVWEVLFDNYTQSSDIISSVSTRILPVMLCSEDGILAIVEQDERPLELLAEPCAINSFDIDPQNPSDVVCALEWESIGVLTRGRDAMAEE

SEQ ID NO: 64059 - protein, 345 aa, Triticum aestivum
  peptide (1)..(345): Ceres Seq. ID no. 12616774
MADSPSFRRHPLPFSIDIVRWLPSSASSGRHLAAAVHDPSVPASSRLSLLPLHDPASPLASLPLPSRPTALRCSPSVLAAATSSGSLHLLPSSFDTDSAVSVPGGAGFHVGPVRGLDCGGEGWVTAGEDGRVHVVSDGDGRVVARRVWDGKGMSGYGAARWASSAEFATGGAGCGVQWWDRRKGDAVVAQCKGVWGHGVATGMVHSIDIHPSRKHVCVVGGSSGTIFAWDLRWAQQPIPLSGVGLDETAQPVCESEVWEVLFDNYTQSSDIISSVSTRILPVMLCSEDGILAIVEQDERPLELLAEPCAINSFDIDPQNPSDVVCALEWESIGVLTRGRDAMAEE

SEQ ID NO: 64060 - protein, 211 aa, Triticum aestivum
  peptide (1)..(211): Ceres Seq. ID no. 12616775
TTANNGGLSLLPPPPAPLLDRHRPLAPVLRLLRPPPRGGRPRPLRARLLAPQPPTAPRPRLPARLPPAPLPAHGPPLLPFRPRRRHLLRLPPPPPLLLRHRLGGVRPRRRGVPCGARARARLRRRGVGDGGGGREGARGVGRRRQGGGQEGVGWEGHVRVRGGEMGLVGGVRHRRRRLRRAVVGPQERGRRGGAVQGRLGSWCRHRHGALH

SEQ ID NO: 64061 - DNA, 1194 bp, Triticum aestivum
  misc_feature (1)..(1194): Ceres Seq. ID no. 15224924
cccgttccgttcccgaccccttccccgccacggacaaaaacccagcgagccgcgagccgcgcgcctccggaccctcctcgccggcatggcctgcacccacctcgccgccgcctcgtcaccggcgaccaccgccgccgcgctgcgtgcacgggcgacggcccccgccgccggtttcgcgcgccttcctgccaccctccatcctgagaacggtgggctggccctcaggggtaggagggcggtcacgcccgtggtcctcgccgccgggccggccgccgcggcgccggtggccgaccgtgacggaacaccggccgcggtgaagcagcccatcatcgtcatcgacaactatgatagctttacctacaacctgtgccagtatatgggggagcttggattaaattttgaggtgtaccgtaatgatgaacttaccatagaggaggtaaagaggatgaaaccacgaggaatacttatttcaccagggcctggtgaaccgcaagattcaggtatatcattgcagactgttctggaacttgggccaaccatcccaatattcggagtttgcatgggtctgcagtgcattggagaggcatttggagggaagattatccgcgttccttctggtgtgatgcatggaaaaagctctccagtttactatgacgaagttctaggaaagtccatattcgagggcttgtcaaacccttttaccgccgcaagatatcatagcttggtcatcgaggaggaaaccttcccgcacgatgaactggaagtcacggcatggactgaagatggacttgtcatggctgctcgccacaagaagtacacgcatatccagggtgttcagttccacccagagagcatcatcacccctgaaggcaagaaaatcatcctcaactttgcgagatatgtcgaggagtttgagaagcagacctccgaggggaagtagaggattcaggaagcagagcagttagaggaagtagagactattgttgagagatcaggcaggcaggaaggggcctaaaagccaagcagatttaggggaaatgaataagggaaaaagagcttttccattgccattcgtttggttcattgtaatatatcattgtggatctagatcccgtatgaacttcattcggtcaattatgttcgtcgtggtgctctttctcaaataataaatcggtggaagcagaagctgttagc

SEQ ID NO: 64062 - protein, 312 aa, Triticum aestivum
  peptide (1)..(312): Ceres Seq. ID no. 15224925
PFRSRPLPRHGQKPSEPRAARLRTLLAGMACTHLAAASSPATTAAALRARATAPAAGFARLPATLHPENGGLALRGRRAVTPVVLAAGPAAAAPVADRDGTPAAVKQPIIVIDNYDSFTYNLCQYMGELGLNFEVYRNDELTIEEVKRMKPRGILISPGPGEPQDSGISLQTVLELGPTIPIFGVCMGLQCIGEAFGGKIIRVPSGVMHGKSSPVYYDEVLGKSIFEGLSNPFTAARYHSLVIEEETFPHDELEVTAWTEDGLVMAARHKKYTHIQGVQFHPESIITPEGKKIILNFARYVEEFEKQTSEGK

SEQ ID NO: 64063 - protein, 284 aa, Triticum aestivum
  peptide (1)..(284): Ceres Seq. ID no. 15224926
MACTHLAAASSPATTAAALRARATAPAAGFARLPATLHPENGGLALRGRRAVTPVVLAAGPAAAAPVADRDGTPAAVKQPIIVIDNYDSFTYNLCQYMGELGLNFEVYRNDELTIEEVKRMKPRGILISPGPGEPQDSGISLQTVLELGPTIPIFGVCMGLQCIGEAFGGKIIRVPSGVMHGKSSPVYYDEVLGKSIFEGLSNPFTAARYHSLVIEEETFPHDELEVTAWTEDGLVMAARHKKYTHIQGVQFHPESIITPEGKKIILNFARYVEEFEKQTSEGK

SEQ ID NO: 64064 - protein, 187 aa, Triticum aestivum
  peptide (1)..(187): Ceres Seq. ID no. 15224927
MGELGLNFEVYRNDELTIEEVKRMKPRGILISPGPGEPQDSGISLQTVLELGPTIPIFGVCMGLQCIGEAFGGKIIRVPSGVMHGKSSPVYYDEVLGKSIFEGLSNPFTAARYHSLVIEEETFPHDELEVTAWTEDGLVMAARHKKYTHIQGVQFHPESIITPEGKKIILNFARYVEEFEKQTSEGK

SEQ ID NO: 64065 - DNA, 1392 bp, Triticum aestivum
  misc_feature (1)..(1392): Ceres Seq. ID no. 12617253
aagcaaagcagcgccacctcgcgagcgccatgctgtccccggcgaccaccgccacggccgccgccttcctctccgcggcgcctgcctcctcatcctctacccaccgcaggcgtagccgtcgcgctgctatctccgcctccctctcgtccgaagaaccgctgctcatacgtgcggcgaggggcgaggatgggctgcctaggccgccggcgtggatgatgcggcaggctgggcggtacatggcgtcgtaccaggcgctgtccaagcgccacccttcgttccgggagcggtcggagaccaccgacctcatcgtcgaaatcacgctacagccgtggcacgccttcgcacccgacggcgtcatcctattctcggacatactcacgccgctgccggccatcggggtgccattcgatatctcggaatccaaggggccggtgatccagtcgcccgtgcggactgaggaacaggtcagggagctcgttcccatagatctcgataagctccagttcgttggggagtcgctcaagattctgcgcaacgagattgatggaaaagctgctttgctaggattcgtgggggccccatggacaattgcaacttacgttgttgaaggagggatgaccaacacttacacaaatataaagcgcatgtgccacacagcaccaaatgtcttgaggggccttctctctcacctcgcagaagctatatctgactatatcatttaccaagtaaactctggtgctcagtgtatacagatatttgattcatggggtgggcaacttccacctcatgtgtgggagcaatggtcaaaaccatatatcagacaaattgtggctaagattaagacagaatgccctcacataccacttgtgctgtatataaatggaaatggaggcttgctcgagcgcatgaaggacataggagttgatgttattggacttgactggacagtggatatggcagatggaaggaggcgcgttggtgatggaattagtgtacaagggaatgtggacccagcatatctattttccccattaccagtattgactgatgaaattcatagggttgtgaaagcagctggtccgaaaggtcatatacttaacttgggccatggtgttcttcaaaaaacaccagaagaagctgtagcacatttctttgatgtcacaaggagcttgagatatgacacccttttccagggtcatcttactgaagaattgcaacctgttgcttgatgatggccagtagccttgccatattttttttggtcttactgttctcagctcaacaccttctacattattagagttcattcccttttgctggagctgttccttgtagagacaccatggctaaatcaattcaattttgttcattatgcatctgtgtatttcagtc

SEQ ID NO: 64066 - protein, 408 aa, Triticum aestivum
  peptide (1)..(408): Ceres Seq. ID no. 12617254
AKQRHLASAMLSPATTATAAAFLSAAPASSSSTHRRRSRRAAISASLSSEEPLLIRAARGEDGLPRPPAWMMRQAGRYMASYQALSKRHPSFRERSETTDLIVEITLQPWHAFAPDGVILFSDILTPLPAIGVPFDISESKGPVIQSPVRTEEQVRELVPIDLDKLQFVGESLKILRNEIDGKAALLGFVGAPWTIATYVVEGGMTNTYTNIKRMCHTAPNVLRGLLSHLAEAISDYIIYQVNSGAQCIQIFDSWGGQLPPHVWEQWSKPYIRQIVAKIKTECPHIPLVLYINGNGGLLERMKDIGVDVIGLDWTVDMADGRRRVGDGISVQGNVDPAYLFSPLPVLTDEIHRVVKAAGPKGHILNLGHGVLQKTPEEAVAHFFDVTRSLRYDTLFQGHLTEELQPVA

SEQ ID NO: 64067 - protein, 399 aa, Triticum aestivum
  peptide (1)..(399): Ceres Seq. ID no. 12617255
MLSPATTATAAAFLSAAPASSSSTHRRRSRRAAISASLSSEEPLLIRAARGEDGLPRPPAWMMRQAGRYMASYQALSKRHPSFRERSETTDLIVEITLQPWHAFAPDGVILFSDILTPLPAIGVPFDISESKGPVIQSPVRTEEQVRELVPIDLDKLQFVGESLKILRNEIDGKAALLGFVGAPWTIATYVVEGGMTNTYTNIKRMCHTAPNVLRGLLSHLAEAISDYIIYQVNSGAQCIQIFDSWGGQLPPHVWEQWSKPYIRQIVAKIKTECPHIPLVLYINGNGGLLERMKDIGVDVIGLDWTVDMADGRRRVGDGISVQGNVDPAYLFSPLPVLTDEIHRVVKAAGPKGHILNLGHGVLQKTPEEAVAHFFDVTRSLRYDTLFQGHLTEELQPVA

SEQ ID NO: 64068 - protein, 338 aa, Triticum aestivum
  peptide (1)..(338): Ceres Seq. ID no. 12617256
MMRQAGRYMASYQALSKRHPSFRERSETTDLIVEITLQPWHAFAPDGVILFSDILTPLPAIGVPFDISESKGPVIQSPVRTEEQVRELVPIDLDKLQFVGESLKILRNEIDGKAALLGFVGAPWTIATYVVEGGMTNTYTNIKRMCHTAPNVLRGLLSHLAEAISDYIIYQVNSGAQCIQIFDSWGGQLPPHVWEQWSKPYIRQIVAKIKTECPHIPLVLYINGNGGLLERMKDIGVDVIGLDWTVDMADGRRRVGDGISVQGNVDPAYLFSPLPVLTDEIHRVVKAAGPKGHILNLGHGVLQKTPEEAVAHFFDVTRSLRYDTLFQGHLTEELQPVA

SEQ ID NO: 64069 - DNA, 1231 bp, Triticum aestivum
  misc_feature (1)..(1231): Ceres Seq. ID no. 13539874
agatcccgcaacccgcgaaacaaaccaccagccaagccggcaagcaatccgcgcgcccccattgttctcctctccctctctctctcagcatccgctccgagtcagctccgacggcatggacgcgcccgcacctgccaagaggagacgcggcggcggtggcggaagcggggagaagaaggatctgttccacgtcgtccacaaggtgcccgccggcgacagcccctacgtccgggccaagcacctccagctcgtggagaaggacgcggaggcgtcgatcgtgtggttctggaaggcgatcaactccggggacagggtagacagcgcgctcaaggacatggccgtggtgatgaagcagcaggaccgcgccgaggaggcgatagaggccatcagatccttcaggcacctctgctccaggcaggcccaggagtccctcgacaacctgctcatcgacctctacaagaaatgcggaaaagtcgacgagcagatagagctgctgaaacagaagctcaagatgatatgcctcggcgaggccttcaacgggaagatcaccaagacggcgcgatcccacggcaagaagttccaggtctcgatccagcaggagatgtcacgcattctgggtaaccttggctgggcttacatgcagcagaacaactatgaagccgctgaattggtttatcgaaaggcccagactatcgtacctgatgccaacagggcgtgcaacctcgggctgtgcctcattaagcagagcagacatgaggaggcagtgcaagtgcttgaggatgtcctacttcgcagaatctccgggttggatgacgacaaggcggttgcccgagctgagcagctcctccgtgagctcggtccgacaacacacatttcatcgccctttgatattggcttgagtttcaccgaagagatcatggagagactagaccttgtgatgaatgattggacaccgttcaggtcgaggcggctgcccgtatttgaggagttagatgcattcagggaccaaatggcttgttgattcattacttcgttggtttttaaactttaacgtgcatttgcgtgtggtaaatagaagttgatgtgcatgtatgtaggaggttttgtggatgttacaggtgtgaatgagagatttgataggttgtagatatcataagcagctagggttgatgcaaagcgttcccttgcggaataatgtggtttcagttttgaatgcagttggtctttgccc

SEQ ID NO: 64070 - protein, 339 aa, Triticum aestivum
  peptide (1)..(339): Ceres Seq. ID no. 13539875
DPATRETNHQPSRQAIRAPPLFSSPSLSQHPLRVSSDGMDAPAPAKRRRGGGGGSGEKKDLFHVVHKVPAGDSPYVRAKHLQLVEKDAEASIVWFWKAINSGDRVDSALKDMAVVMKQQDRAEEAIEAIRSFRHLCSRQAQESLDNLLIDLYKKCGKVDEQIELLKQKLKMICLGEAFNGKITKTARSHGKKFQVSIQQEMSRILGNLGWAYMQQNNYEAAELVYRKAQTIVPDANRACNLGLCLIKQSRHEEAVQVLEDVLLRRISGLDDDKAVARAEQLLRELGPTTHISSPFDIGLSFTEEIMERLDLVMNDWTPFRSRRLPVFEELDAFRDQMAC

SEQ ID NO: 64071 - protein, 301 aa, Triticum aestivum
  peptide (1)..(301): Ceres Seq. ID no. 13539876
MDAPAPAKRRRGGGGGSGEKKDLFHVVHKVPAGDSPYVRAKHLQLVEKDAEASIVWFWKAINSGDRVDSALKDMAVVMKQQDRAEEAIEAIRSFRHLCSRQAQESLDNLLIDLYKKCGKVDEQIELLKQKLKMICLGEAFNGKITKTARSHGKKFQVSIQQEMSRILGNLGWAYMQQNNYEAAELVYRKAQTIVPDANRACNLGLCLIKQSRHEEAVQVLEDVLLRRISGLDDDKAVARAEQLLRELGPTTHISSPFDIGLSFTEEIMERLDLVMNDWTPFRSRRLPVFEELDAFRDQMAC

SEQ ID NO: 64072 - protein, 228 aa, Triticum aestivum
  peptide (1)..(228): Ceres Seq. ID no. 13539877
MAVVMKQQDRAEEAIEAIRSFRHLCSRQAQESLDNLLIDLYKKCGKVDEQIELLKQKLKMICLGEAFNGKITKTARSHGKKFQVSIQQEMSRILGNLGWAYMQQNNYEAAELVYRKAQTIVPDANRACNLGLCLIKQSRHEEAVQVLEDVLLRRISGLDDDKAVARAEQLLRELGPTTHISSPFDIGLSFTEEIMERLDLVMNDWTPFRSRRLPVFEELDAFRDQMAC

SEQ ID NO: 64073 - DNA, 1165 bp, Triticum aestivum
  misc_feature (1)..(1165): Ceres Seq. ID no. 13597435
actctagtacttgtcatcttcttccccgaagcttctcgtcctctcccctccccctcgcaccgccggagggaggcgccggccgcgccgtctcctcgccccgtccgtccggccgccgctcgtcgtgggtggttggttccgagcgagcgacgcccagccagcatggcggcaaatgtgggggagtccacgagcggcagcagcagcgtggccggcgacggcgggggcagcttcgagtgcaacatatgctttgagctgccgcaggagcccatcgtcacgctctgcggccacctcttctgctggccctgcctctacaagtggctgcacatccactcgcactcgcccgagtgccccgtctgcaaggccgtcgtcgaggaggacaagctcgtcccgctctacggccgcggcaaggaccgcgtcgaccccaggtccaagggggtgccggccggggccgagatccccaaccggccgaccgggcagcggcccgccaccgccccgcaggccgaccccaacaaccacttccccaacgcaaccctaacccctggttcatggggggagggggcgtccctttggccaacgcgcggtggggaaactacaccttctcggccgcgtttggcggcctgttcccgctgctgagcttccaggtgcatggattcccggacgcgaccgcgtacgggcagcctgccgggtttccctatggctacgggcatggccatggccatgggcatgctttccatggcgggcacgcccacgccgctgccccccggcacgcgccgcccgggcagcagcagcagcaggcggacgtgtacctcaaggcgctcctcatcctggttggctttctcgtgatcgcgagcctcatcacattctaggttcgtcaccattgtcatttgtcaccgtcataataagagaaacgattgtcatgatacttctcagatgttgtgtgcattaccttgcccccccgtacgaaagccccggtctaaatctgagtggtgcgttttgagcgaaagtgttcatagaactcatgtatatatgtgctatttagacgcggtctgaatggggggtgcctgtgtaccgtagtagtttcacactgattcgtgaatgatttggaaacctctgtttggagtggatgtaccagaccaattatatcatgtgtaattttgtttcgactgcc

SEQ ID NO: 64074 - protein, 209 aa, Triticum aestivum
  peptide (1)..(209): Ceres Seq. ID no. 13597436
TLVLVIFFPEASRPLPSPSHRRREAPAAPSPRPVRPAAARRGWLVPSERRPASMAANVGESTSGSSSVAGDGGGSFECNICFELPQEPIVTLCGHLFCWPCLYKWLHIHSHSPECPVCKAVVEEDKLVPLYGRGKDRVDPRSKGVPAGAEIPNRPTGQRPATAPQADPNNHFPNATLTPGSWGEGASLWPTRGGETTPSRPRLAACSRC

SEQ ID NO: 64075 - protein, 156 aa, Triticum aestivum
  peptide (1)..(156): Ceres Seq. ID no. 13597437
MAANVGESTSGSSSVAGDGGGSFECNICFELPQEPIVTLCGHLFCWPCLYKWLHIHSHSPECPVCKAVVEEDKLVPLYGRGKDRVDPRSKGVPAGAEIPNRPTGQRPATAPQADPNNHFPNATLTPGSWGEGASLWPTRGGETTPSRPRLAACSRC

SEQ ID NO: 64076 - protein, 120 aa, Triticum aestivum
  peptide (1)..(120): Ceres Seq. ID no. 13597438
MWGSPRAAAAAWPATAGAASSATYALSCRRSPSSRSAATSSAGPASTSGCTSTRTRPSAPSARPSSRRTSSSRSTAAARTASTPGPRGCRPGPRSPTGRPGSGPPPPRRPTPTTTSPTQP

SEQ ID NO: 64077 - DNA, 1114 bp, Triticum aestivum
  misc_feature (1)..(1114): Ceres Seq. ID no. 13655598
aatccgctaaggagtgtgtaacaacaccacacaattcaacactgctagctacacagcacacgaaccgatccatccatccagaaaaaaaagaaagagtgcccgtcgaaaatgccggtgagcaggatcgccatcggcgccccgggggagctgtcccacccggacaccttccgcgccggcgtcgccgagttcatctccatgctcatcttcgtcttcgccggctcaggctccggcatggccttcggcaagctgactgacggcggcgcgacgacgccggcggggcttatcgcggcggcgctggcgcacgcgttcgcgctcttcgtggccgtctccgtgggcgccaacatctccggcgggcacgtgaacccggccgtcacattcggcgccttcgtgggcggcaacatcagcctgctcaaggccgtggtgtactgggtggcgcagctgctcggctccgtcgtggcctgcctcctcctcaagatcgccaccggcggcgaggccgtgggcgccttctcgctctccgccggcgtcggcgtctggaacgccgtggtgttcgagatcgtcatgaccttcgggctcgtctacacggtgtacgccaccgcggtcgaccccaagcgcggcgacctcggggtgatcgcgcccatcgccatcggcttcatcgtcggcgccaacatcctcgccggcggcgccttcgacggcgcctccatgaaccccgccgtctccttcggccccgctgtcgtcagcggcgtctgggagaaccactgggtctactggctcggccccttcgccggcgccgccatcgccgccctcgtctacgacatctgcttcatcggccagcgcccccacgagcagctccccaccgccgactactgaaaacctcaatctcatctcgtccatccgtcatcgccatgagagattgaaatcgcttcaaaaattccagcaagtgtacgtcgtcgcgtcatcatcagtaagccagtttagtttcattgcgctatcttgtccttgagaaattcagggtaaacagtgtgtgcgagtcagtcagtcaggaataatctcatccttctcttatcttggtgtatgtatgtacgtcctcaattatgaatgcttctattccatggcc

SEQ ID NO: 64078 - protein, 252 aa, Triticum aestivum
  peptide (1)..(252): Ceres Seq. ID no. 13655599
MPVSRIAIGAPGELSHPDTFRAGVAEFISMLIFVFAGSGSGMAFGKLTDGGATTPAGLIAAALAHAFALFVAVSVGANISGGHVNPAVTFGAFVGGNISLLKAVVYWVAQLLGSVVACLLLKIATGGEAVGAFSLSAGVGVWNAVVFEIVMTFGLVYTVYATAVDPKRGDLGVIAPIAIGFIVGANILAGGAFDGASMNPAVSFGPAVVSGVWENHWVYWLGPFAGAAIAALVYDICFIGQRPHEQLPTADY

SEQ ID NO: 64079 - protein, 223 aa, Triticum aestivum
  peptide (1)..(223): Ceres Seq. ID no. 13655600
MLIFVFAGSGSGMAFGKLTDGGATTPAGLIAAALAHAFALFVAVSVGANISGGHVNPAVTFGAFVGGNISLLKAVVYWVAQLLGSVVACLLLKIATGGEAVGAFSLSAGVGVWNAVVFEIVMTFGLVYTVYATAVDPKRGDLGVIAPIAIGFIVGANILAGGAFDGASMNPAVSFGPAVVSGVWENHWVYWLGPFAGAAIAALVYDICFIGQRPHEQLPTADY

SEQ ID NO: 64080 - protein, 211 aa, Triticum aestivum
  peptide (1)..(211): Ceres Seq. ID no. 13655601
MAFGKLTDGGATTPAGLIAAALAHAFALFVAVSVGANISGGHVNPAVTFGAFVGGNISLLKAVVYWVAQLLGSVVACLLLKIATGGEAVGAFSLSAGVGVWNAVVFEIVMTFGLVYTVYATAVDPKRGDLGVIAPIAIGFIVGANILAGGAFDGASMNPAVSFGPAVVSGVWENHWVYWLGPFAGAAIAALVYDICFIGQRPHEQLPTADY

SEQ ID NO: 64081 - DNA, 1284 bp, Triticum aestivum
  misc_feature (1)..(1284): Ceres Seq. ID no. 13597439
gaggccagccgagttatcgtcgtcacatcgaacgaacgctactcaaagaccagtccaaccacggaaggtcgtgcaagcgcaaactatggagagcacaggggtagcgagacggacgtcgacggtgcaggagctcgccagcgccctcggcaaaccagacgtgccggcccagtacgtctcacgcggacaccacgaaaacgaccagcagcccgccgcggtgccggtccctgtcatcgacatcggccgccttttcaaccaggacggcgccgccgcagctgacgacgaggcggcgaagctccggcaggcgctcgagtcgtggggcctcttcctggtgactaaccacggcgtggacacctcggtgatggacggcatgatggtcgcgtcgagggagttcttccggcagccacccgaagagaagcagagatacaccaacctcatcggcggcgagcggttccagctcgaggggtatgggaccgaccgggtgaactcatcggaacagatcctggactggtcagaccgcctctacctcaaggtggagcccgaagacgagcgcagcctcgccctctggccagcccatccccaaaccttcaggaatcttctgcacgagttcaccacgaaatgtagggtggtgaaggacggactggtccgggcaatggcgaggctgctcgagctcgacaacgactatatcattgaacagtttggggagaaggctgacacttacgctagattcagctactacccggagtgcccaaggccagagctcgtgttcggcctcaagccccactccgatgggagcgttcttaccgtgctcatggtcgatgacaccgttggtgggctgcagattttgagagacggtgtttggttcgatgtaccgatagttcctcacaccctgctgatcaacataggagaccaaactgagataatgagcaatgggatcttcaaaagccccgtgcatagagttgtgacaaatgctgagaaagaaaggctatcgctggctctattctactcgcttgatcccgagagagaaattgagccagcgactcagctggtagatgggaagagaccggcgttgtacagaaaggtcaaggtgaaggactacattgctggactctttgaacatgtgtcgcaaggaacgatggttattgatacagtgaagatataaacaagtgtggtatcatgctggtaatgcaaaacgtgtaatcgttctaggaacaatttatctccatgtattgttgcatgctaactttattaagtactccctttgttcagcatcacatatcgttttgg

SEQ ID NO: 64082 - protein, 385 aa, Triticum aestivum
  peptide (1)..(385): Ceres Seq. ID no. 13597440
RPAELSSSHRTNATQRPVQPRKVVQAQTMESTGVARRTSTVQELASALGKPDVPAQYVSRGHHENDQQPAAVPVPVIDIGRLFNQDGAAAADDEAAKLRQALESWGLFLVTNHGVDTSVMDGMMVASREFFRQPPEEKQRYTNLIGGERFQLEGYGTDRVNSSEQILDWSDRLYLKVEPEDERSLALWPAHPQTFRNLLHEFTTKCRVVKDGLVRAMARLLELDNDYIIEQFGEKADTYARFSYYPECPRPELVFGLKPHSDGSVLTVLMVDDTVGGLQILRDGVWFDVPIVPHTLLINIGDQTEIMSNGIFKSPVHRVVTNAEKERLSLALFYSLDPEREIEPATQLVDGKRPALYRKVKVKDYIAGLFEHVSQGTMVIDTVKI

SEQ ID NO: 64083 - protein, 357 aa, Triticum aestivum
  peptide (1)..(357): Ceres Seq. ID no. 13597441
MESTGVARRTSTVQELASALGKPDVPAQYVSRGHHENDQQPAAVPVPVIDIGRLFNQDGAAAADDEAAKLRQALESWGLFLVTNHGVDTSVMDGMMVASREFFRQPPEEKQRYTNLIGGERFQLEGYGTDRVNSSEQILDWSDRLYLKVEPEDERSLALWPAHPQTFRNLLHEFTTKCRVVKDGLVRAMARLLELDNDYIIEQFGEKADTYARFSYYPECPRPELVFGLKPHSDGSVLTVLMVDDTVGGLQILRDGVWFDVPIVPHTLLINIGDQTEIMSNGIFKSPVHRVVTNAEKERLSLALFYSLDPEREIEPATQLVDGKRPALYRKVKVKDYIAGLFEHVSQGTMVIDTVKI

SEQ ID NO: 64084 - protein, 266 aa, Triticum aestivum
  peptide (1)..(266): Ceres Seq. ID no. 13597442
MDGMMVASREFFRQPPEEKQRYTNLIGGERFQLEGYGTDRVNSSEQILDWSDRLYLKVEPEDERSLALWPAHPQTFRNLLHEFTTKCRVVKDGLVRAMARLLELDNDYIIEQFGEKADTYARFSYYPECPRPELVFGLKPHSDGSVLTVLMVDDTVGGLQILRDGVWFDVPIVPHTLLINIGDQTEIMSNGIFKSPVHRVVTNAEKERLSLALFYSLDPEREIEPATQLVDGKRPALYRKVKVKDYIAGLFEHVSQGTMVIDTVKI

SEQ ID NO: 64085 - DNA, 1459 bp, Triticum aestivum
  misc_feature (1)..(1459): Ceres Seq. ID no. 13597403
cgaaaaaaattccattcaaaatccatttgagcttcacaacagctagtgtgtccgtgagcttctctcttcaatgtgcgtgtgtgtgtaagcagcactagtgagtgtgtgtgctttgctagtgtgctgagcgcaggcagtagtagcacttggctcttccgccggtcgtgtatcagtgtactcgagtgctagcaagtagttctgggctaacagaaggcagccgatcaccggctcccacgtcctctagatccacggctacaagcagatcaagaagatggtccccaacggcaaggcagtcgagtcagccccgttcgacgtcgccggccgcgcctgccgaatcaggtgctatccgaacggcagcggcaagaaacactacggctacacgtccctcttcctcaccagccactgcgacgacggcacggtaaggctagagctcagcgtgctcgatcgggacgggaatccgtctcgcactcgagccacggaaaagcggcgcttctggatcggcgacagctggggctggggctttaaggatttcgtgaagaacgacgatctggtcgagggagagcacctcgtggacgactgcctcatcgtcctctgcgacgtcaccgtccacgacccttccttgcacgccgaggaggttgccgcgccggttgtggcgcctccgttcgacctaagtggggagctcggggaggccatgtggaacgagacggacgtgacgatccacgtcggcgacgagacgttcccggcgcaccggtcggtgctggaggctgcgtccgccgtcttcaaggcggacctcgagaacaacggcaccggcgaggtacgcgtcgacgacatggacgcccaggtgttcaagaccctgctgcagttcatgtacacgagcgtgctgcctgacaagaaccagctcgaggcagacgccgcgacggcggagcggctgctcgtggcggcggacaggtacgggctggagaagataaaggtcgtctgcgaggaggcgctgtgcccgcgcgtcaacatgggctccgtgggcaccatgctggcgttggcggagcggcacggaggtgccgtcctgaagaaggcgtgcatggagttcctctcgatccccggtaacctattatcattcatggcgaccgagggttttgaggagctcaagagaacccagcttgggtgctggagcttcacgtgaacctgatggatacgtgcagcttgcttcctagctagttaaattagctattctcgctaagtcagataagttaattaggtactcttgcatatttttatatcaatcttgttaagtctcagtcgactgatcagactttaaatctcagtcgatgctatatccgtaagatcttacattggtatacatgtattttttttcagttttctcttttacatgtaatgtcatttgaccaaaaaaaaaaaaaaaaaagcttatcgataccgycracctcgaggcgrgkgcccgrta

SEQ ID NO: 64086 - protein, 301 aa, Triticum aestivum
  peptide (1)..(301): Ceres Seq. ID no. 15222094
MVPNGKAVESAPFDVAGRACRIRCYPNGSGKKHYGYTSLFLTSHCDDGTVRLELSVLDRDGNPSRTRATEKRRFWIGDSWGWGFKDFVKNDDLVEGEHLVDDCLIVLCDVTVHDPSLHAEEVAAPVVAPPFDLSGELGEAMWNETDVTIHVGDETFPAHRSVLEAASAVFKADLENNGTGEVRVDDMDAQVFKTLLQFMYTSVLPDKNQLEADAATAERLLVAADRYGLEKIKVVCEEALCPRVNMGSVGTMLALAERHGGAVLKKACMEFLSIPGNLLSFMATEGFEELKRTQLGCWSFT

SEQ ID NO: 64087 - protein, 161 aa, Triticum aestivum
  peptide (1)..(161): Ceres Seq. ID no. 15222095
MWNETDVTIHVGDETFPAHRSVLEAASAVFKADLENNGTGEVRVDDMDAQVFKTLLQFMYTSVLPDKNQLEADAATAERLLVAADRYGLEKIKVVCEEALCPRVNMGSVGTMLALAERHGGAVLKKACMEFLSIPGNLLSFMATEGFEELKRTQLGCWSFT

SEQ ID NO: 64088 - DNA, 1400 bp, Triticum aestivum
  misc_feature (1)..(1400): Ceres Seq. ID no. 13598511
gttgccactcgctccagaagctgctcctgcccgggccagccgccgccactgagagtgagctcggctaccccagctcttccactctcgaagctaccctgctctctgtagcttcgctccctttctccttctttcgatggcgtcaggggaagcagagccgctgcagtacacgaccaccgtgctgcgggtgtccatccactgcgagggctgcaagaagaaggtcaagaaggtgctccacagcatcgaaggtgtgtacaaggtgacgatcgacgcgacgcagcacaaggtgacggtcaccggcagcgtggccgccgacgcactcgtcagacggctgctcaagtccggcaagcacgccgcgctctggccgatgccgccggcgccgcccgccacagaggccaagaagcccggggaggccccgtctgccgggaagggcgggaagggcgcggagaaggtggacgccaagcccaaaaaggtggccgacgaggcagagtcggagggctcggagaagccagccaaggacgaaggttcagagaagaaaccagagaaagcagcggcgaagaaacccaaggacgaggccaaggaggagggagaggttcctgagaagaaggagaagggctcgccggagccgccagccaaagaagctgcggtcggcgacgaggccccggaagcgggcggagaggagacggggggcaagaaggggaagaagaagaagaacaagcagcagaaggaargccggcgacggggacgccgctacggagaagccgccgccgccgccgccgcagcagcagcagcagcagcagccaaagacgaagcagccacagccacagcaggcgatgccgcccgtgccagcgccggggacggggccagagcgcgcgcacggccacggcggcccgttcccgtactacgcgccgcaaccggtgatgagctacaacatggcgcagccgagcgcgagcgtgtcgtactacgcgcccacgccggtggcgtccatgcagccaatgccgcctccgccgccgtacggcgggtactcgccttacccgccgatgatgatgccgccgccgccgccggagtacatgtacggcccgccaggcatgcggtcgtccccgccgcaggaaccgtacaacagcatgttcaacgaggagaaccccagttcctgtagcgtcatgtgacgccgccgccgcgccgccgccggcacgggatcgagtctgtagttaaaagtgggggtggggtgggagaggaggcttcgtaatagaagctttgtctaggctgagtggagtacgtaccctcttaattaggtggtcaaagctcttattgaccacactttttttctcttcaaattttcgacttgattagcttgtcatgtagtgacatgagtattttatttcactaatatggttatttttgcc

SEQ ID NO: 64089 - protein, 339 aa, Triticum aestivum
  peptide (1)..(339): Ceres Seq. ID no. 15222354
  misc_feature (199)..(199): Xaa is any aa, unknown or other
MASGEAEPLQYTTTVLRVSIHCEGCKKKVKKVLHSIEGVYKVTIDATQHKVTVTGSVAADALVRRLLKSGKHAALWPMPPAPPATEAKKPGEAPSAGKGGKGAEKVDAKPKKVADEAESEGSEKPAKDEGSEKKPEKAAAKKPKDEAKEEGEVPEKKEKGSPEPPAKEAAVGDEAPEAGGEETGGKKGKKKKNKQQKEXRRRGRRYGEAAAAAAAAAAAAAAKDEAATATAGDAARASAGDGARARARPRRPVPVLRAATGDELQHGAAERERVVLRAHAGGVHAANAASAAVRRVLALPADDDAAAAAGVHVRPARHAVVPAAGTVQQHVQRGEPQFL

SEQ ID NO: 64090 - protein, 262 aa, Triticum aestivum
  peptide (1)..(262): Ceres Seq. ID no. 15222355
  misc_feature (122)..(122): Xaa is any aa, unknown or other
MPPAPPATEAKKPGEAPSAGKGGKGAEKVDAKPKKVADEAESEGSEKPAKDEGSEKKPEKAAAKKPKDEAKEEGEVPEKKEKGSPEPPAKEAAVGDEAPEAGGEETGGKKGKKKKNKQQKEXRRRGRRYGEAAAAAAAAAAAAAAKDEAATATAGDAARASAGDGARARARPRRPVPVLRAATGDELQHGAAERERVVLRAHAGGVHAANAASAAVRRVLALPADDDAAAAAGVHVRPARHAVVPAAGTVQQHVQRGEPQFL

SEQ ID NO: 64091 - DNA, 521 bp, Triticum aestivum
  misc_feature (1)..(521): Ceres Seq. ID no. 13597443
atccagtatcttggccagcccatcttgacacgagaaaggaccaaacgagcctctctccgccggcggtgagaaaggagaggatggagcggcggcgcaagcctcttccgcgccggccgacgtactgcgctccttttaggtcaggtcgtccaccagccaagaagaggaagagattgggctccgagggagagattgaaccttcggccggggcggcaggagtcgaccggatcagcgccctccccgacgaactcctcggcgagatcatctccctcctccccatcaaggacggcgcccgcacccagatcctcgcgtcccggtggcgccacctctggctctccgcccctctcaacctcgactgccgtggcttcgccaccgccgccgatctcgcggtcgtcagataccgcagggtctacaacaacgtcccctctgctgtagcgcacattcttgaccgccaccaaggccccggccgccgcctccgtgtcaaggggtaccgtctccccgtcgccgccgcagccgccgccgcc

SEQ ID NO: 64092 - protein, 173 aa, Triticum aestivum
  peptide (1)..(173): Ceres Seq. ID no. 13597444
PVSWPAHLDTRKDQTSLSPPAVRKERMERRRKPLPRRPTYCAPFRSGRPPAKKRKRLGSEGEIEPSAGAAGVDRISALPDELLGEIISLLPIKDGARTQILASRWRHLWLSAPLNLDCRGFATAADLAVVRYRRVYNNVPSAVAHILDRHQGPGRRLRVKGYRLPVAAAAAAA

SEQ ID NO: 64093 - protein, 147 aa, Triticum aestivum
  peptide (1)..(147): Ceres Seq. ID no. 13597445
MERRRKPLPRRPTYCAPFRSGRPPAKKRKRLGSEGEIEPSAGAAGVDRISALPDELLGEIISLLPIKDGARTQILASRWRHLWLSAPLNLDCRGFATAADLAVVRYRRVYNNVPSAVAHILDRHQGPGRRLRVKGYRLPVAAAAAAA

SEQ ID NO: 64094 - DNA, 1851 bp, Triticum aestivum
  misc_feature (1)..(1851): Ceres Seq. ID no. 13598512
aaaattaggatcgacagtaggagtaggatttagggggaaagtagagggggaccctgcagatcgaagaaagcacagccgccgccgatgagcgcaacggagaagagcacggagggggagggggagggggaggggtcccagcgcgtggaggcgttcctcgacatcctcggccgcgtcccgatgggggaggtggagggggcgctgacctcctgcggcgtcggcccgacggcggaggccgcggagcaggtgctcaagtccgaaacctgctactcccgccccaaatcggccgtccgcttcttccgctgggcgaaggcgtccgtgcagctcacccccttggcctggaacctcctcgtcgacatcctcggtaaggccgccatgttcgatcccatgtgggacgccgtcctctccatgagccaggagggcggcctcctctccgtcgccacattcgcctccatgttcgcctcctactgcgcgcgcggcaacttcaaggaagccgccakggccttcgacgtcatggagcgccacggcgtgacgccggacgccgttgccctcaactccctcctcgccgccatgtgccgccgggatggcggcgggcaggccgcgtgggagcttttcgaacgctacaagaccacggtcgcgcccgacgccgacaccttcgcgatactgctcgaggcgtgggagaaggaggggaacgtccagcgcgccaagagcaccttcggcgagatggtcgtccgcgtcgggtgggacgccagcaacatgcctgcctacgatgctttcctctccacgctcgtgcgaggggaccagttcaacgaggcactcaagttcctccaggtgatgcggaccaagggctgcctcccggggctcaagttctttgccaacgcgatcgaccttgtcgtccgcaagggagaccatgccaatgctattgctatctggcaaattatggtctcggatgcaggactggttcccaatctcccaatgtacaacgccgtaattggcctctgctctagtgtcggtaacaccgactacgccttccagatgctcgatgaaatgcccttaaatggggtctttgcagattctgatacatataattccatacttgaggggctcatcaagcagcgcaaggctcgtgagactgaaggtttcctcgcggagatgagcaagaacgagcagctgccctccgcctccaactgtgctgctgctatcagcttattttgtcaggagtttaacccatctgccgcagttgacgtttggcactgcatcgtggagcaccaaattactccggctgaggaatcagccaaagagttaatagctgggcttctcgactttagcaggttcgccgaggtgaagaaatataccgatcagatgcttgacatgggaattgagttgccccagtccaccattgaaaaaatgaagcgagcattttacaaggctgagaggcaccacacatatgaccaacttgcacgaaggttgaagcggcggtaacaacacattgatggtataattcattagaaacgagcgagaccgagaagctgtaggatgaggtttcatgctgccagagcaagctgcggtatgtattcaaagtggaaagtggatggaagtctttggtgcagcgggtacaggttctggatgttgttttgcgccactggttgtatggaagatgtttcctggaagtatagcattgtactgttgtacttggcatggaagagcagtttctgagatagctgtaatgctgtacttttgcgttaactggagtagcctgttgccttttaaaaaaaaaaaaaaaaaagcttatcgataccgtcgacctcgagggggggcccgkttaaacmcaataaagttggaactggagggggg

SEQ ID NO: 64095 - protein, 464 aa, Triticum aestivum
  peptide (1)..(464): Ceres Seq. ID no. 15222356
  misc_feature (138)..(138): Xaa is any aa, unknown or other
MSATEKSTEGEGEGEGSQRVEAFLDILGRVPMGEVEGALTSCGVGPTAEAAEQVLKSETCYSRPKSAVRFFRWAKASVQLTPLAWNLLVDILGKAAMFDPMWDAVLSMSQEGGLLSVATFASMFASYCARGNFKEAAXAFDVMERHGVTPDAVALNSLLAAMCRRDGGGQAAWELFERYKTTVAPDADTFAILLEAWEKEGNVQRAKSTFGEMVVRVGWDASNMPAYDAFLSTLVRGDQFNEALKFLQVMRTKGCLPGLKFFANAIDLVVRKGDHANAIAIWQIMVSDAGLVPNLPMYNAVIGLCSSVGNTDYAFQMLDEMPLNGVFADSDTYNSILEGLIKQRKARETEGFLAEMSKNEQLPSASNCAAAISLFCQEFNPSAAVDVWHCIVEHQITPAEESAKELIAGLLDFSRFAEVKKYTDQMLDMGIELPQSTIEKMKRAFYKAERHHTYDQLARRLKRR

SEQ ID NO: 64096 - protein, 433 aa, Triticum aestivum
  peptide (1)..(433): Ceres Seq. ID no. 15222357
  misc_feature (107)..(107): Xaa is any aa, unknown or other
MGEVEGALTSCGVGPTAEAAEQVLKSETCYSRPKSAVRFFRWAKASVQLTPLAWNLLVDILGKAAMFDPMWDAVLSMSQEGGLLSVATFASMFASYCARGNFKEAAXAFDVMERHGVTPDAVALNSLLAAMCRRDGGGQAAWELFERYKTTVAPDADTFAILLEAWEKEGNVQRAKSTFGEMVVRVGWDASNMPAYDAFLSTLVRGDQFNEALKFLQVMRTKGCLPGLKFFANAIDLVVRKGDHANAIAIWQIMVSDAGLVPNLPMYNAVIGLCSSVGNTDYAFQMLDEMPLNGVFADSDTYNSILEGLIKQRKARETEGFLAEMSKNEQLPSASNCAAAISLFCQEFNPSAAVDVWHCIVEHQITPAEESAKELIAGLLDFSRFAEVKKYTDQMLDMGIELPQSTIEKMKRAFYKAERHHTYDQLARRLKRR

SEQ ID NO: 64097 - protein, 368 aa, Triticum aestivum
  peptide (1)..(368): Ceres Seq. ID no. 15222358
  misc_feature (42)..(42): Xaa is any aa, unknown or other
MFDPMWDAVLSMSQEGGLLSVATFASMFASYCARGNFKEAAXAFDVMERHGVTPDAVALNSLLAAMCRRDGGGQAAWELFERYKTTVAPDADTFAILLEAWEKEGNVQRAKSTFGEMVVRVGWDASNMPAYDAFLSTLVRGDQFNEALKFLQVMRTKGCLPGLKFFANAIDLVVRKGDHANAIAIWQIMVSDAGLVPNLPMYNAVIGLCSSVGNTDYAFQMLDEMPLNGVFADSDTYNSILEGLIKQRKARETEGFLAEMSKNEQLPSASNCAAAISLFCQEFNPSAAVDVWHCIVEHQITPAEESAKELIAGLLDFSRFAEVKKYTDQMLDMGIELPQSTIEKMKRAFYKAERHHTYDQLARRLKRR

SEQ ID NO: 64098 - DNA, 1662 bp, Triticum aestivum
  misc_feature (1)..(1662): Ceres Seq. ID no. 13597446
aaacgaaaaaggtggcgagagggagagggagaggaaggtgccggccctagcaatggcggggtggtacgaggaggcggcgggtctgctgctgcgccggtcggcgttggcggagatggcggtagatgtgctgctgtgcgccgtgccgatctgggcggcggtcatgatctgcctcttcatagggtgggcatggcggccgcgctggaccgggctgatcttcctcggtttccgcagccgtctccggctcctctacgtgcctcccgggctcggcgcgcgccgcctatggctcgcctgcaccgcgctctccgccttctccgtcgcgccgcagctgctctcctccgccttccgccgccatgggaagtaccagcgcaaggattcctcgaacgacgacacggacgcctgcggggattctggcgcttgcgctaacggcaggtcaatttttgaggtcaagcatggtattgtcactgagaaggacctagatcacctcgtgcagcttttagataataaggagagtgggcatacaacatggcagcatttgatggagcgtaccacttccaacatgacgtacaaggcctggaggcatgagcccgaggtgggacctataatgcattgtagccagaccattttcgaggatgctactcctgaactggttagagatttcttctgggatgatgattttcgtctaaagtgggaccccatgcttgtgtgcttcaaaattttggatgagttccctctgaatggaaccacaattattcactggattaaaaagttccctttcttctgcagtgaccgtgaatacatttttgggcggcgtatctgggagtcggggaaggcttactattgtgttacgaagggaattccttatccatctttgcccaagaaggaaaaaccgaggcgtgtggaattgtacttctcgagttggcgtattagacctgttcaatcgcccaaaaaagatggccagcaacacatggcatgtgaagtaacactgtttcactacgaggatatgggcatacccaaggatgttgctaaagttggtgtccgccacggcatgtggggtgctgttaaaaagctgcagtccggctttagagcatatcagctaatgagaaaatcagaaaacatcctgtcacgcagtgccatcatggctcgggtgaccaccaagacatgcattgctggttctgatggctccttggatcaagggcccttcagcacagaacaagccagtacagaggacgacaactccagggcagtccaacatggtttcgactggaagtgggtggtggtcggtggcgcggtggctgccgtttgcgtgcttaacaccggaattgtagggaaggccctcttacttggagctgcaagaaggcaggcaaagaagtgatgagcatctaccagcatccacaaagtgagcttcacgaccatcagggcctgtctctgtctagaaagtcgcaatcgagaccgaggataaaggaatgaaatccataccatactacaggatgcagataattcgggtgcctaattttggattgtgccttttaagcagtatatcgcaaatgtgtcttgctataaccgattatgtggtatcaggaatcgttagatgacgatgtatctcaagatgtgagttctgttaacaacatttgctaacttccaagttccaagagtgcacttttc

SEQ ID NO: 64099 - protein, 456 aa, Triticum aestivum
  peptide (1)..(456): Ceres Seq. ID no. 13597447
NEKGGERERERKVPALAMAGWYEEAAGLLLRRSALAEMAVDVLLCAVPIWAAVMICLFIGWAWRPRWTGLIFLGFRSRLRLLYVPPGLGARRLWLACTALSAFSVAPQLLSSAFRRHGKYQRKDSSNDDTDACGDSGACANGRSIFEVKHGIVTEKDLDHLVQLLDNKESGHTTWQHLMERTTSNMTYKAWRHEPEVGPIMHCSQTIFEDATPELVRDFFWDDDFRLKWDPMLVCFKILDEFPLNGTTIIHWIKKFPFFCSDREYIFGRRIWESGKAYYCVTKGIPYPSLPKKEKPRRVELYFSSWRIRPVQSPKKDGQQHMACEVTLFHYEDMGIPKDVAKVGVRHGMWGAVKKLQSGFRAYQLMRKSENILSRSAIMARVTTKTCIAGSDGSLDQGPFSTEQASTEDDNSRAVQHGFDWKWVVVGGAVAAVCVLNTGIVGKALLLGAARRQAKK

SEQ ID NO: 64100 - protein, 439 aa, Triticum aestivum
  peptide (1)..(439): Ceres Seq. ID no. 13597448
MAGWYEEAAGLLLRRSALAEMAVDVLLCAVPIWAAVMICLFIGWAWRPRWTGLIFLGFRSRLRLLYVPPGLGARRLWLACTALSAFSVAPQLLSSAFRRHGKYQRKDSSNDDTDACGDSGACANGRSIFEVKHGIVTEKDLDHLVQLLDNKESGHTTWQHLMERTTSNMTYKAWRHEPEVGPIMHCSQTIFEDATPELVRDFFWDDDFRLKWDPMLVCFKILDEFPLNGTTIIHWIKKFPFFCSDREYIFGRRIWESGKAYYCVTKGIPYPSLPKKEKPRRVELYFSSWRIRPVQSPKKDGQQHMACEVTLFHYEDMGIPKDVAKVGVRHGMWGAVKKLQSGFRAYQLMRKSENILSRSAIMARVTTKTCIAGSDGSLDQGPFSTEQASTEDDNSRAVQHGFDWKWVVVGGAVAAVCVLNTGIVGKALLLGAARRQAKK

SEQ ID NO: 64101 - protein, 419 aa, Triticum aestivum
  peptide (1)..(419): Ceres Seq. ID no. 13597449
MAVDVLLCAVPIWAAVMICLFIGWAWRPRWTGLIFLGFRSRLRLLYVPPGLGARRLWLACTALSAFSVAPQLLSSAFRRHGKYQRKDSSNDDTDACGDSGACANGRSIFEVKHGIVTEKDLDHLVQLLDNKESGHTTWQHLMERTTSNMTYKAWRHEPEVGPIMHCSQTIFEDATPELVRDFFWDDDFRLKWDPMLVCFKILDEFPLNGTTIIHWIKKFPFFCSDREYIFGRRIWESGKAYYCVTKGIPYPSLPKKEKPRRVELYFSSWRIRPVQSPKKDGQQHMACEVTLFHYEDMGIPKDVAKVGVRHGMWGAVKKLQSGFRAYQLMRKSENILSRSAIMARVTTKTCIAGSDGSLDQGPFSTEQASTEDDNSRAVQHGFDWKWVVVGGAVAAVCVLNTGIVGKALLLGAARRQAKK

SEQ ID NO: 64102 - DNA, 1412 bp, Triticum aestivum
  misc_feature (1)..(1412): Ceres Seq. ID no. 13598513
atgtacctaaccttgcaacaaagttcagttgaaaaccaccactagtctgtgcccatggcgaccttctccaacgaggagcttctgcaggcgcacaccgagctctgggacctcaccttcggctacctcaaatccatggcgctcgagtgcgccatcaagctcggcctcccaaacgccatccaccgccgcggcggcgacgccacgctgccggacttgctcgacgcagtttccgtcccggagagcaagaaggcgcacctgcctcgcctcatgaggtttctcggcgcgttcggcatcttcaccgccgacgcacccgctgcaggggagcgcgcgaatggggaggaggcgggcgccgtctacggcctcacgccggtgtcccgcctcctcgtggacgactccggcgccaacgggtcgtgcgggagcctctcgccgttcgtgctctcccagacgaccaagtaccacgtgaaggcggccatgcacctgccggagtggttcacgagcgacgacggcgcggccgcggcggagatgccgttccggacggcgcacggcgcagacctgtggggcgtcatggaccgcgaccccaagatgaaccaggtcttcaacgccggcatggggtccgacacccagctcgcgatggacttcgtcatcggcaactacggcgacgtgttcgacggggtgacctcgctggtcgacgtcggcggcgggacaggctccgcggcgagggccatagccaaggccttcccgcacgtcaagtgctccgtgctcgacctccccaacgtggtcaattccgtcccgcccgacggcgtggtcgagtacatctcaggcgacatgatgagctccattccggcgaccgatgcggtcttcctcaagtacatcatgcatgactggaacgacgaggactgcgtgaagatcctgaagcagtgcaagaaggcgatccccgaatcaggcgggaaagtgataatcgtggacatagtggtgggatctcctttgaaagccatgctggaagcccaggtctcgtttgatctgctgatgatggtgatcacgggaggcaaggagcgcgacgagcatgagtggcgcaagattttcatggacgcggggttcagccatcacaagacaagacctgttttgggatttatggccatcaccgagctgtatgcttagccctgcatgcctgattgcagcagatatctgctgtaacgtgtgtgtaagcgttggtcctgcgatgttcgtcgtggttgtgcagccccaaagtgtctttctgcagcaacgatttgttcctacgcctttaaaggctcccatatttgtatgatctgttgctagggtatatgcacttaataaactagatgacaccccgcccgttgctgcgggaattgtagcaattaaaaaattggaaattggacaaatgaaaagataattcg

SEQ ID NO: 64103 - protein, 366 aa, Triticum aestivum
  peptide (1)..(366): Ceres Seq. ID no. 13598514
MATFSNEELLQAHTELWDLTFGYLKSMALECAIKLGLPNAIHRRGGDATLPDLLDAVSVPESKKAHLPRLMRFLGAFGIFTADAPAAGERANGEEAGAVYGLTPVSRLLVDDSGANGSCGSLSPFVLSQTTKYHVKAAMHLPEWFTSDDGAAAAEMPFRTAHGADLWGVMDRDPKMNQVFNAGMGSDTQLAMDFVIGNYGDVFDGVTSLVDVGGGTGSAARAIAKAFPHVKCSVLDLPNVVNSVPPDGVVEYISGDMMSSIPATDAVFLKYIMHDWNDEDCVKILKQCKKAIPESGGKVIIVDIVVGSPLKAMLEAQVSFDLLMMVITGGKERDEHEWRKIFMDAGFSHHKTRPVLGFMAITELYA

SEQ ID NO: 64104 - protein, 340 aa, Triticum aestivum
  peptide (1)..(340): Ceres Seq. ID no. 13598515
MALECAIKLGLPNAIHRRGGDATLPDLLDAVSVPESKKAHLPRLMRFLGAFGIFTADAPAAGERANGEEAGAVYGLTPVSRLLVDDSGANGSCGSLSPFVLSQTTKYHVKAAMHLPEWFTSDDGAAAAEMPFRTAHGADLWGVMDRDPKMNQVFNAGMGSDTQLAMDFVIGNYGDVFDGVTSLVDVGGGTGSAARAIAKAFPHVKCSVLDLPNVVNSVPPDGVVEYISGDMMSSIPATDAVFLKYIMHDWNDEDCVKILKQCKKAIPESGGKVIIVDIVVGSPLKAMLEAQVSFDLLMMVITGGKERDEHEWRKIFMDAGFSHHKTRPVLGFMAITELYA

SEQ ID NO: 64105 - protein, 296 aa, Triticum aestivum
  peptide (1)..(296): Ceres Seq. ID no. 13598516
MRFLGAFGIFTADAPAAGERANGEEAGAVYGLTPVSRLLVDDSGANGSCGSLSPFVLSQTTKYHVKAAMHLPEWFTSDDGAAAAEMPFRTAHGADLWGVMDRDPKMNQVFNAGMGSDTQLAMDFVIGNYGDVFDGVTSLVDVGGGTGSAARAIAKAFPHVKCSVLDLPNVVNSVPPDGVVEYISGDMMSSIPATDAVFLKYIMHDWNDEDCVKILKQCKKAIPESGGKVIIVDIVVGSPLKAMLEAQVSFDLLMMVITGGKERDEHEWRKIFMDAGFSHHKTRPVLGFMAITELYA

SEQ ID NO: 64106 - DNA, 1594 bp, Triticum aestivum
  misc_feature (1)..(1594): Ceres Seq. ID no. 13597407
accaagacgacgcgagcgccatggcgcacgatggagcttcccatggagcgaccaccgccccgctgctcgcgtcgacggagaagccaccgcggaacatgtacgccttcggctgcgccacgctggcctccatgaccacgatcctcatgggttacaatctcgcgctgatgagcggcgcgcagctcttcatccgggaggacctggggcttaccgacgagcaggtggaggtactggctgggtccatgaacgtgtacatgctcgtgtccatcctcgccgccggctgggcggccgacctcctgggccgccgcggcacgctcgtgctcgccaacggcttcctcatggccggcgcgctcgccatgtcgcttggcggcagctacgcggcgctcatggccgcgcgcttcatcaccagcatcggcgttggcttctccctcgtcgtcgcgccggtctacaacgccgagatctcgccggcctccgcgcgtggcgtgctttcctcgttactcgatatatttgtcaacgtcggcatcctgctcagttacgtgtcgaactacgccttggctggcctgccggtgcacctcagttggcgcgtcatgtacgccatcggcgtgctcccaccggtgctcctcgccgccggggtgctcgccatgccggagtccccgcggtggctcgccatgcgcgggcgcgaggacgacgcgcgcgcagtgctcgtgcgcacctccgataccgccgccgaggccgagctccggtttgaggagatcaagcgggtcgtcgaggcgccgcgagaagccgatagcggcgtgtggcgggagctgatctttcgaccgtcagcgatggtccggcggatccttgtcttcgtggtcgggctcaacttcctccagcaagcgttgggcgtcgacgccatcctgctgtacagcccgctcatgttcaagaaggcaggcatgtcgtcgaatagcgccatcttgggcgccaccgtggccatcggtgtcgtcaagacgtgcttcatactcgtggtctcgctcttttccgaccgcttcggccggcggccgctcctgctggccagcgccggcggcgtggccgcctcgctgaccggcctggctctcacactctgcatcggcgagacgtcgccagcgagcacggctgcctgcgtggcgttcacgctggccacggtcgcggcgttttcggtcgggtgggggtcgctcccgtccacgtacacggcagagatcacgccgctgcggctgcgtgcgcagggctcgagcctgggcatggcggtgaaccggctgacttgcggggtggtaagcatgtcgttcatatcgctagcgggctggatcaccatgcccgggtgcttctttctgtacgccagtatggcggccacggcgtacgtgttcgtcttcctgcgcctgccagagacgaagggccggaccctagaggagatggacgtgctcttttccaaatgattatgtcatctgtaggttttcggccacagttcaatgcacgctgttgcggcccgcagcacgtttggtagaaacctttgaaaaaaaaatgtgtgaactcttttgtgattgcatcatcgatagggatcaataaaaggcttctactcctc

SEQ ID NO: 64107 - protein, 481 aa, Triticum aestivum
  peptide (1)..(481): Ceres Seq. ID no. 13597408
QDDASAMAHDGASHGATTAPLLASTEKPPRNMYAFGCATLASMTTILMGYNLALMSGAQLFIREDLGLTDEQVEVLAGSMNVYMLVSILAAGWAADLLGRRGTLVLANGFLMAGALAMSLGGSYAALMAARFITSIGVGFSLVVAPVYNAEISPASARGVLSSLLDIFVNVGILLSYVSNYALAGLPVHLSWRVMYAIGVLPPVLLAAGVLAMPESPRWLAMRGREDDARAVLVRTSDTAAEAELRFEEIKRVVEAPREADSGVWRELIFRPSAMVRRILVFVVGLNFLQQALGVDAILLYSPLMFKKAGMSSNSAILGATVAIGVVKTCFILVVSLFSDRFGRRPLLLASAGGVAASLTGLALTLCIGETSPASTAACVAFTLATVAAFSVGWGSLPSTYTAEITPLRLRAQGSSLGMAVNRLTCGVVSMSFISLAGWITMPGCFFLYASMAATAYVFVFLRLPETKGRTLEEMDVLFSK

SEQ ID NO: 64108 - protein, 475 aa, Triticum aestivum
  peptide (1)..(475): Ceres Seq. ID no. 13597409
MAHDGASHGATTAPLLASTEKPPRNMYAFGCATLASMTTILMGYNLALMSGAQLFIREDLGLTDEQVEVLAGSMNVYMLVSILAAGWAADLLGRRGTLVLANGFLMAGALAMSLGGSYAALMAARFITSIGVGFSLVVAPVYNAEISPASARGVLSSLLDIFVNVGILLSYVSNYALAGLPVHLSWRVMYAIGVLPPVLLAAGVLAMPESPRWLAMRGREDDARAVLVRTSDTAAEAELRFEEIKRVVEAPREADSGVWRELIFRPSAMVRRILVFVVGLNFLQQALGVDAILLYSPLMFKKAGMSSNSAILGATVAIGVVKTCFILVVSLFSDRFGRRPLLLASAGGVAASLTGLALTLCIGETSPASTAACVAFTLATVAAFSVGWGSLPSTYTAEITPLRLRAQGSSLGMAVNRLTCGVVSMSFISLAGWITMPGCFFLYASMAATAYVFVFLRLPETKGRTLEEMDVLFSK

SEQ ID NO: 64109 - protein, 450 aa, Triticum aestivum
  peptide (1)..(450): Ceres Seq. ID no. 13597410
MYAFGCATLASMTTILMGYNLALMSGAQLFIREDLGLTDEQVEVLAGSMNVYMLVSILAAGWAADLLGRRGTLVLANGFLMAGALAMSLGGSYAALMAARFITSIGVGFSLVVAPVYNAEISPASARGVLSSLLDIFVNVGILLSYVSNYALAGLPVHLSWRVMYAIGVLPPVLLAAGVLAMPESPRWLAMRGREDDARAVLVRTSDTAAEAELRFEEIKRVVEAPREADSGVWRELIFRPSAMVRRILVFVVGLNFLQQALGVDAILLYSPLMFKKAGMSSNSAILGATVAIGVVKTCFILVVSLFSDRFGRRPLLLASAGGVAASLTGLALTLCIGETSPASTAACVAFTLATVAAFSVGWGSLPSTYTAEITPLRLRAQGSSLGMAVNRLTCGVVSMSFISLAGWITMPGCFFLYASMAATAYVFVFLRLPETKGRTLEEMDVLFSK

SEQ ID NO: 64110 - DNA, 1115 bp, Triticum aestivum
  misc_feature (1)..(1115): Ceres Seq. ID no. 13584234
agggtaaagcggcctggcgatggccacagcgcgactactgctccgaagcgcctccctgctccccctccgccgctcgcccctgcactcatccggcttccagccccgagccgccatggcctccgatgccgccagccagttccagaagatccagatccagcgcgaggacacgacctttgatgtctatgttgttggcaaagaaaatgctcctggagtcgtagtgttgcaagagtggtggggtgttgactatgaggtcaagaatcatgccatccatatttcccaaatcggcgatggatacagagcacttattccagatttgtaccgtgggaaggttgctttggaggtagctgaggcacaacatctgatggaaggactagactggcagggtgcaatcaaggatattcaggcttcagttaaatggctgaaggaaaatggatcgcccaaggttggtgttactggttattgcatgggaggtgctttggcggtcgcaagtggagttttggtcccagaggttgatgctgttgttgctttctacgggacgccatcttcggagcttgctgatgcttccaaggctcaggctccaatccaggctcattttggggagcttgacagttttgttgggtttgcggatgttaccgcggccaagtcattggaggagaagctcaaggcttctggagtggcacatgaagtccacatatactctggatgctcccatgccttcatgaacgcatcgcctgaggccctcaagaggaggaagggcatgggtttgactgatgagaatcagggggccattgacctggcatggtcccgcttctccacttggatgggtcgtttcctggggtctgcatgagccattaccatatccatatggtctctgaatgatgtatatggagtctgtcggctcagaagaataaaatgtttgggtgcaatatgtagccagtgcccaatctagacaagcagtgtgttttgtgttagtactactatatgttccaactcgtcatggttttgccagaacatctcggggtacttgattggaggggaaatgaaacacttacgacgctgtcatacgagtttgttttgtgttttaataggcttcagccgagtgctttctggatttt

SEQ ID NO: 64111 - protein, 275 aa, Triticum aestivum
  peptide (1)..(275): Ceres Seq. ID no. 13584235
MATARLLLRSASLLPLRRSPLHSSGFQPRAAMASDAASQFQKIQIQREDTTFDVYVVGKENAPGVVVLQEWWGVDYEVKNHAIHISQIGDGYRALIPDLYRGKVALEVAEAQHLMEGLDWQGAIKDIQASVKWLKENGSPKVGVTGYCMGGALAVASGVLVPEVDAVVAFYGTPSSELADASKAQAPIQAHFGELDSFVGFADVTAAKSLEEKLKASGVAHEVHIYSGCSHAFMNASPEALKRRKGMGLTDENQGAIDLAWSRFSTWMGRFLGSA

SEQ ID NO: 64112 - protein, 244 aa, Triticum aestivum
  peptide (1)..(244): Ceres Seq. ID no. 13584236
MASDAASQFQKIQIQREDTTFDVYVVGKENAPGVVVLQEWWGVDYEVKNHAIHISQIGDGYRALIPDLYRGKVALEVAEAQHLMEGLDWQGAIKDIQASVKWLKENGSPKVGVTGYCMGGALAVASGVLVPEVDAVVAFYGTPSSELADASKAQAPIQAHFGELDSFVGFADVTAAKSLEEKLKASGVAHEVHIYSGCSHAFMNASPEALKRRKGMGLTDENQGAIDLAWSRFSTWMGRFLGSA

SEQ ID NO: 64113 - protein, 161 aa, Triticum aestivum
  peptide (1)..(161): Ceres Seq. ID no. 13584237
MEGLDWQGAIKDIQASVKWLKENGSPKVGVTGYCMGGALAVASGVLVPEVDAVVAFYGTPSSELADASKAQAPIQAHFGELDSFVGFADVTAAKSLEEKLKASGVAHEVHIYSGCSHAFMNASPEALKRRKGMGLTDENQGAIDLAWSRFSTWMGRFLGSA

SEQ ID NO: 64114 - DNA, 1083 bp, Triticum aestivum
  misc_feature (1)..(1083): Ceres Seq. ID no. 12617391
acacactagagaaactcaccagctccacgggcagaggagccgacacccaacccagcccaacgcaggcacgccaagaccaggagagagacaacatgcgtccatcacgggatcttcgcctcgccgtgcttctcctcttctccgcagccgtcctcctctcggcagtcccggcggccagagcccagcaggaaaccgaggaggaggaggagttcagctactcgctggacgcggagaatgggccggcgcactggggcgacatcaaggaggagtggtccgcgtgcggcaagggcaacatgcagtcgcccatcgaccttgccagcccgcgtgtctccctcgtgcgcggcctcggctacctcaaccactcctactcccccgccaacgccaccatcatcaaccgcggccacgacatcatgctcaagttcgagggcgacgccgggagcgtctccatcggcggtacgccctacttcctccggcagctgcactggcactcgcccactgagcatagcgtcaacggccgtcggtacgacatggagctccacatgttccacgagagcgctcagggcaaagcagccgtcatcggcgtcttctacgagatcggcgcccacgacgccttcctacacaagctggagccatacctggagatgatagcggatcgcaaggacagggaggagaagatgggcatgatggatcccaggggcgccagaggcaaggccagcgtctactaccgctacgtgggctccctcaccaccccaccctgctcagaaggggtcatctggaccatcatcaagagggtccgcactgtgtcgaggcaccagctggagcttctacgggaggccgttcacgacgacatggagaagaacgcgaggccccgtcaggaggtgaacagcagagatatcagcatgtcccggccttttgaccaaaatagacattcatcattagctagggtcgattctctacttaattagtttgttgttacagttattgtatatgcacatggttataccattttttgtagttttttcttcccatattagatgccttgtatccagtcattgaataataaaggaccacgtccagtatatttcc

SEQ ID NO: 64115 - protein, 319 aa, Triticum aestivum
  peptide (1)..(319): Ceres Seq. ID no. 12617392
TLEKLTSSTGRGADTQPSPTQARQDQERDNMRPSRDLRLAVLLLFSAAVLLSAVPAARAQQETEEEEEFSYSLDAENGPAHWGDIKEEWSACGKGNMQSPIDLASPRVSLVRGLGYLNHSYSPANATIINRGHDIMLKFEGDAGSVSIGGTPYFLRQLHWHSPTEHSVNGRRYDMELHMFHESAQGKAAVIGVFYEIGAHDAFLHKLEPYLEMIADRKDREEKMGMMDPRGARGKASVYYRYVGSLTTPPCSEGVIWTIIKRVRTVSRHQLELLREAVHDDMEKNARPRQEVNSRDISMSRPFDQNRHSSLARVDSLLN

SEQ ID NO: 64116 - protein, 289 aa, Triticum aestivum
  peptide (1)..(289): Ceres Seq. ID no. 12617393
MRPSRDLRLAVLLLFSAAVLLSAVPAARAQQETEEEEEFSYSLDAENGPAHWGDIKEEWSACGKGNMQSPIDLASPRVSLVRGLGYLNHSYSPANATIINRGHDIMLKFEGDAGSVSIGGTPYFLRQLHWHSPTEHSVNGRRYDMELHMFHESAQGKAAVIGVFYEIGAHDAFLHKLEPYLEMIADRKDREEKMGMMDPRGARGKASVYYRYVGSLTTPPCSEGVIWTIIKRVRTVSRHQLELLREAVHDDMEKNARPRQEVNSRDISMSRPFDQNRHSSLARVDSLLN

SEQ ID NO: 64117 - protein, 223 aa, Triticum aestivum
  peptide (1)..(223): Ceres Seq. ID no. 12617394
MQSPIDLASPRVSLVRGLGYLNHSYSPANATIINRGHDIMLKFEGDAGSVSIGGTPYFLRQLHWHSPTEHSVNGRRYDMELHMFHESAQGKAAVIGVFYEIGAHDAFLHKLEPYLEMIADRKDREEKMGMMDPRGARGKASVYYRYVGSLTTPPCSEGVIWTIIKRVRTVSRHQLELLREAVHDDMEKNARPRQEVNSRDISMSRPFDQNRHSSLARVDSLLN

SEQ ID NO: 64118 - DNA, 1208 bp, Triticum aestivum
  misc_feature (1)..(1208): Ceres Seq. ID no. 13597234
gccgaaaacacaccgtcaaaacgttttgtattcgatttcgtgcccctttcgcgtgcgtacgagcgagaccttctcccccttccccttccctgccggtggcagcgaccgaggcagccgtcggagcggacggggcgcgcgtcagcgagtttgcccggatcccccgaagcgcgcgtggttccggcgggccatgggcacgccggagttccctgacctggggcggcactgcagcgtcggcgactgccaccagatcgatttcctccccttcacctgcgaccgatgcgacttcgtcttttgccttcagcaccgaagttatacatcacataaatgtccaaaggctaataacaaggatgtcactgtcgtcatctgcccattatgtgctaaaggagttcgcctgaatccaaatgaagatgcaaacatcacctgggagtctcatgttaatactgattgcgatccatcaaattaccagagagcaacaaagaaaaagaaatgcccagttcctgggtgcagagaacagctgacattttcaaacacaatcatgtgcaaagattgtagcaaagagcactgcctcaagcacagatttggtcctgatcacaagtgcccgggcccaagaaaaccagagcctaccttcccctttgccaacatgctaagaagaagtcagaaagttgagccacgcgcaaacagcagtggcagtggttcttcctggtggagctccagccttttgaatgcagcatcaagtttcagatcatcggcagaagcaggaatgcagaaactgagcattgccaccagcgaagccgtccagaaggctaaggatggggtcaccccgagcagcagtggtggtggcctcgtggagcaatgtgttcagtgtccagcaaggttttccactgtgggggccctaatcgagcacgccgagaaatcccatgggaacaactcgcgaccgagccgtggcaaagtgacgattgatgcttgccccaaatgtagcaagggatttcaagatccggtgttactagtggagcatgttgagagggaacatggaggaacttcaaaagcataaacctgcccgtgagtcatttctcatgagtatgtctatgttatatgcctgattgctgtgtaatttattcctcatttactcgatttgattgtactctagtgagctctgggctcgaattgtgcacatgaaagaaagtcttatctcaagcctgtttaaacac

SEQ ID NO: 64119 - protein, 349 aa, Triticum aestivum
  peptide (1)..(349): Ceres Seq. ID no. 13597235
PKTHRQNVLYSISCPFRVRTSETFSPFPFPAGGSDRGSRRSGRGARQRVCPDPPKRAWFRRAMGTPEFPDLGRHCSVGDCHQIDFLPFTCDRCDFVFCLQHRSYTSHKCPKANNKDVTVVICPLCAKGVRLNPNEDANITWESHVNTDCDPSNYQRATKKKKCPVPGCREQLTFSNTIMCKDCSKEHCLKHRFGPDHKCPGPRKPEPTFPFANMLRRSQKVEPRANSSGSGSSWWSSSLLNAASSFRSSAEAGMQKLSIATSEAVQKAKDGVTPSSSGGGLVEQCVQCPARFSTVGALIEHAEKSHGNNSRPSRGKVTIDACPKCSKGFQDPVLLVEHVEREHGGTSKA

SEQ ID NO: 64120 - protein, 287 aa, Triticum aestivum
  peptide (1)..(287): Ceres Seq. ID no. 13597236
MGTPEFPDLGRHCSVGDCHQIDFLPFTCDRCDFVFCLQHRSYTSHKCPKANNKDVTVVICPLCAKGVRLNPNEDANITWESHVNTDCDPSNYQRATKKKKCPVPGCREQLTFSNTIMCKDCSKEHCLKHRFGPDHKCPGPRKPEPTFPFANMLRRSQKVEPRANSSGSGSSWWSSSLLNAASSFRSSAEAGMQKLSIATSEAVQKAKDGVTPSSSGGGLVEQCVQCPARFSTVGALIEHAEKSHGNNSRPSRGKVTIDACPKCSKGFQDPVLLVEHVEREHGGTSKA

SEQ ID NO: 64121 - DNA, 1577 bp, Triticum aestivum
  misc_feature (1)..(1577): Ceres Seq. ID no. 13597454
acaaaaagcaagctctatatccagctgactagccacaagtacgacacacatactgcagtgttagcgctacacacacgggcaccagagttatggggaggcaggtcgccgccctgtgcgggcttctcgtcgtgctgctccggctcacgtccggcgtcaatgcacagacggagatcttgttccaggggttcaactgggactcgtggagcaagcaggggggctggtacaacatgctcaaggcccaggttggcgacatcgccggcgccggggtcactcacgtctggctgcccccacctacacactccgtttcatctcaaggatacatgccgggccggctctacgacctggacgcgtccaagtacggcacggcggtggagctcaggtcgctcatcgcggccttcggtgccaagggcatcaagtgcgtcgccgacatcgtcatcaaccaccgctgcgccgaggacaaggacgggcgcggcatctactgcatcttcaagggcggaggacccgagggcctcctggactggggtccgggcatgatctgcagcgacgacaccaagttctccgacggcacgggctaccgtgataccggcgcggacttcgccgccgcgcccgacatcgaccacctcaacccgcgcgtccagaaggagctctccgactggctcaactggctcaagtccgacctcggcttcgacggctggcgcctcgacttcgccaagggctactcggccgacgtcgccaggacgtacgtgcagaacacgagccccggcttcgtcgtcgcggaaatatggaactccctgagctacgacggcgacgggaagcccgccgtcaaccaggacggggagcggcaggagctggtgaactgggcgaaggcggtcggcggccctgccatggcgttcgacttcacgaccaagggcatcctgcagtcggcggtgcagggcgagctgtggaggatgcgggacaaggagggcaacgctcccgggatgatcggcctgttgccggagaaggcggtcacgttcgtggacaaccacgacacgggctcgtcgcagaagaaatggccgttcccggccgacaaggtcatgatgggctacgcctacatcctcacccaccctggagtcccatgcatcttctacgatcacgtgttcgactggaacctgaagcaagagatcaacgcgctggcggcggtgaggaaccgcaacgggatcaacgccgggagcaagctgcgcatcctggcggcggagagcgacatgtacgtggcgacggttgacgagaaagttatcgtcaagctcggaccgaggttcgacgctggcagcgtcatcccgtcggacttccacgtcgtggctcacggcaataactactgcgtctgggagaagagcggccttagggtgccggccgggcggcgctagctacctagtagacgttagcaacttcgcaccggcggccagaccgttgtactcctacaagaaatgtttgttccagttcgtcgtagactaggcaataaagtttgtaccaccaccgctctccttccaaccttgcggaaggagcgtgagctatcaaatatattattaattttacgcgtttgt

SEQ ID NO: 64122 - protein, 436 aa, Triticum aestivum
  peptide (1)..(436): Ceres Seq. ID no. 13597455
MGRQVAALCGLLVVLLRLTSGVNAQTEILFQGFNWDSWSKQGGWYNMLKAQVGDIAGAGVTHVWLPPPTHSVSSQGYMPGRLYDLDASKYGTAVELRSLIAAFGAKGIKCVADIVINHRCAEDKDGRGIYCIFKGGGPEGLLDWGPGMICSDDTKFSDGTGYRDTGADFAAAPDIDHLNPRVQKELSDWLNWLKSDLGFDGWRLDFAKGYSADVARTYVQNTSPGFVVAEIWNSLSYDGDGKPAVNQDGERQELVNWAKAVGGPAMAFDFTTKGILQSAVQGELWRMRDKEGNAPGMIGLLPEKAVTFVDNHDTGSSQKKWPFPADKVMMGYAYILTHPGVPCIFYDHVFDWNLKQEINALAAVRNRNGINAGSKLRILAAESDMYVATVDEKVIVKLGPRFDAGSVIPSDFHVVAHGNNYCVWEKSGLRVPAGRR

SEQ ID NO: 64123 - protein, 390 aa, Triticum aestivum
  peptide (1)..(390): Ceres Seq. ID no. 13597456
MLKAQVGDIAGAGVTHVWLPPPTHSVSSQGYMPGRLYDLDASKYGTAVELRSLIAAFGAKGIKCVADIVINHRCAEDKDGRGIYCIFKGGGPEGLLDWGPGMICSDDTKFSDGTGYRDTGADFAAAPDIDHLNPRVQKELSDWLNWLKSDLGFDGWRLDFAKGYSADVARTYVQNTSPGFVVAEIWNSLSYDGDGKPAVNQDGERQELVNWAKAVGGPAMAFDFTTKGILQSAVQGELWRMRDKEGNAPGMIGLLPEKAVTFVDNHDTGSSQKKWPFPADKVMMGYAYILTHPGVPCIFYDHVFDWNLKQEINALAAVRNRNGINAGSKLRILAAESDMYVATVDEKVIVKLGPRFDAGSVIPSDFHVVAHGNNYCVWEKSGLRVPAGRR

SEQ ID NO: 64124 - protein, 359 aa, Triticum aestivum
  peptide (1)..(359): Ceres Seq. ID no. 13597457
MPGRLYDLDASKYGTAVELRSLIAAFGAKGIKCVADIVINHRCAEDKDGRGIYCIFKGGGPEGLLDWGPGMICSDDTKFSDGTGYRDTGADFAAAPDIDHLNPRVQKELSDWLNWLKSDLGFDGWRLDFAKGYSADVARTYVQNTSPGFVVAEIWNSLSYDGDGKPAVNQDGERQELVNWAKAVGGPAMAFDFTTKGILQSAVQGELWRMRDKEGNAPGMIGLLPEKAVTFVDNHDTGSSQKKWPFPADKVMMGYAYILTHPGVPCIFYDHVFDWNLKQEINALAAVRNRNGINAGSKLRILAAESDMYVATVDEKVIVKLGPRFDAGSVIPSDFHVVAHGNNYCVWEKSGLRVPAGRR

SEQ ID NO: 64125 - DNA, 1696 bp, Triticum aestivum
  misc_feature (1)..(1696): Ceres Seq. ID no. 13597411
aaaagacaattcttttcttcctcttctgttccggcaggggcggcggggatggcgatggcgtcgcgcgcgcggacgcggtggtcggcgctggcggcgagcacgctgatccagtgcttcgcgggcggcagctactgcttcggcgtctactcgccggcgctcaaggcgtcgcagggctacgaccagtccgcgctcgacgccgtcgccttcttcaaggacgtcggcgctaacgtcggggtcctctccggcctcctcgccgcgtgggctccctctgggggccggaggcgaccctggctcgtcctcctcaccggcgccgcgctctgcgccgccgggtacctccccatgtggctcgccgtcgccggggtcgtccccgccccgctcccgctcgtctgcctctacatgctgctcgccgcgcaggcgcagaccttcatgaacacggccgatgtcgtcaccgccgtagagaacttccccgaccgccgcggcaccgtcatcggcatcatgaaggggtttctaggcttgagtggggcgatactggtccaagtacagcggactctccgtattgatcccggcagtttcatacttatgctggcaatactacccacagccatcgcgttgctgctcatgtactttgtcgacgtccacagcgctcatgagcggtacaacaagaagttcctcgatgctttctctctcatggccgttactgttgctgggttcctgatggttgtcataatctgcgaccaagtattcgtgataagttcagccgggcagagcgtttgctttgggatactccttctattgatcctgtctcccgcagctattgttgtaagggttcagaggacggaaccgaagcagcaagaagaaccaacgccggaagaacaaactggtttacttcttcatgaggagactgcgcagcaggattcggagaacgccagctctagcatggcgctcgtgggatctaacagtcaggacatgtcgtcggacaaagcagagaacctgaacgtggtgcaggccatgtgcaaacttgacttctggctgctcttcgttgcgatggcctgcgggatggggtcggggctggccaccgtgaacaacatcagccagatcgggggctcccttggctacacgagcagggagaccagcactctggtgtcgctatggagcatctggaacttctcagggaggttcggcgcaggctacgtctctgatcacttcctccggtcgcgaggagtcggcaggcctttcttcatagccgcgacgcttctggtcatgggcgtaggccatgccatcatctcctccggtttccacgcgtcgctctacgtcggctccgtccttgtaggactgtgctacgggtctcagtgggctttgatgccgagcataacttcagagatcttcgggctaaaccatttcggcaccatattcaacacggtggccgtcgcgagccctgttggctcttacatcctctcggtgtgcgtggtcgggttcatctatgacaaggagtcaccgcaaggtgagcttgcctgcgccggtaagcactgctttgcgctctccttcatgatcatggcatgtgtctgcgtcttcgggtctgctgttgcttttgtattgtttgtcagaacaaggaagttttataggcgggttatatacgcccgactgctctcttttgtagataaatgaagaaatgcatatatgcaaacgattctcagtc

SEQ ID NO: 64126 - protein, 554 aa, Triticum aestivum
  peptide (1)..(554): Ceres Seq. ID no. 13597412
KRQFFSSSSVPAGAAGMAMASRARTRWSALAASTLIQCFAGGSYCFGVYSPALKASQGYDQSALDAVAFFKDVGANVGVLSGLLAAWAPSGGRRRPWLVLLTGAALCAAGYLPMWLAVAGVVPAPLPLVCLYMLLAAQAQTFMNTADVVTAVENFPDRRGTVIGIMKGFLGLSGAILVQVQRTLRIDPGSFILMLAILPTAIALLLMYFVDVHSAHERYNKKFLDAFSLMAVTVAGFLMVVIICDQVFVISSAGQSVCFGILLLLILSPAAIVVRVQRTEPKQQEEPTPEEQTGLLLHEETAQQDSENASSSMALVGSNSQDMSSDKAENLNVVQAMCKLDFWLLFVAMACGMGSGLATVNNISQIGGSLGYTSRETSTLVSLWSIWNFSGRFGAGYVSDHFLRSRGVGRPFFIAATLLVMGVGHAIISSGFHASLYVGSVLVGLCYGSQWALMPSITSEIFGLNHFGTIFNTVAVASPVGSYILSVCVVGFIYDKESPQGELACAGKHCFALSFMIMACVCVFGSAVAFVLFVRTRKFYRRVIYARLLSFVDK

SEQ ID NO: 64127 - protein, 538 aa, Triticum aestivum
  peptide (1)..(538): Ceres Seq. ID no. 13597413
MAMASRARTRWSALAASTLIQCFAGGSYCFGVYSPALKASQGYDQSALDAVAFFKDVGANVGVLSGLLAAWAPSGGRRRPWLVLLTGAALCAAGYLPMWLAVAGVVPAPLPLVCLYMLLAAQAQTFMNTADVVTAVENFPDRRGTVIGIMKGFLGLSGAILVQVQRTLRIDPGSFILMLAILPTAIALLLMYFVDVHSAHERYNKKFLDAFSLMAVTVAGFLMVVIICDQVFVISSAGQSVCFGILLLLILSPAAIVVRVQRTEPKQQEEPTPEEQTGLLLHEETAQQDSENASSSMALVGSNSQDMSSDKAENLNVVQAMCKLDFWLLFVAMACGMGSGLATVNNISQIGGSLGYTSRETSTLVSLWSIWNFSGRFGAGYVSDHFLRSRGVGRPFFIAATLLVMGVGHAIISSGFHASLYVGSVLVGLCYGSQWALMPSITSEIFGLNHFGTIFNTVAVASPVGSYILSVCVVGFIYDKESPQGELACAGKHCFALSFMIMACVCVFGSAVAFVLFVRTRKFYRRVIYARLLSFVDK

SEQ ID NO: 64128 - protein, 536 aa, Triticum aestivum
  peptide (1)..(536): Ceres Seq. ID no. 13597414
MASRARTRWSALAASTLIQCFAGGSYCFGVYSPALKASQGYDQSALDAVAFFKDVGANVGVLSGLLAAWAPSGGRRRPWLVLLTGAALCAAGYLPMWLAVAGVVPAPLPLVCLYMLLAAQAQTFMNTADVVTAVENFPDRRGTVIGIMKGFLGLSGAILVQVQRTLRIDPGSFILMLAILPTAIALLLMYFVDVHSAHERYNKKFLDAFSLMAVTVAGFLMVVIICDQVFVISSAGQSVCFGILLLLILSPAAIVVRVQRTEPKQQEEPTPEEQTGLLLHEETAQQDSENASSSMALVGSNSQDMSSDKAENLNVVQAMCKLDFWLLFVAMACGMGSGLATVNNISQIGGSLGYTSRETSTLVSLWSIWNFSGRFGAGYVSDHFLRSRGVGRPFFIAATLLVMGVGHAIISSGFHASLYVGSVLVGLCYGSQWALMPSITSEIFGLNHFGTIFNTVAVASPVGSYILSVCVVGFIYDKESPQGELACAGKHCFALSFMIMACVCVFGSAVAFVLFVRTRKFYRRVIYARLLSFVDK

SEQ ID NO: 64129 - DNA, 1403 bp, Triticum aestivum
  misc_feature (1)..(1403): Ceres Seq. ID no. 12617323
tagaacatcctaattgaaaacccaaatcaccgttctccccccaaatcacatcccactctcagatctcggaatggccgactcctccgcgccgcactccaacggcggcgccggcgccgaggcggaggcggtgccccgttccctggcgccgccgcggagggtggcgctggtgacgggcatcacggggcaggacgggagctacctgactgagctgctcctgtccaaggggtacgaggtgcacggcctcatccgccgctcctccaacttcaacacccagcgcctcgaccacatctaccacgacccgcacgcgacgccctccgccgcgcgcccgccgatgcgcctccactacgccgacctctccgactcgtcctccctccgccgcgcgctcgaccacgtgctccccgacgaggtctacaacctcgccgcccagtcccacgtcgccgtctccttcgaggtgcccgactacaccgccgacgtcaccgccacgggcgcgctccgcctgctcgaggccgtccgcctctcctcgaagcccatgcgctactaccaggcggggtcctcggagatgttcggctccacgccgccgccgcagagcgaggccacccccttccacccgcgctccccctacgccgccgccaaggtcgccgcgcactggtacaccgtcaactaccgcgaggcgtacggcctcttcgcctgcaacggcgtgctcttcaaccacgagtccccccggcgcggcgagaacttcgtcacccgcaagatcacccgcgccatcggccgcatcaaggtcgggctccagaccaaggtcttcctcggcaacctctccgccgccagggattggggcttcgccggggattatgttgaggccatgtggctcatgctccagcaggacaagcctgatgattatgttgtcgccactgaagagtgccacaccgtggaggagttcttgcaggctgcttttgggtatgccggcctcaactggaaggatcatgtggtcattgacaagaagtactttcgcccttcggaggtggactgcctgcagggagattcatccaagtcaaggagagtgcttgggtggaagcccaaggttggcttccagcagctagttgagatgatggttgataacgacatcgagcttgccaagaaggagaaggtccttgtggatgctgggtaccgcgaccccaagcagcagccatagagttggaatcaatagtttggttaaaatggagcttggtttggatttcccacccttagaagctgatacagtgtggccattgcagtagaggttggctgaagttattgttgtttgtctcagggtagaaataaggaggtttaaagtttgatcctacaagactgttgattaagttactatgtcatgtgcttttctcatatgaatgaatcagacaatttat

SEQ ID NO: 64130 - protein, 372 aa, Triticum aestivum
  peptide (1)..(372): Ceres Seq. ID no. 12617324
MADSSAPHSNGGAGAEAEAVPRSLAPPRRVALVTGITGQDGSYLTELLLSKGYEVHGLIRRSSNFNTQRLDHIYHDPHATPSAARPPMRLHYADLSDSSSLRRALDHVLPDEVYNLAAQSHVAVSFEVPDYTADVTATGALRLLEAVRLSSKPMRYYQAGSSEMFGSTPPPQSEATPFHPRSPYAAAKVAAHWYTVNYREAYGLFACNGVLFNHESPRRGENFVTRKITRAIGRIKVGLQTKVFLGNLSAARDWGFAGDYVEAMWLMLQQDKPDDYVVATEECHTVEEFLQAAFGYAGLNWKDHVVIDKKYFRPSEVDCLQGDSSKSRRVLGWKPKVGFQQLVEMMVDNDIELAKKEKVLVDAGYRDPKQQP

SEQ ID NO: 64131 - protein, 285 aa, Triticum aestivum
  peptide (1)..(285): Ceres Seq. ID no. 12617325
MRLHYADLSDSSSLRRALDHVLPDEVYNLAAQSHVAVSFEVPDYTADVTATGALRLLEAVRLSSKPMRYYQAGSSEMFGSTPPPQSEATPFHPRSPYAAAKVAAHWYTVNYREAYGLFACNGVLFNHESPRRGENFVTRKITRAIGRIKVGLQTKVFLGNLSAARDWGFAGDYVEAMWLMLQQDKPDDYVVATEECHTVEEFLQAAFGYAGLNWKDHVVIDKKYFRPSEVDCLQGDSSKSRRVLGWKPKVGFQQLVEMMVDNDIELAKKEKVLVDAGYRDPKQQP

SEQ ID NO: 64132 - protein, 219 aa, Triticum aestivum
  peptide (1)..(219): Ceres Seq. ID no. 12617326
MRYYQAGSSEMFGSTPPPQSEATPFHPRSPYAAAKVAAHWYTVNYREAYGLFACNGVLFNHESPRRGENFVTRKITRAIGRIKVGLQTKVFLGNLSAARDWGFAGDYVEAMWLMLQQDKPDDYVVATEECHTVEEFLQAAFGYAGLNWKDHVVIDKKYFRPSEVDCLQGDSSKSRRVLGWKPKVGFQQLVEMMVDNDIELAKKEKVLVDAGYRDPKQQP

SEQ ID NO: 64133 - DNA, 907 bp, Triticum aestivum
  misc_feature (1)..(907): Ceres Seq. ID no. 15178576
gaggtgtgaacgatgggctctctgtcggactcgcaggcgaatggcgaccgtcagccgccgccggcggaggcggaggatgctggggcgcaagtcgaggagggagatactggcgagaagatggagggcgtcgcgtccatagcgctgctgccctctggcgccatctccggccacttcatccgccttccggactccgcctgctacggcctccagggcaccccgataccatgcgagagggaatgtagccgaggagatgattaccgccttataaagctctccatcattaattttaagaggaagacagagaaggtggttgtggtggaatgcagggggcatgatgctgctcgattacaaaacattgaccatttgcatggatgggaagatgacgttgttggattggttcaaaagaaacatgggaataagaaagtcttggtctctttcgaatgcgagacgctgaaggccgataaagccgctgaagaacatattagcaagtatatgccaaatctttgcggactggacgcagttgtaaacacagggaagatgagcatctctggcatcaacctcgacgaggacgatgaaccaagcggtaacagctgagagcggaaacactgtgtcagtgtgttagctgcgagccgtcaatgccgtcgacaaaggaggaccacgtgtcgctgttacaacggcatgagttttatgcgacaaatcagcgcttctgtttctgcacttgaaacggtgcgctttgtagcagttctgtttctgcacttgaaacggtgcgctttgtagcaagtctcttaacggaatgtgtgtttgctgttgcttcatctggcatgatcctgatgagggaattatacacccttggtcttggacttgggggtttggtgggccagtcggcggcacaaaaaaaaaaaaaaaa

SEQ ID NO: 64134 - protein, 193 aa, Triticum aestivum
  peptide (1)..(193): Ceres Seq. ID no. 15178577
MGSLSDSQANGDRQPPPAEAEDAGAQVEEGDTGEKMEGVASIALLPSGAISGHFIRLPDSACYGLQGTPIPCERECSRGDDYRLIKLSIINFKRKTEKVVVVECRGHDAARLQNIDHLHGWEDDVVGLVQKKHGNKKVLVSFECETLKADKAAEEHISKYMPNLCGLDAVVNTGKMSISGINLDEDDEPSGNS

SEQ ID NO: 64135 - protein, 158 aa, Triticum aestivum
  peptide (1)..(158): Ceres Seq. ID no. 15178578
MEGVASIALLPSGAISGHFIRLPDSACYGLQGTPIPCERECSRGDDYRLIKLSIINFKRKTEKVVVVECRGHDAARLQNIDHLHGWEDDVVGLVQKKHGNKKVLVSFECETLKADKAAEEHISKYMPNLCGLDAVVNTGKMSISGINLDEDDEPSGNS

SEQ ID NO: 64136 - DNA, 1286 bp, Triticum aestivum
  misc_feature (1)..(1286): Ceres Seq. ID no. 13597237
acacaaactcctctcctcatcgcctctcctcgccccctctgcccttcctcatcttcctcccgttcggttgtggctccgtcttccctcacgattggtgcccgggcgccgccgccatcgccatggacggcctgcacggcgccgacgcctgcttctcccccgggagggccatgtcgccgcaggtccggccccccgccggcccgccggacgtaggcagccactacttggcggagctgttgcaggagcaccagaagctcgtcccgttcacgcaggtgctaccaatctgcagcaagctgttgagcaacgagataatgcgggtgacctgcctgcttaagcaccagcatggcggggactttgagaggctgccgccgatggcgagtccaaaccagatgcatcatcatccgtcgcccccaatgcctaatttctgcggaaatggttttggcccgtggaaccacggggcgcatccagagagggtaggttttcctcaaggacctgtgggttggcaaggagcaccacaaagcccctcttcatacattgtcaagaagattttgcggttggagataccaacagatacttaccctaatttcaattttattggccgtcttcttgggccaagaggaaactcgttgaagaggattgaagcctctacgggttgtcgtgtttttatcagagggaagggctcaattaaagatcctgggaaggaggaactgctgaagggaagacctggttacgaacacttggatgatcccctgcatatcttgattgaagcagagttacctgccaatgtcattgatgcaagactctcaaaagcacaagagatcctagaagagttgttgaaaccagtggatgaatcacaagactactacaagaggcagcaactccgtgagcttgccatgctgaactcaccgctccgagaggagagccctcgtctaagcccgcatccaagtccgcacccaagcccgcatcaaggcggcgcttcacccttcagtaacggtgggatgaaacgaagcaaacaatgactgcagaggcctgctcctcccaactttgacccttccagaaacctgctctcaatcggtgccctcacaacctaatttttcatgagcaagctttcatgatggtgttggcatccgtgcgaaacctgtgttactagtagaattttgatgagtctcccttgtgacattagcctgtgatgactgactgagaatgatctatgatagcgaatcctccgcctttataattagaacatttgatttatttgttgttggtaatcatcagatatggcactgtgc

SEQ ID NO: 64137 - protein, 337 aa, Triticum aestivum
  peptide (1)..(337): Ceres Seq. ID no. 13597238
TNSSPHRLSSPPLPFLIFLPFGCGSVFPHDWCPGAAAIAMDGLHGADACFSPGRAMSPQVRPPAGPPDVGSHYLAELLQEHQKLVPFTQVLPICSKLLSNEIMRVTCLLKHQHGGDFERLPPMASPNQMHHHPSPPMPNFCGNGFGPWNHGAHPERVGFPQGPVGWQGAPQSPSSYIVKKILRLEIPTDTYPNFNFIGRLLGPRGNSLKRIEASTGCRVFIRGKGSIKDPGKEELLKGRPGYEHLDDPLHILIEAELPANVIDARLSKAQEILEELLKPVDESQDYYKRQQLRELAMLNSPLREESPRLSPHPSPHPSPHQGGASPFSNGGMKRSKQ

SEQ ID NO: 64138 - protein, 298 aa, Triticum aestivum
  peptide (1)..(298): Ceres Seq. ID no. 13597239
MDGLHGADACFSPGRAMSPQVRPPAGPPDVGSHYLAELLQEHQKLVPFTQVLPICSKLLSNEIMRVTCLLKHQHGGDFERLPPMASPNQMHHHPSPPMPNFCGNGFGPWNHGAHPERVGFPQGPVGWQGAPQSPSSYIVKKILRLEIPTDTYPNFNFIGRLLGPRGNSLKRIEASTGCRVFIRGKGSIKDPGKEELLKGRPGYEHLDDPLHILIEAELPANVIDARLSKAQEILEELLKPVDESQDYYKRQQLRELAMLNSPLREESPRLSPHPSPHPSPHQGGASPFSNGGMKRSKQ

SEQ ID NO: 64139 - protein, 282 aa, Triticum aestivum
  peptide (1)..(282): Ceres Seq. ID no. 13597240
MSPQVRPPAGPPDVGSHYLAELLQEHQKLVPFTQVLPICSKLLSNEIMRVTCLLKHQHGGDFERLPPMASPNQMHHHPSPPMPNFCGNGFGPWNHGAHPERVGFPQGPVGWQGAPQSPSSYIVKKILRLEIPTDTYPNFNFIGRLLGPRGNSLKRIEASTGCRVFIRGKGSIKDPGKEELLKGRPGYEHLDDPLHILIEAELPANVIDARLSKAQEILEELLKPVDESQDYYKRQQLRELAMLNSPLREESPRLSPHPSPHPSPHQGGASPFSNGGMKRSKQ

SEQ ID NO: 64140 - DNA, 1488 bp, Triticum aestivum
  misc_feature (1)..(1488): Ceres Seq. ID no. 13591224
cagtcgcgagcccccgcttccattctaatccgccccctcccgagacgccaaagccccaaacccctcgccctcccaaaccctaactctaaaacctccgccctcccgccgccgccgccgcccgattcccctccccaggccccgcatcccccgtccggcttgaacgatgtcgtccgacgaggaggtcagggaggagaaggagctcgacctctcctccaacgaggtcgtcaccaagtacaagaccgccgccgagatcatcaacaaggctctgaagttggtattgttggagtgcaagccgaaagccaagattgttgacatttgtgagaagggtgacaatttcataacagagcaaactgggaatgtctacaagaacgcgaagaggaagattgaaaggggcattgctttcccgacatgtgtatctgtgaacaacacagtctgtcatttctccccactggcaactgacgattctgtactcgaagaaaatgacatggtgaagatcgatatggcttgccatattgatggttttattgctgtggtggctcatacacatgtcatcaaaggtgggccggttactggaagagcagctaatgttcttgctgctgcaaacacagcagcagaagttgcaatgaggcttgttagacctggcaagaagaataaggatgtcactgaagcaattcagaaagttgctgctgcttatgattgtaaaattgttgaaggagttcttagccatcagctgaaacaattcgtcatcgatggtaacaaagtggtacttagtgtttcaaatgctgatacaaaggtggatgatgctgaatttgaagaaaatgaagtgtatgcaattgatattgtcaccagcactggcgagggaaagccgaagctattggatgagaagcagaccactatttacaagagagctgtagacaagaactatcacttgaagatgaaggcatcaaggttcatcttcagtgagattagccagaagttcccaatcatgccattcactgctagggcgctggaggagaagcgtgcacgcttaggtttggtagaatgcatgaatcatgagctgttgcagccataccctgttctacatgagaagcaaggtgacctggttgcccacatcaagttcaccgtgttgttgatgccaaatgggtctgacaagataacttcacatccactacagcaattggagccctcaaaatccatcgagggcgatgctgagatcaaggcttggctggctttgggcacaaagtcaaagaagaagggtggtggcaagaaaaagaaaggcaagaaaggagatgcagcagaagtagcagagcccatggaggtttctaaggacgcaccaagccaggaataattctcattttttttgaattgcttccgttacgtttgtacctgctcctttgctgcatctgattgttttatattacattcagctgtggggatttgagtacctttttttgaagtgtctaatgaaaatggttgatcctggcgcac

SEQ ID NO: 64141 - protein, 394 aa, Triticum aestivum
  peptide (1)..(394): Ceres Seq. ID no. 13591225
MSSDEEVREEKELDLSSNEVVTKYKTAAEIINKALKLVLLECKPKAKIVDICEKGDNFITEQTGNVYKNAKRKIERGIAFPTCVSVNNTVCHFSPLATDDSVLEENDMVKIDMACHIDGFIAVVAHTHVIKGGPVTGRAANVLAAANTAAEVAMRLVRPGKKNKDVTEAIQKVAAAYDCKIVEGVLSHQLKQFVIDGNKVVLSVSNADTKVDDAEFEENEVYAIDIVTSTGEGKPKLLDEKQTTIYKRAVDKNYHLKMKASRFIFSEISQKFPIMPFTARALEEKRARLGLVECMNHELLQPYPVLHEKQGDLVAHIKFTVLLMPNGSDKITSHPLQQLEPSKSIEGDAEIKAWLALGTKSKKKGGGKKKKGKKGDAAEVAEPMEVSKDAPSQE

SEQ ID NO: 64142 - protein, 287 aa, Triticum aestivum
  peptide (1)..(287): Ceres Seq. ID no. 13591226
MVKIDMACHIDGFIAVVAHTHVIKGGPVTGRAANVLAAANTAAEVAMRLVRPGKKNKDVTEAIQKVAAAYDCKIVEGVLSHQLKQFVIDGNKVVLSVSNADTKVDDAEFEENEVYAIDIVTSTGEGKPKLLDEKQTTIYKRAVDKNYHLKMKASRFIFSEISQKFPIMPFTARALEEKRARLGLVECMNHELLQPYPVLHEKQGDLVAHIKFTVLLMPNGSDKITSHPLQQLEPSKSIEGDAEIKAWLALGTKSKKKGGGKKKKGKKGDAAEVAEPMEVSKDAPSQE

SEQ ID NO: 64143 - protein, 282 aa, Triticum aestivum
  peptide (1)..(282): Ceres Seq. ID no. 13591227
MACHIDGFIAVVAHTHVIKGGPVTGRAANVLAAANTAAEVAMRLVRPGKKNKDVTEAIQKVAAAYDCKIVEGVLSHQLKQFVIDGNKVVLSVSNADTKVDDAEFEENEVYAIDIVTSTGEGKPKLLDEKQTTIYKRAVDKNYHLKMKASRFIFSEISQKFPIMPFTARALEEKRARLGLVECMNHELLQPYPVLHEKQGDLVAHIKFTVLLMPNGSDKITSHPLQQLEPSKSIEGDAEIKAWLALGTKSKKKGGGKKKKGKKGDAAEVAEPMEVSKDAPSQE

SEQ ID NO: 64144 - DNA, 1209 bp, Triticum aestivum
  misc_feature (1)..(1209): Ceres Seq. ID no. 12625706
accctcgtccacactcttctcttgaaggccatcaatggcggccaagactaaggcaccagctggtactccggtcggccccgtccctttcgcggacgtcgagaccgacccaggcttggtctccccagtgccggagcagctcccggaagagcacgccgccctgccgagcgcgtccgcgttcaacggccggatgaacatccgttgctaccagggcttctggctgccggattacttcgccgccgcggccgtcgccctgcagcgccgcttcgagccctgccgcaacgacgtaatcgtcgcaagctttcccaagtccggcaccacgtggcttaacgccctggcgttcgccaccatggcacggcgggcttatccggccgccgacgccgggcatccgctgctacgcctcaacccgcaccagtgcatccctttcctggagaacctcttccggagccgcgcggaggccgccaagctcgaggcgctgccgtccccgcgcctaatgaacacgcacatgccgctcggcatgataatgccgggcgccggcgggtgcaaggtcgtctacgtgtgcagggagcccaaggacatggtcgtctcgttgtggcacttcctccagcatgtgcatccagacctggcgctggccgacgtcctcgactccgtgtgcagcggcgcggtgccgtatggacccgtctgggaccacatcctcggctactggcgcgccagcatcgcgaggccagacgccgtgctcttcttgcggtacgaggagctgctgcgcgaccccgccgggaacgtcagggatctggcgcggttcgtcgggctgccgttctccgacgaggaggaggacgccggcgtcgtccaggacatcgtcaagctctgcagcttcggtcacctcaagcccttggaagccaattcgacgggccagctggatcccctcgtcccggtgccgcgcgaggcgctgttcaggaagggcgtggccggcgactgggcgaaccacatgacgccggagatggcgcgacgcctcgacgaaatcgtcgccgacaagttccatgcgaccggcctcacttttcagtgattcgagacgactcccgtcccccatacactatcatgatttctcatgatcaagtaatgtttgtactttcgtaatcactaagcatgaataattagtggagggagtagtagactctgggcgtggctaaaaatcagtaaatttcgtttgaggtc

SEQ ID NO: 64145 - protein, 341 aa, Triticum aestivum
  peptide (1)..(341): Ceres Seq. ID no. 12625707
MAAKTKAPAGTPVGPVPFADVETDPGLVSPVPEQLPEEHAALPSASAFNGRMNIRCYQGFWLPDYFAAAAVALQRRFEPCRNDVIVASFPKSGTTWLNALAFATMARRAYPAADAGHPLLRLNPHQCIPFLENLFRSRAEAAKLEALPSPRLMNTHMPLGMIMPGAGGCKVVYVCREPKDMVVSLWHFLQHVHPDLALADVLDSVCSGAVPYGPVWDHILGYWRASIARPDAVLFLRYEELLRDPAGNVRDLARFVGLPFSDEEEDAGVVQDIVKLCSFGHLKPLEANSTGQLDPLVPVPREALFRKGVAGDWANHMTPEMARRLDEIVADKFHATGLTFQ

SEQ ID NO: 64146 - protein, 290 aa, Triticum aestivum
  peptide (1)..(290): Ceres Seq. ID no. 12625708
MNIRCYQGFWLPDYFAAAAVALQRRFEPCRNDVIVASFPKSGTTWLNALAFATMARRAYPAADAGHPLLRLNPHQCIPFLENLFRSRAEAAKLEALPSPRLMNTHMPLGMIMPGAGGCKVVYVCREPKDMVVSLWHFLQHVHPDLALADVLDSVCSGAVPYGPVWDHILGYWRASIARPDAVLFLRYEELLRDPAGNVRDLARFVGLPFSDEEEDAGVVQDIVKLCSFGHLKPLEANSTGQLDPLVPVPREALFRKGVAGDWANHMTPEMARRLDEIVADKFHATGLTFQ

SEQ ID NO: 64147 - protein, 237 aa, Triticum aestivum
  peptide (1)..(237): Ceres Seq. ID no. 12625709
MARRAYPAADAGHPLLRLNPHQCIPFLENLFRSRAEAAKLEALPSPRLMNTHMPLGMIMPGAGGCKVVYVCREPKDMVVSLWHFLQHVHPDLALADVLDSVCSGAVPYGPVWDHILGYWRASIARPDAVLFLRYEELLRDPAGNVRDLARFVGLPFSDEEEDAGVVQDIVKLCSFGHLKPLEANSTGQLDPLVPVPREALFRKGVAGDWANHMTPEMARRLDEIVADKFHATGLTFQ

SEQ ID NO: 64148 - DNA, 953 bp, Triticum aestivum
  misc_feature (1)..(953): Ceres Seq. ID no. 13655610
catataagcatgcgacgaaaccccatcgtccattcttccctgccgccgcctcctcccttcttcagccgaagcgcccgcacgcctcgacccaagggatctcaatggcgccgacctccaagatggcgctgggcatcaagcgcgcgtcgcggtcgcacacctaccaccgccgcgggctgtgggccatcaaggccaagcacggcggagccttccccaaggccgagaagccagccgccgtcgccgagcccaagttctaccccgccgacgacgtcaagccccgcaccgccagcacccgcaagcctaagcccaccaagctcaggtcgaccatcacgcccggtacggtgctgatcctgctcgctgggaggtacatggggaagcgcgtggtgttcctcaagcagctcaagtctggcctgctcctcatctctgggcctttcaagatcaatggtgtgccagttcgccgggtgaaccaggcttatgtcattgccacatccacaaaggttgacatctctggtgttaacgtggagaagtttgatgacaagtacttcgccagggacaagaagaccagggcaaagaagactgaaggggagctgtttgagactgagaaggagaccaccaagaatctgccagaatttaaaaaagatgatcagaaggccatcgatgctgagttgatcaaagctattgaggctgtccctgaccttaagaactatcttggtgctcggttctctctcagggatggtgacaagccccatgagatgaccttctaagttgctacaagttcctgagttttggatgtgttttgcctagattgttgctgaaatttgtaccctgttagttgacttcctatgtcagttgaagtgaccgtaagatattatgagaagatcaagagaatccttatctgctttggtggttctttttttacttatgcttaatggaacagtttgtcgtgtgttatttgt

SEQ ID NO: 64149 - protein, 252 aa, Triticum aestivum
  peptide (1)..(252): Ceres Seq. ID no. 13655611
YKHATKPHRPFFPAAASSLLQPKRPHASTQGISMAPTSKMALGIKRASRSHTYHRRGLWAIKAKHGGAFPKAEKPAAVAEPKFYPADDVKPRTASTRKPKPTKLRSTITPGTVLILLAGRYMGKRVVFLKQLKSGLLLISGPFKINGVPVRRVNQAYVIATSTKVDISGVNVEKFDDKYFARDKKTRAKKTEGELFETEKETTKNLPEFKKDDQKAIDAELIKAIEAVPDLKNYLGARFSLRDGDKPHEMTF

SEQ ID NO: 64150 - protein, 219 aa, Triticum aestivum
  peptide (1)..(219): Ceres Seq. ID no. 13655612
MAPTSKMALGIKRASRSHTYHRRGLWAIKAKHGGAFPKAEKPAAVAEPKFYPADDVKPRTASTRKPKPTKLRSTITPGTVLILLAGRYMGKRVVFLKQLKSGLLLISGPFKINGVPVRRVNQAYVIATSTKVDISGVNVEKFDDKYFARDKKTRAKKTEGELFETEKETTKNLPEFKKDDQKAIDAELIKAIEAVPDLKNYLGARFSLRDGDKPHEMTF

SEQ ID NO: 64151 - protein, 213 aa, Triticum aestivum
  peptide (1)..(213): Ceres Seq. ID no. 13655613
MALGIKRASRSHTYHRRGLWAIKAKHGGAFPKAEKPAAVAEPKFYPADDVKPRTASTRKPKPTKLRSTITPGTVLILLAGRYMGKRVVFLKQLKSGLLLISGPFKINGVPVRRVNQAYVIATSTKVDISGVNVEKFDDKYFARDKKTRAKKTEGELFETEKETTKNLPEFKKDDQKAIDAELIKAIEAVPDLKNYLGARFSLRDGDKPHEMTF

SEQ ID NO: 64152 - DNA, 1498 bp, Triticum aestivum
  misc_feature (1)..(1498): Ceres Seq. ID no. 15169659
cggtttcttctagccccaaagtcaagcagaggaattcctaaaaaaaaaaagtcaagcagaggaggaggagcactgaggcttctagaaacttgaggcagggaggttcggcaggaggcatgtgggggcggcactactggggcgcccggcggccgagcgacggcgccgcgggtgcggaggccggcggcggcgtggtggtgatgttcgcgtggctgtcgagtcaggagcggcacgtgcgcgcgtacgtggacctgtacgcggcccttgggtgggcgtgcctcgtctgccactccgacttcatcaccctgtttatgccggagaaggctgctgtgcttgctgaccgggtgctcacggagctcgttaaggaactgaatattagaccagtacctgttgtgtttgcatccttttcgggaggaccaaaaggttgcacatacaaggttcttcagctgatccagagaaggtgcaaagggcagctgagtttggatgactatcaacttgtacgggactgcgtatgtggacaaatatatgactcgagtcctgtagattttgtgagtgatttaggcacccgctttcttcttcacccaagtgtcctgaagatgcctgaacctccacgtgtcttatcatggatgactagaggcattgcctcgggtctagacactcttttcattggcaagtttgaagcacagcgcaaagaatattgggagacactatactcatcagtgcatgttggcccaatactcatattctgttcagaggatgatgaacttgctccatgttcggccgttcaaaattttggacggcgtctgctggagctgggtggtgatgtgaatttagttaaatggcacagttctccacatgtaggacattacaagcatcacactgaggaataccgagctgcagtgactgagctgctcatgaaggcttcagcgctttacacaagcagaaaacgactcaatgactacagtgtcggcacgagtgaggacagtgacacaccttattcgtctcgcaatctacataagactgctgtaagctccagtgataggctagggagggtttcagttgatccagccaatcatttcttcttaccgagttccatggagtaccatgaaagcaggagtgaagtgctaaaacccgagttgttcaacatgccgagtgttgaaagcgcgaagaaccctgatggcgtgttggggacgatgctctatgatgcatgtgtcccaaagaacgtggaaggctgggacttcaagcttgcatcaatagatggacagcgtatgcattttactgcccgtcagcatggtacttccaatccaacaaaatgtatacgccgctcaagattgtaatgattttgactcaacatctaagtgcattccagcagactgctctatactgccagagtatacttgtttcaggagaatgttattgtgttgaccttttctggaaattttagagtatactgccagagtatactaatgcttttttaaagaaaaaaaaaaaaaaaaaaaag

SEQ ID NO: 64153 - protein, 405 aa, Triticum aestivum
  peptide (1)..(405): Ceres Seq. ID no. 15169660
MWGRHYWGARRPSDGAAGAEAGGGVVVMFAWLSSQERHVRAYVDLYAALGWACLVCHSDFITLFMPEKAAVLADRVLTELVKELNIRPVPVVFASFSGGPKGCTYKVLQLIQRRCKGQLSLDDYQLVRDCVCGQIYDSSPVDFVSDLGTRFLLHPSVLKMPEPPRVLSWMTRGIASGLDTLFIGKFEAQRKEYWETLYSSVHVGPILIFCSEDDELAPCSAVQNFGRRLLELGGDVNLVKWHSSPHVGHYKHHTEEYRAAVTELLMKASALYTSRKRLNDYSVGTSEDSDTPYSSRNLHKTAVSSSDRLGRVSVDPANHFFLPSSMEYHESRSEVLKPELFNMPSVESAKNPDGVLGTMLYDACVPKNVEGWDFKLASIDGQRMHFTARQHGTSNPTKCIRRSRL

SEQ ID NO: 64154 - protein, 378 aa, Triticum aestivum
  peptide (1)..(378): Ceres Seq. ID no. 15169661
MFAWLSSQERHVRAYVDLYAALGWACLVCHSDFITLFMPEKAAVLADRVLTELVKELNIRPVPVVFASFSGGPKGCTYKVLQLIQRRCKGQLSLDDYQLVRDCVCGQIYDSSPVDFVSDLGTRFLLHPSVLKMPEPPRVLSWMTRGIASGLDTLFIGKFEAQRKEYWETLYSSVHVGPILIFCSEDDELAPCSAVQNFGRRLLELGGDVNLVKWHSSPHVGHYKHHTEEYRAAVTELLMKASALYTSRKRLNDYSVGTSEDSDTPYSSRNLHKTAVSSSDRLGRVSVDPANHFFLPSSMEYHESRSEVLKPELFNMPSVESAKNPDGVLGTMLYDACVPKNVEGWDFKLASIDGQRMHFTARQHGTSNPTKCIRRSRL

SEQ ID NO: 64155 - protein, 341 aa, Triticum aestivum; identical to SEQ ID NO: 64017
  peptide (1)..(341): Ceres Seq. ID no. 15169662

SEQ ID NO: 64156 - DNA, 1588 bp, Triticum aestivum
  misc_feature (1)..(1588): Ceres Seq. ID no. 15169651
accgaaacggctcactgggaaaaggggagaaaaaacagagctcaataacttcgaggaggaggagaggcgtggcgggggaaggaagggagggagggagctcgtcgtcgtcggcggcggatggcggtggagtaccgctgctgcgggggccccttcttcgagcacatcgccatcatcgtggtgctggtgctcttcgcggggctcatgtccgggctcaccctcggcctcatgtccctcagcctcgtcgacctcgaggtcctcgccaagtccggcaccgacaaggaccgcaagtacgcagctaagatattgcccgtcgtgaaaaaccagcaccttctgctatgcactcttctgatctgcaacgctgcagctatggaggcactgccaatcttccttgatagcctggtgactgcttggggtgctgttttgatctctgtgacattgatcctgctgttcggcgagatcataccacaatctatctgctcacggtatgggctggcaattggtgcctcggttgctccgttagtccgtgttcttgtttggatttgtttccctgttgcatatccaatcgccaagctgctggaccatgtgcttggtcacggtaaagcggcacttttccgcagagctgagctaaaaacacttgtgacactgcatggaaatgaggctggtaaaggtggagagttaacccatgatgaaacaactataatagctggagctcttgagctcagtgaaaagaaagctaaagatgctatgacacctctttgtgatacatttgtgattgatataaatgcaaagctcgacaggaaactaatgcaagaggtcattgagaaaggtcatagcagagtgccagtttattatgaaaaggatacaaacattattggattgatattggtgaagaatttattatccattaaccctgatgatgaaattcccataaagagtgtaactatccgcaaaattcctcgcgtttcagaagacatgcccctgtatgacatcctaaatgaattccagaagggccacagccacatggcggttgtcataaggcaaaacattccaaactacccagctaagcagcccagcatcgatggtggatctcttgaggtcgccatcgccattgatgacaagcagggtgagaaggttgcgaagagtctcactccgctgtggaggtggaagagctaccccaacacccagaactccaacacggggagcaggagggggaaatggtccaaagaccagtcggacgtcctccaagtgcacgaagagccgttgcccacgctgagcgaggatgaagaagccgtcggcatcataaccatggaggatgtcattgaagaactgctgcaggaggagatctacgacgaaaccgacgtacatgttgaggagcaataacacattgcttgctagggtttacgcacatggtaaacttgccgttttggctggagccggaagcaaagttgcgtgccatgccagtttcttttctttctttgtgccgaggggaagaagaaacaatatatgtatgtatgataacgtaacgttgtactgctacgtgtgaatagacagagaccgcaaatattagttcgtctgaagtgttgatacc

SEQ ID NO: 64157 - protein, 420 aa, Triticum aestivum
  peptide (1)..(420): Ceres Seq. ID no. 15169652
MAVEYRCCGGPFFEHIAIIVVLVLFAGLMSGLTLGLMSLSLVDLEVLAKSGTDKDRKYAAKILPVVKNQHLLLCTLLICNAAAMEALPIFLDSLVTAWGAVLISVTLILLFGEIIPQSICSRYGLAIGASVAPLVRVLVWICFPVAYPIAKLLDHVLGHGKAALFRRAELKTLVTLHGNEAGKGGELTHDETTIIAGALELSEKKAKDAMTPLCDTFVIDINAKLDRKLMQEVIEKGHSRVPVYYEKDTNIIGLILVKNLLSINPDDEIPIKSVTIRKIPRVSEDMPLYDILNEFQKGHSHMAVVIRQNIPNYPAKQPSIDGGSLEVAIAIDDKQGEKVAKSLTPLWRWKSYPNTQNSNTGSRRGKWSKDQSDVLQVHEEPLPTLSEDEEAVGIITMEDVIEELLQEEIYDETDVHVEEQ

SEQ ID NO: 64158 - protein, 392 aa, Triticum aestivum
  peptide (1)..(392): Ceres Seq. ID no. 15169653
MSGLTLGLMSLSLVDLEVLAKSGTDKDRKYAAKILPVVKNQHLLLCTLLICNAAAMEALPIFLDSLVTAWGAVLISVTLILLFGEIIPQSICSRYGLAIGASVAPLVRVLVWICFPVAYPIAKLLDHVLGHGKAALFRRAELKTLVTLHGNEAGKGGELTHDETTIIAGALELSEKKAKDAMTPLCDTFVIDINAKLDRKLMQEVIEKGHSRVPVYYEKDTNIIGLILVKNLLSINPDDEIPIKSVTIRKIPRVSEDMPLYDILNEFQKGHSHMAVVIRQNIPNYPAKQPSIDGGSLEVAIAIDDKQGEKVAKSLTPLWRWKSYPNTQNSNTGSRRGKWSKDQSDVLQVHEEPLPTLSEDEEAVGIITMEDVIEELLQEEIYDETDVHVEEQ

SEQ ID NO: 64159 - protein, 384 aa, Triticum aestivum
  peptide (1)..(384): Ceres Seq. ID no. 15169654
MSLSLVDLEVLAKSGTDKDRKYAAKILPVVKNQHLLLCTLLICNAAAMEALPIFLDSLVTAWGAVLISVTLILLFGEIIPQSICSRYGLAIGASVAPLVRVLVWICFPVAYPIAKLLDHVLGHGKAALFRRAELKTLVTLHGNEAGKGGELTHDETTIIAGALELSEKKAKDAMTPLCDTFVIDINAKLDRKLMQEVIEKGHSRVPVYYEKDTNIIGLILVKNLLSINPDDEIPIKSVTIRKIPRVSEDMPLYDILNEFQKGHSHMAVVIRQNIPNYPAKQPSIDGGSLEVAIAIDDKQGEKVAKSLTPLWRWKSYPNTQNSNTGSRRGKWSKDQSDVLQVHEEPLPTLSEDEEAVGIITMEDVIEELLQEEIYDETDVHVEEQ

SEQ ID NO: 64160 - DNA, 1060 bp, Triticum aestivum
  misc_feature (1)..(1060): Ceres Seq. ID no. 12625713
atttcaggtctcctcctcaactcaagagatctgagctgagagatggctcttcttcctcctctgcttctgtcctgcatcttggtgctggctctcccagggccggcggtggtgacggtagggggcgtcacgttccacgtaactaacaagtgcccgttcccggtgtggccggcggtcgcgccaaacgccggccaccccgtgctcgccgcgggcggcttcttcctccctccgggacagtcgaagcgcgtcggggcaccggccacctggaacggccgcctctggggccgcaccggctgcaccttcgcgggcaccgacgccaacgccgccagctgcctcaccggcgactgcgacggacgcctcacctgcaacgggtccgtcggcgcccctcccgccaccctcgtcgaggtgaacctgcacgcggaccagagcaaggggagctcctacgacgtgagcgtggtggacgggtacaacctcccggtggccgtgtggaccaggccggcgaaccgcagcggcgactgcttcatcgccgggtgcgccaagaacgtgaacgcggtgtgcccgccggagctgcaggtcacgacgagcggcggcgcgggcaagaaggcgacggtggtggcgtgcaggagcgcgtgcctggccttcggcctggacgccttctgctgccgcggcgcgtacggcaccgcggagacgtgccggggcagcgtctactcgcggctcttcagggacgcctgcccggcctactacagctacgcctacgacgtggccgccgccacggcgcgctgctacgcgcaggagtacgtggtcaccttctgcccgtccagatggggagatcgtgtggcccagggttgagcagtgggcagcccaggactgtgctacgtatgtatttatatgtacttttagacaccgtatgtattttatacatgaggtgtgtaatattttgtgttgacataacacatgtactatttccatgcaaaaaaatacatgtactatttatcctgcaaaaaagtaaataatacatgtactattttcccgcaaaaaaataatacatgtactatttggcggg

SEQ ID NO: 64161 - protein, 267 aa, Triticum aestivum
  peptide (1)..(267): Ceres Seq. ID no. 12625714
MALLPPLLLSCILVLALPGPAVVTVGGVTFHVTNKCPFPVWPAVAPNAGHPVLAAGGFFLPPGQSKRVGAPATWNGRLWGRTGCTFAGTDANAASCLTGDCDGRLTCNGSVGAPPATLVEVNLHADQSKGSSYDVSVVDGYNLPVAVWTRPANRSGDCFIAGCAKNVNAVCPPELQVTTSGGAGKKATVVACRSACLAFGLDAFCCRGAYGTAETCRGSVYSRLFRDACPAYYSYAYDVAAATARCYAQEYVVTFCPSRWGDRVAQG

SEQ ID NO: 64162 - DNA, 1350 bp, Triticum aestivum
  misc_feature (1)..(1350): Ceres Seq. ID no. 14302240
gcaacccacacgcccctcccatcccctcttgtactactaggtacaagaagaagctgagctacagcaatggcgcccagagcagctgcggccgtggccgtcgtggccttggtctgcgcagtgcagtcgtccctctcaggggcagccgtcccgggtctgtcccctggcttctacaagacgacctgcccagggctggagcaaatcgtgaacgcccaagtgacggcgaccttcaacaaagaccaaggtgtcgctcccgccctcctgcgcgtcctcttccacgactgctttacgcagggctgcgacgcgtcggtgctcatcaaaggccgcggcaccgagcagatccccggcggagccaacgggactctccgccgcgtggctctggacctcatcgatcgcatccaccgcgaggcccaagctgcctgcggtcgggtggtctcatgcgccgacgttaccgtgctcgctacccgcgacgcgctgttcaaggccggcggtccccgtttcaacgtcgacctgggccggcttgactcgttcgccccggcgccagatagggttaaggacctgccctcgcccttcgacggcgcggacaggcacatcgaggccttcaaggcccgcaaactcagcgccgatgacctggtttccctctccggcgcgcacaccttcggtgtggcccactgcggggtcatcccaccccggggcacccattccatggatccccagctcgccaagcagctacaggagaaatgcaccaaacccacggcaacaaccacgcaagacctcgacgtcctcacgccgcacgtcttcgacaacaagtactacgtgggcctgacccagaagaaggggatgttcctgtccgaccagtcgctcatcgaccacccgctcaccaagaacctcgccctcgccttctccaagaaccagacagccttcttcatcgagttcggcaagtcgatgaccaagatgaccgagatgggtgtgatcaccagcaagctgcagggcgaggtccgggccgactgcaccgtcgcagggaagcccccccgcatcgaggccgccaccgccgccgaccaggggttcacggccgacatgtaagacatgttccatgcaacgtagcgttcctcagctaaccgtgtccgtgcgtatacgcacgcgaacgcgcggtggcttatgttggtgtgtgcgtcttgtgcttgtgctgcctagctagtactactcctagttagttaataatgagcggtcggttcacttgcttcctagcataggattgatcgaggttcctagttttgggacacccttgtaagatcttcgtcatgtctttttcagatttccaacatccgtaatgtcatattttcatttcaaggt

SEQ ID NO: 64163 - protein, 337 aa, Triticum aestivum
  peptide (1)..(337): Ceres Seq. ID no. 14302241
MAPRAAAAVAVVALVCAVQSSLSGAAVPGLSPGFYKTTCPGLEQIVNAQVTATFNKDQGVAPALLRVLFHDCFTQGCDASVLIKGRGTEQIPGGANGTLRRVALDLIDRIHREAQAACGRVVSCADVTVLATRDALFKAGGPRFNVDLGRLDSFAPAPDRVKDLPSPFDGADRHIEAFKARKLSADDLVSLSGAHTFGVAHCGVIPPRGTHSMDPQLAKQLQEKCTKPTATTTQDLDVLTPHVFDNKYYVGLTQKKGMFLSDQSLIDHPLTKNLALAFSKNQTAFFIEFGKSMTKMTEMGVITSKLQGEVRADCTVAGKPPRIEAATAADQGFTADM

SEQ ID NO: 64164 - protein, 172 aa, Triticum aestivum
  peptide (1)..(172): Ceres Seq. ID no. 14302242
NPHAPPIPSCTTRYKKKLSYSNGAQSSCGRGRRGLGLRSAVVPLRGSRPGSVPWLLQDDLPRAGANRERPSDGDLQQRPRCRSRPPARPLPRLLYAGLRRVGAHQRPRHRADPRRSQRDSPPRGSGPHRSHPPRGPSCLRSGGLMRRRYRARYPRRAVQGRRSPFQRRPGPA

SEQ ID NO: 64165 - DNA, 1239 bp, Triticum aestivum
  misc_feature (1)..(1239): Ceres Seq. ID no. 13597120
cattacctagaacatcctaatcgaaaaaaaatttacagttttcaccaagatgaaattgcacaaggcatctatatcccctcctcactctcctccgctggccgccaacgccgccgcataaccaagtcaatcttcccccacccaaccccccgcgcagcctcgccgtcggcatgggcgaggagaggacggaggcgtggtggggccggcgcgcgtgggcgctgctgtcggccgtccgcgcgcgggcgccgctggtgcagtgcatcaccaaccccgcctcccaattccggatggaggcctgcctcgagctcctcgcgctcccccccgccgtcgtcagggggaacgcgtccgagatcctcgccctcgccgcccgctcagacagctcccccaccttcaagggtgtggacagttcacatgactcaggggaggtcctgcaagccgcgaaagcattggcacggtccagcggcacagttgtcgcagtatctggagctgttgatttcatcacggatggcgagcaggtcatcagtgctagcaatggtgtggcaatgatgcagaagatcacagcgacagggtgtgctgtgactgctcttatagcggcatttgtcggggcggatccttccgatgctctggctgcagcagcatgtgcgctcgccatctttggactcgctggagagatagggatggagtcagcaaaaggacctgcctctctcaggatgcatctcattgatgctctctacggtctcgacgagcagaccgtcacatctggagtaaaaattgcgctgctgccgtaatgcatgtgtgccgtggctatcagtgctgtaggagatacagagtctggagtaatctgcaggatcattttgcctccttggtgcttggaaaaccgtgaagcagatcgtgtcagattggctgtcagatcactcatcaataatccggtgaccatcccggctgtagtaagtacgtacatagttgtgaattgtgatgtcacacagagaatgatgttcataaaataagccagtcgaaataaggtgtttgtgcttcaatggccttgagatgatcgaacggctattctgttcaaacactttgatccccctatgcctattatcacgggcggcgctaggggtattcttgggtcttcatgtgaatacccatgatttttacaaaacagtgttgattttggcaaaacagtgacaattttcaaaaaacaacaataattttggcaaaatgaatacacatgaatacccggtt

SEQ ID NO: 64166 - protein, 205 aa, Triticum aestivum
  peptide (1)..(205): Ceres Seq. ID no. 13597121
MGEERTEAWWGRRAWALLSAVRARAPLVQCITNPASQFRMEACLELLALPPAVVRGNASEILALAARSDSSPTFKGVDSSHDSGEVLQAAKALARSSGTVVAVSGAVDFITDGEQVISASNGVAMMQKITATGCAVTALIAAFVGADPSDALAAAACALAIFGLAGEIGMESAKGPASLRMHLIDALYGLDEQTVTSGVKIALLP

SEQ ID NO: 64167 - protein, 180 aa, Triticum aestivum
  peptide (1)..(180): Ceres Seq. ID no. 13597122
HYLEHPNRKKIYSFHQDEIAQGIYIPSSLSSAGRQRRRITKSIFPHPTPRAASPSAWARRGRRRGGAGARGRCCRPSARGRRWCSASPTPPPNSGWRPASSSSRSPPPSSGGTRPRSSPSPPAQTAPPPSRVWTVHMTQGRSCKPRKHWHGPAAQLSQYLELLISSRMASRSSVLAMVWQ

SEQ ID NO: 64168 - protein, 166 aa, Triticum aestivum
  peptide (1)..(166): Ceres Seq. ID no. 13597123
MEACLELLALPPAVVRGNASEILALAARSDSSPTFKGVDSSHDSGEVLQAAKALARSSGTVVAVSGAVDFITDGEQVISASNGVAMMQKITATGCAVTALIAAFVGADPSDALAAAACALAIFGLAGEIGMESAKGPASLRMHLIDALYGLDEQTVTSGVKIALLP

SEQ ID NO: 64169 - DNA, 1520 bp, Triticum aestivum
  misc_feature (1)..(1520): Ceres Seq. ID no. 12625474
cggtcgatcacacatttcctccgcccacctacccatcccgtccgccggccggcctcgaaccttccaagttaagcagctagctagctagctagcacggcggcgaggaatggagcgtgtctcgccgtggctgctgctgctggtacttctggtggccgcgtcagggccgggtgcacgcgccgatccgcaggtgccgtgctacttcgtgttcggggactcgctggtggacaacgggaacaacaacgacatcgcgtcgctggcgcgggccaactacccgccctacggcatcgacttccccggcggagccaccgggcgcttcagcaacggcctcaccaccgtcgacgccatctctcggcttctgggcttcgacgactacatcccagcgtacgcgggcgcaaacaatgatcaactcctctccggcgtcaacttcgcctcagctgcggccggaatcagagacgagaccggccagcaactgggccagcgcataagcttcggcgggcagctccagaactaccaggcggcggtgcagcagctggtgagcatcctgggggacgaggactccgcggcgaaccacctgagccagtgcatcttcacggtgggcatgggcagcaacgactacctcaacaactacttcatgcccgccgtctacgccaccagccggcagtacaccccggagcagtacgccgacgtgctcgtcagccagtacacgcagcagctcaggatcctgtacaacaacggggcgaggaaggtggcgctgatgggggtggggcaggtggggtgcagcccgaacgagctggcgcagcagagctccgacggggtcacctgcgtggcgcggatcaacggcgccatcgagatcttcaaccagaagctggtagagctggtggaccagttcaacacgctgccgggggcgcacttcacctacatcaacgcctacgggatcttccaggacatcatcaggtcgccgggagccaacggcctgacggtgctggacaaggggtgctgcggggtggggaggaacaacgggcaggtgacgtgcctgcccttccagacgccgtgcgccaacaggaacgagtacctcttctgggacgccttccacccaacggaggccgccaacattctcgtcgggaggcgggcctacagcgccgcccagccctccgacgtccaccccgtcgacctgcagacgcttgcgcgcctctagttatgcaacaacctgcttttccaaagagaaaaagaagttatacaggtcgcatgcatcatcagcatcagaaccatatgtgatggctatattttgttggggtgtgtggagtggtccgtgggaatgaaaggtgagtgttttgttacttcagtgcactgcatacgacaagcaagatgtatgtatgtgtgcatctgaacaacgtacgtacttggaaggaggagtatatgctatagttacattttttcggttttgttattgtgaagattcatccatcattgtgcttcgttgtgaaacagcacagttccaagaaaactatcattgtttttgc

SEQ ID NO: 64170 - protein, 362 aa, Triticum aestivum
  peptide (1)..(362): Ceres Seq. ID no. 12625475
MERVSPWLLLLVLLVAASGPGARADPQVPCYFVFGDSLVDNGNNNDIASLARANYPPYGIDFPGGATGRFSNGLTTVDAISRLLGFDDYIPAYAGANNDQLLSGVNFASAAAGIRDETGQQLGQRISFGGQLQNYQAAVQQLVSILGDEDSAANHLSQCIFTVGMGSNDYLNNYFMPAVYATSRQYTPEQYADVLVSQYTQQLRILYNNGARKVALMGVGQVGCSPNELAQQSSDGVTCVARINGAIEIFNQKLVELVDQFNTLPGAHFTYINAYGIFQDIIRSPGANGLTVLDKGCCGVGRNNGQVTCLPFQTPCANRNEYLFWDAFHPTEAANILVGRRAYSAAQPSDVHPVDLQTLARL

SEQ ID NO: 64171 - protein, 198 aa, Triticum aestivum
  peptide (1)..(198): Ceres Seq. ID no. 12625476
MGSNDYLNNYFMPAVYATSRQYTPEQYADVLVSQYTQQLRILYNNGARKVALMGVGQVGCSPNELAQQSSDGVTCVARINGAIEIFNQKLVELVDQFNTLPGAHFTYINAYGIFQDIIRSPGANGLTVLDKGCCGVGRNNGQVTCLPFQTPCANRNEYLFWDAFHPTEAANILVGRRAYSAAQPSDVHPVDLQTLARL

SEQ ID NO: 64172 - protein, 187 aa, Triticum aestivum
  peptide (1)..(187): Ceres Seq. ID no. 12625477
MPAVYATSRQYTPEQYADVLVSQYTQQLRILYNNGARKVALMGVGQVGCSPNELAQQSSDGVTCVARINGAIEIFNQKLVELVDQFNTLPGAHFTYINAYGIFQDIIRSPGANGLTVLDKGCCGVGRNNGQVTCLPFQTPCANRNEYLFWDAFHPTEAANILVGRRAYSAAQPSDVHPVDLQTLARL

SEQ ID NO: 64173 - DNA, 1344 bp, Triticum aestivum
  misc_feature (1)..(1344): Ceres Seq. ID no. 13597124
aacccaacccaacccgacccggcgcggatctaaaatctctctctgccagccaccacgcgcctgccctacagccgccaccgacgccccgtccccgccccctcccacggtcgccgccgccgtcgccgtcgccgttcatctccgccccgtccgcggtctttccccccattggggttcgaggacctgaggtgcttctagctgggaaggatgagcaaaggcccggttccgttccctagctttgggaagaaagcaaaagatctcttgtacaaggactacaattttgaccaaaagttttcatggtcaacaactagcgaatctggtttgggtatcacagcctctggtgtgaagttcgatgaactcttcattggtgacatacgggtacaacataaaagtggtagaaatactgttgatgtcacaatcgattgcgattccaaagtgtcaaccgcggtcacttttgatgaagtagtccctggtttgaagacttctttcggcttcaaggttcctgatcaaaagtcagggaagctcgatttgcaataccttcatgatcgcttcacactgaattcaaccattggcttgacttcggcacctgtgatcgagctggcaacaactattggcacaaacgaacttgctgtcggtgccgaggttggatttgacagcacttcagcttctgttaccaagtacaactcaggggtcagctataccaaggatgatttttctgccgccttacaaatggctgacaaaggcgagacactgaaagcttcctacatccacctgttcagcccgaccagcgcagtggcggccgaggtaacgcacaggttgaaaacaaaggagaactacttcaccatcgggagctcccacgcgctcgacccgtccacgacgctcaagacgaggttcagcaacagcgggaaggccgggctcctctgccggcacgagtggaggcccaagtcgtacgtgacgctctcggccgagtacgaccccaaggtggtgagctcgccgtcaaggttcggcgtggccgtggccctcagcccctgatcacccgcctgcccgcccgcatctcctccctgtacaacagcgccagcgttaagcacgccgctccgctcgtatatgtccgagccatactcgccgatgattctttttggtctctctctctttttgggttacaacagtattggtattggcccacggaaaccttgtctaggagttgggctcatttttgcgggattcctccgattagcctgcctgccggccggcgaagtaaggggccgggaactggaaatatacagaggttttgtactattaggcatacgctttggccactccaggcgatgaaattgctgacttgctgtc

SEQ ID NO: 64174 - protein, 274 aa, Triticum aestivum
  peptide (1)..(274): Ceres Seq. ID no. 13597125
MSKGPVPFPSFGKKAKDLLYKDYNFDQKFSWSTTSESGLGITASGVKFDELFIGDIRVQHKSGRNTVDVTIDCDSKVSTAVTFDEVVPGLKTSFGFKVPDQKSGKLDLQYLHDRFTLNSTIGLTSAPVIELATTIGTNELAVGAEVGFDSTSASVTKYNSGVSYTKDDFSAALQMADKGETLKASYIHLFSPTSAVAAEVTHRLKTKENYFTIGSSHALDPSTTLKTRFSNSGKAGLLCRHEWRPKSYVTLSAEYDPKVVSSPSRFGVAVALSP

SEQ ID NO: 64175 - DNA, 1369 bp, Triticum aestivum
  misc_feature (1)..(1369): Ceres Seq. ID no. 13597129
ctagaacatcctaatcgagaagtctctgactctctctctctcactacccccaaagcagcagaagcagcagcaagcaccaagcgagcagcgaagccgattccccaaaccgcctcccacatgcaattcctcgcctgaagaaaccctaccgtactccgccgccgctgtcgccgccatgtcgttgccaccggtggacccgccggagtggctgcgcacactacccgtggcgccggagtaccgccccaccctcgccgagttcgctgaccccatcgcctatatcctcaagatcgagccagaggcctctcgctacggcatctgcaagatcgtccccccgctcccctcgccgccccgcgaggccaccgttcagctcctcaaggcctcgttcgcctccaatgcgtccgcttccggcgacgctggccccaccttcccgacgcggctccagcaggtgggcctctccacaaagaaccgtcgcggcgcgaaccgtcgcgtctgggagagcggcgagcgctacaccctggaggccttccgcaccaaggcccgcgacttcgaactcccgaggcacgcgatacccccgaagcacgcgacgcccctccagctcgaggcgctcttctggggtgcttgcgctgcgaggccattcaatgtcgagtacggcaacgacatgccggggtctggcttcgtcaaacgggaggtgctagacctggacactgacagtccggtaggggcgcccagggacgtcggcgagacggagtggaacatgagggtggctccgcgcgctcggggctcgctactgcgggcgatgagccgggacgtggctggcgtcacaacgccgatgctatatgtggcgatgctctacagttggttcgcgtggcacgtggaggaccatgagctgcatagcctcaactacctccacttcggcaagcccaagacttggtacggcgtgccccgagatgccatgcttgccttcgaggatgctgtccgtgtccatgggtacgcggacgacctcaatgccatcagtgcgacagacgagccagacggttgggactggcaccaggcgtagggggctctggtacatggaccaggaggtgcagccggacttggtgtgtgctgcgaccatggaggataaggagaagcaggcgatgatccatcattgtaggatggggcatgtatcttttgataagatgagtagaatatttccggatgttatgtgtggaataggcaaaggcaagctgacatgtgatgcttgtgaatatgcaaaacacacacgggccttatatgtgagtaaggggctcaggagcatatctccttttatgcttattcattcggatgtatggactagcccagtggtgtcaatgaatgggaagaagtattttgc

SEQ ID NO: 64176 - protein, 293 aa, Triticum aestivum
  peptide (1)..(293): Ceres Seq. ID no. 15222034
MSLPPVDPPEWLRTLPVAPEYRPTLAEFADPIAYILKIEPEASRYGICKIVPPLPSPPREATVQLLKASFASNASASGDAGPTFPTRLQQVGLSTKNRRGANRRVWESGERYTLEAFRTKARDFELPRHAIPPKHATPLQLEALFWGACAARPFNVEYGNDMPGSGFVKREVLDLDTDSPVGAPRDVGETEWNMRVAPRARGSLLRAMSRDVAGVTTPMLYVAMLYSWFAWHVEDHELHSLNYLHFGKPKTWYGVPRDAMLAFEDAVRVHGYADDLNAISATDEPDGWDWHQA

SEQ ID NO: 64177 - protein, 178 aa, Triticum aestivum
  peptide (1)..(178): Ceres Seq. ID no. 15222035
MWRCSTVGSRGTWRTMSCIASTTSTSASPRLGTACPEMPCLPSRMLSVSMGTRTTSMPSVRQTSQTVGTGTRRRGLWYMDQEVQPDLVCAATMEDKEKQAMIHHCRMGHVSFDKMSRIFPDVMCGIGKGKLTCDACEYAKHTRALYVSKGLRSISPFMLIHSDVWTSPVVSMNGKKYF

SEQ ID NO: 64178 - protein, 163 aa, Triticum aestivum
  peptide (1)..(163): Ceres Seq. ID no. 15222036
MSCIASTTSTSASPRLGTACPEMPCLPSRMLSVSMGTRTTSMPSVRQTSQTVGTGTRRRGLWYMDQEVQPDLVCAATMEDKEKQAMIHHCRMGHVSFDKMSRIFPDVMCGIGKGKLTCDACEYAKHTRALYVSKGLRSISPFMLIHSDVWTSPVVSMNGKKYF

SEQ ID NO: 64179 - DNA, 680 bp, Triticum aestivum
  misc_feature (1)..(680): Ceres Seq. ID no. 12585856
aaaatcaggaaacaaagtggcagacatagacaagcagagcagctcgcggatcgatccatggagttcgacaagcgcacggggacgccttctccccttctcccccggagcgcctccaccgtcacctactgctgcgggcggtgcgggtacgacctgaagctgagctcgtcggcgcgggacacggcgggcatcgtgggggccggcgcgggcggggcgaggcggcggggctggcggagcgcggcggtggtggtgttcgacgccatcgacgacgcgcgcttcggccacctcgacgagttccgctgcctcgacctgcgcgcgcgccgcctcttcgcgcgccgcacgcgcctgctctgccgcaagtgcggcgcccacgtcggcttcggctacgacgacaacaccaccgccaccaggccgccgcggtaccacatcaagatccgcgccctccaccccgcctcctccgacgacgccttctccggcgccgccacgccgccgccgccgtcccacgcgccggcggatccgcgatcttgatctccattgcctgacatgcccgtgcgcacattccgtccctttttttgtgtttccattttctttcttcctttctctgtcgacgcaaacgggaattgccgttcgcgctcgctagtgtacaaactgatttgattgattggaaattggaatcaaatcgc

SEQ ID NO: 64180 - protein, 174 aa, Triticum aestivum
  peptide (1)..(174): Ceres Seq. ID no. 12585857
KIRKQSGRHRQAEQLADRSMEFDKRTGTPSPLLPRSASTVTYCCGRCGYDLKLSSSARDTAGIVGAGAGGARRRGWRSAAVVVFDAIDDARFGHLDEFRCLDLRARRLFARRTRLLCRKCGAHVGFGYDDNTTATRPPRYHIKIRALHPASSDDAFSGAATPPPPSHAPADPRS

SEQ ID NO: 64181 - protein, 155 aa, Triticum aestivum
  peptide (1)..(155): Ceres Seq. ID no. 12585858
MEFDKRTGTPSPLLPRSASTVTYCCGRCGYDLKLSSSARDTAGIVGAGAGGARRRGWRSAAVVVFDAIDDARFGHLDEFRCLDLRARRLFARRTRLLCRKCGAHVGFGYDDNTTATRPPRYHIKIRALHPASSDDAFSGAATPPPPSHAPADPRS

SEQ ID NO: 64182 - DNA, 1306 bp, Triticum aestivum
  misc_feature (1)..(1306): Ceres Seq. ID no. 13597804
atcgaaaaaagataagccagacatcgagtagtccctctcgggtcgcagtacagagtacggacagaggagcgatatggacccggccggcgcggggaaggcgacggcggcggcggcggctgtgtgcgtgacgggcgcgggaggcttcatcgcctcgtggctcgtggagcgccttctcgccggaggagactacgcggtgcatggcaccgtccgtgatcccagcgaccccaagaataaacacctgagggcgctggacggcgccggcgagcggctgcgcctgttcaaggccgacgtgctggactacgcgagcgtggcgtccaccgtggccggctgtgccggcgtcttccacgtcgccagcccctgccccgccgcccaacccacgaaccccgaggtggagctgcttgccccggcggtggccggcacgctgaacgtgctccgggcctgccgggaggccggcgtccgccgcgtcgtggtggtgtcgtcggtcggcgcggtcttcatgaaccccaacccccccgagggccccaccatggacgaacactgctggtcgaacgaggagtactgcagagccaccgagaactggtactgcctctccaagacgctggtcgagcgcgaggcctgggcttacgcagagaaggccgggctggacgtggtgaccgtgtgcccgccgctggtgttcgggcctctgctgcagcccacggtgaacaccagcagcctgttcctcatcagatacctgaaatgcgacggcgtgaacgccatggacgacagggtgaggaacatggtggacgtcagggacgtcgccgacgcccttgtgctggcgtacgagagcccggaggcggccggccggtacatctgcagtgcgcacgccaggaaggtgtccgaaatggtttccgtcgtcaggagcctgcatccgagcctgaactgcgcaaacaagttcgttcagctggtgggagatgagaaagtgttcagcaccgagaagctgcagaggctggggtggaagttcaggacgctggaggagacgctcaaggacagcgtcgagtcctacatgtctgcaggcatactcagctgagcagggcccaaggttgcgcgcggatcggagccaggtgggcattttgtatcctaacgagcactgcggatgtgccgctagtttcagttcaaggatagcacggtagctaatgcgatgatcaaacggtggtgtgaaattgtattgatcaaactagtgtcacaaatactgcaattgctatatgtaaattgactgaatttgtaatttgggtaagtcggttttatgggagaaggagctattgaaggg

SEQ ID NO: 64183 - protein, 330 aa, Triticum aestivum
  peptide (1)..(330): Ceres Seq. ID no. 15222197
MDPAGAGKATAAAAAVCVTGAGGFIASWLVERLLAGGDYAVHGTVRDPSDPKNKHLRALDGAGERLRLFKADVLDYASVASTVAGCAGVFHVASPCPAAQPTNPEVELLAPAVAGTLNVLRACREAGVRRVVVVSSVGAVFMNPNPPEGPTMDEHCWSNEEYCRATENWYCLSKTLVEREAWAYAEKAGLDVVTVCPPLVFGPLLQPTVNTSSLFLIRYLKCDGVNAMDDRVRNMVDVRDVADALVLAYESPEAAGRYICSAHARKVSEMVSVVRSLHPSLNCANKFVQLVGDEKVFSTEKLQRLGWKFRTLEETLKDSVESYMSAGILS

SEQ ID NO: 64184 - protein, 189 aa, Triticum aestivum
  peptide (1)..(189): Ceres Seq. ID no. 15222198
MNPNPPEGPTMDEHCWSNEEYCRATENWYCLSKTLVEREAWAYAEKAGLDVVTVCPPLVFGPLLQPTVNTSSLFLIRYLKCDGVNAMDDRVRNMVDVRDVADALVLAYESPEAAGRYICSAHARKVSEMVSVVRSLHPSLNCANKFVQLVGDEKVFSTEKLQRLGWKFRTLEETLKDSVESYMSAGILS

SEQ ID NO: 64185 - protein, 179 aa, Triticum aestivum
  peptide (1)..(179): Ceres Seq. ID no. 15222199
MDEHCWSNEEYCRATENWYCLSKTLVEREAWAYAEKAGLDVVTVCPPLVFGPLLQPTVNTSSLFLIRYLKCDGVNAMDDRVRNMVDVRDVADALVLAYESPEAAGRYICSAHARKVSEMVSVVRSLHPSLNCANKFVQLVGDEKVFSTEKLQRLGWKFRTLEETLKDSVESYMSAGILS

SEQ ID NO: 64186 - DNA, 1529 bp, Triticum aestivum
  misc_feature (1)..(1529): Ceres Seq. ID no. 13597805
ctctcccccgatctctcgcccgcgacctgctccgataccctgcgaagtacggactccggcgagcttacggggctcgcgcggcgagctcgcggccgcgatggacgaggcgggcacctcgtcgtccgcaggctccgccccgcgcggagggcgcccggcgagatcgggagtattctataagttcacccagcaggatcttccagcttggaaaccggcaatgacaccaggatacgtgatagccattttcttgataattgggattatttttgtaccgcttggactaatttgtcttcaagcttcaaacagagttgcagaaatcgttcaccgttatgatattgattgtgtacctaatgcttacagaagcaataagcaggcctatatcaaagacagctcgatttcgaaggaatgcattcagaaagtgaaggtacaataccacatgaaagctccaatttatgtgtattatgaactcgacaacttctaccagaatcatcgtaggtatatcaaaagtagaagcgacaagcaactacgctatgggctgaaatacactgatagctcatgcagtccaatagaaaagagcgacggccttccaattgttccctgtggattgattgcctggagcttgttcaatgatacttatgattttacccgtggatccatgggaatagtggttgatcggaaaaatatttcatggagaagtgatcgggagcataagtatggcaaggatgtctatcctttcaactttcagaatggatctttgattggaggaggaaaacttgaccctgatataccactaagcaatcaggaagatcttatcgtgtggatgcgcgcagctgctcttccccagtttcgaaagctgtatggtgtcatcgaagaggatatacaagctgatgaaatcattaccatgcacataacaaacaattacaatacctacagctttggtggaaagaaaagcctggttcttacaacatcaacctggctaggtggcaagaatgactttcttggatatgtatatcttatcactggttccttgagcattttcttgtcgattctctttgctctgatccatgtgaaaatcccaaggccacatggtgatgctgcttacctatcttggagcaggaaaaacggcaataactaagcttctgtgcatagttttttctttgtgtaagctagcagtacagcaccctggccagaggtttccccgcggcgttccgtctgcgcaccctgtctcgagggaaatggcatagtagcagcttcaggtttcatacactcgacacttggacggagcatgaaatgcgtagcagcttcagatttcatacacatacttggagcatgaaacgcttgatgactgctgaggatatacggtaaggccatggttcaccgacatgttcgtgcaattcaggccagcgctctgacggcgccctcgaggaaaactagagccgtgtaaaaactgatatatgtgtatgtaaagcgccataccatggattccatgatgttgtatgaatgaatacatataatgtttcagtttcgtgccg

SEQ ID NO: 64187 - protein, 376 aa, Triticum aestivum
  peptide (1)..(376): Ceres Seq. ID no. 13597806
SPPISRPRPAPIPCEVRTPASLRGSRGELAAAMDEAGTSSSAGSAPRGGRPARSGVFYKFTQQDLPAWKPAMTPGYVIAIFLIIGIIFVPLGLICLQASNRVAEIVHRYDIDCVPNAYRSNKQAYIKDSSISKECIQKVKVQYHMKAPIYVYYELDNFYQNHRRYIKSRSDKQLRYGLKYTDSSCSPIEKSDGLPIVPCGLIAWSLFNDTYDFTRGSMGIVVDRKNISWRSDREHKYGKDVYPFNFQNGSLIGGGKLDPDIPLSNQEDLIVWMRAAALPQFRKLYGVIEEDIQADEIITMHITNNYNTYSFGGKKSLVLTTSTWLGGKNDFLGYVYLITGSLSIFLSILFALIHVKIPRPHGDAAYLSWSRKNGNN

SEQ ID NO: 64188 - protein, 344 aa, Triticum aestivum
  peptide (1)..(344): Ceres Seq. ID no. 13597807
MDEAGTSSSAGSAPRGGRPARSGVFYKFTQQDLPAWKPAMTPGYVIAIFLIIGIIFVPLGLICLQASNRVAEIVHRYDIDCVPNAYRSNKQAYIKDSSISKECIQKVKVQYHMKAPIYVYYELDNFYQNHRRYIKSRSDKQLRYGLKYTDSSCSPIEKSDGLPIVPCGLIAWSLFNDTYDFTRGSMGIVVDRKNISWRSDREHKYGKDVYPFNFQNGSLIGGGKLDPDIPLSNQEDLIVWMRAAALPQFRKLYGVIEEDIQADEIITMHITNNYNTYSFGGKKSLVLTTSTWLGGKNDFLGYVYLITGSLSIFLSILFALIHVKIPRPHGDAAYLSWSRKNGNN

SEQ ID NO: 64189 - protein, 305 aa, Triticum aestivum
  peptide (1)..(305): Ceres Seq. ID no. 13597808
MTPGYVIAIFLIIGIIFVPLGLICLQASNRVAEIVHRYDIDCVPNAYRSNKQAYIKDSSISKECIQKVKVQYHMKAPIYVYYELDNFYQNHRRYIKSRSDKQLRYGLKYTDSSCSPIEKSDGLPIVPCGLIAWSLFNDTYDFTRGSMGIVVDRKNISWRSDREHKYGKDVYPFNFQNGSLIGGGKLDPDIPLSNQEDLIVWMRAAALPQFRKLYGVIEEDIQADEIITMHITNNYNTYSFGGKKSLVLTTSTWLGGKNDFLGYVYLITGSLSIFLSILFALIHVKIPRPHGDAAYLSWSRKNGNN

SEQ ID NO: 64190 - DNA, 1340 bp, Triticum aestivum
  misc_feature (1)..(1340): Ceres Seq. ID no. 15226608
aaacattccactgttgcacacacccttgcccccgtcctccccccgcccgatcccccgcccctccgttttcggcgcggccgcgaggagagttcgtcggcggccgcgatgaggtcggccctgagccgcctgatccgttcctcctgctccgtctcgtcctcccgtctcagctctccagttttgttgaagaacggcaaggccttctcgagcgatgccacgcccagggattccgggcgggtcgacgagcctttcaaagtcgaggaggcagaacccgtgaaggtgccgccgccaccgccttctcctgataagctgcttgtgctaggtggaagtggcttcgttggttcacatgtttgcaaggaggctttggagaggggatttgttgtctctagtctaaatagatctggaaagccatcgacaagtgaatcttgggctgacaaagttatatggaaccaaggcaatcttcttgaacctgcttcactggaggatagtatggatggtgtctctgctgttgtatcctgtgttggaggctttgggtcaaattctcaaatgttcaaactgaatgggactgcaaacatcaatgccatcagggttgcagctgagaaaggcataaaaagatttgtgtatgtgtcagctgcagactttggtttagtgaattacttattgcaaggttattatgagggcaagagagctgctgaagctgaactgctgtcgaagtttacctatggaggagtgatactgcggcctggttttattcatggaactcgtcgagtgggtagcgtgaacataccccttggacttgtgggttcacctatgcaaatggtgctccaaaatgcaaaaccattaaccagattgccacttgtcggcccgatgctaactcctccagtgagtgctacctcggtagcgaaggtcgctgtaagagcagcgacggatccggtgttccctcctggtatcgtcgatgtgtatggcatcatgcgttacagcgagcagaagtaagcgcatgcttgtacaggacgataaggcgtgtctccacccatcttttttacctggtttttcctatttgctctaaatgtgtaagcagacatcacaaggccatgaggcctcagctacggccgcagattctctgacagttctatcctggcgtggccctgtttgcctgatctacttactaggcaaggatgctcaataaagaagcagttaacctcgagtttcctgttggaaactgtttttacatgcttgttgcttgtaagtgttccttttagttactgtagagagcaggttaagatttgtaacttcgagtttatgataaggaaaactctattcctggtcgtgtaccgattgtgggc

SEQ ID NO: 64191 - protein, 329 aa, Triticum aestivum
  peptide (1)..(329): Ceres Seq. ID no. 15226609
KHSTVAHTLAPVLPPPDPPPLRFRRGREESSSAAAMRSALSRLIRSSCSVSSSRLSSPVLLKNGKAFSSDATPRDSGRVDEPFKVEEAEPVKVPPPPPSPDKLLVLGGSGFVGSHVCKEALERGFVVSSLNRSGKPSTSESWADKVIWNQGNLLEPASLEDSMDGVSAVVSCVGGFGSNSQMFKLNGTANINAIRVAAEKGIKRFVYVSAADFGLVNYLLQGYYEGKRAAEAELLSKFTYGGVILRPGFIHGTRRVGSVNIPLGLVGSPMQMVLQNAKPLTRLPLVGPMLTPPVSATSVAKVAVRAATDPVFPPGIVDVYGIMRYSEQK

SEQ ID NO: 64192 - protein, 294 aa, Triticum aestivum
  peptide (1)..(294): Ceres Seq. ID no. 15226610
MRSALSRLIRSSCSVSSSRLSSPVLLKNGKAFSSDATPRDSGRVDEPFKVEEAEPVKVPPPPPSPDKLLVLGGSGFVGSHVCKEALERGFVVSSLNRSGKPSTSESWADKVIWNQGNLLEPASLEDSMDGVSAVVSCVGGFGSNSQMFKLNGTANINAIRVAAEKGIKRFVYVSAADFGLVNYLLQGYYEGKRAAEAELLSKFTYGGVILRPGFIHGTRRVGSVNIPLGLVGSPMQMVLQNAKPLTRLPLVGPMLTPPVSATSVAKVAVRAATDPVFPPGIVDVYGIMRYSEQK

SEQ ID NO: 64193 - protein, 167 aa, Triticum aestivum
  peptide (1)..(167): Ceres Seq. ID no. 15226611
MDGVSAVVSCVGGFGSNSQMFKLNGTANINAIRVAAEKGIKRFVYVSAADFGLVNYLLQGYYEGKRAAEAELLSKFTYGGVILRPGFIHGTRRVGSVNIPLGLVGSPMQMVLQNAKPLTRLPLVGPMLTPPVSATSVAKVAVRAATDPVFPPGIVDVYGIMRYSEQK

SEQ ID NO: 64194 - DNA, 1170 bp, Triticum aestivum
  misc_feature (1)..(1170): Ceres Seq. ID no. 14303294
atttccgtacctgtctgctccgtccgcctcccaagctttgcggctccagggtttagctagggttctacccacgaccaccgccgccgcccgccccgccgccgccgcagccatggccggcgccggcgccggagaggaggacgcggcgtgggagcgcgccatcagcgcggccgtcaagagcgcgccgctctcccccttctccgcccccaaaaccctaaccctcgacggcgccatcaagtcctccaccggccgcctcccctcgccggcgctcttcgaccgcttcccctcgctcgaggagctctccgtcgcgggcgcccgcctctcctcgctcgccggcctgccccgcctcccggccctccgccgcctctccctccccgacaaccgcctcgcgggggccggctccctcgccgccgtcgccgagtcctgcggcgggaccatccgccacctcgacctcggcaacaaccgcttcgccgcggtcgaggagctcgccccgctcgcaccgctcggggtcgagtcgctggacctgtaccagtgccccgtcaccaagctcaaggggtacagggagaaggtgtttgcgctggtccccagcttgaagtacctggatggcgtcgatgccgagggcaatgaccgcctggagtccgatgaggacgaggaggaggatgaggatgaggatgaggaaggggatgaagagggggcggaggacggcgaaggggaaggggacgaagaggaagaggaaggagatgaagaagaagatggcgaggaagaggagggagatgaagaggaagaggaaggcgacgaggctgaagacgaagaggatgaggctgaggacgacgaaccggagtcaggcgcggccgagaaaagcgaggtggtcaacggaaacaagtccgcaggatctgccctgccaagcaagaggaaaagggacaatgaagatggggccaacggcgacaactgaatttgatctcgatttaaggtttgttggttcgtctttgcacgcttttcagagggttccgtgcgggaggtgtagtagaagcaagcaacctttgtactagttttgtgcaaggattttctgagaggttttcaaattttattcaagacgcgcggtggatcctcggacctgctccttcatgtgaaatttctggtactataaaccgaggcgctggctcggatcatgac

SEQ ID NO: 64195 - protein, 315 aa, Triticum aestivum
  peptide (1)..(315): Ceres Seq. ID no. 14303295
FPYLSAPSASQALRLQGLARVLPTTTAAARPAAAAAMAGAGAGEEDAAWERAISAAVKSAPLSPFSAPKTLTLDGAIKSSTGRLPSPALFDRFPSLEELSVAGARLSSLAGLPRLPALRRLSLPDNRLAGAGSLAAVAESCGGTIRHLDLGNNRFAAVEELAPLAPLGVESLDLYQCPVTKLKGYREKVFALVPSLKYLDGVDAEGNDRLESDEDEEEDEDEDEEGDEEGAEDGEGEGDEEEEEGDEEEDGEEEEGDEEEEEGDEAEDEEDEAEDDEPESGAAEKSEVVNGNKSAGSALPSKRKRDNEDGANGDN

SEQ ID NO: 64196 - protein, 279 aa, Triticum aestivum
  peptide (1)..(279): Ceres Seq. ID no. 14303296
MAGAGAGEEDAAWERAISAAVKSAPLSPFSAPKTLTLDGAIKSSTGRLPSPALFDRFPSLEELSVAGARLSSLAGLPRLPALRRLSLPDNRLAGAGSLAAVAESCGGTIRHLDLGNNRFAAVEELAPLAPLGVESLDLYQCPVTKLKGYREKVFALVPSLKYLDGVDAEGNDRLESDEDEEEDEDEDEEGDEEGAEDGEGEGDEEEEEGDEEEDGEEEEGDEEEEEGDEAEDEEDEAEDDEPESGAAEKSEVVNGNKSAGSALPSKRKRDNEDGANGDN

SEQ ID NO: 64197 - DNA, 1332 bp, Triticum aestivum
  misc_feature (1)..(1332): Ceres Seq. ID no. 15169537
gattcggaatacatgcagaagatcctgatattttctctctcctcgtgtcatctcatcactctccctctttctgaaaaccctagcgccgcagcccgagagagccatccttaggtttccgcgcaaggcgtcggggaattttcggctcgattggattggagatgacggagaaggaggtgggacggatcttcgtgggcggactgtcctgggacaccacggagcgcacgctggagcgagctttcggcgagttcggcaaggtcatcgagacgcaggttgtaacagaaagagacacaggccgctcccgtgggtttgggtttgttacattctcggaacctcgggctgtggatgttgcgatccgggaaatgcacaatggagaactagatggtcggaccatttctgtgaacaaagctcaacctaggatgaacagtgatgatggtggctatggatatgggggtagtagttactcatctggtgctagaggtggatatcgtggtgcagctgacatagtacccactgcaagtgatgattgctttaagtgtggacgccctggacactgggctcgtgaatgtctttattctgatggaggcaggcctggaaggtactctcccccttccaggtatggcaatggcgctggtgggcgtggtgaccgctttggaggatcagaccgttttggtaatcgctatgttgatgatcgttatgatggtggccgctatgctgatgatcgttatggtggtggacgcgatcgctatcctccagctgctgatcgtttttctggcgatagatatggtggtggtgatcgttatgcatcaggtggctttgccagggaaagaagctatgagagagatggagggcggccaggtggaagttattaccgtgatgaacctagaggcactggtgcttatggcaggggtggtccacgtgtggcgaatggtgacagatatgggagtggtggacctgctcgccttggcgcgagttaccgagataggcctgctccctatgatcgtcccactcagggtgctcgctcatatgatgaccgctactgatggaaggtcaccttggagcagacaggagatttgatacaagattcaattcccagttgctactacctcctttatttgtgtccactatgttgatgcttcaactctcaagtatcattctttcaagcagtttgtttggttacttcagtccatatggcagtacttaattattattattattattattattattattattattatggtcaaactgtacactctaggcaatgggcagacacttgttgcttattgttatggtattgtgtaactactctgcactctaagtttgagttgtact

SEQ ID NO: 64198 - protein, 293 aa, Triticum aestivum
  peptide (1)..(293): Ceres Seq. ID no. 15169538
MTEKEVGRIFVGGLSWDTTERTLERAFGEFGKVIETQVVTERDTGRSRGFGFVTFSEPRAVDVAIREMHNGELDGRTISVNKAQPRMNSDDGGYGYGGSSYSSGARGGYRGAADIVPTASDDCFKCGRPGHWARECLYSDGGRPGRYSPPSRYGNGAGGRGDRFGGSDRFGNRYVDDRYDGGRYADDRYGGGRDRYPPAADRFSGDRYGGGDRYASGGFARERSYERDGGRPGGSYYRDEPRGTGAYGRGGPRVANGDRYGSGGPARLGASYRDRPAPYDRPTQGARSYDDRY

SEQ ID NO: 64199 - protein, 226 aa, Triticum aestivum
  peptide (1)..(226): Ceres Seq. ID no. 15169539
MHNGELDGRTISVNKAQPRMNSDDGGYGYGGSSYSSGARGGYRGAADIVPTASDDCFKCGRPGHWARECLYSDGGRPGRYSPPSRYGNGAGGRGDRFGGSDRFGNRYVDDRYDGGRYADDRYGGGRDRYPPAADRFSGDRYGGGDRYASGGFARERSYERDGGRPGGSYYRDEPRGTGAYGRGGPRVANGDRYGSGGPARLGASYRDRPAPYDRPTQGARSYDDRY

SEQ ID NO: 64200 - protein, 207 aa, Triticum aestivum
  peptide (1)..(207): Ceres Seq. ID no. 15169540
MNSDDGGYGYGGSSYSSGARGGYRGAADIVPTASDDCFKCGRPGHWARECLYSDGGRPGRYSPPSRYGNGAGGRGDRFGGSDRFGNRYVDDRYDGGRYADDRYGGGRDRYPPAADRFSGDRYGGGDRYASGGFARERSYERDGGRPGGSYYRDEPRGTGAYGRGGPRVANGDRYGSGGPARLGASYRDRPAPYDRPTQGARSYDDRY

SEQ ID NO: 64201 - DNA, 1308 bp, Triticum aestivum
  misc_feature (1)..(1308): Ceres Seq. ID no. 14301886
cccaaatcccccgaatttgacccgtttctccgccgattcgcgtcaccccccctttctgctcgggtcggtgagtggtctcaacccccggagggatggggtacctgagcaccgtcatcggccaccccacggacggatcgccggtcagcggcggcggcctcagccagaatggtaagtttagctatggttatgcgagctccctgggtaaaagggcttccatggaagacttctatgagacaagaattgaaagtgtcgatgggcagcttattggtttattcggagtttttgatggtcatggtggtgctaaagtagctgagtatgtcaaacacaacctcttcagccatcttcttaggcatccaaagttcatgagcgacacaaaagtggctatagatgattcttataaaagtaccgacagtgagttcttggaatctgacagtactcaaaaccagtgtgggtcaacagcatcaactgctgtacttgttggtaatcgtctctttgtcgcaaatgttggagactccagggctatcatatgcagggcaggaaatgctgtacctgtttcgaaagatcacaagcctgatcagacagatgagcggcaacgtattgaagaagctggaggttttgttatgtgggcaggaacatggcgtgttggtggtgtacttgctgtttctcgcgcttttggtgacaagctcttaaagcagtatgtagttgtggatccagagatccgggaggaaatcgttgacgagtccctggagtttctcatccttgcaagcgatgggctgtgggatgtggtctctaacgaggaggctgtcgatatgacccggtcaatacaagacccagaggaagctgctaagaggctcttgcaggaggcctacaagcgggagagcagtgacaacataacctgcgtcgtcgtgcgcttctttcacgggcaagggagtagtgggcctgcttaaagcaggtgcgaagagttactctcaacttctcaagtcgacgttgtactgtgatgacacgcgtacatgccttgattgattcttaaggtttaaacgaagagaaactggaagtaggaaaagtgtactctgatatgagaacaaaagtttaggaacgaagtgtgccctaggccttagatttaacaataaatttgctggtgatgaactgatgaccgttcatcgtggtttagttgtggatggtgttgggtctgatgagtgtgttgtatcttgttgtggattgccaaaccatgtgtgagtgtgatgtaagcgattattgttgtactgaaattgagcaatgacaagtataattgagttgttggatggatct

SEQ ID NO: 64202 - protein, 284 aa, Triticum aestivum
  peptide (1)..(284): Ceres Seq. ID no. 14301887
MGYLSTVIGHPTDGSPVSGGGLSQNGKFSYGYASSLGKRASMEDFYETRIESVDGQLIGLFGVFDGHGGAKVAEYVKHNLFSHLLRHPKFMSDTKVAIDDSYKSTDSEFLESDSTQNQCGSTASTAVLVGNRLFVANVGDSRAIICRAGNAVPVSKDHKPDQTDERQRIEEAGGFVMWAGTWRVGGVLAVSRAFGDKLLKQYVVVDPEIREEIVDESLEFLILASDGLWDVVSNEEAVDMTRSIQDPEEAAKRLLQEAYKRESSDNITCVVVRFFHGQGSSGPA

SEQ ID NO: 64203 - protein, 243 aa, Triticum aestivum
  peptide (1)..(243): Ceres Seq. ID no. 14301888
MEDFYETRIESVDGQLIGLFGVFDGHGGAKVAEYVKHNLFSHLLRHPKFMSDTKVAIDDSYKSTDSEFLESDSTQNQCGSTASTAVLVGNRLFVANVGDSRAIICRAGNAVPVSKDHKPDQTDERQRIEEAGGFVMWAGTWRVGGVLAVSRAFGDKLLKQYVVVDPEIREEIVDESLEFLILASDGLWDVVSNEEAVDMTRSIQDPEEAAKRLLQEAYKRESSDNITCVVVRFFHGQGSSGPA

SEQ ID NO: 64204 - protein, 194 aa, Triticum aestivum
  peptide (1)..(194): Ceres Seq. ID no. 14301889
MSDTKVAIDDSYKSTDSEFLESDSTQNQCGSTASTAVLVGNRLFVANVGDSRAIICRAGNAVPVSKDHKPDQTDERQRIEEAGGFVMWAGTWRVGGVLAVSRAFGDKLLKQYVVVDPEIREEIVDESLEFLILASDGLWDVVSNEEAVDMTRSIQDPEEAAKRLLQEAYKRESSDNITCVVVRFFHGQGSSGPA

SEQ ID NO: 64205 - DNA, 2011 bp, Triticum aestivum
  misc_feature (1)..(2011): Ceres Seq. ID no. 14313636
atccctgtctcccccctccctcttaactgcaagcaagcaatgggggctcccaaatgggtggttgcgccattggcgctgctgctcctcctgcagctcgccggcgcgtcccatgacgtccgacggagccttgaggccgaggcggcgacgccgtccgtgccggcctccattcttagccccctgctccggacgggctaccacttccaaccccccatgaactggatcaacgatccgaatggtccgctctactacaagggatggtaccacctgttctaccagtacaaccccaagggcgcggtgtggggcaacatcatctgggcgcactcggtgtcgcgcgacctcatcaactggatggccctcgaccccgccatcaagcccagcattccgaccgaccagtacggcgtctggtccggctcggcgacgatcctgcccaacggcacggtggcgatgctctacaccggcatcgaccgcccgggcaccaactaccagatccagaacatcgccttccccaaggacccctccgacccgctgctccgcgagtgggtcaagcccggctacaaccccatcgccgtccccgaggccggcatcaacgccacgcagttccgcgacccgaccaccgcctggcacgccggcgatggcctctggcgcatgctcgtgggcgggctcaagcccggcacgctccgcggcatggccatcctgtaccggagcagggacttcaagcactgggtccgcgccaagcacccgctccactcggccctcaccggcatgtgggagtgccccgacttcttccccgtgcgcgagcccgggaagacggacggcctcgacacctccgagttcggcccgcgctacaagtacgtgctcaagaacagcctcgacctcacccgctacgactactacaccgtgggcacctacaacaaccgcacggagcggtacgtgcccgacaaccccaccggcgacgtctaccagcggctccagtacgactacggcaacttctacgcgtccaagaccttctacgacccggccaagaaccgccgcgtgctgctgggctgggccaacgagtccgacagcgtcgcgcacgacaacgccaagggatgggccggcatccacgcgatcccgaggaagatatggctggaccccagcggcaagcagctgctgcagtggcccgtggaggagctggaccagctgaggggcaaggctgtcagcgtgggtgacaagctcgtcaagcccggccagcactttgaggtcactggcctgcagtcctaccagtctgacgtggaggtgagcttcgaggtgtcgagcctggacaaggcggagccgttcgatccggcctacgccaacgacgcgcagaagctctgcgggatgaagaacgccgacgtcaagggcggggtggggcccttcggcctctgggtcctggcctctgacaacctggccgagaagaccgccgtgttcttcagagtcttcaaggatgggcatggcaagcctctcgtcctcatgtgcagtgaccccaccaagtcatctctcaccccgggtctatacaagccgacttttgccgggtttgtcgacaccgacatttcgtccgggaagatctctctgagaagcttgatcgaccgatcggtggttgagagcttcggcgccggagggaagacctgcatcctatcgagagtgtacccatccatggcgatcgggaaagacgcacacctttatgtgttcaacaacggggtgaccgatatcaaggtgtccaaactaacggcgtgggagatgaaaaaaccaatgatgaatggtgcctaagtagtatataccgtatatgttttctcatgagtttaagtttttgttgaatgccattcgacatcgatgcacaccacgcaactgattgctcgtcttaatgaagacctctttgagtagaagtggttagagaaatttgttgtacaattgataatttctgtcacgtgttgtacgaataaacatgatgatcccacgctgaagacaataaagaccttaatgaatttcttctttc

SEQ ID NO: 64206 - protein, 594 aa, Triticum aestivum
  peptide (1)..(594): Ceres Seq. ID no. 14313637
IPVSPLPLNCKQAMGAPKWVVAPLALLLLLQLAGASHDVRRSLEAEAATPSVPASILSPLLRTGYHFQPPMNWINDPNGPLYYKGWYHLFYQYNPKGAVWGNIIWAHSVSRDLINWMALDPAIKPSIPTDQYGVWSGSATILPNGTVAMLYTGIDRPGTNYQIQNIAFPKDPSDPLLREWVKPGYNPIAVPEAGINATQFRDPTTAWHAGDGLWRMLVGGLKPGTLRGMAILYRSRDFKHWVRAKHPLHSALTGMWECPDFFPVREPGKTDGLDTSEFGPRYKYVLKNSLDLTRYDYYTVGTYNNRTERYVPDNPTGDVYQRLQYDYGNFYASKTFYDPAKNRRVLLGWANESDSVAHDNAKGWAGIHAIPRKIWLDPSGKQLLQWPVEELDQLRGKAVSVGDKLVKPGQHFEVTGLQSYQSDVEVSFEVSSLDKAEPFDPAYANDAQKLCGMKNADVKGGVGPFGLWVLASDNLAEKTAVFFRVFKDGHGKPLVLMCSDPTKSSLTPGLYKPTFAGFVDTDISSGKISLRSLIDRSVVESFGAGGKTCILSRVYPSMAIGKDAHLYVFNNGVTDIKVSKLTAWEMKKPMMNGA

SEQ ID NO: 64207 - protein, 581 aa, Triticum aestivum
  peptide (1)..(581): Ceres Seq. ID no. 14313638
MGAPKWVVAPLALLLLLQLAGASHDVRRSLEAEAATPSVPASILSPLLRTGYHFQPPMNWINDPNGPLYYKGWYHLFYQYNPKGAVWGNIIWAHSVSRDLINWMALDPAIKPSIPTDQYGVWSGSATILPNGTVAMLYTGIDRPGTNYQIQNIAFPKDPSDPLLREWVKPGYNPIAVPEAGINATQFRDPTTAWHAGDGLWRMLVGGLKPGTLRGMAILYRSRDFKHWVRAKHPLHSALTGMWECPDFFPVREPGKTDGLDTSEFGPRYKYVLKNSLDLTRYDYYTVGTYNNRTERYVPDNPTGDVYQRLQYDYGNFYASKTFYDPAKNRRVLLGWANESDSVAHDNAKGWAGIHAIPRKIWLDPSGKQLLQWPVEELDQLRGKAVSVGDKLVKPGQHFEVTGLQSYQSDVEVSFEVSSLDKAEPFDPAYANDAQKLCGMKNADVKGGVGPFGLWVLASDNLAEKTAVFFRVFKDGHGKPLVLMCSDPTKSSLTPGLYKPTFAGFVDTDISSGKISLRSLIDRSVVESFGAGGKTCILSRVYPSMAIGKDAHLYVFNNGVTDIKVSKLTAWEMKKPMMNGA

SEQ ID NO: 64208 - protein, 524 aa, Triticum aestivum
  peptide (1)..(524): Ceres Seq. ID no. 14313639
MNWINDPNGPLYYKGWYHLFYQYNPKGAVWGNIIWAHSVSRDLINWMALDPAIKPSIPTDQYGVWSGSATILPNGTVAMLYTGIDRPGTNYQIQNIAFPKDPSDPLLREWVKPGYNPIAVPEAGINATQFRDPTTAWHAGDGLWRMLVGGLKPGTLRGMAILYRSRDFKHWVRAKHPLHSALTGMWECPDFFPVREPGKTDGLDTSEFGPRYKYVLKNSLDLTRYDYYTVGTYNNRTERYVPDNPTGDVYQRLQYDYGNFYASKTFYDPAKNRRVLLGWANESDSVAHDNAKGWAGIHAIPRKIWLDPSGKQLLQWPVEELDQLRGKAVSVGDKLVKPGQHFEVTGLQSYQSDVEVSFEVSSLDKAEPFDPAYANDAQKLCGMKNADVKGGVGPFGLWVLASDNLAEKTAVFFRVFKDGHGKPLVLMCSDPTKSSLTPGLYKPTFAGFVDTDISSGKISLRSLIDRSVVESFGAGGKTCILSRVYPSMAIGKDAHLYVFNNGVTDIKVSKLTAWEMKKPMMNGA

SEQ ID NO: 64209 - DNA, 1635 bp, Triticum aestivum
  misc_feature (1)..(1635): Ceres Seq. ID no. 14313463
aaacaagtgtacctctatctcgccgtcgcctccccgctccttgcttccgcccggccgtttctctagggtttaacgccatggacgtcgaggacgagctcccgaccgcccccgcgtccgcggacggcggcgaatcctcgcacgcgctggtgtccggcgaccagttcgacgtggaggcgtacgcggcgcagtactcggggcgcacgcgcgtggcgcggcttctcttcatcgcggagaagtgcgggtcggagcagatgcggctggatgcgctccggctggcctacgactgggccctcaagggagaggacacggccctccaccgcgacgtctccgccaagatcgccggccgcctcggcccccgctacgcagccgaccaggcctggtccgacgccgtcgagcgccgcgccctgctgcgcaaggataagcttgacagcgagctcaatgtctacaggaccaatctgatcaaagagagtattcggatgggctacaatgaccttggtgatttccactatgctcaaggccacctttcagacgccttcaagagctatatcaggacccgcgattactgcacgacctccaagcatgttgttcagatgtgcttgaatgtcatacttgttagcattgagctggggcaatttatgcacgtgtcaaattatgtcatcaaggcggagcagaccccagacgatatggatcctattactgccgccaagttgcgagctgctgctggattagcctacatggaaacaaacaagtacaaacttgctgcccggaagtttatagagacaggatcagagctaaggagcaactattctgaagttatagctccacaagatgttgctgtctatggtgcactatgcgcgcttgcttcttttgatcgctcagagctgaagagcaaagttattgacaactacaattttcgcaattttttggagttagtgcctgaagtaagggagctggtaaatgatttttatgcaagccgctatgggtcatgtctgggatatcttgagaagctgaagtcaaacctgctgctggatatgcatttgcatgcgcatatagaaactctgtacaaggacattcgacacaaagccatcatacagtacacattcccattcatatctgttgatctcaacttgatggctgttgccttccagacctccgtgtccctgctagagaaagagctggcagcgcttatcactgataacaaaatacaggctcgtatcgactcgcacaacaagattctatacgcaagccacgccgaccaaaggaacggaactttccagcgtgctctgcagactggcattgagtttgagagggatgtcaagtccatgcttctgagggcgaacctcctcaagcacgagtacagccagaaggcagcagaaaggaaggtgtgaaaacaagttctccttggtttggacctgaggtgcattgagagattttagtgatgatttgtgccatagtcaagtgtttcatgtcatgatcttccatattcaagctaagatactagatttaagtatgttttagagcacacaaagataatataacttctgccatgcacgtcttttgcggagactatgtggttaattttgtactacgtactggcattcattttggagttttcgtatagactcatttgaagct

SEQ ID NO: 64210 - protein, 461 aa, Triticum aestivum
  peptide (1)..(461): Ceres Seq. ID no. 14313464
TSVPLSRRRLPAPCFRPAVSLGFNAMDVEDELPTAPASADGGESSHALVSGDQFDVEAYAAQYSGRTRVARLLFIAEKCGSEQMRLDALRLAYDWALKGEDTALHRDVSAKIAGRLGPRYAADQAWSDAVERRALLRKDKLDSELNVYRTNLIKESIRMGYNDLGDFHYAQGHLSDAFKSYIRTRDYCTTSKHVVQMCLNVILVSIELGQFMHVSNYVIKAEQTPDDMDPITAAKLRAAAGLAYMETNKYKLAARKFIETGSELRSNYSEVIAPQDVAVYGALCALASFDRSELKSKVIDNYNFRNFLELVPEVRELVNDFYASRYGSCLGYLEKLKSNLLLDMHLHAHIETLYKDIRHKAIIQYTFPFISVDLNLMAVAFQTSVSLLEKELAALITDNKIQARIDSHNKILYASHADQRNGTFQRALQTGIEFERDVKSMLLRANLLKHEYSQKAAERKV

SEQ ID NO: 64211 - protein, 436 aa, Triticum aestivum
  peptide (1)..(436): Ceres Seq. ID no. 14313465
MDVEDELPTAPASADGGESSHALVSGDQFDVEAYAAQYSGRTRVARLLFIAEKCGSEQMRLDALRLAYDWALKGEDTALHRDVSAKIAGRLGPRYAADQAWSDAVERRALLRKDKLDSELNVYRTNLIKESIRMGYNDLGDFHYAQGHLSDAFKSYIRTRDYCTTSKHVVQMCLNVILVSIELGQFMHVSNYVIKAEQTPDDMDPITAAKLRAAAGLAYMETNKYKLAARKFIETGSELRSNYSEVIAPQDVAVYGALCALASFDRSELKSKVIDNYNFRNFLELVPEVRELVNDFYASRYGSCLGYLEKLKSNLLLDMHLHAHIETLYKDIRHKAIIQYTFPFISVDLNLMAVAFQTSVSLLEKELAALITDNKIQARIDSHNKILYASHADQRNGTFQRALQTGIEFERDVKSMLLRANLLKHEYSQKAAERKV

SEQ ID NO: 64212 - protein, 378 aa, Triticum aestivum
  peptide (1)..(378): Ceres Seq. ID no. 14313466
MRLDALRLAYDWALKGEDTALHRDVSAKIAGRLGPRYAADQAWSDAVERRALLRKDKLDSELNVYRTNLIKESIRMGYNDLGDFHYAQGHLSDAFKSYIRTRDYCTTSKHVVQMCLNVILVSIELGQFMHVSNYVIKAEQTPDDMDPITAAKLRAAAGLAYMETNKYKLAARKFIETGSELRSNYSEVIAPQDVAVYGALCALASFDRSELKSKVIDNYNFRNFLELVPEVRELVNDFYASRYGSCLGYLEKLKSNLLLDMHLHAHIETLYKDIRHKAIIQYTFPFISVDLNLMAVAFQTSVSLLEKELAALITDNKIQARIDSHNKILYASHADQRNGTFQRALQTGIEFERDVKSMLLRANLLKHEYSQKAAERKV

SEQ ID NO: 64213 - DNA, 994 bp, Triticum aestivum
  misc_feature (1)..(994): Ceres Seq. ID no. 13655622
ccgacgagcggctgggctcggttagccaaaggagcaagccctagctcgcccaaatccccgctcccctccccctcgccgaacaaatgtccgaccgccgccgcgacagggagaggccccgcgagcgcggcggctacgaccagccgcgggagcgcgaccacgacgccgaccgccaccgcgaccgggaccgcgacgtcgaccgccaccgggaccgggaccgcggccaggacaaggagcgggaccgggaccgggactaccgccgcgcccgcaagcgctcgcgctcccgctccccctcggccgacagggaccgcgcccgccgccgccgctcccactcccactcccacccccaccggtcacgctcccccgacgccggccgccacaagcgccgccgcgaggggtcgcccgtcgccgactcgaaggaggacaggaagccggatccccccaaggccgccgaggaggcggccgccccggtgggcgacggggacgtggacgcggaggagctggagatgatgaagatgatggggatccccgtcgggttcgactccaccaagggcaagtacgtccccggcgccgacgtcagcggcgtgcgcgccgtcaccaagcgccagccgcggcagtacatgaaccgcaggggcgggttcaaccgtcccctgccgcccgaggtcaaccgctgaggaggatcatgtatcactgcagtatacctcgttgctggaatgcaaacttgcggttgattactagacttctttgctggccatagcaaggattgagcttctactgtctaccaagcatgtataaccttgatggctagttactttgccaaactttgcagactgagacatgtagttctcgttttcatcatttgctctgtcgacattccagggaaagatattggtggcgtgtttttggaaatgtggtttagaaaattacatgatgtttctgcacataatttgtatgtttttcaggcatgcaccacatggaatggaacttgtgatgatgc

SEQ ID NO: 64214 - protein, 195 aa, Triticum aestivum
  peptide (1)..(195): Ceres Seq. ID no. 13655623
MSDRRRDRERPRERGGYDQPRERDHDADRHRDRDRDVDRHRDRDRGQDKERDRDRDYRRARKRSRSRSPSADRDRARRRRSHSHSHPHRSRSPDAGRHKRRREGSPVADSKEDRKPDPPKAAEEAAAPVGDGDVDAEELEMMKMMGIPVGFDSTKGKYVPGADVSGVRAVTKRQPRQYMNRRGGFNRPLPPEVNR

SEQ ID NO: 64215 - protein, 168 aa, Triticum aestivum
  peptide (1)..(168): Ceres Seq. ID no. 13655624
PTSGWARLAKGASPSSPKSPLPSPSPNKCPTAAATGRGPASAAATTSRGSATTTPTATATGTATSTATGTGTAARTRSGTGTGTTAAPASARAPAPPRPTGTAPAAAAPTPTPTPTGHAPPTPAATSAAARGRPSPTRRRTGSRIPPRPPRRRPPRWATGTWTRRSWR

SEQ ID NO: 64216 - DNA, 1219 bp, Triticum aestivum
  misc_feature (1)..(1219): Ceres Seq. ID no. 13584238
atcgaaaatccatccattagcatccatctccggctagcaacacaaacgaccttctctttctcctctttcttcagggtagtcggccggagtccgggacgaagccggcggcgaagactccaaagaggatcatcatcagttcatcgcacaaatcgaccagccatgtgtaacaacagcggcggccgcggcggggcgatggcggctcggaaggggccgtggacggagaacgaggacgcccaactggtatggttcgtgcgcttgctcggcgaacgccgttgggatttcttagctcaggtctcaggtttgcgcggtggcgggtgatcgatccaacctgacctctacggccagtcaccattaatcttcttcttctccctcccctcctccggcgtgttctcggctgtgctccatgcaggtctccggcgcaccggcaagagctgccgcctccgctgggtcaactacctccacccgggcctcaagcgcggacgcatcaccgccgacgaggagcggctcatcctcagcctccacgccgagtggggctcccggtggtccaggatcgctaggaagctccccggccgcaccgacaacgagatcaagaactactggaggacgcacatgaggaagaaggcccaggaggagaagatgctggccaagaagaaggcctcatcctcgccctcctcctcctcctcctcgaccacgtcgctgacctgctcggcctcccccacggccacgtcgtcctcggcggccaccaccgaggcgccccaggagagcactactactagcatggacgacgaggccgagcaggaggccaccacgtcggcgagcgaggagaagaaggcggaggtggtgcagtactgctccgccgtggacatggaccagctctggaacgacatcgccgcgtcggagagctacccggagatgatgatgagctggggcgcagccggccacgtggccatgcccgcccccgctgtggagccctcgtcgccggtgtgggagttctgcgaggattactccctgtggaggatcgacgaccaagagtactacaacaagatcgatcaacacgctctgaattgagaggctttcgttacgtttctcttgttgttcttgttcttcctagctagctagcttaattgcatgtattactatatactaattcatgcatgtaattatatgtaaaacttgagttgtgagattatattggtgacagctttttgcgcacatgtgt

SEQ ID NO: 64217 - protein, 152 aa, Triticum aestivum
  peptide (1)..(152): Ceres Seq. ID no. 13584239
MRKKAQEEKMLAKKKASSSPSSSSSSTTSLTCSASPTATSSSAATTEAPQESTTTSMDDEAEQEATTSASEEKKAEVVQYCSAVDMDQLWNDIAASESYPEMMMSWGAAGHVAMPAPAVEPSSPVWEFCEDYSLWRIDDQEYYNKIDQHALN

SEQ ID NO: 64218 - protein, 143 aa, Triticum aestivum
  peptide (1)..(143): Ceres Seq. ID no. 13584240
MLAKKKASSSPSSSSSSTTSLTCSASPTATSSSAATTEAPQESTTTSMDDEAEQEATTSASEEKKAEVVQYCSAVDMDQLWNDIAASESYPEMMMSWGAAGHVAMPAPAVEPSSPVWEFCEDYSLWRIDDQEYYNKIDQHALN

SEQ ID NO: 64219 - protein, 105 aa, Triticum aestivum
  peptide (1)..(105): Ceres Seq. ID no. 13584241
IENPSISIHLRLATQTTFSFSSFFRVVGRSPGRSRRRRLQRGSSSVHRTNRPAMCNNSGGRGGAMAARKGPWTENEDAQLVWFVRLLGERRWDFLAQVSGLRGGG

SEQ ID NO: 64220 - DNA, 1314 bp, Triticum aestivum
  misc_feature (1)..(1314): Ceres Seq. ID no. 13656079
caagaagaaggaacgaatttgtcagccgacctagaggaagaggaagagaagagcgcaacgcaagcagaggcaagaatggcgatggcgaggaggagggccctcgcgctcgtgtcccagatcctacagaggcgggttctccccgcgccgcgcttcctctcgtcggcggccggcggcgctctagaccgcctcaattcgccgcccttcgcgcgccaggccgcgcacaggaaccccgctcctccttccccatgggatcggctcggagggcagaagaggaccatgttcatccagacgcagtcgacccccaacccgcagtcgctcatgttccatcctggaaagccggttatggaagttgggagctctgatttccctcatgctcggaccgccatgacatctcctttggcgaaggcgctgtttgcgatagaaggcgttacgagagtattctttggatctgattttgtaactgtgacaaaatctgacgagacttcatgggattatcttaagcctgaggtatttgctgcgataatggatttctactcatctggacagccacttttcctggactcaaataccgcagctgctatggacacagcaattcatgaggatgattcagaaatagttgctatgataaaagaactattggagacccgcattcgtccggctgttcaagatgatggtggtgacattgaataccgaggatttgagccagaaacagggatagtgaagctaaaaatgcaaggtgcctgcagtggctgcccgagttcatcagtcacgttgaaatctggcatagagaacatgctcatgcactatgtgcccgaggtgaaaggagtggagcaagagtttgatggtgatgaggaagctgaactggctggccagatggaatgagtttttacatttaaatcgcaaccatgtgacatgctgttcagggaaaccatgctacgcatgaaacgtcccggagaatttaaaccactcttaaaaccataggttaccactatattttgtgagataaaccaggagtagcctggagtttttgtgatgattagatggttgtaattttgatcagatgtgtgcaagaagcagactatcgtacatgctagagaggcagcagtagcctaaaccaacatcgactgcagtagggctgaataaagtgatagttggattgatctttccttttgtccaacactttatatgctgagcttgctaatagcaaaggtcatcactttggcatgacaggtgtaatttcatggtggttatttctgctatgtatatgtactttgtaagttttgcatttgcctctgcaagaatggttatggctgc

SEQ ID NO: 64221 - protein, 293 aa, Triticum aestivum
  peptide (1)..(293): Ceres Seq. ID no. 15220564
QEEGTNLSADLEEEEEKSATQAEARMAMARRRALALVSQILQRRVLPAPRFLSSAAGGALDRLNSPPFARQAAHRNPAPPSPWDRLGGQKRTMFIQTQSTPNPQSLMFHPGKPVMEVGSSDFPHARTAMTSPLAKALFAIEGVTRVFFGSDFVTVTKSDETSWDYLKPEVFAAIMDFYSSGQPLFLDSNTAAAMDTAIHEDDSEIVAMIKELLETRIRPAVQDDGGDIEYRGFEPETGIVKLKMQGACSGCPSSSVTLKSGIENMLMHYVPEVKGVEQEFDGDEEAELAGQME

SEQ ID NO: 64222 - protein, 268 aa, Triticum aestivum
  peptide (1)..(268): Ceres Seq. ID no. 15220565
MAMARRRALALVSQILQRRVLPAPRFLSSAAGGALDRLNSPPFARQAAHRNPAPPSPWDRLGGQKRTMFIQTQSTPNPQSLMFHPGKPVMEVGSSDFPHARTAMTSPLAKALFAIEGVTRVFFGSDFVTVTKSDETSWDYLKPEVFAAIMDFYSSGQPLFLDSNTAAAMDTAIHEDDSEIVAMIKELLETRIRPAVQDDGGDIEYRGFEPETGIVKLKMQGACSGCPSSSVTLKSGIENMLMHYVPEVKGVEQEFDGDEEAELAGQME

SEQ ID NO: 64223 - protein, 266 aa, Triticum aestivum
  peptide (1)..(266): Ceres Seq. ID no. 15220566
MARRRALALVSQILQRRVLPAPRFLSSAAGGALDRLNSPPFARQAAHRNPAPPSPWDRLGGQKRTMFIQTQSTPNPQSLMFHPGKPVMEVGSSDFPHARTAMTSPLAKALFAIEGVTRVFFGSDFVTVTKSDETSWDYLKPEVFAAIMDFYSSGQPLFLDSNTAAAMDTAIHEDDSEIVAMIKELLETRIRPAVQDDGGDIEYRGFEPETGIVKLKMQGACSGCPSSSVTLKSGIENMLMHYVPEVKGVEQEFDGDEEAELAGQME

SEQ ID NO: 64224 - DNA, 1408 bp, Triticum aestivum
  misc_feature (1)..(1408): Ceres Seq. ID no. 13598248
gccattccccagccaccaccgaacccgaaagcccatccacccacccggaccgggcgacgaccggggcggaggcggcggcggcggatcgagggacggacggacggatgggcggcggcgggcagtaggacggcggcgggacgcggcgggacgcggcggcaccaccatgtctgcggtagtctgcggcaagaggtcctcctccatcttcgcggacgacctgctgctccaacaggcctcctcttcccctccctcctcccaccacagcagccccgcggccaagaggtcccgctacgcgcaccaccaccaccgccgggacggccgggacgcgctcctcaaccacctccgggccgccttccccgccatggacccccagctgcttgagagagcccttgaagcgtctggagatgatttggatgatgcaataaagagtctgaaggagctgcacctgatggagtcaaatcaggctaacctgtcggccactggttccgcattkgaaaacgggccgactgcagttcagccgtctgttgaaggcattgttaccagcggcggtgtggacacagctactgaacaccaacctcctgcagatggccaacagccaggtaatagtggccctgaatgggttgatctttttgtgagggagatgtcaaatgcttctgacatggatgacgcgcgggcccgtgcgtcaagagctcttgaagccttgacgaagtccatcctggagggtgcaggagctgaagcagcgcagagcttgcatcaggaaaacatgatgctcaaggagcagatgacggccgtcctgtcgcagaacgcggtcctgaagcgcgcggtggcgatccagcacgagcggcagaaggagttcgacgagcggagccacgaggtgcagggcctgaagcagctcgtcctgcagtaccaggagcagctgaggactctcgagatcaacaactacgcgctgcagatgcatctgaagcaggcccagcagagcagctccatgcccgggcgctacaacccggacgtcttctaatttggcctcagggcgatgatgatgagccctggcccttggggattgagagttgagactagtggtgccctgccgtatgatgatgatgaagatgactagaaaatgttgttgtctgggatagttgggtggatgttggtttgctgaccaccccgttggccgtgggatggggcgcaaggctcccatgatagatcatgtgttggttcaaacgtgtcgcgtttaaacgatttttcgtatttgatatatacacaaaacaatcccgattctttgcatgattgtcattcagtcaaaaaaaaaaaaaaaaaaaaaaaaaaaaaaaaaaaaaaaaaaaaaaaaaaaaaaaagaaaaaaaaaaaaaaaaaagcttatcrataccgtcracctcragggggggcccgg

SEQ ID NO: 64225 - protein, 337 aa, Triticum aestivum
  peptide (1)..(337): Ceres Seq. ID no. 15222276
  misc_feature (163)..(163): Xaa is any aa, unknown or other
PFPSHHRTRKPIHPPGPGDDRGGGGGGGSRDGRTDGRRRAVGRRRDAAGRGGTTMSAVVCGKRSSSIFADDLLLQQASSSPPSSHHSSPAAKRSRYAHHHHRRDGRDALLNHLRAAFPAMDPQLLERALEASGDDLDDAIKSLKELHLMESNQANLSATGSAXENGPTAVQPSVEGIVTSGGVDTATEHQPPADGQQPGNSGPEWVDLFVREMSNASDMDDARARASRALEALTKSILEGAGAEAAQSLHQENMMLKEQMTAVLSQNAVLKRAVAIQHERQKEFDERSHEVQGLKQLVLQYQEQLRTLEINNYALQMHLKQAQQSSSMPGRYNPDVF

SEQ ID NO: 64226 - protein, 283 aa, Triticum aestivum
  peptide (1)..(283): Ceres Seq. ID no. 15222277
  misc_feature (109)..(109): Xaa is any aa, unknown or other
MSAVVCGKRSSSIFADDLLLQQASSSPPSSHHSSPAAKRSRYAHHHHRRDGRDALLNHLRAAFPAMDPQLLERALEASGDDLDDAIKSLKELHLMESNQANLSATGSAXENGPTAVQPSVEGIVTSGGVDTATEHQPPADGQQPGNSGPEWVDLFVREMSNASDMDDARARASRALEALTKSILEGAGAEAAQSLHQENMMLKEQMTAVLSQNAVLKRAVAIQHERQKEFDERSHEVQGLKQLVLQYQEQLRTLEINNYALQMHLKQAQQSSSMPGRYNPDVF

SEQ ID NO: 64227 - protein, 218 aa, Triticum aestivum
  peptide (1)..(218): Ceres Seq. ID no. 15222278
  misc_feature (44)..(44): Xaa is any aa, unknown or other
MDPQLLERALEASGDDLDDAIKSLKELHLMESNQANLSATGSAXENGPTAVQPSVEGIVTSGGVDTATEHQPPADGQQPGNSGPEWVDLFVREMSNASDMDDARARASRALEALTKSILEGAGAEAAQSLHQENMMLKEQMTAVLSQNAVLKRAVAIQHERQKEFDERSHEVQGLKQLVLQYQEQLRTLEINNYALQMHLKQAQQSSSMPGRYNPDVF

SEQ ID NO: 64228 - DNA, 1628 bp, Triticum aestivum
  misc_feature (1)..(1628): Ceres Seq. ID no. 14313518
cactaggaacaaaaagaaaaaagaaaaagaggaaggaaggaaaaaatctcccggggcgcaagcaaacgtgacgccacgcctcactccggccttcgtcgtcctcctcttcctccccccactttccccacaatagtttggcgatcgctcgctgccgccgccgcgaccgcgactgaagcctctgctccgctccgctccgctcgccgctggaagatggagcctgaccagagtggcaccgggcagacttctccccgtgggaacgactgggaggtcgtgcagctcaccgcgtcgaactacgcgtctgcgcctggcccggctagaactgaaccttctgacgaggagtctgaaggccaagtgtatggcgcagaagggggtgattcggcagccgcggcactgctgatgtctggccacttctcggttccgcagaatgaggctgagaatctcctcatgggagctgatactagcatagagcagcaggaggcgcgcggcagccagtacgcagtctctgacaagggtgatgatggtgatagggaggaagacccgcaggagaaactgaaggatgatgttcttgacaggatcccgtccttcgacaaagggaaaagcctttcctctgttgatatggaacctgatgatggcagcgagttgcacaggggtagtctggttggaaaagacccagttacgttctcatcctctgtttacaatgcaactgacgctgagaaagaagctaccgagagtgccaaggagaagactgaagaaagtccaactctccaaaatattgaccctgtcactgattcgtccaatattgttgcttccggtgacgagagcaagcctgacggttctggagccccacgcaatgcatggtggcagaagcaacttatatcgctctacaggagcgctaaagagagcaacaagctctggcctatcgttgtggctgctgctgctctgatggggatggcgtatttccggcggcgctggcagaagggcaagctgcagcttcagcaggtcaaattgcaacctgccagcagcaaggaggtaatcgtgggacgccttccttttgatcatactagccaaattttccatgcaactgaacagactagtttggcctgaaattcagagaatcaaccaggccaccgtaccgcttaaccgaatcaaggacattcttgtcgccggcaaccacccgagtccggctcctcacggaaatgctcgattgggctgatgatgataaccatcccgcctgacggatgatgtatcctgaaactagtgtatgcaatggagaaatagccgatgccgcagaacgtatgggcgtttatgcgtgctggctgtgtaattaaaccccaaaactcctcctgggcatgtaaatatacacgagttttgtgtggttgctttccctcctttggaagaactctctccttggccaggttcagtgtgctgctgcttcagtttgtcggccactgtaacttcttccgttgctcccgtggatattttttatctgtcttgttgcgggttgcagtttgtcaggttgtcggccgatatatacacgatgaacttatgatattattgggtgccgaatttttggtttgtgttaaaggaaattttagcctatatatagttgagattacatttgggtccac

SEQ ID NO: 64229 - protein, 297 aa, Triticum aestivum
  peptide (1)..(297): Ceres Seq. ID no. 14313519
MEPDQSGTGQTSPRGNDWEVVQLTASNYASAPGPARTEPSDEESEGQVYGAEGGDSAAAALLMSGHFSVPQNEAENLLMGADTSIEQQEARGSQYAVSDKGDDGDREEDPQEKLKDDVLDRIPSFDKGKSLSSVDMEPDDGSELHRGSLVGKDPVTFSSSVYNATDAEKEATESAKEKTEESPTLQNIDPVTDSSNIVASGDESKPDGSGAPRNAWWQKQLISLYRSAKESNKLWPIVVAAAALMGMAYFRRRWQKGKLQLQQVKLQPASSKEVIVGRLPFDHTSQIFHATEQTSLA

SEQ ID NO: 64230 - protein, 235 aa, Triticum aestivum
  peptide (1)..(235): Ceres Seq. ID no. 14313520
MSGHFSVPQNEAENLLMGADTSIEQQEARGSQYAVSDKGDDGDREEDPQEKLKDDVLDRIPSFDKGKSLSSVDMEPDDGSELHRGSLVGKDPVTFSSSVYNATDAEKEATESAKEKTEESPTLQNIDPVTDSSNIVASGDESKPDGSGAPRNAWWQKQLISLYRSAKESNKLWPIVVAAAALMGMAYFRRRWQKGKLQLQQVKLQPASSKEVIVGRLPFDHTSQIFHATEQTSLA

SEQ ID NO: 64231 - protein, 219 aa, Triticum aestivum
  peptide (1)..(219): Ceres Seq. ID no. 14313521
MGADTSIEQQEARGSQYAVSDKGDDGDREEDPQEKLKDDVLDRIPSFDKGKSLSSVDMEPDDGSELHRGSLVGKDPVTFSSSVYNATDAEKEATESAKEKTEESPTLQNIDPVTDSSNIVASGDESKPDGSGAPRNAWWQKQLISLYRSAKESNKLWPIVVAAAALMGMAYFRRRWQKGKLQLQQVKLQPASSKEVIVGRLPFDHTSQIFHATEQTSLA

SEQ ID NO: 64232 - DNA, 767 bp, Triticum aestivum
  misc_feature (1)..(767): Ceres Seq. ID no. 13655675
aagagaatggagaacagggtaatattacaggaatggtttgaccgcgttgactcggagaaaagtggaagcataacagcggtacagctgaagactgctcttgctgtgggcaacctggaatttccgctctcagttgttcagcaaatgatcaggatgtacgatttcgacaggaatggtactatgagctttcaagaatttgttgcactcaacaacttccttcttaaggttcaacatgcattttctgatctagagaggggtcgtggttttcttgtacctgatgatgtatttgaggctttgggaaaaattggtttcatgctggattctcctgctttttactctgtctgcgagagctttgatcaaagtaaaaatgggaggtttcggctggatgacttaatatcaatctgtatattcttacaatcagcacggaacctatttaattcatttgatacagctaaacaaggcagagttactctcgatctgaatcaatttgtctattgtactgccaattgcagaatatgattcaactatatgacggtttgagaagatgattcacaaatactgcactttgtaataccataaagtcatcttagagtaagttaagttgtgatggtgttgtataagatgaaaacatctcgggtttggatactatttgtcatctgtctgcaaaatactgtggttttttttttctttccagatgatgtaattttgtttataaaacgtaagttgttataaaacatcttgagttatgataacttgtgaagttgattccg

SEQ ID NO: 64233 - protein, 171 aa, Triticum aestivum
  peptide (1)..(171): Ceres Seq. ID no. 13655676
KRMENRVILQEWFDRVDSEKSGSITAVQLKTALAVGNLEFPLSVVQQMIRMYDFDRNGTMSFQEFVALNNFLLKVQHAFSDLERGRGFLVPDDVFEALGKIGFMLDSPAFYSVCESFDQSKNGRFRLDDLISICIFLQSARNLFNSFDTAKQGRVTLDLNQFVYCTANCRI

SEQ ID NO: 64234 - protein, 169 aa, Triticum aestivum
  peptide (1)..(169): Ceres Seq. ID no. 13655677
MENRVILQEWFDRVDSEKSGSITAVQLKTALAVGNLEFPLSVVQQMIRMYDFDRNGTMSFQEFVALNNFLLKVQHAFSDLERGRGFLVPDDVFEALGKIGFMLDSPAFYSVCESFDQSKNGRFRLDDLISICIFLQSARNLFNSFDTAKQGRVTLDLNQFVYCTANCRI

SEQ ID NO: 64235 - protein, 124 aa, Triticum aestivum
  peptide (1)..(124): Ceres Seq. ID no. 13655678
MIRMYDFDRNGTMSFQEFVALNNFLLKVQHAFSDLERGRGFLVPDDVFEALGKIGFMLDSPAFYSVCESFDQSKNGRFRLDDLISICIFLQSARNLFNSFDTAKQGRVTLDLNQFVYCTANCRI

SEQ ID NO: 64236 - DNA, 1633 bp, Triticum aestivum
  misc_feature (1)..(1633): Ceres Seq. ID no. 13542155
tacctagaacatcctaatcgaaaacccgacttcactccccctcccccctcccccatcctctcctcgtagtctccgccggacgccgacgcccgccccctacctgcggcgaaaccccaggcgcggcggcggcggcgggacctgctcagatccgatgggggcgacggagccgcagtgggtgctgatggccacggggcggtcgccgaccaacatcgcggtgatcaagtactgggggaagcgggacgagacgctcatcctccccgtcaacgacagcatcagcgtcaccctcgaccccgaccacctctccgccaccaccaccgtcgctgccagcccctcattcccatccgaccgcatgtggctcaacggcaaggagatcgcgttgtcgggcgggagattccagagctgcctgagggagatacggaagcgggctcgtgatgtcgaggacgagaaaaaggggatcaagatcaagaaagaggactgggaaaagttgcatgtccacatagcatcctacaacaacttcccaaccgctgccggtttggcctcttcggccgctggccttgcttgtcttgttttcaccctgggaaagctaatgaacgtgaatgaagattacggagaactttcttcaatagcaaggcaggggtctggaagtgcatgccgcagtatatatggtggatttgtgaaatggtgtatgggaaaaaatgatgacggaagtgacagcatggcagtacagcttgctgacgagtcacattgggatgatcttgttataatcatagcagtggtcagttcaaagcagaaggaaaccagtagcaccagtgggatgcgagacactgtcgaaacaagccccctcttgcagtacagggcccagactgtagtgccaagtcggatattgaaaatggaagatgctatcaagaatcgtgattttgaatccttcgccaggttaacttgtgccgatagcaaccagtttcatgctgtatgtttggacacgagtcctcccatcttctacatgaacgacacatcacacaggataattagccttgtggaaaagtggaaccactcggaaggaacaccacaggttgcctacacatttgatgctgggcctaacgctgtcctaatagcacggaaccgcaaaactgccacccttctccttcagaggctcttatacactttccccccacagaagaatgacttggacagctatatgctcggcgataaatcgatcctaagcgacgctggtttgcaatccatagccgatgtcgaggcccttccagcgcctccagagatgaaagctccaaaccaaaaattcaaaggcgatgttagctacttcatctgtagcaggcctggggccggcccaaaagttctcaccgatgagagccacgccttgattgattcagccacggggcttgcgaaaggagtgtaattttgaacgacgataggtttccataacagtctttggttgagattaatgtagaattgtcacgttgttgtacactcagtactttcgtcattttgatcttgtactgtaccttcgatcttgtactatttccatcattttgtccctgactgttgtagcctcttaaagaacatgtatatttcttcaataaaagttcgtggaaygaattatcattttatcgatccc

SEQ ID NO: 64237 - protein, 420 aa, Triticum aestivum
  peptide (1)..(420): Ceres Seq. ID no. 15220498
MGATEPQWVLMATGRSPTNIAVIKYWGKRDETLILPVNDSISVTLDPDHLSATTTVAASPSFPSDRMWLNGKEIALSGGRFQSCLREIRKRARDVEDEKKGIKIKKEDWEKLHVHIASYNNFPTAAGLASSAAGLACLVFTLGKLMNVNEDYGELSSIARQGSGSACRSIYGGFVKWCMGKNDDGSDSMAVQLADESHWDDLVIIIAVVSSKQKETSSTSGMRDTVETSPLLQYRAQTVVPSRILKMEDAIKNRDFESFARLTCADSNQFHAVCLDTSPPIFYMNDTSHRIISLVEKWNHSEGTPQVAYTFDAGPNAVLIARNRKTATLLLQRLLYTFPPQKNDLDSYMLGDKSILSDAGLQSIADVEALPAPPEMKAPNQKFKGDVSYFICSRPGAGPKVLTDESHALIDSATGLAKGV

SEQ ID NO: 64238 - protein, 410 aa, Triticum aestivum
  peptide (1)..(410): Ceres Seq. ID no. 15220499
MATGRSPTNIAVIKYWGKRDETLILPVNDSISVTLDPDHLSATTTVAASPSFPSDRMWLNGKEIALSGGRFQSCLREIRKRARDVEDEKKGIKIKKEDWEKLHVHIASYNNFPTAAGLASSAAGLACLVFTLGKLMNVNEDYGELSSIARQGSGSACRSIYGGFVKWCMGKNDDGSDSMAVQLADESHWDDLVIIIAVVSSKQKETSSTSGMRDTVETSPLLQYRAQTVVPSRILKMEDAIKNRDFESFARLTCADSNQFHAVCLDTSPPIFYMNDTSHRIISLVEKWNHSEGTPQVAYTFDAGPNAVLIARNRKTATLLLQRLLYTFPPQKNDLDSYMLGDKSILSDAGLQSIADVEALPAPPEMKAPNQKFKGDVSYFICSRPGAGPKVLTDESHALIDSATGLAKGV

SEQ ID NO: 64239 - protein, 354 aa, Triticum aestivum
  peptide (1)..(354): Ceres Seq. ID no. 15220500
MWLNGKEIALSGGRFQSCLREIRKRARDVEDEKKGIKIKKEDWEKLHVHIASYNNFPTAAGLASSAAGLACLVFTLGKLMNVNEDYGELSSIARQGSGSACRSIYGGFVKWCMGKNDDGSDSMAVQLADESHWDDLVIIIAVVSSKQKETSSTSGMRDTVETSPLLQYRAQTVVPSRILKMEDAIKNRDFESFARLTCADSNQFHAVCLDTSPPIFYMNDTSHRIISLVEKWNHSEGTPQVAYTFDAGPNAVLIARNRKTATLLLQRLLYTFPPQKNDLDSYMLGDKSILSDAGLQSIADVEALPAPPEMKAPNQKFKGDVSYFICSRPGAGPKVLTDESHALIDSATGLAKGV

SEQ ID NO: 64240 - DNA, 657 bp, Triticum aestivum
  misc_feature (1)..(657): Ceres Seq. ID no. 15173170
actgcactctactctactccatcttcttgctctgcactacgccaccacctggtcagtcaagagaaggaaagatgcctagcgcggggctggaggcggggtcgaacaaggtggacgtggccatcgacctcgggaacccgctgctcaaccgcaccgtcgacggcttcctcaagatcggcgccgtcggcgcctgcagggtggtcgccgaggacgccttcgactgcatccacaggggggatatctcgaagcgccagcttgaagagtcgctgaagaaaatgtgcaaggagggtgcatattggggtgctgttgctggggtgtatgtaggcatggagtatggagtggaaagggcccgtggtgaccgtgactggaaaaatgcgttgatagcaggcattgcaaccggtgccctggtctctgctgctaccaacaacaaagggaacaagatcgcccaggacgccatcacaggaggcgccatcgcgaccgccgtcgagttcatcaactacctcacctagccgtgaggccatccatattcgcggcgatgtttttattggacaagactgaataagaacttcttcactgaagccatccaccctttgtgttaataattggagccgtttcctccaatgttcttccattttattttatttttgttgcctgcgttcg

SEQ ID NO: 64241 - protein, 167 aa, Triticum aestivum
  peptide (1)..(167): Ceres Seq. ID no. 15173171
CTLLYSIFLLCTTPPPGQSREGKMPSAGLEAGSNKVDVAIDLGNPLLNRTVDGFLKIGAVGACRVVAEDAFDCIHRGDISKRQLEESLKKMCKEGAYWGAVAGVYVGMEYGVERARGDRDWKNALIAGIATGALVSAATNNKGNKIAQDAITGGAIATAVEFINYLT

SEQ ID NO: 64242 - protein, 144 aa, Triticum aestivum
  peptide (1)..(144): Ceres Seq. ID no. 15173172
MPSAGLEAGSNKVDVAIDLGNPLLNRTVDGFLKIGAVGACRVVAEDAFDCIHRGDISKRQLEESLKKMCKEGAYWGAVAGVYVGMEYGVERARGDRDWKNALIAGIATGALVSAATNNKGNKIAQDAITGGAIATAVEFINYLT

SEQ ID NO: 64243 - protein, 88 aa, Triticum aestivum
  peptide (1)..(88): Ceres Seq. ID no. 15173173
TALYSTPSSCSALRHHLVSQEKERCLARGWRRGRTRWTWPSTSGTRCSTAPSTASSRSAPSAPAGWSPRTPSTASTGGISRSASLKSR

SEQ ID NO: 64244 - DNA, 2213 bp, Triticum aestivum
  misc_feature (1)..(2213): Ceres Seq. ID no. 13597334
tcatcatcaccatggctcggatccaaggagaggtacgtgagtgagtgatatgctcccactcccacatcttcttctagtccacaccttcctcccccatcccctgcctggccctgctccccatttacgcgcccggtgcgtacattcatgcatgacgcacacggccatgaagaggaggaggcggcggcatggccagcctcatcatcttcacctccttgtctccctcctcctcctcctactcctcgaccgcgcttgtgcagctctaccgtcgtcgcccaagatggcaaggatccagcagcatctcgaccgcgccaacaagccagcactgcgcaccatacagagcatggacggggacaccatcgactgcgtgccccggcacaagcagcacgcgctggaccacccgctcctcaggaaccacaggatccagagcgcgccgccgagcatgcccgcctccgccaccgccaccttcagtgctagcgcggcggcgtcgggcaactccaccagcagggccagagcggcgtggcagacgtggcaccacgcgggccactgcccgaaaggcacggtgcccgtgcggcggaccaccgccgaggacgtgctgcgcggcgggcagtcgctcttccgcttcggccgcaagcggcaccgccgcgaccgtgcggcccgcgccgccaacgcccccgacgtcgtcaccggcaacggccacgagcacgcgatcgcgtacacggcggtggggcagcaggaggtgtacggcgccaaggcgaccatcaacgtctgggatccggccatccacgagaacaacggcttcagcctctcgcagctctggctgctctccggctccttcaacggctccgacctcaacagcatcgaggccgggtggcaggtcactcccactcttccatcccatttccatcccatattcttagtgatgatccatctcacttggcttgttcattaaccgttgtaccagtaacttattgcatctgcattgcacggtaaaaaatcattgagatctgcagcgcgggcacatggcgccataaatgcgtgcacatctcgactcgatagatcgattccgtttgtgtacgacggctaccatagtttaacctcttctcttcatttgaggtcaacccatccatatggagaagtactccaacttgatatagtactaccatagaagaatccatgcatgtgagaaatatatatggaatccccgcagaaaaaggaggaatatatataatgggactgtacacttggctgtagtaggagacaaaattgctccaaaaagtgctaatgagttgtggtaatggacacgctcagctcagcgctaactttggatctactccagcaacatgcatgataagcactgcatgcatgcacatgtgctgcttaatcgatctgcatgcatgaaagcttacagtttacgtttctttctagtcaggtcagccctgagctgtacggtgacagcaggcctaggctcttcacatattggacaagcgacgcgtacgaggcgacgggctgctacaacgcgctgtgcccggacttcgtgcagaccagctcccgcgtggccatcggcgccgccatctccccggtctcctccctcgctggcgagcagtacgacatgacgctcctcatctggaaggaccccaagctcggcaactggtggcttagctacggcgacgccggagcctcgcagctcgtcggctactggcccgccgagctcttcacgcacctctccggccacgccagcatggtcgagtggggcggcgaggtcgttaacaccagcccggggggcgcgcacaccgccacgcagatgggctccggcaggttcgccgccgaggggttcggccgcgccagctacttccgcaacctcgagacggtggacgccgggaacagcctcgcccccgtgtcgctcgacgccttgcagacgctggccgaggacgccggctgctacgacatcaggaaggcctacgacgagcgggacggatggggcacgcacttctactacgggggaccgggacacaacccggcctgcccctagcatagccttggggaccaaacacgtcttgctggtgtacattttgtcttgtttttcggggacttgatcgctctcacctctcagccgatcgtgatcagcaacgtcttgactaaatctagtgttagagcatctacggccggactcgaaaaatccgacctttcaaacgcccgtgcacacggggtgtctg

SEQ ID NO: 64245 - protein, 299 aa, Triticum aestivum
  peptide (1)..(299): Ceres Seq. ID no. 13597335
MLPLPHLLLVHTFLPHPLPGPAPHLRARCVHSCMTHTAMKRRRRRHGQPHHLHLLVSLLLLLLLDRACAALPSSPKMARIQQHLDRANKPALRTIQSMDGDTIDCVPRHKQHALDHPLLRNHRIQSAPPSMPASATATFSASAAASGNSTSRARAAWQTWHHAGHCPKGTVPVRRTTAEDVLRGGQSLFRFGRKRHRRDRAARAANAPDVVTGNGHEHAIAYTAVGQQEVYGAKATINVWDPAIHENNGFSLSQLWLLSGSFNGSDLNSIEAGWQVTPTLPSHFHPIFLVMIHLTWLVH

SEQ ID NO: 64246 - protein, 266 aa, Triticum aestivum
  peptide (1)..(266): Ceres Seq. ID no. 13597336
MTHTAMKRRRRRHGQPHHLHLLVSLLLLLLLDRACAALPSSPKMARIQQHLDRANKPALRTIQSMDGDTIDCVPRHKQHALDHPLLRNHRIQSAPPSMPASATATFSASAAASGNSTSRARAAWQTWHHAGHCPKGTVPVRRTTAEDVLRGGQSLFRFGRKRHRRDRAARAANAPDVVTGNGHEHAIAYTAVGQQEVYGAKATINVWDPAIHENNGFSLSQLWLLSGSFNGSDLNSIEAGWQVTPTLPSHFHPIFLVMIHLTWLVH

SEQ ID NO: 64247 - protein, 261 aa, Triticum aestivum
  peptide (1)..(261): Ceres Seq. ID no. 13597337
MKRRRRRHGQPHHLHLLVSLLLLLLLDRACAALPSSPKMARIQQHLDRANKPALRTIQSMDGDTIDCVPRHKQHALDHPLLRNHRIQSAPPSMPASATATFSASAAASGNSTSRARAAWQTWHHAGHCPKGTVPVRRTTAEDVLRGGQSLFRFGRKRHRRDRAARAANAPDVVTGNGHEHAIAYTAVGQQEVYGAKATINVWDPAIHENNGFSLSQLWLLSGSFNGSDLNSIEAGWQVTPTLPSHFHPIFLVMIHLTWLVH

SEQ ID NO: 64248 - DNA, 1242 bp, Triticum aestivum
  misc_feature (1)..(1242): Ceres Seq. ID no. 15179772
cccaactcccaaccaaaccgagagcgcaaccgggacagcgagccaagatctgcagagccacaggcgacctcacaccggcgaccatggccgtggacctcatgggctgctacacccctcgccgcgccgacgaccagctcgccatccaggaggccgccaccgccggcctccgcagcctggagctcctcgtctcctccctctccggcgcggcgccgtccaaggcgccgcagcagcacccgcagcagccgttcggcgagatcgccgaccaggccgtctccaagttccgcaaggtgatctccatcctcgaccgcaccggccacgcccgcttccgccgcggccccgtccagtcgcctaccccgcctcctccggctccggtcgctcctccgccgcccccaccgcgccctctggccgtcgtcgagccggccaggcccgctcccttgaccgtcgtggcgccggtgtcggtggccgccccggtccctctcccgcagccgcagagcctgacgctggacttcaccaagccgaacctgaccatgtcaggcgcgacgtccgtgacgtccacgtccttcttctcgtcggtgaccgccggcgagggcagcgtgtccaagggccgcagcctggtctccgccggcaagccgccgctgtccgggcacaagagaaagccgtgcgccggcgcgcactcggaggccaacaccaccggcagccgatgccactgctccaagagaaggaagaaccgcgtgaagacgacggtgagggtgcccgcggtgagcgcgaagatcgccgacatcccgccggacgagtactcgtggaggaagtacggccagaagcccatcaagggatccccttacccacggggctactacaagtgcagcacagtgcgagggtgcccggcgcggaagcacgtggagcgcgccctggacgacccggcgatgctggtggtgacgtacgagggcgagcaccgccactcgccggggccgatgccgatgcagatggcgccgtcgccggtgccgattccgatgccgatgggcgcgcccgtagccgtagctagtgtgtccgccggcaacgggcacgtctgacttagttaaattttttctttctttccccatttggttgggggtgcttcgttcgttcgctcgcaatctgtctgatgtccgtgtaaagaagaagaaagattgtagagagacggagagggaaacttaatgccagagatttttactacctccaaaaaaaaaaaaaaaaaaaaaaaag

SEQ ID NO: 64249 - protein, 355 aa, Triticum aestivum
  peptide (1)..(355): Ceres Seq. ID no. 15179773
QLPTKPRAQPGQRAKICRATGDLTPATMAVDLMGCYTPRRADDQLAIQEAATAGLRSLELLVSSLSGAAPSKAPQQHPQQPFGEIADQAVSKFRKVISILDRTGHARFRRGPVQSPTPPPPAPVAPPPPPPRPLAVVEPARPAPLTVVAPVSVAAPVPLPQPQSLTLDFTKPNLTMSGATSVTSTSFFSSVTAGEGSVSKGRSLVSAGKPPLSGHKRKPCAGAHSEANTTGSRCHCSKRRKNRVKTTVRVPAVSAKIADIPPDEYSWRKYGQKPIKGSPYPRGYYKCSTVRGCPARKHVERALDDPAMLVVTYEGEHRHSPGPMPMQMAPSPVPIPMPMGAPVAVASVSAGNGHV

SEQ ID NO: 64250 - protein, 346 aa, Triticum aestivum
  peptide (1)..(346): Ceres Seq. ID no. 15179774
PTPNQTESATGTASQDLQSHRRPHTGDHGRGPHGLLHPSPRRRPARHPGGRHRRPPQPGAPRLLPLRRGAVQGAAAAPAAAVRRDRRPGRLQVPQGDLHPRPHRPRPLPPRPRPVAYPASSGSGRSSAAPTAPSGRRRAGQARSLDRRGAGVGGRPGPSPAAAEPDAGLHQAEPDHVRRDVRDVHVLLLVGDRRRGQRVQGPQPGLRRQAAAVRAQEKAVRRRALGGQHHRQPMPLLQEKEEPREDDGEGARGEREDRRHPAGRVLVEEVRPEAHQGIPLPTGLLQVQHSARVPGAEARGARPGRPGDAGGDVRGRAPPLAGADADADGAVAGADSDADGRARSRS

SEQ ID NO: 64251 - protein, 328 aa, Triticum aestivum
  peptide (1)..(328): Ceres Seq. ID no. 15179775
MAVDLMGCYTPRRADDQLAIQEAATAGLRSLELLVSSLSGAAPSKAPQQHPQQPFGEIADQAVSKFRKVISILDRTGHARFRRGPVQSPTPPPPAPVAPPPPPPRPLAVVEPARPAPLTVVAPVSVAAPVPLPQPQSLTLDFTKPNLTMSGATSVTSTSFFSSVTAGEGSVSKGRSLVSAGKPPLSGHKRKPCAGAHSEANTTGSRCHCSKRRKNRVKTTVRVPAVSAKIADIPPDEYSWRKYGQKPIKGSPYPRGYYKCSTVRGCPARKHVERALDDPAMLVVTYEGEHRHSPGPMPMQMAPSPVPIPMPMGAPVAVASVSAGNGHV

SEQ ID NO: 64252 - DNA, 1142 bp, Triticum aestivum
  misc_feature (1)..(1142): Ceres Seq. ID no. 12626108
aactccatttcccaaccaaccaaccaacagccgccaaaggccgatccatggcgtcggcgtcgccgtcgcggctgctgccgccctttccccctccagctgccccaacatcccgccacacaactctccgcgccgtccctcgcagctgcagcctcgccatcccgagcctccggtgccgcgcctccgctccagcggccgttgacgctggcgcgccgctgctgctagaggaccgcgccggcgcggtgtccatccgagagtttgtcacgctcgatgagctccacgccgccgtgcgcctccgcgttcgcaccttctacgagtacgcccgcgacactgtcggcgccgaggatcacaggaaaggtctggcagagagggaatatgaagcattacaaaatcggatttctgggaatatgattaattttcggagagtctcttgtataaatgggacagtgccactgttgccatcgttgatgtcagcagaggagctttgttcaacatgcaagtttgttgaagatggggaagagagaatagtagttggtagtttagacctgaatcagtgcctctggctaccagatgaactgactggaaagaggccaggggtaactgaatcaagccatacacgggcatatctgagcaatgtatgtgttgccaaggagctccaaagatgcggactgggctatgcattggttgacaagtctaagaagcttgctcgtcaatggggcataacggatttgtatgtccatgttgccatcaacaacgaggcggcacaaaagctgtacatcaagagtggatttgtgtacgaaagcgaggagcctgcccagcaggctaggcatcttgggcgcccccgaaggcttcttctttggcttgatatgaagaacgaaaccttgtgatcttacctgtaaatgcttctttttatagttatacagcattatctatatataattttgattttactgcccaattcaagtagtagtatttttttccttgtggaaagaaatacaattctcaaaatttaaattaaggattctccccataattttatttgttctgcacatagtactcattattcaatgtatatccagcattcccccggtggcaaacaatggtacatgataatacagtgctatcaaatctttgcattcctgctc

SEQ ID NO: 64253 - protein, 293 aa, Triticum aestivum
  peptide (1)..(293): Ceres Seq. ID no. 12626109
LHFPTNQPTAAKGRSMASASPSRLLPPFPPPAAPTSRHTTLRAVPRSCSLAIPSLRCRASAPAAVDAGAPLLLEDRAGAVSIREFVTLDELHAAVRLRVRTFYEYARDTVGAEDHRKGLAEREYEALQNRISGNMINFRRVSCINGTVPLLPSLMSAEELCSTCKFVEDGEERIVVGSLDLNQCLWLPDELTGKRPGVTESSHTRAYLSNVCVAKELQRCGLGYALVDKSKKLARQWGITDLYVHVAINNEAAQKLYIKSGFVYESEEPAQQARHLGRPRRLLLWLDMKNETL

SEQ ID NO: 64254 - protein, 278 aa, Triticum aestivum
  peptide (1)..(278): Ceres Seq. ID no. 12626110
MASASPSRLLPPFPPPAAPTSRHTTLRAVPRSCSLAIPSLRCRASAPAAVDAGAPLLLEDRAGAVSIREFVTLDELHAAVRLRVRTFYEYARDTVGAEDHRKGLAEREYEALQNRISGNMINFRRVSCINGTVPLLPSLMSAEELCSTCKFVEDGEERIVVGSLDLNQCLWLPDELTGKRPGVTESSHTRAYLSNVCVAKELQRCGLGYALVDKSKKLARQWGITDLYVHVAINNEAAQKLYIKSGFVYESEEPAQQARHLGRPRRLLLWLDMKNETL

SEQ ID NO: 64255 - protein, 159 aa, Triticum aestivum
  peptide (1)..(159): Ceres Seq. ID no. 12626111
MINFRRVSCINGTVPLLPSLMSAEELCSTCKFVEDGEERIVVGSLDLNQCLWLPDELTGKRPGVTESSHTRAYLSNVCVAKELQRCGLGYALVDKSKKLARQWGITDLYVHVAINNEAAQKLYIKSGFVYESEEPAQQARHLGRPRRLLLWLDMKNETL

SEQ ID NO: 64256 - DNA, 1202 bp, Triticum aestivum
  misc_feature (1)..(1202): Ceres Seq. ID no. 12618341
atctcaaccttgccttagttttcgacgccgccgccgtagagcccgttccccctcacgcggccagcgaccatgtcgagtggcctgaacatgtccctagacgacctcatcaagcaatccaagtccaggcccaaagccaaccccgccttctcttccgggcccacccgccgggcggcgccgtccgcccggaccatgccctacccgccgtctgctcccaaggccgccaccgccgactctctgtacggtgtctactccgagcacgttgccgccatggcaacctccccgccaccgccggtggctgggccacaggcactcgagacgggcacgaagctgcacatctccaacctcgactccagcgtcaccgtcgaggacgtccaggaactcttttcagagattggtgagctcaaacgttattctgttaactacgataaggatgggaagtctcagggaagtgcggaagttgtctttgcaagaaaagtagatgctttggatgctattgagagatataacggtgttctgcttgatgggaagccaatgaagatagagctcattggaaataagaccgagccacacccaacagaacctttgatgtacaacggcacttcttctaactacaatgcaactccaaacagtttgcttcagagaggtgacccgagagggccatttcatggtaatggtcgttctggaggcagtggtcagggcggtgctggcaaaagaggaatgtttcaaggcaacgttcgtcctggaaacactgtgcaggacggtggtgggcggggtcagggcagagccagagggcatgatcgcagccgagttccggcctctgctgcggatcttgatgctgaactggagcagtatcatgcagcagcagtgaagcaaaaatgaggctctgatgtagtccgtatattttatactccctccgtccatatataggtgacgtggttttagtccaaatttaaactaaaaccacgtcacttgtttatgaacggagggagtatatacatagattgttgcattattagttttctgcttttagtcgtcaggtaccatgttgagaaaagttggaaggcattaattcgacatttacatctgctgtgcttttcatatccctactccgtgctggatatgccgtattacctaattttgaaacaggggtgttctcttggggtttatttggatagtaagattacaaagaactagttcttgtc

SEQ ID NO: 64257 - protein, 269 aa, Triticum aestivum
  peptide (1)..(269): Ceres Seq. ID no. 12618342
MSSGLNMSLDDLIKQSKSRPKANPAFSSGPTRRAAPSARTMPYPPSAPKAATADSLYGVYSEHVAAMATSPPPPVAGPQALETGTKLHISNLDSSVTVEDVQELFSEIGELKRYSVNYDKDGKSQGSAEVVFARKVDALDAIERYNGVLLDGKPMKIELIGNKTEPHPTEPLMYNGTSSNYNATPNSLLQRGDPRGPFHGNGRSGGSGQGGAGKRGMFQGNVRPGNTVQDGGGRGQGRARGHDRSRVPASAADLDAELEQYHAAAVKQK

SEQ ID NO: 64258 - protein, 263 aa, Triticum aestivum
  peptide (1)..(263): Ceres Seq. ID no. 12618343
MSLDDLIKQSKSRPKANPAFSSGPTRRAAPSARTMPYPPSAPKAATADSLYGVYSEHVAAMATSPPPPVAGPQALETGTKLHISNLDSSVTVEDVQELFSEIGELKRYSVNYDKDGKSQGSAEVVFARKVDALDAIERYNGVLLDGKPMKIELIGNKTEPHPTEPLMYNGTSSNYNATPNSLLQRGDPRGPFHGNGRSGGSGQGGAGKRGMFQGNVRPGNTVQDGGGRGQGRARGHDRSRVPASAADLDAELEQYHAAAVKQK

SEQ ID NO: 64259 - protein, 229 aa, Triticum aestivum
  peptide (1)..(229): Ceres Seq. ID no. 12618344
MPYPPSAPKAATADSLYGVYSEHVAAMATSPPPPVAGPQALETGTKLHISNLDSSVTVEDVQELFSEIGELKRYSVNYDKDGKSQGSAEVVFARKVDALDAIERYNGVLLDGKPMKIELIGNKTEPHPTEPLMYNGTSSNYNATPNSLLQRGDPRGPFHGNGRSGGSGQGGAGKRGMFQGNVRPGNTVQDGGGRGQGRARGHDRSRVPASAADLDAELEQYHAAAVKQK

SEQ ID NO: 64260 - DNA, 953 bp, Triticum aestivum
  misc_feature (1)..(953): Ceres Seq. ID no. 13597839
ccccaatcctctctcgtccccatccccaatccccgatctcccgaccccgacccccgacgaaaccctagccagcaaaccgcggcggcggcggcaatgggcaacccggagaagctgatggcgcagatcttcgacctcaagttcacgtccaagtcgctgcagcggcaggcgcgcaagtgcgagaaggaggagaaggagcagaagctcaaggtgaagaaggccatcgagaagggcaacgtggacggcgcgcggatctacgccgagaacgccatccgcaagcgcaccgagcacatgaactacctccgcctcgcctcccgcctcgacgccgtcgtcgcgcgcctcgacacgcaggccaagatgcaggccatcggcaagtccatgggcagcatcgtcaagtcgcttgactcctccctcgccacgggcaacctccagaagatgtccgagaccatggacagcttcgagcgccagttcgtcaacatggaggtccaggccgagttcatggagggcgccatggccggctccacctccctctccacgcccgagaccgaggtcaactccctcatgcagcaggtcgccgacgactacggcctcgaggtctccgtcggcctcccccaggccgccgcccacgccatcccggccgccaaggacaaggagaaggtcgacgaggacgacctcacccgccgcctcgcagagctcaaggcccgcggctaaactgaacggccttcgcttcacttcaggtacggctcatgcaatgttcactcgcctcgccgtatgtcagttgtcaagggctgctcatatctgacagccccgtaaatattgttaacgcccatgtgggtgctctctttgtctgggatctctatgtggaactgatttaaacgctgctgtgtgatatgacgtgttattccgaatcggagtgtgatattgatattatgagtcagtaataatacatgtgcttg

SEQ ID NO: 64261 - protein, 235 aa, Triticum aestivum
  peptide (1)..(235): Ceres Seq. ID no. 13597840
PQSSLVPIPNPRSPDPDPRRNPSQQTAAAAAMGNPEKLMAQIFDLKFTSKSLQRQARKCEKEEKEQKLKVKKAIEKGNVDGARIYAENAIRKRTEHMNYLRLASRLDAVVARLDTQAKMQAIGKSMGSIVKSLDSSLATGNLQKMSETMDSFERQFVNMEVQAEFMEGAMAGSTSLSTPETEVNSLMQQVADDYGLEVSVGLPQAAAHAIPAAKDKEKVDEDDLTRRLAELKARG

SEQ ID NO: 64262 - protein, 204 aa, Triticum aestivum
  peptide (1)..(204): Ceres Seq. ID no. 13597841
MGNPEKLMAQIFDLKFTSKSLQRQARKCEKEEKEQKLKVKKAIEKGNVDGARIYAENAIRKRTEHMNYLRLASRLDAVVARLDTQAKMQAIGKSMGSIVKSLDSSLATGNLQKMSETMDSFERQFVNMEVQAEFMEGAMAGSTSLSTPETEVNSLMQQVADDYGLEVSVGLPQAAAHAIPAAKDKEKVDEDDLTRRLAELKARG

SEQ ID NO: 64263 - protein, 197 aa, Triticum aestivum
  peptide (1)..(197): Ceres Seq. ID no. 13597842
MAQIFDLKFTSKSLQRQARKCEKEEKEQKLKVKKAIEKGNVDGARIYAENAIRKRTEHMNYLRLASRLDAVVARLDTQAKMQAIGKSMGSIVKSLDSSLATGNLQKMSETMDSFERQFVNMEVQAEFMEGAMAGSTSLSTPETEVNSLMQQVADDYGLEVSVGLPQAAAHAIPAAKDKEKVDEDDLTRRLAELKARG

SEQ ID NO: 64264 - DNA, 1675 bp, Triticum aestivum
  misc_feature (1)..(1675): Ceres Seq. ID no. 13598642
gaaaaatcgaccaaagagcaacccgacggccgtggtgatggaggcgatggggaagcagcagagggaggaggtgctcctccgcgccgcctccgacggcaacctccgactcctcaagaagatggcgcgctggatggggtcagggggccaaggcgaggccgccgtacttgcggcggtggaggacggcgaagggggtcgcccgctgcacctggcggccggggcgggccgggtcgaggtctgcaggtacctcgtcgaggacctccgcctcgatgtcaatcaactcaactgtcaaggtcacacgccactgtacctttctgcctattttgggagagctgctgctgcaacatatcttcttgatcatggtgccgatccactagctagcaaactacggtcacctctttatggcgctgcaatgcaagggcattgtgaaatgttagaaatgctgctttcaagaggactcgatgtggatttaaattctgtacaagggacggcattgcatgcagctgcttgttataaacaacatggcatgatgaagattttgttggagcaccatgccgatcctaacaaggtttgctatcttaataataccccgttgagtttggccatgcggcagcgggacatgtctacagagttgttggaatgtgccaagctactcataaaggctggtgctgatgtgaattttattgaccttgatggtgatagttacgtgacagtggcagcgaagttcggctatcctggcatcatgaagtgcttattagatgctggtgctaaccccgatattccagatgaatatggtagaacaccagttgaatttgctgcctctaacggcagtagggatatggttgaaatgttattccctttaacttctcctatttcaacgctgccggactggagtattgatggaatcatttctcatgtgaaacactatggtttgaagccgagggataaacaaaagtgtgcgaagagaagaactgaactgaaacagaaagctttaaaggcttttaaggaagaggaatattttatagcagcactgctgtatagttgtgcaataacacttgacccgagtccagatgaatatgcaaccctattggcaaataggagtctctgctgtttgcgcaccaagaacggaagagctgctctccctgatgctaccatgtgcagaagggtgcgacctttttggccaaaagcctgctatcgagaagggtcagcttttatgttattgaaggactatgagaaagcatgcaaggcttttgcggatggcttgaagcttgaccctacaaatggtgatcttgcaaatgctttaagggaagcccaagaagctgcgaaggatgctcgtcgccctgaaaattgactgatgtgtcaaaccttacatgcagaatctgaggctctgttttgttgctaagcaccttttgtccatcctgaaaacttctgccaagaatatcccgtggtcgtttaagacttccgttgcacccatcgtttgtaaatataactggggatgaactcgctgaccatagtatcttcattccagtgcatgtgttgacaaactttatcgtcacagaacgtacggcatagtccggtcaccgagaagcgctggaggcggagcagtatgtaattggctcattaattcttccttccccttaccttcgcgggaagtggtaaatgatgaaatttggacttg

SEQ ID NO: 64265 - protein, 448 aa, Triticum aestivum
  peptide (1)..(448): Ceres Seq. ID no. 15222389
KNRPKSNPTAVVMEAMGKQQREEVLLRAASDGNLRLLKKMARWMGSGGQGEAAVLAAVEDGEGGRPLHLAAGAGRVEVCRYLVEDLRLDVNQLNCQGHTPLYLSAYFGRAAAATYLLDHGADPLASKLRSPLYGAAMQGHCEMLEMLLSRGLDVDLNSVQGTALHAAACYKQHGMMKILLEHHADPNKVCYLNNTPLSLAMRQRDMSTELLECAKLLIKAGADVNFIDLDGDSYVTVAAKFGYPGIMKCLLDAGANPDIPDEYGRTPVEFAASNGSRDMVEMLFPLTSPISTLPDWSIDGIISHVKHYGLKPRDKQKCAKRRTELKQKALKAFKEEEYFIAALLYSCAITLDPSPDEYATLLANRSLCCLRTKNGRAALPDATMCRRVRPFWPKACYREGSAFMLLKDYEKACKAFADGLKLDPTNGDLANALREAQEAAKDARRPEN

SEQ ID NO: 64266 - protein, 436 aa, Triticum aestivum
  peptide (1)..(436): Ceres Seq. ID no. 15222390
MEAMGKQQREEVLLRAASDGNLRLLKKMARWMGSGGQGEAAVLAAVEDGEGGRPLHLAAGAGRVEVCRYLVEDLRLDVNQLNCQGHTPLYLSAYFGRAAAATYLLDHGADPLASKLRSPLYGAAMQGHCEMLEMLLSRGLDVDLNSVQGTALHAAACYKQHGMMKILLEHHADPNKVCYLNNTPLSLAMRQRDMSTELLECAKLLIKAGADVNFIDLDGDSYVTVAAKFGYPGIMKCLLDAGANPDIPDEYGRTPVEFAASNGSRDMVEMLFPLTSPISTLPDWSIDGIISHVKHYGLKPRDKQKCAKRRTELKQKALKAFKEEEYFIAALLYSCAITLDPSPDEYATLLANRSLCCLRTKNGRAALPDATMCRRVRPFWPKACYREGSAFMLLKDYEKACKAFADGLKLDPTNGDLANALREAQEAAKDARRPEN

SEQ ID NO: 64267 - protein, 433 aa, Triticum aestivum
  peptide (1)..(433): Ceres Seq. ID no. 15222391
MGKQQREEVLLRAASDGNLRLLKKMARWMGSGGQGEAAVLAAVEDGEGGRPLHLAAGAGRVEVCRYLVEDLRLDVNQLNCQGHTPLYLSAYFGRAAAATYLLDHGADPLASKLRSPLYGAAMQGHCEMLEMLLSRGLDVDLNSVQGTALHAAACYKQHGMMKILLEHHADPNKVCYLNNTPLSLAMRQRDMSTELLECAKLLIKAGADVNFIDLDGDSYVTVAAKFGYPGIMKCLLDAGANPDIPDEYGRTPVEFAASNGSRDMVEMLFPLTSPISTLPDWSIDGIISHVKHYGLKPRDKQKCAKRRTELKQKALKAFKEEEYFIAALLYSCAITLDPSPDEYATLLANRSLCCLRTKNGRAALPDATMCRRVRPFWPKACYREGSAFMLLKDYEKACKAFADGLKLDPTNGDLANALREAQEAAKDARRPEN

SEQ ID NO: 64268 - DNA, 1412 bp, Triticum aestivum
  misc_feature (1)..(1412): Ceres Seq. ID no. 14302224
acgtaaggaagaagcaagaagcaggtagcagctagcataccacactcgatcgatcatacacatacaccatgccggccgcgcagcacatcgaacgagaccaagacctcgccatgagcagcgacgagttacttcaagctcagctggagctctaccaccacggcctcgccttcgtcaagtcactggcgctcaaggccgccacggacctgcgcatccccgacgccatccaccgccgcggcggcgccgccaccttgtccgagctggcctccgacaccgggatccaccccacgaagcgctccaacctccggcgggtcatgcgggtgctcaccaccaccggggtattctccattgtccaaggcaaaggcagcaacgaccacgccggtgatggcgctgcgtattacaagctcacgcgggtctcccggctccttgtcgagagatcaccgcacaacctgtccccgatggtgggcaccatcgtcaacacgttatgctggacctctctcctcaaaatgcccgagtggtttacccaaggccaagagggagagtcggcacagtcgcactcgctcgtccagctggccaacggctgcacgttctgggacaccaccaaggtcgatggcggcttgttcaacgacggcatggccgcggacagccgcatcgccatgaaggtcctgttgaaggagcacggcggagcgttcggggaagtgaaaagctcgctggtggacatcggcggcaaccatggcgccaccgcgtcggccgtggcgagagcgttcccgcacctcaagtgcagcgttctggacctcccacacgtcgtcgccgcggctcccgccagcgacattttgaccttcgtcgctggaaatatgttcgagtatgtcccacctgcggatgctgttctactcaagtggattttgcatgactggaaacacgaagattgcgtcaagataatgcgccggtgcaaggaagcgatcccagcgaaagaagccggaggaaaggtgataatcatcgacatggtggtgggatatccggtgactcagcccaaccattccaaagaggcgcaggttttgttagatatctacatgatgggctccgatggaatggagcgagaggaaaacgagtggagcttgattttctccgaagccgggttcagcgactacaagatcactccaaccaatgggattcgatcaattatcgaagtatacccttaaatgtacttacttccacttcggagatactatctccttccgtccgtacgtgtttattagtcttgcacgtgtaattgacttggtaaattagcagccaagatacacgtgcaagacttataaaccggaaaggaaggagtcgtcatttgatttgtaataaatctcaccaggaactctctgtattattgcatttaagttttactttttgtttatagattttac

SEQ ID NO: 64269 - protein, 375 aa, Triticum aestivum
  peptide (1)..(375): Ceres Seq. ID no. 14302225
MPAAQHIERDQDLAMSSDELLQAQLELYHHGLAFVKSLALKAATDLRIPDAIHRRGGAATLSELASDTGIHPTKRSNLRRVMRVLTTTGVFSIVQGKGSNDHAGDGAAYYKLTRVSRLLVERSPHNLSPMVGTIVNTLCWTSLLKMPEWFTQGQEGESAQSHSLVQLANGCTFWDTTKVDGGLFNDGMAADSRIAMKVLLKEHGGAFGEVKSSLVDIGGNHGATASAVARAFPHLKCSVLDLPHVVAAAPASDILTFVAGNMFEYVPPADAVLLKWILHDWKHEDCVKIMRRCKEAIPAKEAGGKVIIIDMVVGYPVTQPNHSKEAQVLLDIYMMGSDGMEREENEWSLIFSEAGFSDYKITPTNGIRSIIEVYP

SEQ ID NO: 64270 - protein, 361 aa, Triticum aestivum
  peptide (1)..(361): Ceres Seq. ID no. 14302226
MSSDELLQAQLELYHHGLAFVKSLALKAATDLRIPDAIHRRGGAATLSELASDTGIHPTKRSNLRRVMRVLTTTGVFSIVQGKGSNDHAGDGAAYYKLTRVSRLLVERSPHNLSPMVGTIVNTLCWTSLLKMPEWFTQGQEGESAQSHSLVQLANGCTFWDTTKVDGGLFNDGMAADSRIAMKVLLKEHGGAFGEVKSSLVDIGGNHGATASAVARAFPHLKCSVLDLPHVVAAAPASDILTFVAGNMFEYVPPADAVLLKWILHDWKHEDCVKIMRRCKEAIPAKEAGGKVIIIDMVVGYPVTQPNHSKEAQVLLDIYMMGSDGMEREENEWSLIFSEAGFSDYKITPTNGIRSIIEVYP

SEQ ID NO: 64271 - protein, 294 aa, Triticum aestivum
  peptide (1)..(294): Ceres Seq. ID no. 14302227
MRVLTTTGVFSIVQGKGSNDHAGDGAAYYKLTRVSRLLVERSPHNLSPMVGTIVNTLCWTSLLKMPEWFTQGQEGESAQSHSLVQLANGCTFWDTTKVDGGLFNDGMAADSRIAMKVLLKEHGGAFGEVKSSLVDIGGNHGATASAVARAFPHLKCSVLDLPHVVAAAPASDILTFVAGNMFEYVPPADAVLLKWILHDWKHEDCVKIMRRCKEAIPAKEAGGKVIIIDMVVGYPVTQPNHSKEAQVLLDIYMMGSDGMEREENEWSLIFSEAGFSDYKITPTNGIRSIIEVYP

SEQ ID NO: 64272 - DNA, 1188 bp, Triticum aestivum
  misc_feature (1)..(1188): Ceres Seq. ID no. 13597338
aaaaacagatcagtccggggtcgtggcctccactcggcatcttcttcctcccccacatcgcacttcctcccctgctagattcgtccctccaccgaccggcaaggcctctctcctgcacttccctcgcccaaggttgcaccagagaaggcggaaaacatcacagtttgcgaaatcgtggagcggtagagagagatggccgagacggtgttcgctccgtgtttggaagggatgaagcatgtcaggtcggacagcggggtcatgctcgccaagcccttccttgatgtctgcaagcaaatcttgcctgtcctggataaatttggtgctgctatggcaattgtgaagagtgatattggaggtaatatcacgaggttggagaacaagtattcttcagacccgtcaaaatatgagcacttgtacaccatggtccaagaagaagttgaaaagaagaccgcaaagggttcatcaagctgcacaaatggacttctatggctcacgagggctatggacttccttgttgaactgttccgtaatctacttgaccatccagactggactatgagtcaagcatgtactgattcatacacaaaaactctgaagaaatggcatgggtggctcgccagttccagttttacggtggctatgaagcttgctcctaacaaagataaatttatggaggtaattagcggaacgggtgatatcaaagcagacattgagaaattctgcaccaccttttatccctttctcaaggagaatcatgacttcctggccagtgttgggctcgatgatatgaaggcttcttaatgcaatacacaccgacaatcatcacaaatatgaagtgctgctattttctcgaattttattgtggccaaggatacactgttttgcatactgatcttcaggaaattatagacgaataataagtcaaaatgtttgggtgttcatgacccatagctacttacatacaagatgaattgaatgtatgcatgggatcaaaattaacttttgaaagtcaccttgtcagccaagccggccattttaccaattgatgtaactgaagagaacgcagaggatgcagatatgtggtgatcttgtcgttcagtttataaactgctgtgtaagtgattctgtttataaactgctgtataagtgatgaggcgaagatgcaaattaagagtctgttattgatgc

SEQ ID NO: 64273 - protein, 202 aa, Triticum aestivum
  peptide (1)..(202): Ceres Seq. ID no. 13597339
MAETVFAPCLEGMKHVRSDSGVMLAKPFLDVCKQILPVLDKFGAAMAIVKSDIGGNITRLENKYSSDPSKYEHLYTMVQEEVEKKTAKGSSSCTNGLLWLTRAMDFLVELFRNLLDHPDWTMSQACTDSYTKTLKKWHGWLASSSFTVAMKLAPNKDKFMEVISGTGDIKADIEKFCTTFYPFLKENHDFLASVGLDDMKAS

SEQ ID NO: 64274 - protein, 190 aa, Triticum aestivum
  peptide (1)..(190): Ceres Seq. ID no. 13597340
MKHVRSDSGVMLAKPFLDVCKQILPVLDKFGAAMAIVKSDIGGNITRLENKYSSDPSKYEHLYTMVQEEVEKKTAKGSSSCTNGLLWLTRAMDFLVELFRNLLDHPDWTMSQACTDSYTKTLKKWHGWLASSSFTVAMKLAPNKDKFMEVISGTGDIKADIEKFCTTFYPFLKENHDFLASVGLDDMKAS

SEQ ID NO: 64275 - protein, 180 aa, Triticum aestivum
  peptide (1)..(180): Ceres Seq. ID no. 13597341
MLAKPFLDVCKQILPVLDKFGAAMAIVKSDIGGNITRLENKYSSDPSKYEHLYTMVQEEVEKKTAKGSSSCTNGLLWLTRAMDFLVELFRNLLDHPDWTMSQACTDSYTKTLKKWHGWLASSSFTVAMKLAPNKDKFMEVISGTGDIKADIEKFCTTFYPFLKENHDFLASVGLDDMKAS

SEQ ID NO: 64276 - DNA, 1294 bp, Triticum aestivum
  misc_feature (1)..(1294): Ceres Seq. ID no. 13662949
gcaacaagatcagtgatgaatatttctctgaaaaaaacaagccagattcgccaagcgcccggtctccgctctccacgtaacccttctcccctcccaacctccgcgtcgtcgcaaacccaaatcctcctcccactccagccccccctcatcagatcacgcgagcagggggcaccggaaccggatcgggcgcggcggcggaggcgggcgacggcgatgatgcacggcgtgggcccgtcggacgacgccgcggcggcggcggcgctggagctgcaggagtccgggtgggaggagctgcggcgggaggcgcggaagctggagggggacctggacgtgaagctctcctcgtacgcgcgcctcgccgcgcgctcctcctccgcctccgcctcggcctcggcctcggcggcctcccccaccgccgaccgctcctcctggaagtccacggagctcgagatccaggcgctgctcgacaagctgcaggacgtcaacgacgccatgagccgctgcgccgcgcccgccgcccccgccaccgcttccgtctcccagaagctcgcgcgccaccgcgacatcctgcacgagttcacgcaggagttcaggaggacgcgggggaacctgagctccatgagggagcacgccgacctgctcagctccgtgcgcggcgacatcaccgagtccaaggctaccggcggcatgtcgccgagggtacatttgctccgggagagggcttccattcacggcagcgtcaaccagatagacgaggtaattgggcaagctcaaagcacaagagcagccctatccaatcagagggccttgtttggagatgttcaggggaaagtcaagcagttgggtgaaaaattccctgtggtccgaggcctccttggcgccatcaagaggaagaaatcaaaggacacgatcatcctttcagcagtaatcgcggcctgcaccatctttttgatcatctactggctctcaaaatgatcggtccgttgttgggaaagctcgcgacggggacttcctctctcaccacagaatgactgacaagtgaccaacagatggcacgataaaagactggtgattattatccatttcttagggctagtacgagggaatgggagatcccgttgtgtttagctctcaccgtgctgccctcgacatatcttgtttttggagatctcccttgtcatttataccttagatcaattttgtttggtgaattgagatgttgcttgtttcgagtaaatacgatgacacacttctgacacttccatcttacaatgggaattgagctgttgcttgt

SEQ ID NO: 64277 - protein, 324 aa, Triticum aestivum
  peptide (1)..(324): Ceres Seq. ID no. 13662950
ATRSVMNISLKKTSQIRQAPGLRSPRNPSPLPTSASSQTQILLPLQPPLIRSREQGAPEPDRARRRRRATAMMHGVGPSDDAAAAAALELQESGWEELRREARKLEGDLDVKLSSYARLAARSSSASASASASAASPTADRSSWKSTELEIQALLDKLQDVNDAMSRCAAPAAPATASVSQKLARHRDILHEFTQEFRRTRGNLSSMREHADLLSSVRGDITESKATGGMSPRVHLLRERASIHGSVNQIDEVIGQAQSTRAALSNQRALFGDVQGKVKQLGEKFPVVRGLLGAIKRKKSKDTIILSAVIAACTIFLIIYWLSK

SEQ ID NO: 64278 - protein, 319 aa, Triticum aestivum
  peptide (1)..(319): Ceres Seq. ID no. 13662951
MNISLKKTSQIRQAPGLRSPRNPSPLPTSASSQTQILLPLQPPLIRSREQGAPEPDRARRRRRATAMMHGVGPSDDAAAAAALELQESGWEELRREARKLEGDLDVKLSSYARLAARSSSASASASASAASPTADRSSWKSTELEIQALLDKLQDVNDAMSRCAAPAAPATASVSQKLARHRDILHEFTQEFRRTRGNLSSMREHADLLSSVRGDITESKATGGMSPRVHLLRERASIHGSVNQIDEVIGQAQSTRAALSNQRALFGDVQGKVKQLGEKFPVVRGLLGAIKRKKSKDTIILSAVIAACTIFLIIYWLSK

SEQ ID NO: 64279 - protein, 253 aa, Triticum aestivum
  peptide (1)..(253): Ceres Seq. ID no. 13662952
MMHGVGPSDDAAAAAALELQESGWEELRREARKLEGDLDVKLSSYARLAARSSSASASASASAASPTADRSSWKSTELEIQALLDKLQDVNDAMSRCAAPAAPATASVSQKLARHRDILHEFTQEFRRTRGNLSSMREHADLLSSVRGDITESKATGGMSPRVHLLRERASIHGSVNQIDEVIGQAQSTRAALSNQRALFGDVQGKVKQLGEKFPVVRGLLGAIKRKKSKDTIILSAVIAACTIFLIIYWLSK

SEQ ID NO: 64280 - DNA, 1036 bp, Triticum aestivum
  misc_feature (1)..(1036): Ceres Seq. ID no. 12618436
gaacatcctaaccggaaaattaatcgatgctacacagcaataacgcggcagaagaaagatccagcagaaggcaacaacagccaaagactgaaggagaggggatccggcttccggcgaaatggctgcgctgccgccacctccgccgtcgctggagccggagatcggccccgacggcctcgcccgagactcccccgtcctggcctacactgagaaggtcattgcggaggagcagctgcaactgaagaaatatattcaggaaaattattccaaaattcgggatgttgagaaggagctagagaatctgactctagaagttaaactgacagctggaccaaagaaagcagcactcgagcatttgaggaaaaagattgagatgtcaactgagagaatacgtttggctaaggtgaaagaggacgaggcaaaaaaggcctgggaagctgctgcacaagttgttaaagaggaagaggaggctaagcagaggctatgtgatgatctgaaccggttggttcaagagagcgcggcttcacaatattcgaggttagaagagttaaagaagcgtttagaatgtctaaatcccatcagggcttctgtcgatgtttctggtatcaacattgtacagcaggctgccacaaattcggtacctcagcaacccacttcacaaaatctagcgaatgcaattgcccctgcaagcaatatccacaagcccgccaccagcggatcacagcaacaaagaaccgctgaggcggaaaggaagcagagatcatcaaactcgggaggaagagggagaggcggtgtgatggtcctccccaagggaaggggaagctctggatcaggatggacaggtgctgggtttgagacatgatgctgggatccgtagttatatatacttgaaagaattggcatggttgtcttggtataaaacgatggcttggttgtcttggtataaaacgatggcttggttggaactggaaggttgaaagtgtaatggaatgtcgatcctttttggatgtgttagaagcgtgagagggatttggcg

SEQ ID NO: 64281 - protein, 247 aa, Triticum aestivum
  peptide (1)..(247): Ceres Seq. ID no. 12618437
MAALPPPPPSLEPEIGPDGLARDSPVLAYTEKVIAEEQLQLKKYIQENYSKIRDVEKELENLTLEVKLTAGPKKAALEHLRKKIEMSTERIRLAKVKEDEAKKAWEAAAQVVKEEEEAKQRLCDDLNRLVQESAASQYSRLEELKKRLECLNPIRASVDVSGINIVQQAATNSVPQQPTSQNLANAIAPASNIHKPATSGSQQQRTAEAERKQRSSNSGGRGRGGVMVLPKGRGSSGSGWTGAGFET

SEQ ID NO: 64282 - protein, 162 aa, Triticum aestivum
  peptide (1)..(162): Ceres Seq. ID no. 12618438
MSTERIRLAKVKEDEAKKAWEAAAQVVKEEEEAKQRLCDDLNRLVQESAASQYSRLEELKKRLECLNPIRASVDVSGINIVQQAATNSVPQQPTSQNLANAIAPASNIHKPATSGSQQQRTAEAERKQRSSNSGGRGRGGVMVLPKGRGSSGSGWTGAGFET

SEQ ID NO: 64283 - DNA, 1764 bp, Triticum aestivum
  misc_feature (1)..(1764): Ceres Seq. ID no. 13597796
acctagaacatcctaatcgaaaactaaaagaaaaaaaaacactcccctaatcccctccatcttgccgccgccgccgccggattgcttccgcccgtcgccatgtccgccgcgggagaccgctctcccccgcgagaggaaggccgcgcttcgattcgcgcccgggctctccccagcgggccgccggccgggaggctcatcgacgacatcctcgtggagatcctctcgcgcgtcccggccaaggaactctgccgctgcaagagcgtctcgaagcactggttcggcctcatccaccaccccgaccaccgcaagcggctcccccaaaccctggccggcttcttctacggcagcagcgccggcaccaccgcgcagcggctcctggagctgcccttccgcttcaccagcgtctcgggggaccgctgccctccgttcggcgcctccctcaccttcctgcccaaccaccacctgcccgtcgatctgctggactcctgcaacggcctcctcctctgccgatgttaccacgtctccgacggggttggcgcgttccattacgtcgtgtgcaatcccgccacccagaagtgggtcgtgttgcccagctcctgcaaggacagcagcgaggtggccaccacatctctgggcttcgacccggctctatcgtcgcatttccatgtgtttgagctggtagttgagcagaattatactcaggacactgagctttgcggagtggcggtgtattcgtctgaaaccggagaatggatttataaggagaagagatggaacagagctagtcggcactccgcaacagtctttctcgacggccttctgttttttcgtgtccttggccttgaatatcacgactgtgtggctgcggtggacacaaagggagaaacatggatgaaattcagggtccctggtggtcaggttgatgattttggtctggctgatggttttgttcagcagatgttattcagggttcctggtggtccggctgatgattttggtctggctcatggttttattcagcagtcgcagggctgcttgcattttgccaattttcagagggatgaacatggtgttggcattcgattggtggtttatgttctgaaaaactatgaaagcgaagaatggatagtgaagcatagcattaaaacttcagacatatgtggatggacagatttatggcttgatgcggattttgatttcattgcgattcatccagaatgcaactcgttgttcttcattgcggggggtgtcacattaatgtgctataatatggataatcggcaggtcaaagtgatctcctatcttggaggtgccaagccgctatttctgccctatgtgccgttgtacacagagtcactatcactgcactgctaagtggatctctgatcggagtcaattcttcattctatggggcagcgtgcttgccatgtctgcttgaatttggctctcatttgctctgactgatgaatgcatgtttttctggtttggagcaatggtggttcagtatggagggaatttgactgatttctctgtgatctgctatccaaatttgcactaaactttctgccatatgtattggtctctggtttagtcaacttctaccttcatgcattgcttaacctcgtgtagcgtttgtgttaaggtactatgatcattatgtaagacatggacaatggttatcatgcaggaaaacttttctcgaacatcatgctgagggttaaacttttatcttctacagtatttgcagccatgggaattataagc

SEQ ID NO: 64284 - protein, 424 aa, Triticum aestivum
  peptide (1)..(424): Ceres Seq. ID no. 13597797
MSAAGDRSPPREEGRASIRARALPSGPPAGRLIDDILVEILSRVPAKELCRCKSVSKHWFGLIHHPDHRKRLPQTLAGFFYGSSAGTTAQRLLELPFRFTSVSGDRCPPFGASLTFLPNHHLPVDLLDSCNGLLLCRCYHVSDGVGAFHYVVCNPATQKWVVLPSSCKDSSEVATTSLGFDPALSSHFHVFELVVEQNYTQDTELCGVAVYSSETGEWIYKEKRWNRASRHSATVFLDGLLFFRVLGLEYHDCVAAVDTKGETWMKFRVPGGQVDDFGLADGFVQQMLFRVPGGPADDFGLAHGFIQQSQGCLHFANFQRDEHGVGIRLVVYVLKNYESEEWIVKHSIKTSDICGWTDLWLDADFDFIAIHPECNSLFFIAGGVTLMCYNMDNRQVKVISYLGGAKPLFLPYVPLYTESLSLHC

SEQ ID NO: 64285 - DNA, 904 bp, Triticum aestivum
  misc_feature (1)..(904): Ceres Seq. ID no. 13584363
aggcctcgaaactgggccgagtgttggcccacgctccttgggctaaaccctaacgcagagcgtcctctcctctccaacccgacgccggcctccgcctcctcctccgccctcgcctccttcctagccgcacaccttgctggtctggtttgggttgacccggagtgaggcgggatggcgctgaggggcgtttggcagctgcagaagctcgtggtgaacttctgcgattggggagggagcagcaaggggatcagggcttttatggagtcgcatcttccagctatcaaggaaaagaatccccagttagaggtggtgacacagcttgtccgtggccagcatcctaacttgaagggcatttacaaaaaccataatgagagagtggtttgcgtcagaaacttggcacctgaggacataatgctgcaagctagtaggctaaggtgttctctgggcaggaaagtggtgaagctgagaaccagacacgtgacgaagcggccaagcgtccagggaacatggacgacggaactgaagatgtgagtcaaagttcctgatggcacgcactcagcaacaaccgtctcagatctatagcaagaactccgtgctgctattagacctctgttccgtcagtagttattacagtttcattctgtctccttttgtttgagccgcagtctgataataacatgtgaacttggggattttttttttttgttagtgtcacctgtctagctgatattttgatggcaaatgcctgatctttagaccattgcattcattaaagctgtcagcgcagaatttgttctgaaggaaggaggaatgttctgcatgttatgacaggacaagttataaatgtaaaactgtcatgaactatatacattgtgccatgtcttgctgtccatctggtgcactc

SEQ ID NO: 64286 - protein, 119 aa, Triticum aestivum
  peptide (1)..(119): Ceres Seq. ID no. 13584364
MALRGVWQLQKLVVNFCDWGGSSKGIRAFMESHLPAIKEKNPQLEVVTQLVRGQHPNLKGIYKNHNERVVCVRNLAPEDIMLQASRLRCSLGRKVVKLRTRHVTKRPSVQGTWTTELKM

SEQ ID NO: 64287 - protein, 90 aa, Triticum aestivum
  peptide (1)..(90): Ceres Seq. ID no. 13584365
MESHLPAIKEKNPQLEVVTQLVRGQHPNLKGIYKNHNERVVCVRNLAPEDIMLQASRLRCSLGRKVVKLRTRHVTKRPSVQGTWTTELKM

SEQ ID NO: 64288 - DNA, 1448 bp, Triticum aestivum
  misc_feature (1)..(1448): Ceres Seq. ID no. 13597018
ctccctctccttccctctctctctctctcgctcgtcttccttgccccctcgcgcaacagcagcgccacaacgcagtgagtggcacttccgtgatttcgccgccgcgggggcggggggaggaggaggagggaaggaggccatgggcaacgccagcggcagggaggaggacgccgccgcgcccggggaggccgacgccgccgacgtcgacgtcgaggacggaggcgacgactcctcggcccgcggcttccctccctacggcggaggcgccaaccacgtgcgccgtgcgtgctcagtgggcgtcgtgggggccagcggcgggcccggatcgccgcccgtgagccccggccgctccctctcgccgcggatgttcgtgccccagacacctgtacctccattgcaaagacctgctgatgtaactccagtattcaatgaaatactgatgaatgaacaagaagaagaatttgatggcccccctcaaaaggaaatacctgctttgattgtgtggactcttggaggaaagaatgtatctgttgaaggatcttgggataactggaaatcaaggaaaccgatgcagaaatctggaaaagatcattctcttctgttgatccttccttctggagtttatcgttatagatttgttgtagatggagagaggagatgttttcctgaccttccatgtgaaactgacgccatgggcaatgctgttaaccttcttgatgttcatgattttgttcctgaaagtgttgaaagtgtatcagaatttgaggctcctccatccccagaatctagctacagtttccaggcacctgaggaaaaggactttgcgaatgagccacctgctcttccgtctcagcttcacctcggcgttcttaactcacagaactcagaggaaatatgtgcacggccccaacacatcgtcctcaaccaccttttcatcgagaagggttggggtgcccatccgctggtggctcttggtgtaacccacagattcgagtccaaatatgtaacggtcgtcttgtataagcccatagaacgatagcatagcaaccgcatgaaagttgaagctaatgcttgacaactcaccgcgaaaccagcaatgaacagcaacagcgtggcctctctccctgtaaaagcacttcaggtacaggaatattttcgataacttgaaggagcttctagtcgtgatattgctccccttctgtatacctcctggcggatggccttatcgtcgtgagttcatacatatacttgtgttgttgttgttgttgtttccaaccccttgggaatgatatgtgtagaattgtcaccgaaaagtgagaactgagaaccgtgggactccgctgaatcgctaagcttcagagttagatcttgtgatccttattcttcattgtttttcattgtgatgatggtgttgtataataatacaaagctaccggttacggatttgg

SEQ ID NO: 64289 - protein, 345 aa, Triticum aestivum
  peptide (1)..(345): Ceres Seq. ID no. 15222016
SLSFPLSLSRSSSLPPRATAAPQRSEWHFRDFAAAGAGGGGGGKEAMGNASGREEDAAAPGEADAADVDVEDGGDDSSARGFPPYGGGANHVRRACSVGVVGASGGPGSPPVSPGRSLSPRMFVPQTPVPPLQRPADVTPVFNEILMNEQEEEFDGPPQKEIPALIVWTLGGKNVSVEGSWDNWKSRKPMQKSGKDHSLLLILPSGVYRYRFVVDGERRCFPDLPCETDAMGNAVNLLDVHDFVPESVESVSEFEAPPSPESSYSFQAPEEKDFANEPPALPSQLHLGVLNSQNSEEICARPQHIVLNHLFIEKGWGAHPLVALGVTHRFESKYVTVVLYKPIER

SEQ ID NO: 64290 - protein, 299 aa, Triticum aestivum
  peptide (1)..(299): Ceres Seq. ID no. 15222017
MGNASGREEDAAAPGEADAADVDVEDGGDDSSARGFPPYGGGANHVRRACSVGVVGASGGPGSPPVSPGRSLSPRMFVPQTPVPPLQRPADVTPVFNEILMNEQEEEFDGPPQKEIPALIVWTLGGKNVSVEGSWDNWKSRKPMQKSGKDHSLLLILPSGVYRYRFVVDGERRCFPDLPCETDAMGNAVNLLDVHDFVPESVESVSEFEAPPSPESSYSFQAPEEKDFANEPPALPSQLHLGVLNSQNSEEICARPQHIVLNHLFIEKGWGAHPLVALGVTHRFESKYVTVVLYKPIER

SEQ ID NO: 64291 - protein, 224 aa, Triticum aestivum
  peptide (1)..(224): Ceres Seq. ID no. 15222018
MFVPQTPVPPLQRPADVTPVFNEILMNEQEEEFDGPPQKEIPALIVWTLGGKNVSVEGSWDNWKSRKPMQKSGKDHSLLLILPSGVYRYRFVVDGERRCFPDLPCETDAMGNAVNLLDVHDFVPESVESVSEFEAPPSPESSYSFQAPEEKDFANEPPALPSQLHLGVLNSQNSEEICARPQHIVLNHLFIEKGWGAHPLVALGVTHRFESKYVTVVLYKPIER

SEQ ID NO: 64292 - DNA, 1204 bp, Triticum aestivum
  misc_feature (1)..(1204): Ceres Seq. ID no. 13597854
ctgtcgcttcatccttcacgccaccgctctcctcccccttctatatcaatcgccgctcccccggcggcagacacagcggagcgcatctcgacggcggccatggcgacgaacgagagaaccgtcgcgtccgtcgaccccgacgtcgcgctcgcctacaggttccccgaggtctccttcgcctacgacgagagggacgtggcgctctacgcgctcggcgtgggggcctgcggcgcggacgccgtcgacgacaaggagctccacctcgtgcaccacagggacagccagcgccacatcaaggtgcttcctacctttgtttctttatttcctaacaagaacagcaatgggcgtggaattgttaatgtgcctggcattcacttcgatgaaagccttctattgcacggtcaacaatacatagagatctacaagccaattccttcatgtgccagtgttgtaaacaaggttaaggtagctggtttgcacgacaaagggaaagcaacaattcttgagattgaaactacgaccagtctcaaggattctggcgaagtgttatgtatgaacaggagcactattttcttgcgtggtgcgggaggtttttcggactcttccaggccatactcgtatacaacttatcctgccaaccagatttctcgcatttccattccaaattccacaccttccgcagtgcatgaagaccagacacaacaatcccaggcactcttatacaggttatctggggattataatcctttgcattcagaccctatggttgcacagattgcaggattcactcgtccaatactgcacggcctctgcactctggggttcgcggccagggcagtcatcaagtctttctgcaacggggacccagcagcggtgcggaacatcttcggccggttcctgctgcacgtctaccccggcgaaacgctggtcaccgagatgtgggtcgacggccagagggtgcagtaccagaccaaggcgaaagagcgtgaccgcgccgtgctttccggatacgtgctgctcaaacacatcccctcatcattgtaagtgctgtgaggatcatactttttaatcggcgatttgattagttaactgtggtggtctgaagagaggatggtttccggtgtaaactatatatactcctaagagatgacacggttgtgcagatgatgaactcgtattagtgcttgctttttgttttgttcgt

SEQ ID NO: 64293 - protein, 347 aa, Triticum aestivum
  peptide (1)..(347): Ceres Seq. ID no. 13597855
LSLHPSRHRSPPPSISIAAPPAADTAERISTAAMATNERTVASVDPDVALAYRFPEVSFAYDERDVALYALGVGACGADAVDDKELHLVHHRDSQRHIKVLPTFVSLFPNKNSNGRGIVNVPGIHFDESLLLHGQQYIEIYKPIPSCASVVNKVKVAGLHDKGKATILEIETTTSLKDSGEVLCMNRSTIFLRGAGGFSDSSRPYSYTTYPANQISRISIPNSTPSAVHEDQTQQSQALLYRLSGDYNPLHSDPMVAQIAGFTRPILHGLCTLGFAARAVIKSFCNGDPAAVRNIFGRFLLHVYPGETLVTEMWVDGQRVQYQTKAKERDRAVLSGYVLLKHIPSSL

SEQ ID NO: 64294 - protein, 314 aa, Triticum aestivum
  peptide (1)..(314): Ceres Seq. ID no. 13597856
MATNERTVASVDPDVALAYRFPEVSFAYDERDVALYALGVGACGADAVDDKELHLVHHRDSQRHIKVLPTFVSLFPNKNSNGRGIVNVPGIHFDESLLLHGQQYIEIYKPIPSCASVVNKVKVAGLHDKGKATILEIETTTSLKDSGEVLCMNRSTIFLRGAGGFSDSSRPYSYTTYPANQISRISIPNSTPSAVHEDQTQQSQALLYRLSGDYNPLHSDPMVAQIAGFTRPILHGLCTLGFAARAVIKSFCNGDPAAVRNIFGRFLLHVYPGETLVTEMWVDGQRVQYQTKAKERDRAVLSGYVLLKHIPSSL

SEQ ID NO: 64295 - DNA, 1498 bp, Triticum aestivum
  misc_feature (1)..(1498): Ceres Seq. ID no. 13597887
caaaggcaaacccctcttttgaattccctccccctctcccctcggccgcctcgccgccgacccggcccgggacggaggccccctccctcccggaacctcctggaagcttccgcggctccctcccctgctccggcaacagcccgcgtcgtcgccgccgccgagggccagcacctcgcgctgccggcccgttgcttgcagcgggaggaaaggggtcaagatggttgtcggatcattcatcaccagagctttaatacttgttcttggatatgcatatccagcttatgattgttacaagacagtggagctgaataggcctgagattgagcagttgcggttctggtgtcagtactggattttacttgcaatgcttactgttttcgagagagttggggataatttcatatcatggttgccaatgtatagtgaagcaaagctggcttttattgtgtatttgtggtatcctaagacacaggggacttcatatgtctatgagtcgttcttcaagccttatatcgcaaaacacgaatctgagattgatcgcaatcttcttgagttgaggacaagggctagtgatattgctgttacttacttccacaaggttgcagactacagccagtcaaggttccatgaaatcttgcaatatattgcttctcaatcacaaggatctcgttctcaggcacagcaacagcagcagcgtccaccacctccacggactcggatggcgaatcctgcaccaccacctgttcccgcaccaacggcaccaccgatgccgccacaggccgcccaagttcctcctactccaccaaggatgcaggtgcaagataaaggcccagttccagttgcccctcctggcgcagtgcctcctgtgcagcaacaaacaccttcctgtcctggccctgtcgccggcaacagccccccaaagagtgaagacatgctggttgatcaatctgggccttcgacaagcaacgtgccaccccgcccaacaatgcctgaagacgaggagacgctcatccaggaggctattcggttgactcggggccggctcaggaggcgcatgggtggatctggacctccatccaactagctcttctcgcacttacgacgatggcaggggaaatgctgggttggtccatcaggcatggctgaatttcctcgcacagttgcaagctcacgtccaccttgtaaaacgatgaatcctggttcctgttgtttcacagcccagattgtgtatataaacccaccccatgccaggggtaaaaacgctgggatgccagtggaccaccagtttagctaggcggtagcagaagatggtggttaagatgctcggtgaaatcggttccaacttagttctgtcgaaattcgttggtggtgacttcgtctgtattggaaagtggttcaaaggtgaagtgaaataatcttaggctgtaccgggaagatagaaccttcgcccgcctcgcattagctgttkaaacacaataaagttggaactggagggggg

SEQ ID NO: 64296 - protein, 288 aa, Triticum aestivum
  peptide (1)..(288): Ceres Seq. ID no. 15222226
MVVGSFITRALILVLGYAYPAYDCYKTVELNRPEIEQLRFWCQYWILLAMLTVFERVGDNFISWLPMYSEAKLAFIVYLWYPKTQGTSYVYESFFKPYIAKHESEIDRNLLELRTRASDIAVTYFHKVADYSQSRFHEILQYIASQSQGSRSQAQQQQQRPPPPRTRMANPAPPPVPAPTAPPMPPQAAQVPPTPPRMQVQDKGPVPVAPPGAVPPVQQQTPSCPGPVAGNSPPKSEDMLVDQSGPSTSNVPPRPTMPEDEETLIQEAIRLTRGRLRRRMGGSGPPSN

SEQ ID NO: 64297 - protein, 239 aa, Triticum aestivum
  peptide (1)..(239): Ceres Seq. ID no. 15222227
MLTVFERVGDNFISWLPMYSEAKLAFIVYLWYPKTQGTSYVYESFFKPYIAKHESEIDRNLLELRTRASDIAVTYFHKVADYSQSRFHEILQYIASQSQGSRSQAQQQQQRPPPPRTRMANPAPPPVPAPTAPPMPPQAAQVPPTPPRMQVQDKGPVPVAPPGAVPPVQQQTPSCPGPVAGNSPPKSEDMLVDQSGPSTSNVPPRPTMPEDEETLIQEAIRLTRGRLRRRMGGSGPPSN

SEQ ID NO: 64298 - protein, 222 aa, Triticum aestivum
  peptide (1)..(222): Ceres Seq. ID no. 15222228
MYSEAKLAFIVYLWYPKTQGTSYVYESFFKPYIAKHESEIDRNLLELRTRASDIAVTYFHKVADYSQSRFHEILQYIASQSQGSRSQAQQQQQRPPPPRTRMANPAPPPVPAPTAPPMPPQAAQVPPTPPRMQVQDKGPVPVAPPGAVPPVQQQTPSCPGPVAGNSPPKSEDMLVDQSGPSTSNVPPRPTMPEDEETLIQEAIRLTRGRLRRRMGGSGPPSN

SEQ ID NO: 64299 - DNA, 1205 bp, Triticum aestivum
  misc_feature (1)..(1205): Ceres Seq. ID no. 13597888
actcctctccaccgcctggacgccgcgccgccgcctcgaccgagcctcggccacgcggctcgccccgtcccccggcctgtcctgccgctcctcccggccgacgcgctccgtgcgcccgatggcgtcgtcgacgaccgcggcccgggccgacgcggcgccgccggggctgaaggagggcatcgcggggctctacgacgagtcgtccggcctgtgggagagcatctggggcgagcacatgcaccacggcttctacgactccggcgaggccgcctccatgtccgaccaccgccgcgcccagatccgcatgatcgaggaggccctcgccttcgccgccgtccccgacgatccgacaaacaaaccgaaaacgattgttgatgttggatgcggaatcggtggtagctcaagatacctggcgaacaaatatggagcacaatgctctgggatcacattgagcccagtgcaagccgagagaggaaatgccctcgcagcagtgcaggggttgtcggacaaggcttctttccaagttgctgatgctctggagcaaccatttcctgatgggcagtttgatcttgtctggtctatggagagtggtgagcacatgccgaacaaacagaagtttgtaagcgagctggcacgcgtcgcagctccaggagcaactatcatcatcgtgacctggtgccataggaacctcgcgccgtcggaggactcactgaaacctgacgagctgaatcttttgaaaaagatttgtgatgcatattacctcccagattggtgctcgccctcggattatgtcaagattgccgagtcattgtctcttgaggatatcaaaacggctgactggtctgaaaacgtggccccgttctggcctgctgtcatccaatcagcactgacatggaaaggcctcacttctctactaaggagtggatggaagacgataaagggagcactggtgatgcctctcatgatccaaggctacaagaaaggcctcattaagttcagcatcatcacctgccgcaaaccccaagcagcaatagaaggagaacctgaggccgcatcgcccagtgtagaatagaacccatgtgattggaatagactcggcttgctgtcgcctcgtagctgaataatttcatgttaccgtgcatctgtatctgcaactggaagtgccatatgaaagtggttcctaaagcaaaattctcctcacattc

SEQ ID NO: 64300 - protein, 356 aa, Triticum aestivum
  peptide (1)..(356): Ceres Seq. ID no. 13597889
LLSTAWTPRRRLDRASATRLAPSPGLSCRSSRPTRSVRPMASSTTAARADAAPPGLKEGIAGLYDESSGLWESIWGEHMHHGFYDSGEAASMSDHRRAQIRMIEEALAFAAVPDDPTNKPKTIVDVGCGIGGSSRYLANKYGAQCSGITLSPVQAERGNALAAVQGLSDKASFQVADALEQPFPDGQFDLVWSMESGEHMPNKQKFVSELARVAAPGATIIIVTWCHRNLAPSEDSLKPDELNLLKKICDAYYLPDWCSPSDYVKIAESLSLEDIKTADWSENVAPFWPAVIQSALTWKGLTSLLRSGWKTIKGALVMPLMIQGYKKGLIKFSIITCRKPQAAIEGEPEAASPSVE

SEQ ID NO: 64301 - protein, 317 aa, Triticum aestivum
  peptide (1)..(317): Ceres Seq. ID no. 13597890
MASSTTAARADAAPPGLKEGIAGLYDESSGLWESIWGEHMHHGFYDSGEAASMSDHRRAQIRMIEEALAFAAVPDDPTNKPKTIVDVGCGIGGSSRYLANKYGAQCSGITLSPVQAERGNALAAVQGLSDKASFQVADALEQPFPDGQFDLVWSMESGEHMPNKQKFVSELARVAAPGATIIIVTWCHRNLAPSEDSLKPDELNLLKKICDAYYLPDWCSPSDYVKIAESLSLEDIKTADWSENVAPFWPAVIQSALTWKGLTSLLRSGWKTIKGALVMPLMIQGYKKGLIKFSIITCRKPQAAIEGEPEAASPSVE

SEQ ID NO: 64302 - protein, 278 aa, Triticum aestivum
  peptide (1)..(278): Ceres Seq. ID no. 13597891
MHHGFYDSGEAASMSDHRRAQIRMIEEALAFAAVPDDPTNKPKTIVDVGCGIGGSSRYLANKYGAQCSGITLSPVQAERGNALAAVQGLSDKASFQVADALEQPFPDGQFDLVWSMESGEHMPNKQKFVSELARVAAPGATIIIVTWCHRNLAPSEDSLKPDELNLLKKICDAYYLPDWCSPSDYVKIAESLSLEDIKTADWSENVAPFWPAVIQSALTWKGLTSLLRSGWKTIKGALVMPLMIQGYKKGLIKFSIITCRKPQAAIEGEPEAASPSVE

SEQ ID NO: 64303 - DNA, 1568 bp, Triticum aestivum
  misc_feature (1)..(1568): Ceres Seq. ID no. 13597019
ctccgtcgtcgccaaaagcatcgcgacacccagaaacggccacgaaccgagagcaagcgagcgagcgagggagcgagtcagccatccgtccgtccgtcggccatggcactagtggacgcgctgtgcgcctccagcgtcgacaatgcggcgctcgtctacagcaccttcaacgccgcgggcttcctcttcgacaatgccgcgggcttctacgacgacaccggcattgccggtggcccggcgcttgcgttgcaggcggccgacagagcgccggggctgtccgccgcgggtgacgtggcgccgtgcctggagaagcaggccacgttgtcgcccgcgccgccgaggaggaagcggcgtcggcgggcgaggagctgcaagtcgagggaggagaccgagtgccagcgcatgacccacatcgccgtggagcgcaaccgccggcgacagatgaacgagtacctcgtcgtgctccgctccctcatgccggagtcctacgtccagaggggtgaccaggcatcgatcgtcggaggggcgatagatttcgtcaaggagctggagcagcagctgcagtccctggaggcgcagaagcgggcgctggctcaccagcagcagcacaaggcaggacgcgacgcggcgccgctgccgacggccatgccggcgcgcgccagcaccagcggcggcattggcaacgcgtgcgtggagtcgacgagcaactgcagcagcagcgtgaccgaggcggacggcgctcccgacgcgccgccgttcgcggggttcttcacgtacccgcagtacgtgtggcgccagtcgccgcgcgacgccacgacgctgtcggcggacgagagccgcgccggggtggccgacatcgaggtgaccctggtggagacgcacgccagcctccgcgtcatggcgccgcggcggcccggccagctgctccgcatggtcgccggcctgcaggcgctccgtctcaccgtgctgcacctcaacgtcaccgcgctcgactccctggccctctactccctcagcctcaaggtggaggaggggtgtggcctgacgacggcggacgacatcgcggcggcagtgcaccatgtgctctgcttcatccacgcggaggcggaggcggcgccgcagcagctgctcgcgccggcgcagtaggcaacgatggccgcggcggccggagggttaagccgcagccctcgtatatgtatgtactcgggcagctaggtagtgtatgccattttaaggattattaaggacgagtcatgtaatttaacccgtcggatctactgggcttagatgttgtcgacggcgcacgtcgcgctgccgctttctggcaagtctatccagtgtgatgtggcggcctagtgtaccgtagtactagattcagatgcatgcgttttcgcaataggcgagtcgtttcagtttctcaaaaacaagtcttgctatgtgctactgattattttcagtctatgccactgatcaagtgctggccatttcggttaaccttctgtcaggagatctacgttcagcatgtaaattcatcgtttgtttctgcctatgcattccagttgtactgt

SEQ ID NO: 64304 - protein, 381 aa, Triticum aestivum
  peptide (1)..(381): Ceres Seq. ID no. 13597020
LRRRQKHRDTQKRPRTESKRASEGASQPSVRPSAMALVDALCASSVDNAALVYSTFNAAGFLFDNAAGFYDDTGIAGGPALALQAADRAPGLSAAGDVAPCLEKQATLSPAPPRRKRRRRARSCKSREETECQRMTHIAVERNRRRQMNEYLVVLRSLMPESYVQRGDQASIVGGAIDFVKELEQQLQSLEAQKRALAHQQQHKAGRDAAPLPTAMPARASTSGGIGNACVESTSNCSSSVTEADGAPDAPPFAGFFTYPQYVWRQSPRDATTLSADESRAGVADIEVTLVETHASLRVMAPRRPGQLLRMVAGLQALRLTVLHLNVTALDSLALYSLSLKVEEGCGLTTADDIAAAVHHVLCFIHAEAEAAPQQLLAPAQ

SEQ ID NO: 64305 - protein, 347 aa, Triticum aestivum
  peptide (1)..(347): Ceres Seq. ID no. 13597021
MALVDALCASSVDNAALVYSTFNAAGFLFDNAAGFYDDTGIAGGPALALQAADRAPGLSAAGDVAPCLEKQATLSPAPPRRKRRRRARSCKSREETECQRMTHIAVERNRRRQMNEYLVVLRSLMPESYVQRGDQASIVGGAIDFVKELEQQLQSLEAQKRALAHQQQHKAGRDAAPLPTAMPARASTSGGIGNACVESTSNCSSSVTEADGAPDAPPFAGFFTYPQYVWRQSPRDATTLSADESRAGVADIEVTLVETHASLRVMAPRRPGQLLRMVAGLQALRLTVLHLNVTALDSLALYSLSLKVEEGCGLTTADDIAAAVHHVLCFIHAEAEAAPQQLLAPAQ

SEQ ID NO: 64306 - protein, 247 aa, Triticum aestivum
  peptide (1)..(247): Ceres Seq. ID no. 13597022
MTHIAVERNRRRQMNEYLVVLRSLMPESYVQRGDQASIVGGAIDFVKELEQQLQSLEAQKRALAHQQQHKAGRDAAPLPTAMPARASTSGGIGNACVESTSNCSSSVTEADGAPDAPPFAGFFTYPQYVWRQSPRDATTLSADESRAGVADIEVTLVETHASLRVMAPRRPGQLLRMVAGLQALRLTVLHLNVTALDSLALYSLSLKVEEGCGLTTADDIAAAVHHVLCFIHAEAEAAPQQLLAPAQ

SEQ ID NO: 64307 - DNA, 1568 bp, Triticum aestivum
  misc_feature (1)..(1568): Ceres Seq. ID no. 13598643
tgccactccagttcccggtgcatcaagctccagttccagcggcttccacaccgacgccaccgcccaccggagccccaatggccgccgccggagacctcaggtcggagtacctccaggtcctgctcagccgccgccgcgaaccccaagtgcctctgtccgtggagcaagggactccggtgacgaagccgctgttccagggcgactggcctctggggcccagagaggccatggagtcgtgcccgaggaaggaggtggaggacttccacgagaagctggtcgaggagaatttcttcctgattaccgagtcaggtgagcaggggcgtgtacctgtacttctgctgaaactcaacgacagtactgctcccgaaaggaagccggttgttgtgatactgcacagctcttacaaatgcaaggaatgggtgcgtccactgctagaggcatatgcctccaggggttatattgctgtttccatcgattctcgctatcatggtgaaagcgccagccacaagaatacttacaccgatgcactgaaagcagcttggaggaatggggacacgatgccttttatttttgacacggcatgggacttgataaagcttgcagatcatcttagtgcaaggaaggatgtcgatccctcaaggattgggattactggtgaatcactcggaggaatgcattcatggtttggtgctttcgtggatacacggtacagtgttgttgttccgatagttggttttcagggatttcggtgggcaatagacaataacatgtgggaagccagagttaacagcatcaggcctgtatttgaagaggcagcaactgatttagggaagagtgaaatagattcggaggttgtggagaaggtttgggacaggatagcacctgggcttgcttcacggtttgatgcaccttactcggttcccctgattgcaccacgtccgctcctcctcctaaatggcgctgaagacccttgttgccctatcgctggtctacaagagcctgcttccagagttgctgaagcttatgaaaaagctggttctgcggagaagttcaagttcatcgtggagccgggagttgaacatatgttaacggcgaacatggtgaaggaagcgagcgaatggttcgaccgattcctgcagtagctcggggttcgggatgcttcatggagtgcacggcctcaataaattgtcctcactttcggatcactgtcgttgttgaataaatcccttcgccgtgatggtgcgtgcgcggcgagttcgcctagaccacggtgaccgcgctcggcactcgttggatcgtgggatggcgcggtccgcaaggaggccgggtactgcgcgatctcgtggccatttttccgtcgttgctactaataacaagaggagtgcagtgaaaagccgtgaggttttacgcagcacaaattctgtgtgctccacagacttgatttgttccatcattatctagctaatcgctacgctatatttctccatttgaaacgacacagcatatgtgagcagtttttttatcatgcaccatcatgtttcctggggagctctgcatttactgaactg

SEQ ID NO: 64308 - protein, 379 aa, Triticum aestivum
  peptide (1)..(379): Ceres Seq. ID no. 13598644
PLQFPVHQAPVPAASTPTPPPTGAPMAAAGDLRSEYLQVLLSRRREPQVPLSVEQGTPVTKPLFQGDWPLGPREAMESCPRKEVEDFHEKLVEENFFLITESGEQGRVPVLLLKLNDSTAPERKPVVVILHSSYKCKEWVRPLLEAYASRGYIAVSIDSRYHGESASHKNTYTDALKAAWRNGDTMPFIFDTAWDLIKLADHLSARKDVDPSRIGITGESLGGMHSWFGAFVDTRYSVVVPIVGFQGFRWAIDNNMWEARVNSIRPVFEEAATDLGKSEIDSEVVEKVWDRIAPGLASRFDAPYSVPLIAPRPLLLLNGAEDPCCPIAGLQEPASRVAEAYEKAGSAEKFKFIVEPGVEHMLTANMVKEASEWFDRFLQ

SEQ ID NO: 64309 - protein, 354 aa, Triticum aestivum
  peptide (1)..(354): Ceres Seq. ID no. 13598645
MAAAGDLRSEYLQVLLSRRREPQVPLSVEQGTPVTKPLFQGDWPLGPREAMESCPRKEVEDFHEKLVEENFFLITESGEQGRVPVLLLKLNDSTAPERKPVVVILHSSYKCKEWVRPLLEAYASRGYIAVSIDSRYHGESASHKNTYTDALKAAWRNGDTMPFIFDTAWDLIKLADHLSARKDVDPSRIGITGESLGGMHSWFGAFVDTRYSVVVPIVGFQGFRWAIDNNMWEARVNSIRPVFEEAATDLGKSEIDSEVVEKVWDRIAPGLASRFDAPYSVPLIAPRPLLLLNGAEDPCCPIAGLQEPASRVAEAYEKAGSAEKFKFIVEPGVEHMLTANMVKEASEWFDRFLQ

SEQ ID NO: 64310 - protein, 304 aa, Triticum aestivum
  peptide (1)..(304): Ceres Seq. ID no. 13598646
MESCPRKEVEDFHEKLVEENFFLITESGEQGRVPVLLLKLNDSTAPERKPVVVILHSSYKCKEWVRPLLEAYASRGYIAVSIDSRYHGESASHKNTYTDALKAAWRNGDTMPFIFDTAWDLIKLADHLSARKDVDPSRIGITGESLGGMHSWFGAFVDTRYSVVVPIVGFQGFRWAIDNNMWEARVNSIRPVFEEAATDLGKSEIDSEVVEKVWDRIAPGLASRFDAPYSVPLIAPRPLLLLNGAEDPCCPIAGLQEPASRVAEAYEKAGSAEKFKFIVEPGVEHMLTANMVKEASEWFDRFLQ

SEQ ID NO: 64311 - DNA, 2166 bp, Triticum aestivum
  misc_feature (1)..(2166): Ceres Seq. ID no. 13597798
aacccaaacccccccggacctaaaatctccgaaccctcctcaccggcaacacccggggtggccgccatgcacgcctccgcccgcttgctccgccgcctctcctcttcctactccgcccgctcgctccgccgcctccctctccacccatcaccctcgccgcctccacatccatctcgtctgccgccccttcgaaccgtgacccgcgccctccttccccacctcgctgctccccgcttctccaccatctcttgcgcatccacaccctctctccgcctaggtgaatgcggcgctctgggaaccccggcgataccgtcggcggaggtatccgaggaagaggaggaggtggagtctgtggcggcgcggcatgacaccgacgcgttcgcggcggtggagctcgcgctggactcggtggtgaaggtgttcacggtgtcaagtggccctaactacttcctgccgtggcagaacaaggcccagcgcgagagcatgggctccggctttgtaatttctggaaaaaggatcgtcacaaatgctcatgtggtagctgatcatacttttgttcttgtgaggaagcatggatcacctgcaaagtacaaggcggaagttcaggctattggccatgagtgtgatttggctcttcttacagttgagagtgaggagttttgggaggggatgaacagcttggatcttggagacattccatttttgcaggaagctgtcgccgtggttggctaccctcagggtggagacaatatctctgtcaccaagggggttgtttctagagtggaaccaacacagtatgcccatggtgcgactcagctcatggctatacaaatagatgcagctattaatccaggcaatagtggagggcctgcaatcatgggtgataaagtggctggagttgctttccaaaatctgtcaggagcagaaaacattgggtatattatacctgtgcctgtaattaagcgttttatttctggtgtggaagagagtggcaaatattctgggttttgttctcttgggatatcttgccaggccactgagaacatccaaataagagagtgctttggtatgcggcctgaaatgactggagtgttagtcagtagaataaatcctctgtctggtgcttacgaaattttgaggaaagacgatatccttctcgagtttgatggcgtgcctattgcgaatgatgggacagttccatttcgaaatagagagagaatcacctttgatcatcttgtgtccatgaagaagcctgaagaaacagccgttatcaaagtactaagagatggcaaagagcatgaattgaatgtgacacttagacctttgcaacctttggttcctgtacatcaatttgataaactgcccagctactacatctttgctggttttgtttttatcccgctgacccagccttatctccatgaatttggggaggactggtacaacacttcgccacgtcgattgtgtgaacgggcactgagagaacttccgaagaaggctggccaacagttagtaatattatctcaggtcctaatggatgatattaatgttggttatgaaaggctggctgaactccaggtaaagaaggtgaatggtgttgaggttgagaatttgaagcatttgtgcagtatcgtggagaactgcactgaagaaaacttgagaattgatttggacgatgagcgggtgatcgtcctgaaatttcagaacgcgaggcttgccacgtctcggatcctcaagcggcacaggattccatcagccatgtcaaatgaccttgtcgatgaacaagcgagcaaaggtgagactgaggcatcatgcacaaactgacacattttcatagacgtagctacacagtttctgcggaagcaccgatgttagctcggttgtctttccagagacagatgaggtaggccaaggactgctggagtcagcgatgagcccatgggttgcagcaggctccagttttgctgattcagttttgacagaaggtagaggtcttcagcaaataagaacccaagttcttcagcccgagttgtaacatcattctttgctcccctcccaacgatttatcattctttctttcgccactgtacgggttttggcacccttatgttaaattcggattatgtatcatcaccaaagcagaacataggagatacaaatttcaag

SEQ ID NO: 64312 - protein, 607 aa, Triticum aestivum
  peptide (1)..(607): Ceres Seq. ID no. 15222191
NPNPPGPKISEPSSPATPGVAAMHASARLLRRLSSSYSARSLRRLPLHPSPSPPPHPSRLPPLRTVTRALLPHLAAPRFSTISCASTPSLRLGECGALGTPAIPSAEVSEEEEEVESVAARHDTDAFAAVELALDSVVKVFTVSSGPNYFLPWQNKAQRESMGSGFVISGKRIVTNAHVVADHTFVLVRKHGSPAKYKAEVQAIGHECDLALLTVESEEFWEGMNSLDLGDIPFLQEAVAVVGYPQGGDNISVTKGVVSRVEPTQYAHGATQLMAIQIDAAINPGNSGGPAIMGDKVAGVAFQNLSGAENIGYIIPVPVIKRFISGVEESGKYSGFCSLGISCQATENIQIRECFGMRPEMTGVLVSRINPLSGAYEILRKDDILLEFDGVPIANDGTVPFRNRERITFDHLVSMKKPEETAVIKVLRDGKEHELNVTLRPLQPLVPVHQFDKLPSYYIFAGFVFIPLTQPYLHEFGEDWYNTSPRRLCERALRELPKKAGQQLVILSQVLMDDINVGYERLAELQVKKVNGVEVENLKHLCSIVENCTEENLRIDLDDERVIVLKFQNARLATSRILKRHRIPSAMSNDLVDEQASKGETEASCTN

SEQ ID NO: 64313 - protein, 585 aa, Triticum aestivum
  peptide (1)..(585): Ceres Seq. ID no. 15222192
MHASARLLRRLSSSYSARSLRRLPLHPSPSPPPHPSRLPPLRTVTRALLPHLAAPRFSTISCASTPSLRLGECGALGTPAIPSAEVSEEEEEVESVAARHDTDAFAAVELALDSVVKVFTVSSGPNYFLPWQNKAQRESMGSGFVISGKRIVTNAHVVADHTFVLVRKHGSPAKYKAEVQAIGHECDLALLTVESEEFWEGMNSLDLGDIPFLQEAVAVVGYPQGGDNISVTKGVVSRVEPTQYAHGATQLMAIQIDAAINPGNSGGPAIMGDKVAGVAFQNLSGAENIGYIIPVPVIKRFISGVEESGKYSGFCSLGISCQATENIQIRECFGMRPEMTGVLVSRINPLSGAYEILRKDDILLEFDGVPIANDGTVPFRNRERITFDHLVSMKKPEETAVIKVLRDGKEHELNVTLRPLQPLVPVHQFDKLPSYYIFAGFVFIPLTQPYLHEFGEDWYNTSPRRLCERALRELPKKAGQQLVILSQVLMDDINVGYERLAELQVKKVNGVEVENLKHLCSIVENCTEENLRIDLDDERVIVLKFQNARLATSRILKRHRIPSAMSNDLVDEQASKGETEASCTN

SEQ ID NO: 64314 - protein, 446 aa, Triticum aestivum
  peptide (1)..(446): Ceres Seq. ID no. 15222193
MGSGFVISGKRIVTNAHVVADHTFVLVRKHGSPAKYKAEVQAIGHECDLALLTVESEEFWEGMNSLDLGDIPFLQEAVAVVGYPQGGDNISVTKGVVSRVEPTQYAHGATQLMAIQIDAAINPGNSGGPAIMGDKVAGVAFQNLSGAENIGYIIPVPVIKRFISGVEESGKYSGFCSLGISCQATENIQIRECFGMRPEMTGVLVSRINPLSGAYEILRKDDILLEFDGVPIANDGTVPFRNRERITFDHLVSMKKPEETAVIKVLRDGKEHELNVTLRPLQPLVPVHQFDKLPSYYIFAGFVFIPLTQPYLHEFGEDWYNTSPRRLCERALRELPKKAGQQLVILSQVLMDDINVGYERLAELQVKKVNGVEVENLKHLCSIVENCTEENLRIDLDDERVIVLKFQNARLATSRILKRHRIPSAMSNDLVDEQASKGETEASCTN

SEQ ID NO: 64315 - DNA, 831 bp, Triticum aestivum
  misc_feature (1)..(831): Ceres Seq. ID no. 12585694
ctcacagaaacgacgcgtcgactctcccttcctctcctccttccccctctctagcaatcggcgagcagcgatggcgtgggcgacacggttcctgtccgcggtgtgcttcttcgcggcgggcgtcctcttcgccccagatgtcctcgtcggcgaccgctccggctccggcgccaccgccgtcacggccgccaaggtgtcccacctcctctgcttcgccacctgctggggcgctgcgctttgggctaccttcatcggtggaatcatcatgttcaagaatctgccgaggcaccagttcgggaacctgcaggggaagatgttcccggcctatttcacgctcatctccgcctgcgccgccgtctccgtcgccgcctttgcctacctccacccgtggaaggccgcctccgccgtcgagcgctaccagcttgggttcctcatctccgcgctcggcttcaacctctccaacctgctggtcttcacccccatgaccattgagatgatgaagaagaggcacaagatcgagagagagcttagcatcggtgacgaggtcgggtggtcgaagaacgtcaagacggcaaaaagcaaccctaccctcgctgcgatgaacaagaagtttgggatgatccacggtctctcatcgctggccaacatcttgtcgttcggcagccttgccatgcactcctggtactttgccagcaagcttgagctgtgaagtgtacaaacacccagcttgaccacgaacacggttgaatctagtatcatcgcaatatgcctatgctttgttctaaaaacagctacatgttatgagcttgcaaacagatttaatgtagactg

SEQ ID NO: 64316 - protein, 235 aa, Triticum aestivum
  peptide (1)..(235): Ceres Seq. ID no. 12585695
SQKRRVDSPFLSSFPLSSNRRAAMAWATRFLSAVCFFAAGVLFAPDVLVGDRSGSGATAVTAAKVSHLLCFATCWGAALWATFIGGIIMFKNLPRHQFGNLQGKMFPAYFTLISACAAVSVAAFAYLHPWKAASAVERYQLGFLISALGFNLSNLLVFTPMTIEMMKKRHKIERELSIGDEVGWSKNVKTAKSNPTLAAMNKKFGMIHGLSSLANILSFGSLAMHSWYFASKLEL

SEQ ID NO: 64317 - protein, 212 aa, Triticum aestivum
  peptide (1)..(212): Ceres Seq. ID no. 12585696
MAWATRFLSAVCFFAAGVLFAPDVLVGDRSGSGATAVTAAKVSHLLCFATCWGAALWATFIGGIIMFKNLPRHQFGNLQGKMFPAYFTLISACAAVSVAAFAYLHPWKAASAVERYQLGFLISALGFNLSNLLVFTPMTIEMMKKRHKIERELSIGDEVGWSKNVKTAKSNPTLAAMNKKFGMIHGLSSLANILSFGSLAMHSWYFASKLEL

SEQ ID NO: 64318 - protein, 160 aa, Triticum aestivum
  peptide (1)..(160): Ceres Seq. ID no. 12585697
HRNDASTLPSSPPSPSLAIGEQRWRGRHGSCPRCASSRRASSSPQMSSSATAPAPAPPPSRPPRCPTSSASPPAGALRFGLPSSVESSCSRICRGTSSGTCRGRCSRPISRSSPPAPPSPSPPLPTSTRGRPPPPSSATSLGSSSPRSASTSPTCWSSPP

SEQ ID NO: 64319 - DNA, 1022 bp, Triticum aestivum
  misc_feature (1)..(1022): Ceres Seq. ID no. 15225623
aaaccgaaaccgaccggccttcccctctcgctctcgcgtctctcggcgggcgttcactctccggcgacgccgacctcccgtctccggcgaccggctgccgccccgccctccctctcaaccggctcggcggtgttccatagcctgccatgtcgaagaagaggggcctttccttggaggagaagcgggagcaaatgcttcaaatattttacgagagtcaagacttctatctgcttaaagagcttgagaagatgggtcctaaaaaaggagtgatcagccagtctgttaaggatgttgtgcaaagcctggtggatgatgatcttgtcttgagagacaaaataggaacttctgtgtacttttggagtcttcccagttgtgccggaaatcagctgaggactacctacaacaagctggagtctgatctttcaaactctaaaaaacgttacatggagcttcttgagcagagagatgacttgaaaagaggcagggaagacactgatgagagagaagacgctttggaggagctgaaggctgtagagctacgccataagaagttaaaggaagaactagctgcctatgctgatagtgatccatctgcactagaggcgatgaaggatgctactgaggttgcccattcggcagctaacagatggacagacaacatcttcactttgcaacaatggtgttcaactacattcccgcaagcaaaagaacagcttgaacacatgtacaaggaggtgggcataactgaagactttgagtatctgcagtaatgctcgacagcctgcatatgccctattgcatcatcgtgtgcagtctccctcagcacgtggtgttggatctagagtagttcacccaaaattggtgagaatcacccgtaccgtcggctatttaacatttgagcagatgatgccattattgcacatgttctgttatgtagaggtgagatgccttgcctatcattgtcgtcaggagagaatgttcactacgttaaaacggtgctacaagatgaatttggcacatgc

SEQ ID NO: 64320 - protein, 207 aa, Triticum aestivum
  peptide (1)..(207): Ceres Seq. ID no. 15225624
MSKKRGLSLEEKREQMLQIFYESQDFYLLKELEKMGPKKGVISQSVKDVVQSLVDDDLVLRDKIGTSVYFWSLPSCAGNQLRTTYNKLESDLSNSKKRYMELLEQRDDLKRGREDTDEREDALEELKAVELRHKKLKEELAAYADSDPSALEAMKDATEVAHSAANRWTDNIFTLQQWCSTTFPQAKEQLEHMYKEVGITEDFEYLQ

SEQ ID NO: 64321 - protein, 192 aa, Triticum aestivum
  peptide (1)..(192): Ceres Seq. ID no. 15225625
MLQIFYESQDFYLLKELEKMGPKKGVISQSVKDVVQSLVDDDLVLRDKIGTSVYFWSLPSCAGNQLRTTYNKLESDLSNSKKRYMELLEQRDDLKRGREDTDEREDALEELKAVELRHKKLKEELAAYADSDPSALEAMKDATEVAHSAANRWTDNIFTLQQWCSTTFPQAKEQLEHMYKEVGITEDFEYLQ

SEQ ID NO: 64322 - protein, 173 aa, Triticum aestivum
  peptide (1)..(173): Ceres Seq. ID no. 15225626
MGPKKGVISQSVKDVVQSLVDDDLVLRDKIGTSVYFWSLPSCAGNQLRTTYNKLESDLSNSKKRYMELLEQRDDLKRGREDTDEREDALEELKAVELRHKKLKEELAAYADSDPSALEAMKDATEVAHSAANRWTDNIFTLQQWCSTTFPQAKEQLEHMYKEVGITEDFEYLQ

SEQ ID NO: 64323 - DNA, 1495 bp, Triticum aestivum
  misc_feature (1)..(1495): Ceres Seq. ID no. 15225627
tcgccccctcctccctattactctcccacctgctctccccgccgctccagaatcgccgccaccttgctgcgctcaccaacggcacgcgcatcccccctcagatccctccctcacgcattccgccttctcccgaggctcgtagctgctagcacggacgatggccccttgtgcaaccgccggcgcgcagatgctggccgcacgcccctgcgtctcggcctctcagagcatgctcacctcgaggccggccgtctcacggatcgacctgacgctcgtcgctggtagcttcgcgaactgtcccagaatctcctgctccaggtctcttggttcttcccggagcggcgctgtcgccgtaagagcggtgtcaggagaaggtagctcttctgggctgcccatcgatcttagagggaaaagggcatttattgctggggttgctgatgataacggctatggctgggcaattgcaaaggctcttgccgcagctggtgctgaaattcttgttggtacatgggtgcctgcacttaacatatttgagacaagcctgaggcgtggaaaatttgacgaatcacggaagctgcctgatggatctcttatggagattgttaaagtctatccactggatgctgtctatgattccccggaggatgttcctgaagatgtcaaaacaaacaaaaggtacgcaggatcgtcaaattggactgtgaaggaagctgccgaattagttaagaaggaatatggcagcattgacattcttgtgcattctcttgctaatggtcctgaggttacaaaacctttgctggaaacctcaagaagtgggtatcttgctgcaatttcagcatccagttactcctttgtttctttacttaagcacttccttcctattatgaatccaggtggtgctagcatctcgctaacatatattgcatctgaaaggacaattcctggatatggtggtggcatgagttcagctaaagcagctcttgagagtgatacaaaagtacttgcttttgaagctggacgcaaaggcaaaatccgagttaacaccatatctgcaggtcctctgggcagcagagctgccaaggcaattggattcattgagaagatgatcgagtactcttatgtcaatgcaccattgcagaaggagcttctggcagatgaagtcgggaacacggcagcattcctggtgtctcctttggcttctgccatcactggctcgactgtttacgtcgacaacggacttaacaccatgggtcttgcggttgacagccccacagtatcttcattgttgtgattccggtaggcggacctatttttcctgattcaccgcggcttgattgttgaataaggagcttagttagttagtactgtaagaagctcttgctaagagctgagggcaggagaaaaaagagaagggggtggctgttgaaaatgactttttaagcagtccagtacctcctctttggcccatttctaatattatctcaaatgttgttgttgc

SEQ ID NO: 64324 - protein, 376 aa, Triticum aestivum
  peptide (1)..(376): Ceres Seq. ID no. 15225628
MAPCATAGAQMLAARPCVSASQSMLTSRPAVSRIDLTLVAGSFANCPRISCSRSLGSSRSGAVAVRAVSGEGSSSGLPIDLRGKRAFIAGVADDNGYGWAIAKALAAAGAEILVGTWVPALNIFETSLRRGKFDESRKLPDGSLMEIVKVYPLDAVYDSPEDVPEDVKTNKRYAGSSNWTVKEAAELVKKEYGSIDILVHSLANGPEVTKPLLETSRSGYLAAISASSYSFVSLLKHFLPIMNPGGASISLTYIASERTIPGYGGGMSSAKAALESDTKVLAFEAGRKGKIRVNTISAGPLGSRAAKAIGFIEKMIEYSYVNAPLQKELLADEVGNTAAFLVSPLASAITGSTVYVDNGLNTMGLAVDSPTVSSLL

SEQ ID NO: 64325 - protein, 366 aa, Triticum aestivum
  peptide (1)..(366): Ceres Seq. ID no. 15225629
MLAARPCVSASQSMLTSRPAVSRIDLTLVAGSFANCPRISCSRSLGSSRSGAVAVRAVSGEGSSSGLPIDLRGKRAFIAGVADDNGYGWAIAKALAAAGAEILVGTWVPALNIFETSLRRGKFDESRKLPDGSLMEIVKVYPLDAVYDSPEDVPEDVKTNKRYAGSSNWTVKEAAELVKKEYGSIDILVHSLANGPEVTKPLLETSRSGYLAAISASSYSFVSLLKHFLPIMNPGGASISLTYIASERTIPGYGGGMSSAKAALESDTKVLAFEAGRKGKIRVNTISAGPLGSRAAKAIGFIEKMIEYSYVNAPLQKELLADEVGNTAAFLVSPLASAITGSTVYVDNGLNTMGLAVDSPTVSSLL

SEQ ID NO: 64326 - protein, 353 aa, Triticum aestivum
  peptide (1)..(353): Ceres Seq. ID no. 15225630
MLTSRPAVSRIDLTLVAGSFANCPRISCSRSLGSSRSGAVAVRAVSGEGSSSGLPIDLRGKRAFIAGVADDNGYGWAIAKALAAAGAEILVGTWVPALNIFETSLRRGKFDESRKLPDGSLMEIVKVYPLDAVYDSPEDVPEDVKTNKRYAGSSNWTVKEAAELVKKEYGSIDILVHSLANGPEVTKPLLETSRSGYLAAISASSYSFVSLLKHFLPIMNPGGASISLTYIASERTIPGYGGGMSSAKAALESDTKVLAFEAGRKGKIRVNTISAGPLGSRAAKAIGFIEKMIEYSYVNAPLQKELLADEVGNTAAFLVSPLASAITGSTVYVDNGLNTMGLAVDSPTVSSLL

SEQ ID NO: 64327 - DNA, 584 bp, Triticum aestivum
  misc_feature (1)..(584): Ceres Seq. ID no. 13584968
aaatcgatagatagatagataagtaaaaatggcgcagtgtgtgaccaaaaacacattcgtgcaaggaaaacccttccttccagttccagcagctcccactaaaaatgttcggagagtggttcagtgcggtgtgtggtgcaggaagaaggagatacacccgcaattccacgaggaagcgaaggtgtactgcaacggggagctggtgctgacgacaggtgggacccagaaggagtacgtggtcgacgtgtggtcggggaaccaccctttctacctcggaagccggtcggcgtctatggtcagcgacgaccaggtcgagaagttccgcaagaagttcggagagctaaaagagatcatggagattcctgttctcaagggagagattgttatcccctcaagacgcaagggcgtttccaaaggaggcaagaaaaaataatttattcgattcaaacatgattgtcttttttcttcttcttaatttcaattcctgtaatgtaatatgataaaacgctttaagcctgtgctatggatattgttttgagcaagcccctgaatgtgctaatgtgattgatttggtgattctgtcc

SEQ ID NO: 64328 - protein, 134 aa, Triticum aestivum
  peptide (1)..(134): Ceres Seq. ID no. 13584969
MAQCVTKNTFVQGKPFLPVPAAPTKNVRRVVQCGVWCRKKEIHPQFHEEAKVYCNGELVLTTGGTQKEYVVDVWSGNHPFYLGSRSASMVSDDQVEKFRKKFGELKEIMEIPVLKGEIVIPSRRKGVSKGGKKK

SEQ ID NO: 64329 - DNA, 1181 bp, Triticum aestivum
  misc_feature (1)..(1181): Ceres Seq. ID no. 13585324
ctttttttaggaagtaccatctagataagtatatctatgccttagtagatttgacctaagaggttttttatagcaagcaggcagttctttaatacagtagtttacagaccttgttttacatggcccattccatgatcgtccttgtatttttgtcatcaagatctgtctgtttttgtcgttcagatttgatttcgtgcaaagccttaaccaagcagcatgttctcatcagtcgggtagtgaatggagctttattagccttgtctgtaaccaatgctgctcccctataatctgcatgtggacacgatcttgcaatcagccaaattggcaagcgatagcatttgatattgagcttggctgtggtgactagggagtcgtactgaaccccatgtgctatttgttgtttggtggcctacatgcgatgctttgatggatggaaggttgcaagtgcaacagcaacatttgtcatgatgttctcctcgtctctctctgtggtcgagttctactttctgggcaggttcccaattccttatgctctctacttgatcttcatttccatattggctgggttctggggccagtgcttggtcaggaagatcgtgcatgtgctcaagagggcctcgctgatcgtcttcatcctctcctctgtcatcttcgccagtgctcttaccatgggtgttgttgggaccgagaagagcatctcgatgatccacaatcacgaatacatggggttcctcagcttctgctgagtgaacaaaccaagcagacgaccaccagacccggggagaacccaaaccaggccaatacctaattgacctcacctctcccccagtccagttaagtccaaggatgaaataaaagaagcctgacgcgtgcccgtcgttagctcctcgctaacctgcaagcacctgcccggccaagcaaattctcctagtagtatagtgtcatggtcttgtggcgcggcgtcgtgccgtgtgctggatgttcttttttgttgtgttcatgtgctggttagctcctggttaacctgcagtgaagcattcgtcgtagggtttacgccgattcattcatgcgctagctagctcttggctggctggctacctgcaaacattggttgtattgggtgatgtaaatatatcagccggccaattggttgctgatttgtctatatagcttgttttgct

SEQ ID NO: 64330 - protein, 125 aa, Triticum aestivum
  peptide (1)..(125): Ceres Seq. ID no. 13585325
MEGCKCNSNICHDVLLVSLCGRVLLSGQVPNSLCSLLDLHFHIGWVLGPVLGQEDRACAQEGLADRLHPLLCHLRQCSYHGCCWDREEHLDDPQSRIHGVPQLLLSEQTKQTTTRPGENPNQANT

SEQ ID NO: 64331 - protein, 110 aa, Triticum aestivum
  peptide (1)..(110): Ceres Seq. ID no. 13585326
MRCFDGWKVASATATFVMMFSSSLSVVEFYFLGRFPIPYALYLIFISILAGFWGQCLVRKIVHVLKRASLIVFILSSVIFASALTMGVVGTEKSISMIHNHEYMGFLSFC

SEQ ID NO: 64332 - protein, 93 aa, Triticum aestivum
  peptide (1)..(93): Ceres Seq. ID no. 13585327
MMFSSSLSVVEFYFLGRFPIPYALYLIFISILAGFWGQCLVRKIVHVLKRASLIVFILSSVIFASALTMGVVGTEKSISMIHNHEYMGFLSFC

SEQ ID NO: 64333 - DNA, 808 bp, Triticum aestivum
  misc_feature (1)..(808): Ceres Seq. ID no. 12618251
acatcgagtcctcgcgccgtcccccgtcccatattccctttacccgttctcgcctcgtcgccggcaatggcgggtcccggcgtcggagcggccgcgcctcgcctgtcgctgctgctgctgctcgtcgtcgtcttcgcgggcccctctcgcgacagccgcaccgaggcggccgtgcggacgtgcacgtacacggtgaaggtgaagacgagctgcgcgtcgccggcgcggacgtcggacgcggtcagcgtggcgttcggggacgcgtaccggaacgaggcgtacggggcgcgcctcccgagcgcgccgggcgggagggccttcgagcggtgcggcaccgacaccttccgcgtctccggggtgtgcggctacggcgtctgctacctctacctccgccgcgccggccgcgacggctgggcgcccgagtgggtccaggtcaccgagccgggccccggcgccggagagaagcccgccaccttctacttcggggcgccgctgccggacggcgtctggtacggccacaaccgctgccccaaggccaaggccaaggcagcggcggcggctcggacaaacaccacctctgctgctgcttcgcctctgggctagcgcgacctgattcggctctacccaccgggcgcagcccctctccgtatgtaattcggcattcgccgagaataagcagactgtgcttacagattcagaataagtaattagagaatcataatccgaaatatgatgaggccatgagggcaccttcttcacaccccggaggatttgtttcctgtttacatttaccacacatctctattag

SEQ ID NO: 64334 - protein, 234 aa, Triticum aestivum
  peptide (1)..(234): Ceres Seq. ID no. 12618252
IESSRRPPSHIPFTRSRLVAGNGGSRRRSGRASPVAAAAARRRLRGPLSRQPHRGGRADVHVHGEGEDELRVAGADVGRGQRGVRGRVPERGVRGAPPERAGREGLRAVRHRHLPRLRGVRLRRLLPLPPPRRPRRLGARVGPGHRAGPRRRREARHLLLRGAAAGRRLVRPQPLPQGQGQGSGGGSDKHHLCCCFASGLARPDSALPTGRSPSPYVIRHSPRISRLCLQIQNK

SEQ ID NO: 64335 - protein, 200 aa, Triticum aestivum
  peptide (1)..(200): Ceres Seq. ID no. 12618253
TSSPRAVPRPIFPLPVLASSPAMAGPGVGAAAPRLSLLLLLVVVFAGPSRDSRTEAAVRTCTYTVKVKTSCASPARTSDAVSVAFGDAYRNEAYGARLPSAPGGRAFERCGTDTFRVSGVCGYGVCYLYLRRAGRDGWAPEWVQVTEPGPGAGEKPATFYFGAPLPDGVWYGHNRCPKAKAKAAAAARTNTTSAAASPLG

SEQ ID NO: 64336 - protein, 178 aa, Triticum aestivum
  peptide (1)..(178): Ceres Seq. ID no. 12618254
MAGPGVGAAAPRLSLLLLLVVVFAGPSRDSRTEAAVRTCTYTVKVKTSCASPARTSDAVSVAFGDAYRNEAYGARLPSAPGGRAFERCGTDTFRVSGVCGYGVCYLYLRRAGRDGWAPEWVQVTEPGPGAGEKPATFYFGAPLPDGVWYGHNRCPKAKAKAAAAARTNTTSAAASPLG

SEQ ID NO: 64337 - DNA, 1472 bp, Triticum aestivum
  misc_feature (1)..(1472): Ceres Seq. ID no. 13655434
ctaatcgaaaacattcggcagggttgtgaacaccatgtgcaacgtcggagccaaccgcaaccaggccttcgtggagttcgcagatcaaaaccaggcaatttcaatggtttcatattatgcttcatcttcagaacctgcccaagttcgtggtaaaactgtatatatccagtattcaaataggcaagaaattacaaacaataaaggcactggtgattcttctggcaatgtcctgcttgtcacctttgaaggtgtccagcctaatgatgttagcatagatgttatccatttggtattttctgcttttgggtttgttcacaagatagcaacgtttgagaaagccgctggtttccaggcacttatccaatatactgatgctccaactgctctagaggcaaaaaattcgttagacggaagaagcataccgaggtatctactggctgaacacgtcagcatttgtcacctgcgcataacattttctgcgcacaaagatttgaatattaaatttcaatcacatcgcagcagggattacacaaatccttatcttcctgttaatccaactgcaatcgagggaatcacacagcccatattaggctctgatgggaagattaaggagccagagagcaatgtacttttagcatcaatcgagaacatgcagtatgctgtgggagtggatgttctacacactgtgttctcttcttttggtgctgtccgaaagattgcaatgttcgagaagaatggtggaatgcaggctctaattcagtatccagatataacaacagcaggagttgctaaacaagctctggaggggcattgcatatatgatggtggttactgtaagcttcatctgtcatactctcgtcatactgatctgaatgtgaaggcacatgacgagagaagcagagactacaccgtctcggatcctagtgctcaggtacaagctgcaggtcaagcccctggtctaagcactcctggagcagcatggcaaagcaccacgcctgctgctttttatggaagctcagcaggaccgacctctatcggacaagcgccagcctggaatcctaacatgcagcgaggggcatttgcacctgcatcaacctcgtaccctacccaattattgatggcaaacccaggcccgcactttccagcagtcggatcaagctctggtgctcctccgatgttgtaccaagcttcgcagcagatggcacattatggcacagcccctgctgctctgcctcatgcagccttgtctggcgaaccgatgtacttcccaaaatgagctattcatccaatagagcagttgcctatgctttgtgcagcacctctggtcttcaatttttggaactgcactgtaatgccgatctgtttttcttggtacttgtgagacccctgtggcaaatgtacctgtctggctgttggtgcctgtaaactgcacaacaaaatggaaaattactcgagccatgtcagttcaatcc

SEQ ID NO: 64338 - protein, 413 aa, Triticum aestivum
  peptide (1)..(413): Ceres Seq. ID no. 13655435
MCNVGANRNQAFVEFADQNQAISMVSYYASSSEPAQVRGKTVYIQYSNRQEITNNKGTGDSSGNVLLVTFEGVQPNDVSIDVIHLVFSAFGFVHKIATFEKAAGFQALIQYTDAPTALEAKNSLDGRSIPRYLLAEHVSICHLRITFSAHKDLNIKFQSHRSRDYTNPYLPVNPTAIEGITQPILGSDGKIKEPESNVLLASIENMQYAVGVDVLHTVFSSFGAVRKIAMFEKNGGMQALIQYPDITTAGVAKQALEGHCIYDGGYCKLHLSYSRHTDLNVKAHDERSRDYTVSDPSAQVQAAGQAPGLSTPGAAWQSTTPAAFYGSSAGPTSIGQAPAWNPNMQRGAFAPASTSYPTQLLMANPGPHFPAVGSSSGAPPMLYQASQQMAHYGTAPAALPHAALSGEPMYFPK

SEQ ID NO: 64339 - protein, 390 aa, Triticum aestivum
  peptide (1)..(390): Ceres Seq. ID no. 13655436
MVSYYASSSEPAQVRGKTVYIQYSNRQEITNNKGTGDSSGNVLLVTFEGVQPNDVSIDVIHLVFSAFGFVHKIATFEKAAGFQALIQYTDAPTALEAKNSLDGRSIPRYLLAEHVSICHLRITFSAHKDLNIKFQSHRSRDYTNPYLPVNPTAIEGITQPILGSDGKIKEPESNVLLASIENMQYAVGVDVLHTVFSSFGAVRKIAMFEKNGGMQALIQYPDITTAGVAKQALEGHCIYDGGYCKLHLSYSRHTDLNVKAHDERSRDYTVSDPSAQVQAAGQAPGLSTPGAAWQSTTPAAFYGSSAGPTSIGQAPAWNPNMQRGAFAPASTSYPTQLLMANPGPHFPAVGSSSGAPPMLYQASQQMAHYGTAPAALPHAALSGEPMYFPK

SEQ ID NO: 64340 - protein, 208 aa, Triticum aestivum
  peptide (1)..(208): Ceres Seq. ID no. 13655437
MQYAVGVDVLHTVFSSFGAVRKIAMFEKNGGMQALIQYPDITTAGVAKQALEGHCIYDGGYCKLHLSYSRHTDLNVKAHDERSRDYTVSDPSAQVQAAGQAPGLSTPGAAWQSTTPAAFYGSSAGPTSIGQAPAWNPNMQRGAFAPASTSYPTQLLMANPGPHFPAVGSSSGAPPMLYQASQQMAHYGTAPAALPHAALSGEPMYFPK

SEQ ID NO: 64341 - DNA, 1260 bp, Triticum aestivum
  misc_feature (1)..(1260): Ceres Seq. ID no. 13598749
actccactcaatccccaaaatggggacgctgcttccgtgtcaccctacccttaccctcctccccctcctcttcgccgccgccatcgtcggcgtgcgttgcgcgccggtgtacaggccggagtacctggtggacgggaaccagctggtaaacatgcagtaccacatgggccccgtcgtgtcaggcgcgccgaccaacctgttcctcatctggtacggccggtgggaggccccggcgcaggctgtgctccgcgacttcctcgcctccctctccgctccggcgccgttccccgccgtctccgactggtgggcccgcacgccgcggctctacacggaccaatccggcgccaatgtcaccgccacattcgccatcgccggggagcactccgacgccgggtactcccacggcgcctccctgaagcggatcgacatgcagtccatcatccgcaccgccgtggtcgcgtacccggaccctctgccgctcgacccgtacaacggcgtgtacctggtgctctcctcaccggacgtgcaggtggaggagttctgccgcgccatgtgcggcttccactacttcaccttcgcgtccgtggtcggggtcaccgtcccgtacgcgtgggtcgggaacagcggctcgcagtgcccagggaggtgtgcgtatccgttcgccgcgccggagtacggcgccagcgggcagggggtgctgcggccgccgaacggcgaccccggggtggacgggatggtgatcgtgctggggcacgagcttgcggagctggccaccaacccgctggtgaacgcgtggtacgccggtgacacgccaacggcgcccacggagatcgccgacctctgtctcggggtctacggcgacggcggtggagcaggcgggttcgtcgggaatgtctcccacgcagccgacggcagctcctacaacgtgaacggcgtcaacggtcggcggttcctggtgcagtggctctggaaccccgtcctcggcgcgtgctacggacccaactccagcaactgaagccgctcttctcttccccggatccgtggcttctctcagttgatgccattgcgctggatggcgttgcagaggcaggaatggcaagtccatggatggatgggtacgacatgccatgatatccagatactgaatgtctgaaatgtcattcagactcgatctgttccttatttgttggcccagggtttgcgataggtttatggattttgatagatctgtatctgtgaggacaagatgcaaatttttgc

SEQ ID NO: 64342 - protein, 337 aa, Triticum aestivum
  peptide (1)..(337): Ceres Seq. ID no. 13598750
LHSIPKMGTLLPCHPTLTLLPLLFAAAIVGVRCAPVYRPEYLVDGNQLVNMQYHMGPVVSGAPTNLFLIWYGRWEAPAQAVLRDFLASLSAPAPFPAVSDWWARTPRLYTDQSGANVTATFAIAGEHSDAGYSHGASLKRIDMQSIIRTAVVAYPDPLPLDPYNGVYLVLSSPDVQVEEFCRAMCGFHYFTFASVVGVTVPYAWVGNSGSQCPGRCAYPFAAPEYGASGQGVLRPPNGDPGVDGMVIVLGHELAELATNPLVNAWYAGDTPTAPTEIADLCLGVYGDGGGAGGFVGNVSHAADGSSYNVNGVNGRRFLVQWLWNPVLGACYGPNSSN

SEQ ID NO: 64343 - protein, 331 aa, Triticum aestivum
  peptide (1)..(331): Ceres Seq. ID no. 13598751
MGTLLPCHPTLTLLPLLFAAAIVGVRCAPVYRPEYLVDGNQLVNMQYHMGPVVSGAPTNLFLIWYGRWEAPAQAVLRDFLASLSAPAPFPAVSDWWARTPRLYTDQSGANVTATFAIAGEHSDAGYSHGASLKRIDMQSIIRTAVVAYPDPLPLDPYNGVYLVLSSPDVQVEEFCRAMCGFHYFTFASVVGVTVPYAWVGNSGSQCPGRCAYPFAAPEYGASGQGVLRPPNGDPGVDGMVIVLGHELAELATNPLVNAWYAGDTPTAPTEIADLCLGVYGDGGGAGGFVGNVSHAADGSSYNVNGVNGRRFLVQWLWNPVLGACYGPNSSN

SEQ ID NO: 64344 - protein, 287 aa, Triticum aestivum
  peptide (1)..(287): Ceres Seq. ID no. 13598752
MQYHMGPVVSGAPTNLFLIWYGRWEAPAQAVLRDFLASLSAPAPFPAVSDWWARTPRLYTDQSGANVTATFAIAGEHSDAGYSHGASLKRIDMQSIIRTAVVAYPDPLPLDPYNGVYLVLSSPDVQVEEFCRAMCGFHYFTFASVVGVTVPYAWVGNSGSQCPGRCAYPFAAPEYGASGQGVLRPPNGDPGVDGMVIVLGHELAELATNPLVNAWYAGDTPTAPTEIADLCLGVYGDGGGAGGFVGNVSHAADGSSYNVNGVNGRRFLVQWLWNPVLGACYGPNSSN

SEQ ID NO: 64345 - DNA, 1251 bp, Triticum aestivum
  misc_feature (1)..(1251): Ceres Seq. ID no. 12618555
attcccactttactccagcaatcttgtgctctcttctaattttatctcggttgctcggtattgattcaccgtctcctccttccagggcgcagcgcttgctcgtttcatctctcgtgccatgccacaggtagcacagtacaagatcgcgctgtgccagctgcctgtcaccgcggacaagcacggcaacatcgcccgcgcgcgcgcccgcatcgacgccgccgcggccgccggcgccaagctcgtcgtcctgccggaaatatggaactgcccctacgcgatggagaccatgccgagctacgccgaggacatcgacggcggccggtcgccgtcggtctcgatgctgtcggaggtggccgctgccaggaagatcaccatcgtcggcggatccgtgcccgagatggcgtcggggcagctgttcaacacctgctgcgtggtcggtcccgacggagagatcaaggccaagcacaggaagctgcatctgtttggaattgacatccccggagacatcactttcagggaatccgataccttcactgctgggcaagaacccaccgtggttgacacagatgttggacggattggtattgggatttgtcatgatatccggttcccagaactggcaatgctgtatcgatcaagaggtgcacacttgatatgctacccttctgcatttaacatgagcaccgggcagctcctctgggaccttatgcagaagtccagggctgttgacaatcagctgttcgtggcgacctgctcacctgcgcgagaccccaactcgccgtcggaattcgtggtctggggcaactcaagcctcatcgcaccatttggcgaggttcttgcggcggcagggcacgaggacgcgaccgtcatcggcgagatcgacctgtctttggttgaagctgtaagggcgaacctccctttggaaacgcagggtagaggggatctgtacaggctgatcgatgtccagagggaacgttcgagctagctgcgttgctcgaggagatggaaatgcagcgcacagagctgaagaaggccacgtctgcatgtgttggtcacatgctaggttcagtaagacactaagactgtaaggggtttgcaaaattgtgtagcggcatgcaaagattcgggatgccataatactgtatccttgtactgcatttgttttcttattacagtgaactaaaagtagatgtggatttgagtagtccggattctgctaaaacccggttactagtaggttttccctttttg

SEQ ID NO: 64346 - protein, 288 aa, Triticum aestivum
  peptide (1)..(288): Ceres Seq. ID no. 12618556
MPQVAQYKIALCQLPVTADKHGNIARARARIDAAAAAGAKLVVLPEIWNCPYAMETMPSYAEDIDGGRSPSVSMLSEVAAARKITIVGGSVPEMASGQLFNTCCVVGPDGEIKAKHRKLHLFGIDIPGDITFRESDTFTAGQEPTVVDTDVGRIGIGICHDIRFPELAMLYRSRGAHLICYPSAFNMSTGQLLWDLMQKSRAVDNQLFVATCSPARDPNSPSEFVVWGNSSLIAPFGEVLAAAGHEDATVIGEIDLSLVEAVRANLPLETQGRGDLYRLIDVQRERSS

SEQ ID NO: 64347 - protein, 235 aa, Triticum aestivum
  peptide (1)..(235): Ceres Seq. ID no. 12618557
METMPSYAEDIDGGRSPSVSMLSEVAAARKITIVGGSVPEMASGQLFNTCCVVGPDGEIKAKHRKLHLFGIDIPGDITFRESDTFTAGQEPTVVDTDVGRIGIGICHDIRFPELAMLYRSRGAHLICYPSAFNMSTGQLLWDLMQKSRAVDNQLFVATCSPARDPNSPSEFVVWGNSSLIAPFGEVLAAAGHEDATVIGEIDLSLVEAVRANLPLETQGRGDLYRLIDVQRERSS

SEQ ID NO: 64348 - protein, 232 aa, Triticum aestivum
  peptide (1)..(232): Ceres Seq. ID no. 12618558
MPSYAEDIDGGRSPSVSMLSEVAAARKITIVGGSVPEMASGQLFNTCCVVGPDGEIKAKHRKLHLFGIDIPGDITFRESDTFTAGQEPTVVDTDVGRIGIGICHDIRFPELAMLYRSRGAHLICYPSAFNMSTGQLLWDLMQKSRAVDNQLFVATCSPARDPNSPSEFVVWGNSSLIAPFGEVLAAAGHEDATVIGEIDLSLVEAVRANLPLETQGRGDLYRLIDVQRERSS

SEQ ID NO: 64349 - DNA, 1489 bp, Triticum aestivum
  misc_feature (1)..(1489): Ceres Seq. ID no. 12618461
atcagggggtttttggttgccagggttcggagttcggtacacagatcggaagggtctagaagcttctggtggtgacgatggcggtcctcgcgaggtcggccgccgccgtggctgcgctcgcgctcgcgctgctcgtgtcggccgtcgccggcgaggtcttcttccaggagaagttcgacgatggatgggaggatcggtgggtcaagtcggagtggaagaaggaggacaacacggccggcgagtggaaccacacctccggcaaatggaacggagacgctgacgacaaaggcatccagacgtcggaggactacaggttctacgccatctcggcgcagtacccggagttgaggaacaaggacaagaccctggtgctgcagttctccgtcaagcacgagcaggacctcgactgcggcggcggctacatcaagctcctccccgccgacgtcgaccagaagaagttcggcggtgagaccccatacagcatcatgttcgggccggacatctgcgggtacgccaccaagaaggtgcacgcgatcctcaccaagaacggcaagaaccatctgatcaagaaggaggtgccctgcgagacggaccaactcacgcacgtctacaccttgatcttccggcccgacgccacgtacagcatcctcatcgacaacgtcgagaagcagtccggcagcgtctacgatgactgggacatccttcctgccaagaagaagagggatcctaatgccaagaagccagaggactgggaggacgaggagttccttcctgaccccgaggacaagaagccagaggggtatgatgacattcccaaggaaatcactgaacctgatgcaacgaagcctgaggactgggatgatgaggaagatggtgaatggacagctccaaccatcccaaacccggagtacaagggaccatggatccaaaagaaaatcaagaaccctaatttcaagggaaaatggaaggcacctttgatcgacaacccagagtacaaggacgatccttacatctacgcttttgacagcctgaagcacattggcattgagctgtggcaggttaaatcaggaactctgttcgacaacatcctgatcactgatgaccctgagtacgccaagaagttcgcggaggagacctggggcaagcacaaggatgctgagaaggccgcctttgatgaggccgagaagaagaggcttgaggaggaatccgcaaacactaagaccgaagacaatgacgatgcagctgatcaggaggatgagggcaaagctgccggcgccagcgatgaggagaacaaggatgcctccggcgatgaggaaattagcaaggatgcttcttcttcttccgacaagaaggacgagctttagagtgtggcaggcaggctctgtatctaaactttttcctcttgaggcagtagagcttcccatccagcaattagaagaacattttctctgaaagatgacagaagaagtaatgcaatctcggctcttgt

SEQ ID NO: 64350 - protein, 428 aa, Triticum aestivum
  peptide (1)..(428): Ceres Seq. ID no. 12618462
MAVLARSAAAVAALALALLVSAVAGEVFFQEKFDDGWEDRWVKSEWKKEDNTAGEWNHTSGKWNGDADDKGIQTSEDYRFYAISAQYPELRNKDKTLVLQFSVKHEQDLDCGGGYIKLLPADVDQKKFGGETPYSIMFGPDICGYATKKVHAILTKNGKNHLIKKEVPCETDQLTHVYTLIFRPDATYSILIDNVEKQSGSVYDDWDILPAKKKRDPNAKKPEDWEDEEFLPDPEDKKPEGYDDIPKEITEPDATKPEDWDDEEDGEWTAPTIPNPEYKGPWIQKKIKNPNFKGKWKAPLIDNPEYKDDPYIYAFDSLKHIGIELWQVKSGTLFDNILITDDPEYAKKFAEETWGKHKDAEKAAFDEAEKKRLEEESANTKTEDNDDAADQEDEGKAAGASDEENKDASGDEEISKDASSSSDKKDEL

SEQ ID NO: 64351 - protein, 292 aa, Triticum aestivum
  peptide (1)..(292): Ceres Seq. ID no. 12618463
MFGPDICGYATKKVHAILTKNGKNHLIKKEVPCETDQLTHVYTLIFRPDATYSILIDNVEKQSGSVYDDWDILPAKKKRDPNAKKPEDWEDEEFLPDPEDKKPEGYDDIPKEITEPDATKPEDWDDEEDGEWTAPTIPNPEYKGPWIQKKIKNPNFKGKWKAPLIDNPEYKDDPYIYAFDSLKHIGIELWQVKSGTLFDNILITDDPEYAKKFAEETWGKHKDAEKAAFDEAEKKRLEEESANTKTEDNDDAADQEDEGKAAGASDEENKDASGDEEISKDASSSSDKKDEL

SEQ ID NO: 64352 - DNA, 846 bp, Triticum aestivum
  misc_feature (1)..(846): Ceres Seq. ID no. 13585022
ctcaactcaaaccaccggcattagtcactcctcttcactccaaaccagcgagtaacactccaaacagccaatggcgttccccaagcccctggcggctctcctcctcgccgtggcgctggcagcgactgccatgtccgccgccggtcaggatccccaaaactgcaagccgagccgcaaggtgacggtgcagaacctgtgcggcaaggacctttacctcggcatcgagccgctggccaacagcaagctcctctacagccctggctacctgctccgccacggcacccacgtgtcgtacgacgtgtgctcgtggacggggcgcgtgaaggtgcaggacgccgtggtgacggagtttcacatcgggtacgacggcggggcgtggtaccaggtgagcaccgaccagtcccacatgcccatccgtgtctccatcaccccccacggccaccccctgaaagaccactgccccaccgccggctgcaacagcggtggccactgcttcgagcactccgtccccggcggcaagtgccacggcgtcgacgagatcaagatcgtcttctacaacccctagatccagctgctgggcgtgtttaataagtttgcagctcggtgatcttagtcgtattgcagctgctagtcagtgaatcatctgctccaacgagctattgtcgtgtcgtgtcgtgtcgatttactgttcaattagtagttgcggtggtgaatgtgtggctagagatgtttcatagccgtgcaatgaactgcatgtcgtcagctctgtatccgtcgttggtgtgttgtgtgttttctagtttataaatccgatttaaaatgtggctgggtcaccgaactgatgtc

SEQ ID NO: 64353 - protein, 164 aa, Triticum aestivum
  peptide (1)..(164): Ceres Seq. ID no. 13585023
MAFPKPLAALLLAVALAATAMSAAGQDPQNCKPSRKVTVQNLCGKDLYLGIEPLANSKLLYSPGYLLRHGTHVSYDVCSWTGRVKVQDAVVTEFHIGYDGGAWYQVSTDQSHMPIRVSITPHGHPLKDHCPTAGCNSGGHCFEHSVPGGKCHGVDEIKIVFYNP

SEQ ID NO: 64354 - protein, 144 aa, Triticum aestivum
  peptide (1)..(144): Ceres Seq. ID no. 13585024
MSAAGQDPQNCKPSRKVTVQNLCGKDLYLGIEPLANSKLLYSPGYLLRHGTHVSYDVCSWTGRVKVQDAVVTEFHIGYDGGAWYQVSTDQSHMPIRVSITPHGHPLKDHCPTAGCNSGGHCFEHSVPGGKCHGVDEIKIVFYNP

SEQ ID NO: 64355 - DNA, 1363 bp, Triticum aestivum
  misc_feature (1)..(1363): Ceres Seq. ID no. 12616314
aaaaacaagcacaaccggaaattctccacccagcaactcacacggtcacactccctcgcgctcacatcaaaacagcgagagaacgcgccgccgccgtggaccacgcaccgctcgacagccgataatgctcctcctcttcgcgctcctcgccggcgccggcgccgccgccttcctcctcttcaagttcgccaccgccgacggagatttcaccctcttgtcgtgcggccgggcgcggcgggacaaagtggacggcaaggttgtatggatcacgggagcgagccgtgggattggggaggttctttcgatgcagtttgcgagtttaggagcaaagctcatactatctgcacgtaacaaggaggagcttgagagagtgaaacgtaacatcatcagcaagcatccagatagcaaagttgaagtgttacctatggatttatcatctgatgaagaatctctgaaagaagttgtacattcagcggaatcactcttttccagtgcaggcattgactatatgatgcacaatgcggcctttgagcgtccaaaaaggggggccctggaagaaactgaggaaggtcttaaggctacttttcatgtcaatgtctttggaacaattactttgactcgccttcttgcacctttcatgttggatagagggatgggtcattttgttgtgatgagtagtgcagctggaaaggtgcccacacctggtcaggctctttactctgcttccaaacatgctctcaatggctactttgcttctctgcgctctgagttatgtacgaaaggcattaaggtcactgttgtctgtcctggacctattgaaacaccagtaccttctggtgcaacttcttcatcacaaaggcattcatccgagaaacgtgtttcagtggaaagatgtgctgaactgacaatagttgccgcaactcatggactaaaagaagcatggatatcatatcagcctgtgctggctgttatgtacgtggtgcaatacatgccaacaattggatggtggcttatggacaaggttggtgcgaagcgagtggatgctgctgcaaagaagggcaacgcctacagttggaatctcctcttcggtggcaaaaagtcggcttgacaatgaagttgctcattacgcctacagttggaatctcattgagattctgaaatagtcatacacatctatctatatagattatgaaccttgtcaccctttttcatctttatgtgcgaaatgaccaacgggaagcaagcactccttgtaatgtcacctagtcagcgagttgaagtattttataactcagatacaagtcagcattccagcttcgcatttccacaaaagaataaatcatgcaagatggatgactatttt

SEQ ID NO: 64356 - protein, 368 aa, Triticum aestivum
  peptide (1)..(368): Ceres Seq. ID no. 12616315
KTSTTGNSPPSNSHGHTPSRSHQNSERTRRRRGPRTARQPIMLLLFALLAGAGAAAFLLFKFATADGDFTLLSCGRARRDKVDGKVVWITGASRGIGEVLSMQFASLGAKLILSARNKEELERVKRNIISKHPDSKVEVLPMDLSSDEESLKEVVHSAESLFSSAGIDYMMHNAAFERPKRGALEETEEGLKATFHVNVFGTITLTRLLAPFMLDRGMGHFVVMSSAAGKVPTPGQALYSASKHALNGYFASLRSELCTKGIKVTVVCPGPIETPVPSGATSSSQRHSSEKRVSVERCAELTIVAATHGLKEAWISYQPVLAVMYVVQYMPTIGWWLMDKVGAKRVDAAAKKGNAYSWNLLFGGKKSA

SEQ ID NO: 64357 - protein, 327 aa, Triticum aestivum
  peptide (1)..(327): Ceres Seq. ID no. 12616316
MLLLFALLAGAGAAAFLLFKFATADGDFTLLSCGRARRDKVDGKVVWITGASRGIGEVLSMQFASLGAKLILSARNKEELERVKRNIISKHPDSKVEVLPMDLSSDEESLKEVVHSAESLFSSAGIDYMMHNAAFERPKRGALEETEEGLKATFHVNVFGTITLTRLLAPFMLDRGMGHFVVMSSAAGKVPTPGQALYSASKHALNGYFASLRSELCTKGIKVTVVCPGPIETPVPSGATSSSQRHSSEKRVSVERCAELTIVAATHGLKEAWISYQPVLAVMYVVQYMPTIGWWLMDKVGAKRVDAAAKKGNAYSWNLLFGGKKSA

SEQ ID NO: 64358 - protein, 267 aa, Triticum aestivum
  peptide (1)..(267): Ceres Seq. ID no. 12616317
MQFASLGAKLILSARNKEELERVKRNIISKHPDSKVEVLPMDLSSDEESLKEVVHSAESLFSSAGIDYMMHNAAFERPKRGALEETEEGLKATFHVNVFGTITLTRLLAPFMLDRGMGHFVVMSSAAGKVPTPGQALYSASKHALNGYFASLRSELCTKGIKVTVVCPGPIETPVPSGATSSSQRHSSEKRVSVERCAELTIVAATHGLKEAWISYQPVLAVMYVVQYMPTIGWWLMDKVGAKRVDAAAKKGNAYSWNLLFGGKKSA

SEQ ID NO: 64359 - DNA, 1526 bp, Triticum aestivum
  misc_feature (1)..(1526): Ceres Seq. ID no. 13655442
acatcctaatcgaaaaaccacacacgagcacccgccggagccgatcgaccgagagccgccgcgcgcgcagctcagctcagccccgccgcctcccctcctcctccaccgcgccgcattcctctcccgcgcgcaggcagggggagatccgcctccctggcccgatggcgccgtcgcggccgctgatgcgcggggcgggcccgccgcgggtcttcggctccgggcgcgccggccgggcatcgccgtacgcgctcgcgctcgccgcgctgctcctcgcctccgccttcctcctcgccctcatcgccttcggcgtcttctcgctccccgtctcctcccccgcgctccccaccaccggcgccgagaccgagtcgtccggcgacggcggggccgcggagtccgatgcctccggcggctcctcccgcgccgcgcgcagccgcgcccgccgcgacctcagcgaggggctgggcgagcgcggcgcgcagtggacggaggtcatctcgtgggagcccagggcgttcgtctaccacaacttcctgtctaaggaagagtgtgagtacttaattggattggcgaagcctcgcatggtgaaatcaacagtggtcgacagtgagactggtaaaagcaaggacagcagggttcgtacaagttcaggcatgtttcttcaaagagggcgggacaaggttatccgggccattgaaaggaggatagcagattacaccttcatacctgcagaacatggagagggactccaagtactgcactatgaagtcgggcagaagtacgaaccccactttgattattttcttgacgagttcaacaccaagaatggtggccagaggatggcaactattctcatgtacctgtcagatgttgaagaagggggtgagactattttccccgatgcaaatgtgaacagcagttccttaccgtggtacaacgaactttcagagtgtgccagaaaaggtcttgctgtcaaaccgaagatgggagatgcgctgcttttctggagcatgaaaccagatgccactctagatccactaagtttgcacgggggctgtcctgtcatcaaagggaacaaatggtcatcaaccaagtggctgcatgttcacgagtacaaagcataggccttgtgaactcattccaaagatgacacgatctgagcatgtgacctgggctctttacatgatggctttacagttacagatccacccccattgtgttcattgcttgtggaggacatatatatacaaggagggcttcatgctggaatactgactcggcatttttcttcttcttctccctcgccgcagtgcccccagcaacttattatagaggaatgaatatgatatgatgtgatgtatgtagcgtcgggggctgtaggatccggagttccattttcggttcgtgttcttgtcctgtttgtagcactagtactataatgcagtactgatgtagcagcctcgaggtgagtcgttactgaacaataactattgaggattttgcttgtctcggcattttacacagttatt

SEQ ID NO: 64360 - protein, 372 aa, Triticum aestivum
  peptide (1)..(372): Ceres Seq. ID no. 13655443
ILIEKPHTSTRRSRSTESRRARSSAQPRRLPSSSTAPHSSPARRQGEIRLPGPMAPSRPLMRGAGPPRVFGSGRAGRASPYALALAALLLASAFLLALIAFGVFSLPVSSPALPTTGAETESSGDGGAAESDASGGSSRAARSRARRDLSEGLGERGAQWTEVISWEPRAFVYHNFLSKEECEYLIGLAKPRMVKSTVVDSETGKSKDSRVRTSSGMFLQRGRDKVIRAIERRIADYTFIPAEHGEGLQVLHYEVGQKYEPHFDYFLDEFNTKNGGQRMATILMYLSDVEEGGETIFPDANVNSSSLPWYNELSECARKGLAVKPKMGDALLFWSMKPDATLDPLSLHGGCPVIKGNKWSSTKWLHVHEYKA

SEQ ID NO: 64361 - protein, 319 aa, Triticum aestivum
  peptide (1)..(319): Ceres Seq. ID no. 13655444
MAPSRPLMRGAGPPRVFGSGRAGRASPYALALAALLLASAFLLALIAFGVFSLPVSSPALPTTGAETESSGDGGAAESDASGGSSRAARSRARRDLSEGLGERGAQWTEVISWEPRAFVYHNFLSKEECEYLIGLAKPRMVKSTVVDSETGKSKDSRVRTSSGMFLQRGRDKVIRAIERRIADYTFIPAEHGEGLQVLHYEVGQKYEPHFDYFLDEFNTKNGGQRMATILMYLSDVEEGGETIFPDANVNSSSLPWYNELSECARKGLAVKPKMGDALLFWSMKPDATLDPLSLHGGCPVIKGNKWSSTKWLHVHEYKA

SEQ ID NO: 64362 - protein, 312 aa, Triticum aestivum
  peptide (1)..(312): Ceres Seq. ID no. 13655445
MRGAGPPRVFGSGRAGRASPYALALAALLLASAFLLALIAFGVFSLPVSSPALPTTGAETESSGDGGAAESDASGGSSRAARSRARRDLSEGLGERGAQWTEVISWEPRAFVYHNFLSKEECEYLIGLAKPRMVKSTVVDSETGKSKDSRVRTSSGMFLQRGRDKVIRAIERRIADYTFIPAEHGEGLQVLHYEVGQKYEPHFDYFLDEFNTKNGGQRMATILMYLSDVEEGGETIFPDANVNSSSLPWYNELSECARKGLAVKPKMGDALLFWSMKPDATLDPLSLHGGCPVIKGNKWSSTKWLHVHEYKA

SEQ ID NO: 64363 - DNA, 1642 bp, Triticum aestivum
  misc_feature (1)..(1642): Ceres Seq. ID no. 15170155
agctccgcccacagggaggcaaccaagaatttaaagcggcaacaagatcgtcggcgccgccggatcctgctccgccttgttatctccgccccgtaaccacacgcccgaagctgcagccgagccgagatgcatctgagcgagaacgaggggatcgagggcgtgcggttcgtggtgacaggcgggcagggcttcgtcggcgccgccctctgcctggagctgatccgccgcggcgccctggaggtccgctccctcgacctgcgcgcctcctcctcctggtcccagcagctcctcgacgccggcgtccgcttcttccaaggggatgttcggaagaaggaggatgtggggaaggttttccgcaatgtggactgtgtcttccaccttgcttcatatggaatgtcagggaaagaaatggtacaggcaggacgaacagatgaggtcaatataaatgggacgtgcaatgtactggatgcttgccatgagcatggtgttagaaggcttgtgtatgttagcacatataatgtggtgtttgggggaaagccaattgtcaatggcagtgagacgttgccttattttcccattgaagaccatgttgatgcttatgggcgtagcaaatcgatcgctgaacagttggtgctgaagagcaatggtcggcaagctaagagtagtaaaggtactcgcctttatacatgtgcaatacgcccggctgctatctatggtccaggtgaagagcgtcatcttccaagaatcctgtctcttggaaaattgggattagcatctttcaggattgggggtccaaatgtgaagacagattgggtctatgctgataatcttgttcttgcactgatattggcaagtatgggacttttagatgacattcctggcaggaagggaactcctgtagcagctggtcaagcatacttcatatgtgatggagagcctattaatagttttgattttatcatcagtcccttgtttcgaagtttgggctatcctgtacctcgagctacactagatacctctgttgcccttgcaatttcaagaatcattttgttcatgtccacactattctatccatggttagatagtaaatggattcctcagcctcttattcttcctgctgaagtatacaaggtgggtgttacacattacttttcatatctgaaagctaaggaggaacttggctacgtgcctgtgacgagtccacaggaaggcctggccgcaacgatctcctattggcaagagcggaagaggagagagctcgatggcccgacgatattcacctgggttgcagtaatagccgggatgctggctgtgttctccgccgctttccttccacccgtcggtccgctcaaatgggtgctcgccatcaatctgttcgttttccgctcgatgctggtgatccggatagtctttgtggccgcggtcgcggcgcacgcgagtgaagccgtctacgcctggttcctggcaaagaaggtcgacccgaggaacgcgacggggtggttttggcagaccttcgccctggggttcctctccctccggtttctgctcaagagggcgagggcggggacgggaccgtgatttgtgtgttgtacttcagtaacaatggattctagtagaaattccccagaggttctaggtttgc

SEQ ID NO: 64364 - protein, 483 aa, Triticum aestivum
  peptide (1)..(483): Ceres Seq. ID no. 15170156
MHLSENEGIEGVRFVVTGGQGFVGAALCLELIRRGALEVRSLDLRASSSWSQQLLDAGVRFFQGDVRKKEDVGKVFRNVDCVFHLASYGMSGKEMVQAGRTDEVNINGTCNVLDACHEHGVRRLVYVSTYNVVFGGKPIVNGSETLPYFPIEDHVDAYGRSKSIAEQLVLKSNGRQAKSSKGTRLYTCAIRPAAIYGPGEERHLPRILSLGKLGLASFRIGGPNVKTDWVYADNLVLALILASMGLLDDIPGRKGTPVAAGQAYFICDGEPINSFDFIISPLFRSLGYPVPRATLDTSVALAISRIILFMSTLFYPWLDSKWIPQPLILPAEVYKVGVTHYFSYLKAKEELGYVPVTSPQEGLAATISYWQERKRRELDGPTIFTWVAVIAGMLAVFSAAFLPPVGPLKWVLAINLFVFRSMLVIRIVFVAAVAAHASEAVYAWFLAKKVDPRNATGWFWQTFALGFLSLRFLLKRARAGTGP

SEQ ID NO: 64365 - protein, 394 aa, Triticum aestivum
  peptide (1)..(394): Ceres Seq. ID no. 15170157
MSGKEMVQAGRTDEVNINGTCNVLDACHEHGVRRLVYVSTYNVVFGGKPIVNGSETLPYFPIEDHVDAYGRSKSIAEQLVLKSNGRQAKSSKGTRLYTCAIRPAAIYGPGEERHLPRILSLGKLGLASFRIGGPNVKTDWVYADNLVLALILASMGLLDDIPGRKGTPVAAGQAYFICDGEPINSFDFIISPLFRSLGYPVPRATLDTSVALAISRIILFMSTLFYPWLDSKWIPQPLILPAEVYKVGVTHYFSYLKAKEELGYVPVTSPQEGLAATISYWQERKRRELDGPTIFTWVAVIAGMLAVFSAAFLPPVGPLKWVLAINLFVFRSMLVIRIVFVAAVAAHASEAVYAWFLAKKVDPRNATGWFWQTFALGFLSLRFLLKRARAGTGP

SEQ ID NO: 64366 - protein, 389 aa, Triticum aestivum
  peptide (1)..(389): Ceres Seq. ID no. 15170158
MVQAGRTDEVNINGTCNVLDACHEHGVRRLVYVSTYNVVFGGKPIVNGSETLPYFPIEDHVDAYGRSKSIAEQLVLKSNGRQAKSSKGTRLYTCAIRPAAIYGPGEERHLPRILSLGKLGLASFRIGGPNVKTDWVYADNLVLALILASMGLLDDIPGRKGTPVAAGQAYFICDGEPINSFDFIISPLFRSLGYPVPRATLDTSVALAISRIILFMSTLFYPWLDSKWIPQPLILPAEVYKVGVTHYFSYLKAKEELGYVPVTSPQEGLAATISYWQERKRRELDGPTIFTWVAVIAGMLAVFSAAFLPPVGPLKWVLAINLFVFRSMLVIRIVFVAAVAAHASEAVYAWFLAKKVDPRNATGWFWQTFALGFLSLRFLLKRARAGTGP

SEQ ID NO: 64367 - DNA, 835 bp, Triticum aestivum
  misc_feature (1)..(835): Ceres Seq. ID no. 15174142
ccgttcgctctgtcgctcgcgtcatctcaccttccccgtcctgtggaagtcatctcctgtatcccggtaagaagaaggggtcgaaatggtgaagcacaacaatgttatccctaacggccacttcaagaagcattggcagaactatgtcaagacctggttcaaccagcctgcccgcaagcagaggcgccgcattgctcgtcaaaagaaggctgtgaagatcttccctcgccctacatctggtcctcttcgtcccattgtgcaatgccagactcggaagtacaacatgaaggcaagggctgggagaggctttacccttgaggagctgaagtcagcgggcatcccgaagaagctagctcctactattggcatttctgtggaccaccgacgtaaaaaccggtcacttgagggtatgcagtcaaacattcagcgactcaagacttacaaggccaagctggttatcttcccaaggtgtgctcacaaggttaaggctggtgattctacccctgaggaacttgccacagccacccaggtccagggtgactacttgcctattactcgtggtgagaagcgctcggttgagatcatgaaggtcactgaggagatgaaggcgttcaaggcctacggcaagctccgtgtcgagaggatgaaccagcaccagctcggtgcccgcacgaagaaggctgccgaggcagagaaggaagaaaagaagtgataagatattttgtttcattctgcagctagtgaatgttatcattgggaacttgttctaaattttgttttggggctggaaatagagaccaccggatggctttgatacctgctacttgtttgcatg

SEQ ID NO: 64368 - protein, 208 aa, Triticum aestivum
  peptide (1)..(208): Ceres Seq. ID no. 15174143
MVKHNNVIPNGHFKKHWQNYVKTWFNQPARKQRRRIARQKKAVKIFPRPTSGPLRPIVQCQTRKYNMKARAGRGFTLEELKSAGIPKKLAPTIGISVDHRRKNRSLEGMQSNIQRLKTYKAKLVIFPRCAHKVKAGDSTPEELATATQVQGDYLPITRGEKRSVEIMKVTEEMKAFKAYGKLRVERMNQHQLGARTKKAAEAEKEEKK

SEQ ID NO: 64369 - protein, 142 aa, Triticum aestivum
  peptide (1)..(142): Ceres Seq. ID no. 15174144
MKARAGRGFTLEELKSAGIPKKLAPTIGISVDHRRKNRSLEGMQSNIQRLKTYKAKLVIFPRCAHKVKAGDSTPEELATATQVQGDYLPITRGEKRSVEIMKVTEEMKAFKAYGKLRVERMNQHQLGARTKKAAEAEKEEKK

SEQ ID NO: 64370 - DNA, 1227 bp, Triticum aestivum
  misc_feature (1)..(1227): Ceres Seq. ID no. 13597233
acacaagactccaatattcagggaaccagcagcatctcaattatcaagagcggcaagagatgggatctctccccgtcccgagtgtgcaggccctggtggctgccaccggcggagacgatgtgccgctgaggtatctccggccagaggcggcagcagaggcggtcaccggcgacgccgacggcgaggctcagatccccatcatcgaccaccaaaggctgctgctggagctggaccatggcggcgaggagtctgcacgcctccacagagcctgccaggactggggtttcttccagttagttaaccacagtgtcccagacgatgtggtggagagtatgaaggccaacatccagcaattcttccagctatccgcagagacgaagaagcggttcgctcaggagcaagggcagctagaaggctacggtcaactgttcgtcgtctctgaggatcagaagctcgactgggccgacatgctcttcctctacacacagccacctgagatgaggaacaccaagttctggcctgaccagcctgctgccttcagatcggcgctggatagatattctgatgcggtgaaggatgtatcagactcccttttggctacgatggccaagaacttgggtctgaaacgagaggcgattgctgacaaatgcatccgtggaatgcagaaagtcagaataaactactacccaccatgcgcccaaccagagaaagtcgttggcttgtccccgcactctgatgctaatctcctgacacttgtcctccaagtgaatcatgtccagggcctgcagatcaagaggaacggcagctggcttcctgtcaagcccgtcccgggcgctttcgtcgtcaacatcggagatatgtttgaggtcttgacaaacgggaggtacaggagcatcgagcaccgggctgttgtcgacccgaaggaagaacggttgtcgattgcggcgttccaattcccaaacatccacaccatgataggtcctatgaaggagttgaccgcacacgaagacgatgcctacaagacattggacctcgagagcttcatgaggaccttcttctcgaccaagctcgaggggaagaacttcttggagcagatgaagctaaactagctagctagcggctgaagctgggcttgcgcgtatcatcattgagatggactcgacagtgcttgcttcagctcttctttccaatgaatggacacttctcgcaacggagttctctctcggg

SEQ ID NO: 64371 - protein, 368 aa, Triticum aestivum
  peptide (1)..(368): Ceres Seq. ID no. 15222051
TRLQYSGNQQHLNYQERQEMGSLPVPSVQALVAATGGDDVPLRYLRPEAAAEAVTGDADGEAQIPIIDHQRLLLELDHGGEESARLHRACQDWGFFQLVNHSVPDDVVESMKANIQQFFQLSAETKKRFAQEQGQLEGYGQLFVVSEDQKLDWADMLFLYTQPPEMRNTKFWPDQPAAFRSALDRYSDAVKDVSDSLLATMAKNLGLKREAIADKCIRGMQKVRINYYPPCAQPEKVVGLSPHSDANLLTLVLQVNHVQGLQIKRNGSWLPVKPVPGAFVVNIGDMFEVLTNGRYRSIEHRAVVDPKEERLSIAAFQFPNIHTMIGPMKELTAHEDDAYKTLDLESFMRTFFSTKLEGKNFLEQMKLN

SEQ ID NO: 64372 - protein, 349 aa, Triticum aestivum
  peptide (1)..(349): Ceres Seq. ID no. 15222052
MGSLPVPSVQALVAATGGDDVPLRYLRPEAAAEAVTGDADGEAQIPIIDHQRLLLELDHGGEESARLHRACQDWGFFQLVNHSVPDDVVESMKANIQQFFQLSAETKKRFAQEQGQLEGYGQLFVVSEDQKLDWADMLFLYTQPPEMRNTKFWPDQPAAFRSALDRYSDAVKDVSDSLLATMAKNLGLKREAIADKCIRGMQKVRINYYPPCAQPEKVVGLSPHSDANLLTLVLQVNHVQGLQIKRNGSWLPVKPVPGAFVVNIGDMFEVLTNGRYRSIEHRAVVDPKEERLSIAAFQFPNIHTMIGPMKELTAHEDDAYKTLDLESFMRTFFSTKLEGKNFLEQMKLN

SEQ ID NO: 64373 - protein, 258 aa, Triticum aestivum
  peptide (1)..(258): Ceres Seq. ID no. 15222053
MKANIQQFFQLSAETKKRFAQEQGQLEGYGQLFVVSEDQKLDWADMLFLYTQPPEMRNTKFWPDQPAAFRSALDRYSDAVKDVSDSLLATMAKNLGLKREAIADKCIRGMQKVRINYYPPCAQPEKVVGLSPHSDANLLTLVLQVNHVQGLQIKRNGSWLPVKPVPGAFVVNIGDMFEVLTNGRYRSIEHRAVVDPKEERLSIAAFQFPNIHTMIGPMKELTAHEDDAYKTLDLESFMRTFFSTKLEGKNFLEQMKLN

SEQ ID NO: 64374 - DNA, 1409 bp, Triticum aestivum
  misc_feature (1)..(1409): Ceres Seq. ID no. 13597899
caaaaccgtttgctccgtttcccccaaatctgccgcacgacccaaacaaaacccttgcggcggcgccccaccccatctccggcggccaagcggaatggagcgctcggcggcgggcgcctcgtaccagcgcttcccgcgcgtgcggatccgcgagctcaaggacgagtacgccaagttcgagctcaaggacaccgacgcgagcatggccaacgccctccgccgcgtcatgatcgccgaggtccccaccgtcgccatcgacctcgtcgagatcgagagcaactcctccgtcctcaacgacgagttcctcgcgcaccgcctcggcctcatcccgctcacctcctccgccgccatgtccatgcgcttctcccgcgactgcgacgcctgcgacggggacggctcctgcgagtactgctccgtcgagttccacctcgccgcccgcgccaccgactccggccagacgctcgaggtcacctccaccaaggacctccgctccaccgaccccaaggtctgccctgtcgaccagcaaagggagtaccagcaggccctcggcaacgtcgacgcttacgagcccgatgctgccggtgaccacaggggcatattaattgtaaagctgcgccgtgggcaagagctgcgtcttcgagcaattgccaggaagggaattggaaaggaccatgccaaatggtctccagctgctactgtgaccttcatgtatgagcctgacatacgtattaaccaagaactcatggagacacttacacttgaggaaaaacaaagctgggtggagagcagccctacaaaagtatttgacattgatcctgtcacccaacaggtgacgattgtggacccagaggcctacacatatgacgatgaggtgatcaagaaagcagaggccatggggaagccaggattggtagagatcaacgccaaggaggacagctttgtgttcactgtggagacaacgggggccattacagcctatgagctgattatgaacgctatcacggtcctgaggcagaagctggacgccgttcgcctgcaagacgatgacggcgatctgggcgagctcggcgcccaccttatcggaggctaaccaccgcttgtctgggaaagaagtcgccagcggtatctttgtttctccgtatctaggctcgtctcgtctaactggcttgcctgtggcaagtggtagttgatgcctcctttgatatgcagcaccagaactctacggtaatcgcctttgtatccctctgtttatgccctgacctctgccggaactctgtacgtgcaaaaagccatgggcgctgaagcttagcggcactgtggaacaagagaatagctggtagcccatgattggccgtgccgtgcggtggtgatacggcgtggtgtcttgaatgcagagttattcgcagggc

SEQ ID NO: 64375 - protein, 362 aa, Triticum aestivum
  peptide (1)..(362): Ceres Seq. ID no. 13597900
KTVCSVSPKSAARPKQNPCGGAPPHLRRPSGMERSAAGASYQRFPRVRIRELKDEYAKFELKDTDASMANALRRVMIAEVPTVAIDLVEIESNSSVLNDEFLAHRLGLIPLTSSAAMSMRFSRDCDACDGDGSCEYCSVEFHLAARATDSGQTLEVTSTKDLRSTDPKVCPVDQQREYQQALGNVDAYEPDAAGDHRGILIVKLRRGQELRLRAIARKGIGKDHAKWSPAATVTFMYEPDIRINQELMETLTLEEKQSWVESSPTKVFDIDPVTQQVTIVDPEAYTYDDEVIKKAEAMGKPGLVEINAKEDSFVFTVETTGAITAYELIMNAITVLRQKLDAVRLQDDDGDLGELGAHLIGG

SEQ ID NO: 64376 - protein, 331 aa, Triticum aestivum
  peptide (1)..(331): Ceres Seq. ID no. 13597901
MERSAAGASYQRFPRVRIRELKDEYAKFELKDTDASMANALRRVMIAEVPTVAIDLVEIESNSSVLNDEFLAHRLGLIPLTSSAAMSMRFSRDCDACDGDGSCEYCSVEFHLAARATDSGQTLEVTSTKDLRSTDPKVCPVDQQREYQQALGNVDAYEPDAAGDHRGILIVKLRRGQELRLRAIARKGIGKDHAKWSPAATVTFMYEPDIRINQELMETLTLEEKQSWVESSPTKVFDIDPVTQQVTIVDPEAYTYDDEVIKKAEAMGKPGLVEINAKEDSFVFTVETTGAITAYELIMNAITVLRQKLDAVRLQDDDGDLGELGAHLIGG

SEQ ID NO: 64377 - protein, 295 aa, Triticum aestivum
  peptide (1)..(295): Ceres Seq. ID no. 13597902
MANALRRVMIAEVPTVAIDLVEIESNSSVLNDEFLAHRLGLIPLTSSAAMSMRFSRDCDACDGDGSCEYCSVEFHLAARATDSGQTLEVTSTKDLRSTDPKVCPVDQQREYQQALGNVDAYEPDAAGDHRGILIVKLRRGQELRLRAIARKGIGKDHAKWSPAATVTFMYEPDIRINQELMETLTLEEKQSWVESSPTKVFDIDPVTQQVTIVDPEAYTYDDEVIKKAEAMGKPGLVEINAKEDSFVFTVETTGAITAYELIMNAITVLRQKLDAVRLQDDDGDLGELGAHLIGG

SEQ ID NO: 64378 - DNA, 1196 bp, Triticum aestivum
  misc_feature (1)..(1196): Ceres Seq. ID no. 13664349
actcactccgccctcgcccccgccacctcatcgacgcctcgaagccgaaccctgggcaaggaaaaatacctaaccctagctggtccgccatggccagggaggcgtcgtcgtcctccgcgccggggccctcagagttgccgccggcggctggtggcagcggcagcggaagcggcggggacacgccgcgagtgacgcggcgacgcgcccgcggcgaccccctcctcatcgtgtgcggctgcttcagcgtcgtcacggccgccaccgccttgctctgcgtcgccgtcaacgtcctctccgctgtccagtccttccgccgcaacggtggctacatattcgggggcatattccggtgctatgcggtggtgatctcgctgttcgtggccgtcctcgagaccgagtggggattcatcatcaaattctgcaagatattggaatactggcctgcaagggggatgctacagatatttgttgctgtcatgacgaaggcatacccaaacgttgaaaggagcgatctgattttgcttcaggacattgccagctatctgctccttgcatgtggactaatctatgtaatctcgggggtattatgtcttggtgtactaaagcgttctaggcagcagaaagcaacatcacgagagcaagcagccaaagatctgcatgagctggagaagcggagagaggaactcgaggcattgttaattgctgagaggtccgaattggtctgatgaatctgagcacgacgatttaacatttctcacgtggtgtagatagattgttgctcctgctaattgcatgccacttttcatggtcatcgatttgtcacccgagacattttcgttgggagtgcccccttttcctgttagtgctgacctttaccaatcatttgcttcctatgtttacatggattgcagtggaccatattgcgctcttattttatttttagctaggaatggcttgctaacatatttggtaaatcgacaggtgttccagttttcgtctagatttctgctgaatttggtttctggtgtgagcattttcgtggatgcatggatcaagcgggattgtgttgtctcagttgttggatttatgtcaatgccgtaggcctcaaaatgtaccatgctgacatggtgtgtgtttgttgtctctgtagtctttgactgaaccatggatgctaaataattttctgtattttgtgt

SEQ ID NO: 64379 - protein, 240 aa, Triticum aestivum
  peptide (1)..(240): Ceres Seq. ID no. 15220314
SLRPRPRHLIDASKPNPGQGKIPNPSWSAMAREASSSSAPGPSELPPAAGGSGSGSGGDTPRVTRRRARGDPLLIVCGCFSVVTAATALLCVAVNVLSAVQSFRRNGGYIFGGIFRCYAVVISLFVAVLETEWGFIIKFCKILEYWPARGMLQIFVAVMTKAYPNVERSDLILLQDIASYLLLACGLIYVISGVLCLGVLKRSRQQKATSREQAAKDLHELEKRREELEALLIAERSELV

SEQ ID NO: 64380 - protein, 211 aa, Triticum aestivum
  peptide (1)..(211): Ceres Seq. ID no. 15220315
MAREASSSSAPGPSELPPAAGGSGSGSGGDTPRVTRRRARGDPLLIVCGCFSVVTAATALLCVAVNVLSAVQSFRRNGGYIFGGIFRCYAVVISLFVAVLETEWGFIIKFCKILEYWPARGMLQIFVAVMTKAYPNVERSDLILLQDIASYLLLACGLIYVISGVLCLGVLKRSRQQKATSREQAAKDLHELEKRREELEALLIAERSELV

SEQ ID NO: 64381 - DNA, 1282 bp, Triticum aestivum
  misc_feature (1)..(1282): Ceres Seq. ID no. 14301882
aactggtggggggcggtggcaagtgcaaccgtgcgtgcgctcctgtatccatctgtctgccgggactcatcgtctcctccttccccaatcgccattgtcggtggtgcaagcaagcgcgccgaggcgtgtgggagggacatggcggggcgctacgatggcggcaaccctttcgaggaggaggaggacgtgaaccctttctcggaacaaacgcgaggcaaagctggcgggcagtccaactatggcggcggcggcgcgttctacatgccgaatcccagaaacgttgccccctcctcgaattcgcggctttcgccccttcccccggaacctgcagatttcagtgccacagtggatatccctcttgagtcgtcaaaggacctgaagaaaagagaaaaggagctgcaagcgagggaagcagagttgaacaagagggagaaggaattgaaaagaagggaggaagctgcagcacgagctggtattgtcatcgaggagaaaaactggcctccttttctgccactcatccaccatgacattgccaatgagataccgactcatcttcaaagaatgcaatacttcgcatttgcgtcatttcttggtttggttttctgtctcttctggaatgtcgtagcagttacttcagcctggatcaagggggaaggtgtgaaaatctggttgctagcaataatctacttcatctctggggttcctggtgcgtatgtgttatggtatcgccctctttataatgctatgaggactgacagtgcgttgaagtttggattgtttttcttgctctacttgtttcacatcattttcgtcgtatttgctgccgtggctcctcctgctgtctttgagggcaagtctttggcaggaattttaccggcgattgatcttatcagcgtgaatgctctagttgggatcttctacttcattggatttggattatttgccctggagtcattgctgagcatctgggttatccagcaagtgtacatgtacttccgaggaagtggaaaggccgcagagatgaagcgtgatgcgacgaggggcgctatgagagcggcattttgattgccacatatctcagatgatgataggtctcaagattaattccatggattagatggcacggtaaagaaaaatatatgtagcaatgtaaacatatatttttctttatcgccggtaagaaaagtggacaagtcctacaatgtcacttcatcatagcagtatgataacacggcgatcataacaaaaacttacaggttcatcggaaagtttgacaaaaggc

SEQ ID NO: 64382 - protein, 354 aa, Triticum aestivum
  peptide (1)..(354): Ceres Seq. ID no. 14301883
NWWGAVASATVRALLYPSVCRDSSSPPSPIAIVGGASKRAEACGRDMAGRYDGGNPFEEEEDVNPFSEQTRGKAGGQSNYGGGGAFYMPNPRNVAPSSNSRLSPLPPEPADFSATVDIPLESSKDLKKREKELQAREAELNKREKELKRREEAAARAGIVIEEKNWPPFLPLIHHDIANEIPTHLQRMQYFAFASFLGLVFCLFWNVVAVTSAWIKGEGVKIWLLAIIYFISGVPGAYVLWYRPLYNAMRTDSALKFGLFFLLYLFHIIFVVFAAVAPPAVFEGKSLAGILPAIDLISVNALVGIFYFIGFGLFALESLLSIWVIQQVYMYFRGSGKAAEMKRDATRGAMRAAF

SEQ ID NO: 64383 - protein, 308 aa, Triticum aestivum
  peptide (1)..(308): Ceres Seq. ID no. 14301884
MAGRYDGGNPFEEEEDVNPFSEQTRGKAGGQSNYGGGGAFYMPNPRNVAPSSNSRLSPLPPEPADFSATVDIPLESSKDLKKREKELQAREAELNKREKELKRREEAAARAGIVIEEKNWPPFLPLIHHDIANEIPTHLQRMQYFAFASFLGLVFCLFWNVVAVTSAWIKGEGVKIWLLAIIYFISGVPGAYVLWYRPLYNAMRTDSALKFGLFFLLYLFHIIFVVFAAVAPPAVFEGKSLAGILPAIDLISVNALVGIFYFIGFGLFALESLLSIWVIQQVYMYFRGSGKAAEMKRDATRGAMRAAF

SEQ ID NO: 64384 - protein, 267 aa, Triticum aestivum
  peptide (1)..(267): Ceres Seq. ID no. 14301885
MPNPRNVAPSSNSRLSPLPPEPADFSATVDIPLESSKDLKKREKELQAREAELNKREKELKRREEAAARAGIVIEEKNWPPFLPLIHHDIANEIPTHLQRMQYFAFASFLGLVFCLFWNVVAVTSAWIKGEGVKIWLLAIIYFISGVPGAYVLWYRPLYNAMRTDSALKFGLFFLLYLFHIIFVVFAAVAPPAVFEGKSLAGILPAIDLISVNALVGIFYFIGFGLFALESLLSIWVIQQVYMYFRGSGKAAEMKRDATRGAMRAAF

SEQ ID NO: 64385 - DNA, 1383 bp, Triticum aestivum
  misc_feature (1)..(1383): Ceres Seq. ID no. 12618559
aaaagtcatcgggtggacccgtgaaaccatcgaaccaactaaacaagcacagctgacacccacccctccgccaccgcagtcgccggtgaccaggacgcgcgcccgaattcgccggtggcgaggagaagggcgccgagtatggggtgctccctctcggggctcaacgccctctacgacgcagcgactggcggcggcgacgtgtggatcaacgagcgccgcttccgcgtcctccgccagatcggcgagggcggcttcgccttcgtctacctcgtcaaggagcacgacgcctcctcctacgccgcgcgcgacaggcacccctcccacgtctcagacgacgggacatatgctatgaagaaggtgctgatacagagcagggagcaactggatctggtgaaggaggagatccgcgtttcgtccttgttcaaccaccccaatctgctaccgcttcttgaccatgccataatagcagttaagagtacacagggagattggagccatgaagcctacttactcttcccagtccatttggatggtactctgttcgacaatgctgcagtcatgcagtcaaggaaagagttttattcggtggtcgatgttttgcgaatattccaacagatttgtgaaggactgaagcacatgcatagtcttgatcccacatatgcccataatgatgtcaagcctggcaatgttcttgtaacctgccgaaaagggcaagcacctcttgcaactttgatggattttggaagttcgcggcctgcaagaaatcaaattcgttctcgttctgaagcattacggttgcaggaatgggctgctgagcattgctctgcaccttttcgcgcacctgaattgtgggactgcccgagtcatgctgatattgatgagaggacagacatttggtcgctaggttgcactctttacgcgatcatgtatggtgtttctccctttgagtatgctcttggtgaatctggaggaagcttgcagctggccattatgaacgcacagttgaagtggccagcgctaccgagcacctaccctgacgcacttcacaagtttgttacctggatgcttcagccacagcctgagatgcgccctcgcatcaatgacatacttctccacgttgacaagcttgtggagaaatactcgccttaaagccagcttgcatattctgttctgacttgtttcttctttatacgattgcaaaaggggacatgttgtaagactcatgctctaggccttttcatcctttggaataggctcagtgtcaattctttatgtaactttcaggctgttaccgatatgtcgttctctaactcttggaagttatattactcgcttatcttgtacaaaatgtttgctgaatatgaaaaatacatgtgttattgc

SEQ ID NO: 64386 - protein, 336 aa, Triticum aestivum
  peptide (1)..(336): Ceres Seq. ID no. 12618560
MGCSLSGLNALYDAATGGGDVWINERRFRVLRQIGEGGFAFVYLVKEHDASSYAARDRHPSHVSDDGTYAMKKVLIQSREQLDLVKEEIRVSSLFNHPNLLPLLDHAIIAVKSTQGDWSHEAYLLFPVHLDGTLFDNAAVMQSRKEFYSVVDVLRIFQQICEGLKHMHSLDPTYAHNDVKPGNVLVTCRKGQAPLATLMDFGSSRPARNQIRSRSEALRLQEWAAEHCSAPFRAPELWDCPSHADIDERTDIWSLGCTLYAIMYGVSPFEYALGESGGSLQLAIMNAQLKWPALPSTYPDALHKFVTWMLQPQPEMRPRINDILLHVDKLVEKYSP

SEQ ID NO: 64387 - protein, 266 aa, Triticum aestivum
  peptide (1)..(266): Ceres Seq. ID no. 12618561
MKKVLIQSREQLDLVKEEIRVSSLFNHPNLLPLLDHAIIAVKSTQGDWSHEAYLLFPVHLDGTLFDNAAVMQSRKEFYSVVDVLRIFQQICEGLKHMHSLDPTYAHNDVKPGNVLVTCRKGQAPLATLMDFGSSRPARNQIRSRSEALRLQEWAAEHCSAPFRAPELWDCPSHADIDERTDIWSLGCTLYAIMYGVSPFEYALGESGGSLQLAIMNAQLKWPALPSTYPDALHKFVTWMLQPQPEMRPRINDILLHVDKLVEKYSP

SEQ ID NO: 64388 - protein, 196 aa, Triticum aestivum
  peptide (1)..(196): Ceres Seq. ID no. 12618562
MQSRKEFYSVVDVLRIFQQICEGLKHMHSLDPTYAHNDVKPGNVLVTCRKGQAPLATLMDFGSSRPARNQIRSRSEALRLQEWAAEHCSAPFRAPELWDCPSHADIDERTDIWSLGCTLYAIMYGVSPFEYALGESGGSLQLAIMNAQLKWPALPSTYPDALHKFVTWMLQPQPEMRPRINDILLHVDKLVEKYSP

SEQ ID NO: 64389 - DNA, 1342 bp, Triticum aestivum
  misc_feature (1)..(1342): Ceres Seq. ID no. 14303313
accaaaccctcgtcgcgctcgtctctcccctctcgtgctctcaccccggccagcggcatctgagattcgcgcctcgccggcggccatgggcggcgactggcaggagctggcccagtcggcggtcatcggcctcatcttcgccttcctcgtcgccaagctcatctccgtcgtcctcgccttcaaggaggacaacctccgcatcacccgctccgcccccgcccccgccccctcgcccgacgccactgcccccgcgctcgacggcggcacgagcggcggcgacggcgacagcgacggcgactgggagggcgtggagagcacggagctcgacgaggacttcagcgccgcctccgccttcgtcgcggcctccgccgccggcgtccccgaggaggcgcagctccgcctctacggcctctacaagatcgccaccgagggcccctgcaccgcgccgcagccctccgccctcaagctcaaggcccgcgccaagtggaatgcttggaataaattgggtgctatgccaacagaagaagctatggaggagtacataacaattgttgatgagatattccctaactgggctgatggctcgaaaaagaaagatggggaaaccacaatgtctgcatcaggttcgaagggaccaatgggacctgtatttagcagtttaatgtacgaggaagatcaaggaaatgaatcagaacttggtgacatccatgtttctgcaagggaaggagcaatcgaagacgttaaaaagcatcttgctgctggtgtacaaatcaacttaagagatagcgaagagagaactccgttgcactgggctgtggaccggggtcatctagatgctgttgaggttcttgtcaactcaaatgcggacgtgaatgctcaggacaacgaagggcagacagcgctccactacgccgtcctctgcgagagggaggacatcgccgaactgctcgtcaagcaccacgcggatctccagatcaaggacggcgacgggaacaccgcccgggacttgtgctcctcggcctggccgttcatgaagccggcaaactgacggcacaatgaacccgatgatacagagttgacgcctgctgctgctactaccactagtgccgagaaactatacacaccgtgcttggttagctgaatcggatgagccgttttaccaacctcatcgaatacactgtcaaaaggtaactcagcgcagggtagacatcttgtagtggtattttgcctgtttcatagtgtgtttgtgctgcaggccaactgtttggcaggaaatatatcagtgtcaggattcaggcctcgcggcctcatactgtcaatatgcatacatgttaagagcatc

SEQ ID NO: 64390 - protein, 348 aa, Triticum aestivum
  peptide (1)..(348): Ceres Seq. ID no. 14303314
PNPRRARLSPLVLSPRPAASEIRASPAAMGGDWQELAQSAVIGLIFAFLVAKLISVVLAFKEDNLRITRSAPAPAPSPDATAPALDGGTSGGDGDSDGDWEGVESTELDEDFSAASAFVAASAAGVPEEAQLRLYGLYKIATEGPCTAPQPSALKLKARAKWNAWNKLGAMPTEEAMEEYITIVDEIFPNWADGSKKKDGETTMSASGSKGPMGPVFSSLMYEEDQGNESELGDIHVSAREGAIEDVKKHLAAGVQINLRDSEERTPLHWAVDRGHLDAVEVLVNSNADVNAQDNEGQTALHYAVLCEREDIAELLVKHHADLQIKDGDGNTARDLCSSAWPFMKPAN

SEQ ID NO: 64391 - protein, 320 aa, Triticum aestivum
  peptide (1)..(320): Ceres Seq. ID no. 14303315
MGGDWQELAQSAVIGLIFAFLVAKLISVVLAFKEDNLRITRSAPAPAPSPDATAPALDGGTSGGDGDSDGDWEGVESTELDEDFSAASAFVAASAAGVPEEAQLRLYGLYKIATEGPCTAPQPSALKLKARAKWNAWNKLGAMPTEEAMEEYITIVDEIFPNWADGSKKKDGETTMSASGSKGPMGPVFSSLMYEEDQGNESELGDIHVSAREGAIEDVKKHLAAGVQINLRDSEERTPLHWAVDRGHLDAVEVLVNSNADVNAQDNEGQTALHYAVLCEREDIAELLVKHHADLQIKDGDGNTARDLCSSAWPFMKPAN

SEQ ID NO: 64392 - protein, 180 aa, Triticum aestivum
  peptide (1)..(180): Ceres Seq. ID no. 14303316
QTLVALVSPLSCSHPGQRHLRFAPRRRPWAATGRSWPSRRSSASSSPSSSPSSSPSSSPSRRTTSASPAPPPPPPPRPTPLPPRSTAARAAATATATATGRAWRARSSTRTSAPPPPSSRPPPPASPRRRSSASTASTRSPPRAPAPRRSPPPSSSRPAPSGMLGINWVLCQQKKLWRST

SEQ ID NO: 64393 - DNA, 1154 bp, Triticum aestivum
  misc_feature (1)..(1154): Ceres Seq. ID no. 13656209
atcttccttcccccacttgttccccgaaaagcttctcgtccgctcctctcgcaccgccggagggaggcgcctcgccgtctcctcgccgccgctcgtcgagggtggttcctggcgagcgactgaagcccagccagcatggcggccaacgtgggggagtccacgagcggcagcggcagcagcgtggctggcgacggcgggggcagcttcgagtgcaacatatgcttcgagctgccgcaggagcccatcgtcacgctctgcggccacctcttctgctggccctgcctctacaagtggctgcacatccactcgcactcgcccgagtgccccgtctgcaaggccgtcgtcgaggaggacaagctcgtcccgctctacggccgcggcaaggaccgcgtcgaccccaggtccaagggcgtgccggccggggccgagatccccaaccggccgaccgggcagcggcctgccacggccccgcaggcagatcccaacaaccacttccctaatgcgaaccctaacccctggttcatggggggagggggcgtccctctggccaacgcgcggtgggggaactacaccttctcggccgcgttcggcggcctgttcccgctgctgagcttccaggtgcatggattcccggacgcggccgcgtacgggcagcctgccgggtttccctatgggtacggccatggccatggccacgggcatgctttccatggcgggcacgcccacgccgccgccccccggcacgcgccgcccgggcagcagcagcagcagcagcaggcggacgtgtacctcaaggcgctgctcatcctggttggctttctcgtgatcgcaagcctcatcacattctaggttcgtcggttcccaccattgtcatttgtcaccgtcataataagagaaacaacgattgtcgtgatacttctcagatgttgtgtgcattaccttggcccccccatacaaagccccggtctaaatccgagtggtgcgttttgagcgaaagtgttcatagaactcctgtatatatgtgctatttagacgcggtcctgtgggggggcgcatgtgtaccgtagtagtttcgcgctgattcgcggatgatttgggaaacctctgtttggagtggatgtaccagaccaattatatatcatgtgtaattttgt

SEQ ID NO: 64394 - protein, 237 aa, Triticum aestivum
  peptide (1)..(237): Ceres Seq. ID no. 15219813
MAANVGESTSGSGSSVAGDGGGSFECNICFELPQEPIVTLCGHLFCWPCLYKWLHIHSHSPECPVCKAVVEEDKLVPLYGRGKDRVDPRSKGVPAGAEIPNRPTGQRPATAPQADPNNHFPNANPNPWFMGGGGVPLANARWGNYTFSAAFGGLFPLLSFQVHGFPDAAAYGQPAGFPYGYGHGHGHGHAFHGGHAHAAAPRHAPPGQQQQQQQADVYLKALLILVGFLVIASLITF

SEQ ID NO: 64395 - protein, 202 aa, Triticum aestivum
  peptide (1)..(202): Ceres Seq. ID no. 15219814
SSFPHLFPEKLLVRSSRTAGGRRLAVSSPPLVEGGSWRATEAQPAWRPTWGSPRAAAAAAWLATAGAASSATYASSCRRSPSSRSAATSSAGPASTSGCTSTRTRPSAPSARPSSRRTSSSRSTAAARTASTPGPRACRPGPRSPTGRPGSGLPRPRRQIPTTTSLMRTLTPGSWGEGASLWPTRGGGTTPSRPRSAACSRC

SEQ ID NO: 64396 - protein, 165 aa, Triticum aestivum
  peptide (1)..(165): Ceres Seq. ID no. 15219815
LPSPTCSPKSFSSAPLAPPEGGASPSPRRRSSRVVPGERLKPSQHGGQRGGVHERQRQQRGWRRRGQLRVQHMLRAAAGAHRHALRPPLLLALPLQVAAHPLALARVPRLQGRRRGGQARPALRPRQGPRRPQVQGRAGRGRDPQPADRAAACHGPAGRSQQPLP

SEQ ID NO: 64397 - DNA, 1092 bp, Triticum aestivum
  misc_feature (1)..(1092): Ceres Seq. ID no. 13584319
ccacccacccccgattcacatccccttcacctcctctcctctcctctcctctgccgacgggatctctccctttctccgatccatgccgggatcctccgccgtgtggccgcacacgcgtgcagccctcctccaccacccgaccgaccaggcccatcccggcggccagcccgggctgctccccgccgcggcatgggggcagggcggcgcggcggccccgagggcgagcatagtggcggcgcgggcggtgcagaccaacaggcagcaggcgcgtgggaggagcagtgctgccgaagccggcgctaggaacaagctgaggaagccgccggctggaggagctggaggtgcagcggggatccacggctccgcgccctgtccccagtcagtcccctccaaatctcgccgcagccgccacagtggtttagcatggtggtgcgaaagtgttgcggcttggtttgtgagctacagaccttatcaagcagcaaagtcatctcacatatgccgacgacgaagatccatatttattggctgagggagcaacaacacaattctgatgattctgccaatatttacttgcaaggaccagagggtatgctgatgctgcgcaggcacttgagctatttacagaaggagaggacccgaccttcttcatgtcttgtggctgtgtcttcctttgattcattcgtgcaacaaagaggggacctggccttcttcatgtctcgtgcaaaaagggtgattgacactgactacgacagcctggtgggcgtcgtgctcttcaaccacttagaggtggacttcgacgtgaagcccagcgaccgcgccgcacggatgatcgtccatgtgatcacgatgccggatgtcgccgaggtggaggacctcgacgccatcttttggcgtgagggaggattcgggtcctccggcgtctgaactccgagccttggtagatacatgtagagaaataatctgtttaggctggtggtggaacactagggaaggtagccaccttcggttgtgtgtgtttaatttattttgcactggacgtgtccctgatttctatctatgaataatgcacgtaatttttattttttttaattt

SEQ ID NO: 64398 - protein, 175 aa, Triticum aestivum
  peptide (1)..(175): Ceres Seq. ID no. 13584320
HPPPIHIPFTSSPLLSSADGISPFLRSMPGSSAVWPHTRAALLHHPTDQAHPGGQPGLLPAAAWGQGGAAAPRASIVAARAVQTNRQQARGRSSAAEAGARNKLRKPPAGGAGGAAGIHGSAPCPQSVPSKSRRSRHSGLAWWCESVAAWFVSYRPYQAAKSSHICRRRRSIFIG

SEQ ID NO: 64399 - protein, 166 aa, Triticum aestivum
  peptide (1)..(166): Ceres Seq. ID no. 13584321
MVVRKCCGLVCELQTLSSSKVISHMPTTKIHIYWLREQQHNSDDSANIYLQGPEGMLMLRRHLSYLQKERTRPSSCLVAVSSFDSFVQQRGDLAFFMSRAKRVIDTDYDSLVGVVLFNHLEVDFDVKPSDRAARMIVHVITMPDVAEVEDLDAIFWREGGFGSSGV

SEQ ID NO: 64400 - protein, 148 aa, Triticum aestivum
  peptide (1)..(148): Ceres Seq. ID no. 13584322
MPGSSAVWPHTRAALLHHPTDQAHPGGQPGLLPAAAWGQGGAAAPRASIVAARAVQTNRQQARGRSSAAEAGARNKLRKPPAGGAGGAAGIHGSAPCPQSVPSKSRRSRHSGLAWWCESVAAWFVSYRPYQAAKSSHICRRRRSIFIG

SEQ ID NO: 64401 - DNA, 1114 bp, Triticum aestivum
  misc_feature (1)..(1114): Ceres Seq. ID no. 12626033
acattagtccagttcgtcggttggtggtggtggcgtgcgtgcctgggcgactctgcctcaaaccctcatcaggtccctcgatcgccgcgctcgagttggttatatagaactgaagggaggtaaggtgagtataagcatcagagggagtacatagcatgagtaataccagcggcgcacggcgtgccgcaaggaggcaatcgctggatggatctgctgataaagttgttgtggacttggatgcaagctcgccggtggcggggaaccatcatgggctctcggtcttccctggtgcacgcacatcgcctattgatgtggaagctctcgatgatgaagtgcaggccctatcgccttcacaagtgcctcccccgggggtgaaccggagaactagagggcaacctgtgacacaattttctctggatgaagatgctgtcctggaagagaattggagaattataaggcaatgtgcgacaccattttatcttgatgaagatgctgccatggaagagaatcggagaactagaagtcaatttttgacaccactttatctggatgaagatgctgccctggaagataatgcagctatgccttctcataacacgtggaacaaacgccaaagggttgcgcctttgatatgtctctccccagaaagggaagaagggtccagcctgcagtcgaacaatgcggtgcaaattagccaagagcctgctaaggtggtggttccaaaggaaccgaatttcacttgcccggtgtgccttaacaagctggtggagccttcgacaacaaaatgtggccatatcttctgcgcagagtgcatcaagcaagccatccagtttcagaagaaatgccctacttgccgcaaggccctgaggaagaacaacttccatcgtatttaccttccgaactcggatggttaaggtcagcatcggatcaatcgccaaagagtatcatcacatagattatggttgctgaggaacctgtagcaggtgctcagatgaacaattgattaagttgactgctgtacgtatcattagatggttggtctatgatgtaactgagattaagcttgaagctgagataaaacagtggatagcatcttcagtattggtgtgttctt

SEQ ID NO: 64402 - protein, 252 aa, Triticum aestivum
  peptide (1)..(252): Ceres Seq. ID no. 12626034
MSNTSGARRAARRQSLDGSADKVVVDLDASSPVAGNHHGLSVFPGARTSPIDVEALDDEVQALSPSQVPPPGVNRRTRGQPVTQFSLDEDAVLEENWRIIRQCATPFYLDEDAAMEENRRTRSQFLTPLYLDEDAALEDNAAMPSHNTWNKRQRVAPLICLSPEREEGSSLQSNNAVQISQEPAKVVVPKEPNFTCPVCLNKLVEPSTTKCGHIFCAECIKQAIQFQKKCPTCRKALRKNNFHRIYLPNSDG

SEQ ID NO: 64403 - protein, 138 aa, Triticum aestivum
  peptide (1)..(138): Ceres Seq. ID no. 12626035
MEENRRTRSQFLTPLYLDEDAALEDNAAMPSHNTWNKRQRVAPLICLSPEREEGSSLQSNNAVQISQEPAKVVVPKEPNFTCPVCLNKLVEPSTTKCGHIFCAECIKQAIQFQKKCPTCRKALRKNNFHRIYLPNSDG

SEQ ID NO: 64404 - DNA, 830 bp, Triticum aestivum
  misc_feature (1)..(830): Ceres Seq. ID no. 13597908
agaaaaccgtgggccgaaattgaaaccctgcggctgcaatggaggcggcggcggcggctgctgcggccgtgggcggggaggacgacgggcggggtcggaagggaagctggtacgcggtgggggagcgtgcggtgctggtgccgtacctgcgggagcacgtcccgcggtaccacgagtggatgcaggacccggcgctgctggaggccaccgcgtcggagccgctctccctcgcccaggagttcgaggtccaccgctcctggaccctcgaccctctcaaacatactttcatagtgctggataaggagttgatcgagggagacttcgtggtcgggaaccctcacacggaagctatgattggcgatgtcaacatctatatgaatgaccctgatgatttggaacttgcagagatagagattatgatagctgaacaaaagagccgtggaaagggactaggtcaagaagtgaccttaatgatgatgtcgtttgcagtagagaaatacggaattcacactttcagagcaaaaattagtgactcaaatactgcatcgttaaagctcttcaggaaattgggcttcaaggatgcttcccatagtgcagtttttaaggaggtgacactggaggcgcctgcagctgaactcccattaagctcccctttgaccataggaagttggtgacatctgtgattatatgccccaagatgtgttgcagtagacatgcaatcagtggctggtcttcaccaactgatagaagctaattgtgtgcgctatttggcatacttaatgtaatgagtactgccttcatctgccaacaactgcttgggccgattgctc

SEQ ID NO: 64405 - protein, 211 aa, Triticum aestivum
  peptide (1)..(211): Ceres Seq. ID no. 13597909
MEAAAAAAAAVGGEDDGRGRKGSWYAVGERAVLVPYLREHVPRYHEWMQDPALLEATASEPLSLAQEFEVHRSWTLDPLKHTFIVLDKELIEGDFVVGNPHTEAMIGDVNIYMNDPDDLELAEIEIMIAEQKSRGKGLGQEVTLMMMSFAVEKYGIHTFRAKISDSNTASLKLFRKLGFKDASHSAVFKEVTLEAPAAELPLSSPLTIGSW

SEQ ID NO: 64406 - protein, 164 aa, Triticum aestivum
  peptide (1)..(164): Ceres Seq. ID no. 13597910
MQDPALLEATASEPLSLAQEFEVHRSWTLDPLKHTFIVLDKELIEGDFVVGNPHTEAMIGDVNIYMNDPDDLELAEIEIMIAEQKSRGKGLGQEVTLMMMSFAVEKYGIHTFRAKISDSNTASLKLFRKLGFKDASHSAVFKEVTLEAPAAELPLSSPLTIGSW

SEQ ID NO: 64407 - protein, 107 aa, Triticum aestivum
  peptide (1)..(107): Ceres Seq. ID no. 13597911
MIGDVNIYMNDPDDLELAEIEIMIAEQKSRGKGLGQEVTLMMMSFAVEKYGIHTFRAKISDSNTASLKLFRKLGFKDASHSAVFKEVTLEAPAAELPLSSPLTIGSW

SEQ ID NO: 64408 - DNA, 739 bp, Triticum aestivum
  misc_feature (1)..(739): Ceres Seq. ID no. 15173160
aagcaaccctgcgccattacaagactcacagattacatcatttgcaccggctgtactagcttgatcatcacaatatgtcctccaccaacagctggacccacgagatcgagtcggcggtcaccgcaccgcgcctcttccgcgctggcgtcatggactggcacaccctggctcccaagctcgcgccgcaaattgttgccagtgcccaccccgttgagggagaaggcggtatcggcagcgtcaggcagttcaacttcacctcagccatgcccttcaacctcatgaaggagaggctcgagttcattgacgcagataagtgcgagtgcaagtcgactcttatcgagggcggtggcatcggcatggcgatcgagacagccacttcgcacatcaaggtggagccggcagcaaacggtgggagcatagtgaaggtggaatcgacatacaagctgcttccaggcgtggaggtgaatgatgagattaccaaggccaaggattccgtcacggccatcttcaaggccgccgaggcctacctcatcgccaacccagacgcctacaactaaatcagttgagggatcaaatacgattatgttctccctggtttgatttttgtgtggtttcttcctgaataataaggctgctctaatctccaagtagtgatgcgagaacactaattaagtagagtgtggacctgagaagtttaaaatgtgtatttgtaactatcaaatggagctgttgtttgatg

SEQ ID NO: 64409 - protein, 160 aa, Triticum aestivum
  peptide (1)..(160): Ceres Seq. ID no. 15173161
MSSTNSWTHEIESAVTAPRLFRAGVMDWHTLAPKLAPQIVASAHPVEGEGGIGSVRQFNFTSAMPFNLMKERLEFIDADKCECKSTLIEGGGIGMAIETATSHIKVEPAANGGSIVKVESTYKLLPGVEVNDEITKAKDSVTAIFKAAEAYLIANPDAYN

SEQ ID NO: 64410 - protein, 135 aa, Triticum aestivum
  peptide (1)..(135): Ceres Seq. ID no. 15173162
MDWHTLAPKLAPQIVASAHPVEGEGGIGSVRQFNFTSAMPFNLMKERLEFIDADKCECKSTLIEGGGIGMAIETATSHIKVEPAANGGSIVKVESTYKLLPGVEVNDEITKAKDSVTAIFKAAEAYLIANPDAYN

SEQ ID NO: 64411 - protein, 97 aa, Triticum aestivum
  peptide (1)..(97): Ceres Seq. ID no. 15173163
MPFNLMKERLEFIDADKCECKSTLIEGGGIGMAIETATSHIKVEPAANGGSIVKVESTYKLLPGVEVNDEITKAKDSVTAIFKAAEAYLIANPDAYN

SEQ ID NO: 64412 - DNA, 681 bp, Triticum aestivum
  misc_feature (1)..(681): Ceres Seq. ID no. 13591179
atcccgmacgcgcacggccgcagcctttcactcccaacccttgtctccaatggcggccacggccgcggcggcgacgctggcggcggccacctcctccctcctccggcgctcctccttgctgcggccgcacgggctccgggtctcccgcgacttcgctccccgaagatttgtgcgccacattgcttcatcaacaaatgaagaggctgctgccagaacagcggcagcaactgctgatactggaggaccgaccatttttgacaagatcatagcaaaggaaatcccttcaagcattgtctatgaggacgagaaagtcttagcatttagagatatcaatccgcaagctcctgtgcatgttctagtcatcccgaaactaagagatgggctaactggacttgataaggctgaaccaaggcatgctgaaattctggggcagctgctttacgctgcgaaggtagtggccgagaaggaaggcgtggcagatggattccgggtcgtcataaacaacggagcagaaggatgtcaatcagtctaccatctgcacgtacatgtacttggtggaaggcagatgaaatggcctcctggttaagtttaagaacagtgtctgccttttttctgcttctgtatgatcgatcatactagactgctattgagtttctactacttgccacctgscttgttatt

SEQ ID NO: 64413 - protein, 194 aa, Triticum aestivum
  peptide (1)..(194): Ceres Seq. ID no. 15221031
  misc_feature (2)..(2): Xaa is any aa, unknown or other
SXTRTAAAFHSQPLSPMAATAAAATLAAATSSLLRRSSLLRPHGLRVSRDFAPRRFVRHIASSTNEEAAARTAAATADTGGPTIFDKIIAKEIPSSIVYEDEKVLAFRDINPQAPVHVLVIPKLRDGLTGLDKAEPRHAEILGQLLYAAKVVAEKEGVADGFRVVINNGAEGCQSVYHLHVHVLGGRQMKWPPG

SEQ ID NO: 64414 - protein, 178 aa, Triticum aestivum
  peptide (1)..(178): Ceres Seq. ID no. 15221032
MAATAAAATLAAATSSLLRRSSLLRPHGLRVSRDFAPRRFVRHIASSTNEEAAARTAAATADTGGPTIFDKIIAKEIPSSIVYEDEKVLAFRDINPQAPVHVLVIPKLRDGLTGLDKAEPRHAEILGQLLYAAKVVAEKEGVADGFRVVINNGAEGCQSVYHLHVHVLGGRQMKWPPG

SEQ ID NO: 64415 - DNA, 1410 bp, Triticum aestivum
  misc_feature (1)..(1410): Ceres Seq. ID no. 13662937
gcttctcgccgcgccctctttccccctcccctcccccgcctcgcccactgccccctcgatccagcgcgggagcaccagatggatcggccggcgccggaccagcggcccacgctcttctcgccgtaccagatgcgccgcttcagcctcgcccaccgggtggtgctggcgccgatgacgaggtgcagggccatcggcgggctgccggggccggcgctggcggagtactacgcgcagcgggtcacccagggaggcctgctcatctccgagggcaccgtcgtctcgccggccgggccggggtttcctcacgtccctggaatatacaatcaggagcagatagatggatggaaaaaggtggtggatgctgttcatgctaagggaggcatctttttctgtcaattatggcacgtaggcagagcttctcaccaagtataccagccggacggtgctgctccaatatcctcaactgataagccgatatcagcaaggtggaagatattgctgcctgatggttcatacggaacgtatcccacgccaagccgccttgcgacatcggaaataccagacatagtcgagcaatatcgccaagctgccataaacgccatcaaagcaggtttcgatggcatcgagatccacggcgctcatggctacatcatcgatcagttcctcaaggatggcatcaacgaccgcaccgacgagtatggcggatcgctcaccaaccgttgcaagtttctactcgaggtgacccgagccgtggtatccgccatcagagcagagcgaactgcggtgagggtgtcaccggccatcgaccaccttgacgcctatgactcgaacccaatgcagctaggcatggccgtcgtcgaacggctcaacgctctccagcaggaagccgggcagctcgcctacctccacgtgacacagccaaggtacgcggcctacgggcagacagagtcgggcccgcatggcagcgccgaggaggagagccggctgatgcgcaccctgcggggcgcgtaccgtggcacgttcatgtgcagcggcggctacacgcgggagctcgggctggaggcggtggagagcggcgacgccgacctggtgtcgttcgggcggctgttcatttcgaacccggacctggtcgagcggctcaggctcaacgccggcctcaacaagtacgtgaggaagacgttctacacccctgaccccgtcgtgggctacaccgactacccgttcctcggcaagcctaaatcgcgcatgtagtgtgtacaaggttagtgatcggagatgggatttattgttaagtgtatttgggggaataaggtcatatacgcgcatgtagtgtacacgaattagtgatcggagaacagagatgggtttgtgaaacgtatttgaagaaaataaagtaatatacgtgactgc

SEQ ID NO: 64416 - protein, 416 aa, Triticum aestivum
  peptide (1)..(416): Ceres Seq. ID no. 13662938
ASRRALFPPPLPRLAHCPLDPAREHQMDRPAPDQRPTLFSPYQMRRFSLAHRVVLAPMTRCRAIGGLPGPALAEYYAQRVTQGGLLISEGTVVSPAGPGFPHVPGIYNQEQIDGWKKVVDAVHAKGGIFFCQLWHVGRASHQVYQPDGAAPISSTDKPISARWKILLPDGSYGTYPTPSRLATSEIPDIVEQYRQAAINAIKAGFDGIEIHGAHGYIIDQFLKDGINDRTDEYGGSLTNRCKFLLEVTRAVVSAIRAERTAVRVSPAIDHLDAYDSNPMQLGMAVVERLNALQQEAGQLAYLHVTQPRYAAYGQTESGPHGSAEEESRLMRTLRGAYRGTFMCSGGYTRELGLEAVESGDADLVSFGRLFISNPDLVERLRLNAGLNKYVRKTFYTPDPVVGYTDYPFLGKPKSRM

SEQ ID NO: 64417 - protein, 390 aa, Triticum aestivum
  peptide (1)..(390): Ceres Seq. ID no. 13662939
MDRPAPDQRPTLFSPYQMRRFSLAHRVVLAPMTRCRAIGGLPGPALAEYYAQRVTQGGLLISEGTVVSPAGPGFPHVPGIYNQEQIDGWKKVVDAVHAKGGIFFCQLWHVGRASHQVYQPDGAAPISSTDKPISARWKILLPDGSYGTYPTPSRLATSEIPDIVEQYRQAAINAIKAGFDGIEIHGAHGYIIDQFLKDGINDRTDEYGGSLTNRCKFLLEVTRAVVSAIRAERTAVRVSPAIDHLDAYDSNPMQLGMAVVERLNALQQEAGQLAYLHVTQPRYAAYGQTESGPHGSAEEESRLMRTLRGAYRGTFMCSGGYTRELGLEAVESGDADLVSFGRLFISNPDLVERLRLNAGLNKYVRKTFYTPDPVVGYTDYPFLGKPKSRM

SEQ ID NO: 64418 - protein, 373 aa, Triticum aestivum
  peptide (1)..(373): Ceres Seq. ID no. 13662940
MRRFSLAHRVVLAPMTRCRAIGGLPGPALAEYYAQRVTQGGLLISEGTVVSPAGPGFPHVPGIYNQEQIDGWKKVVDAVHAKGGIFFCQLWHVGRASHQVYQPDGAAPISSTDKPISARWKILLPDGSYGTYPTPSRLATSEIPDIVEQYRQAAINAIKAGFDGIEIHGAHGYIIDQFLKDGINDRTDEYGGSLTNRCKFLLEVTRAVVSAIRAERTAVRVSPAIDHLDAYDSNPMQLGMAVVERLNALQQEAGQLAYLHVTQPRYAAYGQTESGPHGSAEEESRLMRTLRGAYRGTFMCSGGYTRELGLEAVESGDADLVSFGRLFISNPDLVERLRLNAGLNKYVRKTFYTPDPVVGYTDYPFLGKPKSRM

SEQ ID NO: 64419 - DNA, 1542 bp, Triticum aestivum
  misc_feature (1)..(1542): Ceres Seq. ID no. 13662984
gtgtgtcccttcccggaagaattccccaattaaaagatctctctctctctctctctctcgtcacatccacctcactccctcgcttcctgctgccattccgcggccggacatgtcgtcgtcgggggccggcgaggagggcgccgccgcgccgcaggggccgctgcccgtggagcaccgcaagggcgccaacgggctcgacaaggtcgtcctccgcgaggcccggcgcatctccgccgaggtgtacctgtatggtggccatgtaacatcatggaaagatgagcatggggaggagctgcttttcgttagtaataaggctattttcaaacctccaaaagctatacgtggaggtataccaatctgctttcctcagttttccaacttcggacagctggaagctcatggatttgcaaggaacaagatctggagtgttgacactgatccaccaccatttccagtaccaatctctagtagagcttacatcgatttaatccttaaacctactgatgaagacttaaagatctggccacatagttttgagtaccgtctgagggttgcacttggacctggtggagatctgatgctgacttcacgtataaggaatacgaatgcagatggaaagccattctcttttacctttgcatatcacacgtacttctcaatttctgatataagtgagatacgagtagaaggcctggaaactctggattacctagacaacttacaagatagggcccgcttcactgaacaaggcgatgctattgtttttgaatctgagttggacagaatatatctgggcacgccgtcaaaaattgccattattgatcatgagaaaaaaagaacatttgttgtgaggaaaggaggacttccggatgctgttgtttggaacccatgggacaaaaaagctaaggcaatggcagattttggggatgacgaatataaacgcatggtatgtgtggaagcagctgctatagaaaaggcgattactctgaagcctggcgaggagtggactggaaaattggaactatctgcagttccgtctagttattacagtggtcaattggacccagatcgtgttattcaggattcagttgttccggaggattcagtcagctagcccttagtcaagttctgtgcaggtagactattaatatcatatgcacaagggaaatggcagccacgagtgtccaaacatttcttccattctattcaaatctttgttattttcagcgtaccgaccggaacagagcgaaaatctcaacactggtttctgtttcgggatccacatgacataaagggacaaatcagtgtttgtgccctgcatagggatgatcgaagaaacatcttagatgggttgtaaaataaatttataactgtattttctttatcagtttcttttattcccagatgagtaagtttcatagtgtggccaaaaggcgaagacgatgttgaaccacctttcagataaacacacatgatgtgtaaacatgccaaggttttgagttgcatggcttgttggtggttgcggaaccatgcttattttgg

SEQ ID NO: 64420 - protein, 370 aa, Triticum aestivum
  peptide (1)..(370): Ceres Seq. ID no. 13662985
CVPSRKNSPIKRSLSLSLSRHIHLTPSLPAAIPRPDMSSSGAGEEGAAAPQGPLPVEHRKGANGLDKVVLREARRISAEVYLYGGHVTSWKDEHGEELLFVSNKAIFKPPKAIRGGIPICFPQFSNFGQLEAHGFARNKIWSVDTDPPPFPVPISSRAYIDLILKPTDEDLKIWPHSFEYRLRVALGPGGDLMLTSRIRNTNADGKPFSFTFAYHTYFSISDISEIRVEGLETLDYLDNLQDRARFTEQGDAIVFESELDRIYLGTPSKIAIIDHEKKRTFVVRKGGLPDAVVWNPWDKKAKAMADFGDDEYKRMVCVEAAAIEKAITLKPGEEWTGKLELSAVPSSYYSGQLDPDRVIQDSVVPEDSVS

SEQ ID NO: 64421 - protein, 334 aa, Triticum aestivum
  peptide (1)..(334): Ceres Seq. ID no. 13662986
MSSSGAGEEGAAAPQGPLPVEHRKGANGLDKVVLREARRISAEVYLYGGHVTSWKDEHGEELLFVSNKAIFKPPKAIRGGIPICFPQFSNFGQLEAHGFARNKIWSVDTDPPPFPVPISSRAYIDLILKPTDEDLKIWPHSFEYRLRVALGPGGDLMLTSRIRNTNADGKPFSFTFAYHTYFSISDISEIRVEGLETLDYLDNLQDRARFTEQGDAIVFESELDRIYLGTPSKIAIIDHEKKRTFVVRKGGLPDAVVWNPWDKKAKAMADFGDDEYKRMVCVEAAAIEKAITLKPGEEWTGKLELSAVPSSYYSGQLDPDRVIQDSVVPEDSVS

SEQ ID NO: 64422 - DNA, 1185 bp, Triticum aestivum
  misc_feature (1)..(1185): Ceres Seq. ID no. 13656147
actagagcagaaccacatctcatccatccccaaccccagccccaaaccccccaaagtggaagagaagattgttgcggcggcggatcggagtgagaagaatcaatggcttccgacggcgtggtggccctgtacggcaacaacaaggcggtggtggagccctccgccaagcctgccgccgccaccttctccgtcaaggtgggcctcgcccagatgctgcgcggcggcgtcatcatggacgtggtcaccgccgagcaggcgcgcctcgccgaggaggccggcgcctgcgccgtcatggcgctggagcgcgtgcccgccgacatccgcgcccagggcggcgtggcccgcatgtccgacccggccctcatccgcgacatcaagcgcgccgtcaccatcccggtgatggccaaggcccgcatcgggcacttcgtggaggcccagatcctggaggccatcggcgtggactacgtggacgagagcgaggtcctgaccctcgccgacgacgcccaccacatcaacaagcacaacttccgtgtccccttcgtgtgcggctgccgcgacctgggggaggcgctccgccgcatccgcgagggcgccgccatgatccacaccaagggcgaggccggcaccggtaacgtggtggaggccgtccgccacgtccgctccgtgatgggcgccgtccgcgccctgcgcaacatggacgaggacgaggtcttcagctacgccaagcagatcgccgccccgtacgacctggtgatgcagaccaagcagctgggccgcctcccggtggtgcagttcgccgccggcggcgtggccacccccgcggacgccgccctgatgatgcagctcgggtgcgacggggtgttcgtcggctccggcatcttcaagagcggcgacccggcgcgtcgcgcccgcgccatcgtgcaggccgtgacgcactacagcgacccggagatcctggccaacgtcagcgcggggctcggggaggccatggtggggatcaacctgtccgaccccaacgtggagcgcttcgccgcccgatcccagtagcttcataccttgttgccaagttggtgccatggatcgtcgtcgtaataacttgaatctggctttgcatcatgtgtcgttttgttcctctactctaggtgcatcatcatgtattatccagcagaactatcttgggtgttg

SEQ ID NO: 64423 - protein, 314 aa, Triticum aestivum
  peptide (1)..(314): Ceres Seq. ID no. 13656148
MASDGVVALYGNNKAVVEPSAKPAAATFSVKVGLAQMLRGGVIMDVVTAEQARLAEEAGACAVMALERVPADIRAQGGVARMSDPALIRDIKRAVTIPVMAKARIGHFVEAQILEAIGVDYVDESEVLTLADDAHHINKHNFRVPFVCGCRDLGEALRRIREGAAMIHTKGEAGTGNVVEAVRHVRSVMGAVRALRNMDEDEVFSYAKQIAAPYDLVMQTKQLGRLPVVQFAAGGVATPADAALMMQLGCDGVFVGSGIFKSGDPARRARAIVQAVTHYSDPEILANVSAGLGEAMVGINLSDPNVERFAARSQ

SEQ ID NO: 64424 - protein, 278 aa, Triticum aestivum
  peptide (1)..(278): Ceres Seq. ID no. 13656149
MLRGGVIMDVVTAEQARLAEEAGACAVMALERVPADIRAQGGVARMSDPALIRDIKRAVTIPVMAKARIGHFVEAQILEAIGVDYVDESEVLTLADDAHHINKHNFRVPFVCGCRDLGEALRRIREGAAMIHTKGEAGTGNVVEAVRHVRSVMGAVRALRNMDEDEVFSYAKQIAAPYDLVMQTKQLGRLPVVQFAAGGVATPADAALMMQLGCDGVFVGSGIFKSGDPARRARAIVQAVTHYSDPEILANVSAGLGEAMVGINLSDPNVERFAARSQ

SEQ ID NO: 64425 - protein, 271 aa, Triticum aestivum
  peptide (1)..(271): Ceres Seq. ID no. 13656150
MDVVTAEQARLAEEAGACAVMALERVPADIRAQGGVARMSDPALIRDIKRAVTIPVMAKARIGHFVEAQILEAIGVDYVDESEVLTLADDAHHINKHNFRVPFVCGCRDLGEALRRIREGAAMIHTKGEAGTGNVVEAVRHVRSVMGAVRALRNMDEDEVFSYAKQIAAPYDLVMQTKQLGRLPVVQFAAGGVATPADAALMMQLGCDGVFVGSGIFKSGDPARRARAIVQAVTHYSDPEILANVSAGLGEAMVGINLSDPNVERFAARSQ

SEQ ID NO: 64426 - DNA, 1367 bp, Triticum aestivum
  misc_feature (1)..(1367): Ceres Seq. ID no. 13655881
gctctctcgcatcccgatctcccctgctgctttcttctcctcctcatcccaaaccctagcccccctccgcctcggccaccgcttcgtcgccatggccgccgccgccgcggaggagttcgtgaagggtcgcgtcttccccaacggcgtcgcggtcatcaccctcgaccgccccaaggccctcaacgccatgaacctcgaaatggaccttaggtacaagacatttcttgatgactgggaaacaaatccaaacgtgaagtgcattcttgtggaaagcagttctccgcgtgccttctcagctgggatggatattaagggcgttgcagcggaaattcaaaaggacaagagcacatcacttgtgcaaaaggtcttcacagctgagtactctttgatttgcaagatacatgagtatgcaaaaccttatatatgcttgatggatggtgtgaccatggggtttggaattggattgtctggacatgggcgctaccgcattattacggagagaacactgctggccatgccggaaaatggtattggcttgttcccagatgttggctttgcttacatcggtgcaaaagcgccaggagggggtgcagtcggagcttaccttgggatgacaggaaaaagaatatcttcacctgctgatgctctattcattggtctcggaacccattatgtaccttccggggacttgggttcactcaaggaatccctcctgagtgctaacttcrctgctgatcctcacaaagatgttgagtcactcctgactgggtacaagaaggagcctgagtcggtgccccaattagaaaagcttttaccggatatcgtttcttcttttggtcctgataaatcagctactgaatctgtggaagagctaaagaagcgtactcaaaatggtgatgccacagtgtcagaatgggccaatgatgctttagcaggacttaagaaaggtgctccgttttctctttgtttaacacagaaacatttctctcgagttgcatcatcatatgggaacaatgaaaattatctatctaagttggctggtgttatgaaattggagtaccgtattgccttgagatcgtcggttcgaaatgattttgctgaaggcgtacgcgctgtcttagttgacaaggaccagaatccaaaatggagtccagcaactctggaagaggtaaacatggatgaggtcgaatcagtgtttgaaccattagctgccgatgctgagttgaatgtgtgattttctgtagcagcccagaatgctgtgaccacctgaacaccctttgtccttccgatgatgtaataggaaattactacaaacctacacacggctatccattgagccaataaatttgcctggagtgcatcgtctg

SEQ ID NO: 64427 - protein, 410 aa, Triticum aestivum
  peptide (1)..(410): Ceres Seq. ID no. 15219778
  misc_feature (243)..(243): Xaa is any aa, unknown or other
LSRIPISPAAFFSSSSQTLAPLRLGHRFVAMAAAAAEEFVKGRVFPNGVAVITLDRPKALNAMNLEMDLRYKTFLDDWETNPNVKCILVESSSPRAFSAGMDIKGVAAEIQKDKSTSLVQKVFTAEYSLICKIHEYAKPYICLMDGVTMGFGIGLSGHGRYRIITERTLLAMPENGIGLFPDVGFAYIGAKAPGGGAVGAYLGMTGKRISSPADALFIGLGTHYVPSGDLGSLKESLLSANFXADPHKDVESLLTGYKKEPESVPQLEKLLPDIVSSFGPDKSATESVEELKKRTQNGDATVSEWANDALAGLKKGAPFSLCLTQKHFSRVASSYGNNENYLSKLAGVMKLEYRIALRSSVRNDFAEGVRAVLVDKDQNPKWSPATLEEVNMDEVESVFEPLAADAELNV

SEQ ID NO: 64428 - protein, 380 aa, Triticum aestivum
  peptide (1)..(380): Ceres Seq. ID no. 15219779
  misc_feature (213)..(213): Xaa is any aa, unknown or other
MAAAAAEEFVKGRVFPNGVAVITLDRPKALNAMNLEMDLRYKTFLDDWETNPNVKCILVESSSPRAFSAGMDIKGVAAEIQKDKSTSLVQKVFTAEYSLICKIHEYAKPYICLMDGVTMGFGIGLSGHGRYRIITERTLLAMPENGIGLFPDVGFAYIGAKAPGGGAVGAYLGMTGKRISSPADALFIGLGTHYVPSGDLGSLKESLLSANFXADPHKDVESLLTGYKKEPESVPQLEKLLPDIVSSFGPDKSATESVEELKKRTQNGDATVSEWANDALAGLKKGAPFSLCLTQKHFSRVASSYGNNENYLSKLAGVMKLEYRIALRSSVRNDFAEGVRAVLVDKDQNPKWSPATLEEVNMDEVESVFEPLAADAELNV

SEQ ID NO: 64429 - protein, 348 aa, Triticum aestivum
  peptide (1)..(348): Ceres Seq. ID no. 15219780
  misc_feature (181)..(181): Xaa is any aa, unknown or other
MNLEMDLRYKTFLDDWETNPNVKCILVESSSPRAFSAGMDIKGVAAEIQKDKSTSLVQKVFTAEYSLICKIHEYAKPYICLMDGVTMGFGIGLSGHGRYRIITERTLLAMPENGIGLFPDVGFAYIGAKAPGGGAVGAYLGMTGKRISSPADALFIGLGTHYVPSGDLGSLKESLLSANFXADPHKDVESLLTGYKKEPESVPQLEKLLPDIVSSFGPDKSATESVEELKKRTQNGDATVSEWANDALAGLKKGAPFSLCLTQKHFSRVASSYGNNENYLSKLAGVMKLEYRIALRSSVRNDFAEGVRAVLVDKDQNPKWSPATLEEVNMDEVESVFEPLAADAELNV

SEQ ID NO: 64430 - DNA, 1137 bp, Triticum aestivum
  misc_feature (1)..(1137): Ceres Seq. ID no. 15174190
aagtgtttcccggctcggaaggcgctttcttacagctgctctgccctcagctaaaccagcgcacaccaaaaagaaatggaggagaaaagaaaaatggcgggtttgctccggcacatcgccgccgctctccttttcctcgtcacggccgcttcgaccgccggtgcttccacttattacgcctcggatcccaacctcggatccgcccgcgtcatcttccagttaaatcatggtgacattgaattcggcttctttcctcgtgttgcacctaagacagttgaacacatttttaaacttgtgcagcttggatgctataatacaaatcacttcttccgggttgacaagggttttgttgcgcaagttgccgatgtcatgggaggtagaaaagcccctatgaataaagagcaggaacaacaggcagagaaatcaattgttggtgaatttagtactgtcaagcatgtcagaggaattctctcaatgggaaggtattctgacccagacagtgcctcctcttccttttctatcctccttggtgatgctccccaccttgatggccagtatgctgtatttgggagggtgactaagggtgacgatacattaagaaaactagagcgcctgccaacccataaagaaggcatttttgtaatgccaattgagcgcattgagattctgtcgacatactattatgatattgatgtagagagctgtgagccagagaagtctattcttaagaggagactttctgaatcagcatcagaagttgagagatggagacgaaaatgcttcgcatgatccagcgattgagtgccttttttttcctttcggcctcactgagaagacatgtgtttcaaaaggacatccatattacctcttccaggatttagagtgcatgtgcattccaaggagaggggtcagacttgtactatgtccaaatgcgttgtaccatgtaatttttccatgagtttgatgttactaggtctgcacgtttagcattgtttctctatggtgaccaaaattttgtcttgtacctatttggcatgcttagcacatgcagaacgtgaagcattgggaaggtcctaatgcaatccaatcgaccgatagtctaatggaaaaaaatcaatattacacatgtatgcttcc

SEQ ID NO: 64431 - protein, 237 aa, Triticum aestivum
  peptide (1)..(237): Ceres Seq. ID no. 15174191
MEEKRKMAGLLRHIAAALLFLVTAASTAGASTYYASDPNLGSARVIFQLNHGDIEFGFFPRVAPKTVEHIFKLVQLGCYNTNHFFRVDKGFVAQVADVMGGRKAPMNKEQEQQAEKSIVGEFSTVKHVRGILSMGRYSDPDSASSSFSILLGDAPHLDGQYAVFGRVTKGDDTLRKLERLPTHKEGIFVMPIERIEILSTYYYDIDVESCEPEKSILKRRLSESASEVERWRRKCFA

SEQ ID NO: 64432 - protein, 231 aa, Triticum aestivum
  peptide (1)..(231): Ceres Seq. ID no. 15174192
MAGLLRHIAAALLFLVTAASTAGASTYYASDPNLGSARVIFQLNHGDIEFGFFPRVAPKTVEHIFKLVQLGCYNTNHFFRVDKGFVAQVADVMGGRKAPMNKEQEQQAEKSIVGEFSTVKHVRGILSMGRYSDPDSASSSFSILLGDAPHLDGQYAVFGRVTKGDDTLRKLERLPTHKEGIFVMPIERIEILSTYYYDIDVESCEPEKSILKRRLSESASEVERWRRKCFA

SEQ ID NO: 64433 - protein, 139 aa, Triticum aestivum
  peptide (1)..(139): Ceres Seq. ID no. 15174193
MGGRKAPMNKEQEQQAEKSIVGEFSTVKHVRGILSMGRYSDPDSASSSFSILLGDAPHLDGQYAVFGRVTKGDDTLRKLERLPTHKEGIFVMPIERIEILSTYYYDIDVESCEPEKSILKRRLSESASEVERWRRKCFA

SEQ ID NO: 64434 - DNA, 752 bp, Triticum aestivum
  misc_feature (1)..(752): Ceres Seq. ID no. 15173164
gaaacacagcgagcaagagcaagagcaagagcaagagcaagagcagcctttctccgtgaggtccattgcaatccagaaaccttcaagtatgggcagatctgcaatttctcaggccctcccggtgcaccaggaggacgaagacctgttcgagacctcgtcatccttctcctgcgactccgacgacgaggcccagttctcggacggcgaggaccagtttgtgccggcttccccgccggtgcggagactcaactctgacagcgtctacgatctgtcgtccatcaaggctgagctctccgccaagaaaggagggttgtccaagtactacgacgggaagtcccagtcgttcgcgtgcatgtccgaggtgaggtgcctggaggatctacccaagaagagcccctacaagaagatcaagtcatgcaggagcaacatcaatctagacggaaaccagagagattgccccgtaactggttctaacaacagcaaaggaatcgccaagcagagctctgcgagttcctgcgcgaatctgatgatggcgcggaccagcagcgccaacatgctctacaggcctccggcgatccctgttaacaagagcgcgtgccaccagtagggctcgcagctgcctggaaatgtccgtccatggctggcctcgcgcctcttctttgttccttgatgaggatttttcttggcgggcgtattagcctgtcaaatgtaaagaggcttttgattctctcatgttcaggaagatattgatg

SEQ ID NO: 64435 - protein, 201 aa, Triticum aestivum
  peptide (1)..(201): Ceres Seq. ID no. 15173165
KHSEQEQEQEQEQEQPFSVRSIAIQKPSSMGRSAISQALPVHQEDEDLFETSSSFSCDSDDEAQFSDGEDQFVPASPPVRRLNSDSVYDLSSIKAELSAKKGGLSKYYDGKSQSFACMSEVRCLEDLPKKSPYKKIKSCRSNINLDGNQRDCPVTGSNNSKGIAKQSSASSCANLMMARTSSANMLYRPPAIPVNKSACHQ

SEQ ID NO: 64436 - protein, 172 aa, Triticum aestivum
  peptide (1)..(172): Ceres Seq. ID no. 15173166
MGRSAISQALPVHQEDEDLFETSSSFSCDSDDEAQFSDGEDQFVPASPPVRRLNSDSVYDLSSIKAELSAKKGGLSKYYDGKSQSFACMSEVRCLEDLPKKSPYKKIKSCRSNINLDGNQRDCPVTGSNNSKGIAKQSSASSCANLMMARTSSANMLYRPPAIPVNKSACHQ

SEQ ID NO: 64437 - DNA, 1133 bp, Triticum aestivum
  misc_feature (1)..(1133): Ceres Seq. ID no. 13597027
tgcttcgtccagcataacccccaaaaccacctcacccgacagaacaggcggcggcggcggcggaatcgggcgagatgatcaagaggcgctacttcaggcaagaccacggcgacaatagcgcctcctcgtcctcctcctcttcgggttctgattcggaccgcgaccccgcggaagaagaggtctcggaggaggaagtagaaggggagcaagaaaaagaagaagaagatgatgatgaagaagcggaggtggagtcgggggaagaacaggaaaaggaagtagatgagcaggccgaagatgagggttcaggataccaaagtgaggacagctctggacatcatgttgatagtccttgtgcaggtttactttcagatgagaacagcagtctggtgtatgaacaataccaagcaatcaggttgcctgctaagaaagcatcaagtggtgatgctgattctgccgaaggtgctgttaacaaggatgacactgttgaggtcgatttcaataactacattctgaagtgcaaatctgtgtataagtgcaagctttgtcccagaatcatgtgcttaagtgaggagatggtcagggtacatcttgaatcaaagagacatgctcgatcaaagaaactactgggagaaggtaggcttaagatggtgctcaacagtgatggtgagctggaggaagaggcagagacacatgctgaacgacatgcccgaactatagctcttgctcagcaagtacaaaagcccaagaaggattcaggcaggcagcgacaaaatcggagaagacagaagaggtcgcagaatcgtctcaaggacaaagatcagagacacagctctggaaaggaaggtgcaaggccgaacaatggaactgctgataagaaaatgccgaatgttgaaactgctgctaagaaaatgccgaatcttgaaactgctgctaagaaaaggcgcaagactgaaaaataagtcggtgctgcagaaatatttcttgcgtgtcatttcttcctatattgttgtaatttttaggagctttctgcggttttactgtttctggtttgcttctttaagtgtagttcatgaaagctgagagattaaattgaaaggaaagacgacaactagaaagtggacatttaatcgtgc

SEQ ID NO: 64438 - protein, 294 aa, Triticum aestivum
  peptide (1)..(294): Ceres Seq. ID no. 13597028
MIKRRYFRQDHGDNSASSSSSSSGSDSDRDPAEEEVSEEEVEGEQEKEEEDDDEEAEVESGEEQEKEVDEQAEDEGSGYQSEDSSGHHVDSPCAGLLSDENSSLVYEQYQAIRLPAKKASSGDADSAEGAVNKDDTVEVDFNNYILKCKSVYKCKLCPRIMCLSEEMVRVHLESKRHARSKKLLGEGRLKMVLNSDGELEEEAETHAERHARTIALAQQVQKPKKDSGRQRQNRRRQKRSQNRLKDKDQRHSSGKEGARPNNGTADKKMPNVETAAKKMPNLETAAKKRRKTEK

SEQ ID NO: 64439 - DNA, 527 bp, Triticum aestivum
  misc_feature (1)..(527): Ceres Seq. ID no. 15224346
caaaaccatggatgaaattaatgacaatatggagaacatgaggcagatccaggatctactgtctgcgcctatgggagcagcaagtgatttcgatgaagatgagctggaagctgaacttgcggatttggagggcgaggagttggaggcacagctactagcaccaaccacaagtgctcctatgactgctccagcgcgtgtacctcagcagtcgagtcggcccactgctcagagtagtaaaaccgaagatgatgagctggcagctttacaagcagagatggctatgtaattagtttgcaggacttgggcgtgggcatgtttagagaccagattgtgcaaatatatttgggaccacggtattttcatggaggtcttcctgggaagacgtcagaagtgcacacagaaactagttgcatctcaccctgatgatctcttatgtatatcttatcatgttacttctgtaatcaaacatctaagatgcgctgttgagcgcattatcagctaataaagggcatctgccatcattgtat

SEQ ID NO: 64440 - protein, 94 aa, Triticum aestivum
  peptide (1)..(94): Ceres Seq. ID no. 15224347
KTMDEINDNMENMRQIQDLLSAPMGAASDFDEDELEAELADLEGEELEAQLLAPTTSAPMTAPARVPQQSSRPTAQSSKTEDDELAALQAEMAM

SEQ ID NO: 64441 - protein, 92 aa, Triticum aestivum
  peptide (1)..(92): Ceres Seq. ID no. 15224348
MDEINDNMENMRQIQDLLSAPMGAASDFDEDELEAELADLEGEELEAQLLAPTTSAPMTAPARVPQQSSRPTAQSSKTEDDELAALQAEMAM

SEQ ID NO: 64442 - protein, 85 aa, Triticum aestivum
  peptide (1)..(85): Ceres Seq. ID no. 15224349
MENMRQIQDLLSAPMGAASDFDEDELEAELADLEGEELEAQLLAPTTSAPMTAPARVPQQSSRPTAQSSKTEDDELAALQAEMAM

SEQ ID NO: 64443 - DNA, 965 bp, Triticum aestivum
  misc_feature (1)..(965): Ceres Seq. ID no. 12599167
cttctccgttctcctagctagctcccacacatcctcgaatcacagcctcacacctcctcccctgatcgaccaccctgcagctagcttcgtgcccgcagccagcaccgatcacacgctagctgctgctgctgctggggcgaccgaccggccatccatggcggtgaaggactgcggcgggcacaagggcgggggctgcgagtgccaccgccggcggctctaccgcaagtgctgcggcgcgctgctcgccctcgtcctcctcgccctcttcatcatcctcatcgtctacctggtgctccgcccccacaagccccgcttctacctgcaggacctggcggtgctctgcctcaacgtcacgccgcccacctccgcctacctcttcaccaccatgcaggccacggtcgcggcgcgcaaccccaacgaccgcgtcggcgtctactacgacgaggcggacatgtacgcgcagtacaagggcgtcgccatcaccgtccccacccgcctccccgtcgcctaccagggccaccgcgaccagtccgtgtggtcgccgtatctgaggtccatggacagcgtcgtgctcccgccgcagctcgccgtggcgctggcgcaggacgagacggccgggtacgtgctggtggacgtgcgcgtggacggtcaggtgcgctggaaggtgggcacgtggatctccggccactaccacctccgggtcaactgcccggcgctcatcagggtgaacgagggcaagggcagctacggcgccaccaccggcggcggccccgactacttccgcttccagcaggccgccgcctgcgccgtcgacgtctgatcatgcatcatcggttcgacctccaccgatccatgcatgtgtccaaattcagtggaatcgattgattgcttctccttctagtctctttcttgcttctttttagtctctttttgacttgttgatcgattggttaaagaaatggatg

SEQ ID NO: 64444 - protein, 272 aa, Triticum aestivum
  peptide (1)..(272): Ceres Seq. ID no. 12599168
FSVLLASSHTSSNHSLTPPPLIDHPAASFVPAASTDHTLAAAAAGATDRPSMAVKDCGGHKGGGCECHRRRLYRKCCGALLALVLLALFIILIVYLVLRPHKPRFYLQDLAVLCLNVTPPTSAYLFTTMQATVAARNPNDRVGVYYDEADMYAQYKGVAITVPTRLPVAYQGHRDQSVWSPYLRSMDSVVLPPQLAVALAQDETAGYVLVDVRVDGQVRWKVGTWISGHYHLRVNCPALIRVNEGKGSYGATTGGGPDYFRFQQAAACAVDV

SEQ ID NO: 64445 - protein, 221 aa, Triticum aestivum
  peptide (1)..(221): Ceres Seq. ID no. 12599169
MAVKDCGGHKGGGCECHRRRLYRKCCGALLALVLLALFIILIVYLVLRPHKPRFYLQDLAVLCLNVTPPTSAYLFTTMQATVAARNPNDRVGVYYDEADMYAQYKGVAITVPTRLPVAYQGHRDQSVWSPYLRSMDSVVLPPQLAVALAQDETAGYVLVDVRVDGQVRWKVGTWISGHYHLRVNCPALIRVNEGKGSYGATTGGGPDYFRFQQAAACAVDV

SEQ ID NO: 64446 - protein, 144 aa, Triticum aestivum
  peptide (1)..(144): Ceres Seq. ID no. 12599170
MQATVAARNPNDRVGVYYDEADMYAQYKGVAITVPTRLPVAYQGHRDQSVWSPYLRSMDSVVLPPQLAVALAQDETAGYVLVDVRVDGQVRWKVGTWISGHYHLRVNCPALIRVNEGKGSYGATTGGGPDYFRFQQAAACAVDV

SEQ ID NO: 64447 - DNA, 913 bp, Triticum aestivum
  misc_feature (1)..(913): Ceres Seq. ID no. 12618524
gcaggcagctccactcccctctccccttgcagccgccgccgctcgccgtcgcgatggccgagacggtggacttcgcgagcggcgacggggaggcctggcgtgcggcgctgggcgcgtacgaccgccggctcgcggcgctggacaagcccgacctcctggacgccgactccttctaccgccacgacctccccctcctgctgcaccgccgcgacccggacccctacctcgccaagccggagctggtgcagctcatgcagtggaagctctcgcgcggcaagtggaggccgaggctgatggatttcgtcaaaagcttggatgacaaagttgtagagtcagcgtcacgcaaggcatttgcagcgctgcctgacctcagcaaggccatcaccgagctcaccgtgctcaagggtgttggccctgccactgcatctgcggtgctcgctgcctatgcacccgatgttgcacccttcatgtcagacgaagctatggtcgcagccttgggcaatgtaaaggaatacactctgaagcagtaccttgcgtttgcggagaagttgcaggctaaagcgaaggagttgagcgtaggaggagaaagcttcacgcctttggatgttgagagagctttgtggagctcggcaatcgcctccaagccaccgaaggcaccagcaggtgggaagagaaaacgatgacttgtgtcgccgcactgttgcgctagagctagaatggtctgctggtggtagatcgatctttgtagaatgtatatgtcatgtacttcttgcctttggatcccaaacatatttgtgaatggggaatggcgcacctcctgagcttggtatttggctatcggatgatgacctggtgtattccgtcaaaggactaaccgcctgtaaaattgtcatgaaatccatagaccaattcc

SEQ ID NO: 64448 - protein, 226 aa, Triticum aestivum
  peptide (1)..(226): Ceres Seq. ID no. 12618525
RQLHSPLPLQPPPLAVAMAETVDFASGDGEAWRAALGAYDRRLAALDKPDLLDADSFYRHDLPLLLHRRDPDPYLAKPELVQLMQWKLSRGKWRPRLMDFVKSLDDKVVESASRKAFAALPDLSKAITELTVLKGVGPATASAVLAAYAPDVAPFMSDEAMVAALGNVKEYTLKQYLAFAEKLQAKAKELSVGGESFTPLDVERALWSSAIASKPPKAPAGGKRKR

SEQ ID NO: 64449 - protein, 209 aa, Triticum aestivum
  peptide (1)..(209): Ceres Seq. ID no. 12618526
MAETVDFASGDGEAWRAALGAYDRRLAALDKPDLLDADSFYRHDLPLLLHRRDPDPYLAKPELVQLMQWKLSRGKWRPRLMDFVKSLDDKVVESASRKAFAALPDLSKAITELTVLKGVGPATASAVLAAYAPDVAPFMSDEAMVAALGNVKEYTLKQYLAFAEKLQAKAKELSVGGESFTPLDVERALWSSAIASKPPKAPAGGKRKR

SEQ ID NO: 64450 - protein, 143 aa, Triticum aestivum
  peptide (1)..(143): Ceres Seq. ID no. 12618527
MQWKLSRGKWRPRLMDFVKSLDDKVVESASRKAFAALPDLSKAITELTVLKGVGPATASAVLAAYAPDVAPFMSDEAMVAALGNVKEYTLKQYLAFAEKLQAKAKELSVGGESFTPLDVERALWSSAIASKPPKAPAGGKRKR

SEQ ID NO: 64451 - DNA, 1168 bp, Triticum aestivum
  misc_feature (1)..(1168): Ceres Seq. ID no. 12388947
attcaggaaactgccattgaccagacaaaacgaaaacgtgacggcaaacagttccgtaccacctccctccactggtcgatccccatcccctgttccgttcatacatctacctccgccgccgctgccatgccgccggccggcagcctcaccgccgagcagctcagcttcttcgagaagaacggctacctggtgctggagtcgttatccagcgtggaggaggttcaggcgatgcgcgaccgcatggccgagctcgtcgacggcttcgacggcgctgactccagtgtcttctccaccaaggatcatcggcagttgaaggacgactacttctttaagagtgcggagaatatatctttcttcttcgaggaaaaggcatttggagatgatggatgcttgagacagccaaaggaactttcaatcaataaagttggacatgcactacatgaacatgaccctgtgttcaaaaagtttgctttctcggagagtatttctagcctgttctcttctttagggtacaagagacctgcagttattcaatctatgtacatctttaagcaaccgggcattggtggcgaggtggtgccacaccaggataatacattcctttatacagagcccctatcatgcacaggattgtggcttgcacttgaagatgcaacagttaccaatggttgcctatgggcaattcccggatcacataaaaatggtctaaaaaggcgaatgatcagagatgaaaatggtactcattttgatcgcccctctccactttatgaccagaaagagtttgtaccactggaaatgaaatcaggtgactttgttgttattcacgacgatcttgtacatcagagctttgagaacctttctccagtgtcaagacatgcactgagcttacatgtagttgacatggaaggatgtaaatggtccaaggacaactggatacagaggaaaactgcgcctgaaccgctctatgtgtcttagttcagccagttactaataaacaagcagtttcagttgcttatcatcggtgcagtgaaatttgggaacgccgcggagcaatgctggtttctttgtcgtctttcacatgtgtacactgtaaatactgaatacttgctgctgtgttgtcatgatatcagttactatctgcaatcctgaaataaatccaatttcctcc

SEQ ID NO: 64452 - protein, 324 aa, Triticum aestivum
  peptide (1)..(324): Ceres Seq. ID no. 12388948
IQETAIDQTKRKRDGKQFRTTSLHWSIPIPCSVHTSTSAAAAMPPAGSLTAEQLSFFEKNGYLVLESLSSVEEVQAMRDRMAELVDGFDGADSSVFSTKDHRQLKDDYFFKSAENISFFFEEKAFGDDGCLRQPKELSINKVGHALHEHDPVFKKFAFSESISSLFSSLGYKRPAVIQSMYIFKQPGIGGEVVPHQDNTFLYTEPLSCTGLWLALEDATVTNGCLWAIPGSHKNGLKRRMIRDENGTHFDRPSPLYDQKEFVPLEMKSGDFVVIHDDLVHQSFENLSPVSRHALSLHVVDMEGCKWSKDNWIQRKTAPEPLYVS

SEQ ID NO: 64453 - protein, 282 aa, Triticum aestivum
  peptide (1)..(282): Ceres Seq. ID no. 12388949
MPPAGSLTAEQLSFFEKNGYLVLESLSSVEEVQAMRDRMAELVDGFDGADSSVFSTKDHRQLKDDYFFKSAENISFFFEEKAFGDDGCLRQPKELSINKVGHALHEHDPVFKKFAFSESISSLFSSLGYKRPAVIQSMYIFKQPGIGGEVVPHQDNTFLYTEPLSCTGLWLALEDATVTNGCLWAIPGSHKNGLKRRMIRDENGTHFDRPSPLYDQKEFVPLEMKSGDFVVIHDDLVHQSFENLSPVSRHALSLHVVDMEGCKWSKDNWIQRKTAPEPLYVS

SEQ ID NO: 64454 - protein, 248 aa, Triticum aestivum
  peptide (1)..(248): Ceres Seq. ID no. 12388950
MRDRMAELVDGFDGADSSVFSTKDHRQLKDDYFFKSAENISFFFEEKAFGDDGCLRQPKELSINKVGHALHEHDPVFKKFAFSESISSLFSSLGYKRPAVIQSMYIFKQPGIGGEVVPHQDNTFLYTEPLSCTGLWLALEDATVTNGCLWAIPGSHKNGLKRRMIRDENGTHFDRPSPLYDQKEFVPLEMKSGDFVVIHDDLVHQSFENLSPVSRHALSLHVVDMEGCKWSKDNWIQRKTAPEPLYVS

SEQ ID NO: 64455 - DNA, 983 bp, Triticum aestivum
  misc_feature (1)..(983): Ceres Seq. ID no. 13585554
aggaataggattcaggcccgggcggccgcgtcaaaatcgtctctttgctcctcctcctgtccgtccgtctccgtccgtccgcccgcccgccccgaagcgtctcgccgccccctccaccggagaaccccctcgaaggcgagcacccgccctccccttcctcccggattcttgtctgccatgggtgactacacaatccggataagcaccagcttgatcgagcagctcgcgcgcgatgacgagaagcagatgaagaggaggaccaggaaacccaagccgaggaaggtcgtggagcaaccagaggagcctcaggacaatggcagggaacttccaactgaacccaagagcagccctgctcctgttttgccttttccgccacccatgtacctgccagtgacccccgctcctccaccgcccccgcccgtgatccaggaggtggaagccatacgcgccgtggttgtggagagcgagaaggtgctggagaagctgcagaagaaggaggcgacgatgcgcgaggagctcaccaagagggccaaggagctgcacgacaaggagttcaagctgccctaccagaacccctcgccgtgcaccgacgagagggcaggctgcgctgagtgctacaggagcaacgtgcaggacccgctcaagtgcgccgaggcggtcaagaggttcgaggcgtgcgttcgcatggcgattcggggcggtaccaccatgggagctgctcagtaggcagtggcgctgggagtcggggctgagtgagcgaggtgtcgagcacacgattttgcttctgtcgggatgattgattgaataacctgcctggatttttgtttggtgagacctgaaacaccatcagttgtagattaattctggtaacgggttgctactggtgttggcaacaagaggccatgagtgtccttgaatttaggggagtggctccatgctacttgcatacatattacaaaatgagacatgaaatttgcagggtc

SEQ ID NO: 64456 - protein, 241 aa, Triticum aestivum
  peptide (1)..(241): Ceres Seq. ID no. 13585555
RNRIQARAAASKSSLCSSSCPSVSVRPPARPEASRRPLHRRTPSKASTRPPLPPGFLSAMGDYTIRISTSLIEQLARDDEKQMKRRTRKPKPRKVVEQPEEPQDNGRELPTEPKSSPAPVLPFPPPMYLPVTPAPPPPPPVIQEVEAIRAVVVESEKVLEKLQKKEATMREELTKRAKELHDKEFKLPYQNPSPCTDERAGCAECYRSNVQDPLKCAEAVKRFEACVRMAIRGGTTMGAAQ

SEQ ID NO: 64457 - protein, 182 aa, Triticum aestivum; identical to SEQ ID NO: 52012
  peptide (1)..(182): Ceres Seq. ID no. 13585556

SEQ ID NO: 64458 - protein, 159 aa, Triticum aestivum; identical to SEQ ID NO: 52013
  peptide (1)..(159): Ceres Seq. ID no. 13585557

SEQ ID NO: 64459 - DNA, 1101 bp, Triticum aestivum
  misc_feature (1)..(1101): Ceres Seq. ID no. 14313511
gtcctgtactagtagagtacatctctgtcccaatcgccgtgatccagctagcttactacacaggcaagggcgattcgatcgaggccgccgccgccgccgccggagacgaccccgccgccttcagttagttaagatacaaaaatggcctcattggacaccgtcacaggagatcttggcctggttgttttgtacctaagcaaggctgaggcaagagataagatctgcagagctatacaatatggatccaagttcctgagcaacggacaaccaggacctgcacagaatgtcgacaaatcaactagtcttgctcggaaagttttccggctgtttaagtttgttaatgatctccaagctctgattagcccccctgccaaaggaactccacttccgctgatcttacttggaaagtcgaagaacgcgatgctgtcaactttcctctttctggaccaaattgtttgggctgggagaacaggagtatacaagaacaaggagcgagcagaattccttggcaggattgccttttattgctttcttggatctaatacatgtactaccatcatcgagctagcggagcttcagcggctttccaaatcgatgaagaagttagagaaggacctcaagcaccaagagctgtacaagaacgagcagtatcggatgaagctgaagaagtccaatgagaggctgcttgctctcatcaaatcgagccttgacatagttgttgcagtggggctgctgcaactggccccgaaaaaggtcactcctcgcgtcactggggcctttgggttcgctagctcgctcatcgcctgttaccagttgcttccagccccagccaaatccaagtgatctgcctgcccacctcgggccaggcagctggtgcatcgattggtgaaacggcggttgctgtcgctgatacttgataagaaataaatctggaccaaattgtccgtcctgtaggatataaccgaggattattgttgtggaagtcggcattgcccagggccatctcatagcctggttgatctgccttgccttatgacttgattatgtagcacgcttgtatttgtatggtctggtgtgccactatcatactataactgttgc

SEQ ID NO: 64460 - protein, 233 aa, Triticum aestivum
  peptide (1)..(233): Ceres Seq. ID no. 14313512
MASLDTVTGDLGLVVLYLSKAEARDKICRAIQYGSKFLSNGQPGPAQNVDKSTSLARKVFRLFKFVNDLQALISPPAKGTPLPLILLGKSKNAMLSTFLFLDQIVWAGRTGVYKNKERAEFLGRIAFYCFLGSNTCTTIIELAELQRLSKSMKKLEKDLKHQELYKNEQYRMKLKKSNERLLALIKSSLDIVVAVGLLQLAPKKVTPRVTGAFGFASSLIACYQLLPAPAKSK

SEQ ID NO: 64461 - protein, 140 aa, Triticum aestivum
  peptide (1)..(140): Ceres Seq. ID no. 14313513
MLSTFLFLDQIVWAGRTGVYKNKERAEFLGRIAFYCFLGSNTCTTIIELAELQRLSKSMKKLEKDLKHQELYKNEQYRMKLKKSNERLLALIKSSLDIVVAVGLLQLAPKKVTPRVTGAFGFASSLIACYQLLPAPAKSK

SEQ ID NO: 64462 - DNA, 1205 bp, Triticum aestivum
  misc_feature (1)..(1205): Ceres Seq. ID no. 13597821
gagccggcgagccgcgcaaccttcgactccgaggggaaccgctcaccggagcaccaccgacccgcggacatggccgacgaggggaagcacctggagacgggccgggccgaccgctccgtctggctcatgaagtgcccgaccatcgtctcgcgcgcctggcaggaggccgccgccgcccaccgccgccgccgatgcgggaggccccaaccctaaccctaaccccgtcgtcgccaaggtcatcctctccttcgacccgctcagcaccgacgaggacccgaaccagttcaagatggagatggctcaaactaataatggcaacacaccgaagaattactctttaaatatgttcaaggattttgtgccaatgtgtgttttctcagagtctaaccaaggggtaagactaggttcctataatccctccccagaccccaccttgtgtgggagcttctatgcactgggtaagcttgcatgcgaaggaaaagtcgagcacaaatttgacatggaaccgcacaaagaaaacctttcagactatgcaaaattatgccgtgagaggactaaaaattctatgattaaaacaagaaaagtgcatgtacttgacaaggagcatgtgaacgtgcgcacaatgattagcatgattggtggcgggcctcattctggtccaaaggacaagaagaagccggcgccaaccagaactcctgaagtgaaaagaacacgcagggatcgtggggacattgaaaacatcctattcaagttatttgagaggcagccgaattggtcactgaggcatctaatgcaggaaactgatcaaccagagcaattcctgaaggagataatgaacgatctttgtgtctacaacaagagaggaccgaatcaagggacacatgagctcaagcctgaatacaagaagtctgttgaggacactagcgcgacctgaagtctatatcatctcttatgatatgctatacctgagagctagaagcccgtatgctctgataagttgaatgtgggtcatcgacagattctgactccagcctgttagttgctgatgaatcgcgtatgcttcatctggttgttctttgcaaaagtaatttttacgctgtataagcctcgagatatcttgttataccacggtttgccgtatcaaagatcctgagttttcagcatccttgtgtcccgaaggaaaagttgttcatgtttctgtgtat

SEQ ID NO: 64463 - protein, 214 aa, Triticum aestivum
  peptide (1)..(214): Ceres Seq. ID no. 15222203
MEMAQTNNGNTPKNYSLNMFKDFVPMCVFSESNQGVRLGSYNPSPDPTLCGSFYALGKLACEGKVEHKFDMEPHKENLSDYAKLCRERTKNSMIKTRKVHVLDKEHVNVRTMISMIGGGPHSGPKDKKKPAPTRTPEVKRTRRDRGDIENILFKLFERQPNWSLRHLMQETDQPEQFLKEIMNDLCVYNKRGPNQGTHELKPEYKKSVEDTSAT

SEQ ID NO: 64464 - protein, 212 aa, Triticum aestivum
  peptide (1)..(212): Ceres Seq. ID no. 15222204
MAQTNNGNTPKNYSLNMFKDFVPMCVFSESNQGVRLGSYNPSPDPTLCGSFYALGKLACEGKVEHKFDMEPHKENLSDYAKLCRERTKNSMIKTRKVHVLDKEHVNVRTMISMIGGGPHSGPKDKKKPAPTRTPEVKRTRRDRGDIENILFKLFERQPNWSLRHLMQETDQPEQFLKEIMNDLCVYNKRGPNQGTHELKPEYKKSVEDTSAT

SEQ ID NO: 64465 - protein, 196 aa, Triticum aestivum
  peptide (1)..(196): Ceres Seq. ID no. 15222205
MFKDFVPMCVFSESNQGVRLGSYNPSPDPTLCGSFYALGKLACEGKVEHKFDMEPHKENLSDYAKLCRERTKNSMIKTRKVHVLDKEHVNVRTMISMIGGGPHSGPKDKKKPAPTRTPEVKRTRRDRGDIENILFKLFERQPNWSLRHLMQETDQPEQFLKEIMNDLCVYNKRGPNQGTHELKPEYKKSVEDTSAT

SEQ ID NO: 64466 - DNA, 648 bp, Triticum aestivum
  misc_feature (1)..(648): Ceres Seq. ID no. 12587729
cacaagtgggaaatcatggttgatctgttcttctacagggacccagaggaagctaaggagcttgaggaagatgaggctttgggtgctcctgagtacgctgcagttgcagagtacactgccccagcgggagatacctggggtgctgaatggccaggagctgcagctccagctgctgccgtcgaagccccggctggtgctgagtggactggtgctccagctcctgcggccgatggatgggatgccgttgcagcacctgcccctactggctgggaacagggcagtgctccggcacctgcagcagcaccagctgctactcagaactgggagtgaaggacttgacccaaggtttatgctactcggcactctggagtgaaggagttcggccgtggtttattggtgaaggctgtgttatttgccccgtcagtactctgttggtagacgctggttaagtagatttaatttttacagtactgagttatgttagatggaaatcgatttttgtcttcttggctttgcaggggttgggagttatcaccccagccttctgttgcctctcatcgaatagctttatttgaagttccattttgccagcaagtgtatggtcagattctcttgaaatgttataaaagcccggatcatgtgataccg

SEQ ID NO: 64467 - protein, 123 aa, Triticum aestivum
  peptide (1)..(123): Ceres Seq. ID no. 12587730
TSGKSWLICSSTGTQRKLRSLRKMRLWVLLSTLQLQSTLPQREIPGVLNGQELQLQLLPSKPRLVLSGLVLQLLRPMDGMPLQHLPLLAGNRAVLRHLQQHQLLLRTGSEGLDPRFMLLGTLE

SEQ ID NO: 64468 - protein, 109 aa, Triticum aestivum
  peptide (1)..(109): Ceres Seq. ID no. 12587731
HKWEIMVDLFFYRDPEEAKELEEDEALGAPEYAAVAEYTAPAGDTWGAEWPGAAAPAAAVEAPAGAEWTGAPAPAADGWDAVAAPAPTGWEQGSAPAPAAAPAATQNWE

SEQ ID NO: 64469 - protein, 104 aa, Triticum aestivum
  peptide (1)..(104): Ceres Seq. ID no. 12587732
MVDLFFYRDPEEAKELEEDEALGAPEYAAVAEYTAPAGDTWGAEWPGAAAPAAAVEAPAGAEWTGAPAPAADGWDAVAAPAPTGWEQGSAPAPAAAPAATQNWE

SEQ ID NO: 64470 - DNA, 909 bp, Triticum aestivum
  misc_feature (1)..(909): Ceres Seq. ID no. 13585560
ctcctaccccgccgcctcattgattttcctcctcttcccctccaccgcccgcccttgccgccgccgcgtaacccaacaacgccggggcaagagaaggagcagctatccaagcttacaagggctcggagagccatgtcgtcgtcgtcggcggcgccgatcggcctgtcgtgggcgccccagctgccatcccttgcggcggccggcggcagcaagaagggctcggcgccgacatcgagcattgacgcgcaggagtccctctggaagcccagcaacgagctcgtggacgggctctacgtgcccccgagggaccccaggaaggtcaacaagatggcgaggaagaacgtcaaggacaccaccggcaagggctggttcgacatgccggcgccgagcatcactcccgagttgaagaaagaccttgagattttgcagctgaggcatgtaatggaccctaaaaggcatttcaagaggtctggtaaatccaaggctcttccgaagtatttccaagttggaacggttattgagcctgcatctgagttctactcaagtaggttgacaaagcatgaacggaagcagaccttggttgatgagctgttatctgaccaaaaactcaagaactacaggatgcgtaaggtaagggaaattcaggtggcccggacacccggaggcaaccagaagtggaagaacaagggcaagcaaacgttcaaaagggccaaggacaggcggaaataggatcaatgtaaaacaaggaagaacagaagaacggagccaaggagaaatgggcgagcacggctataggttgtgcactccactgtaatgtgttgaattcatgtaactgaacgtatggaacttttctccccgcacttagagagatgagatcagtgtttgaggggatgatggtcaaagcattgt

SEQ ID NO: 64471 - protein, 242 aa, Triticum aestivum
  peptide (1)..(242): Ceres Seq. ID no. 13585561
LLPRRLIDFPPLPLHRPPLPPPRNPTTPGQEKEQLSKLTRARRAMSSSSAAPIGLSWAPQLPSLAAAGGSKKGSAPTSSIDAQESLWKPSNELVDGLYVPPRDPRKVNKMARKNVKDTTGKGWFDMPAPSITPELKKDLEILQLRHVMDPKRHFKRSGKSKALPKYFQVGTVIEPASEFYSSRLTKHERKQTLVDELLSDQKLKNYRMRKVREIQVARTPGGNQKWKNKGKQTFKRAKDRRK

SEQ ID NO: 64472 - protein, 198 aa, Triticum aestivum
  peptide (1)..(198): Ceres Seq. ID no. 13585562
MSSSSAAPIGLSWAPQLPSLAAAGGSKKGSAPTSSIDAQESLWKPSNELVDGLYVPPRDPRKVNKMARKNVKDTTGKGWFDMPAPSITPELKKDLEILQLRHVMDPKRHFKRSGKSKALPKYFQVGTVIEPASEFYSSRLTKHERKQTLVDELLSDQKLKNYRMRKVREIQVARTPGGNQKWKNKGKQTFKRAKDRRK

SEQ ID NO: 64473 - protein, 134 aa, Triticum aestivum
  peptide (1)..(134): Ceres Seq. ID no. 13585563
SYPAASLIFLLFPSTARPCRRRVTQQRRGKRRSSYPSLQGLGEPCRRRRRRRSACRGRPSCHPLRRPAAARRARRRHRALTRRSPSGSPATSSWTGSTCPRGTPGRSTRWRGRTSRTPPARAGSTCRRRASLPS

SEQ ID NO: 64474 - DNA, 963 bp, Triticum aestivum
  misc_feature (1)..(963): Ceres Seq. ID no. 12618538
gcaaccaccgcagagcacgccatcgatcgaatcgagcgaaccgaagccaagaagagtttcctcgttgctagcgccgctaagtagacgtcgacggcgatgggcaagatgaagatgccggccctgttccgccgccgctcctcctccaagtcgcgctccgcgtcgccgccgacgactcctccccgggaggagcagcaggaggagagccggcaggccatcgggtccccggcgcggtcggcggaggaggagatggagcgggtcttccgcaagttcgacgccaacggcgacggccggatctcgcggccggagctggccgccctcttcgagagcctgggccacgcggccaccgaggacgagctgacccgcatgatgttcgaggcggacgcggacggcgacggcttcatcagcctggaggagttcgcggcgctcaacgccacggcgcccggcgacgacgaggaggacctgcggctcgccttcaaggtgttcgacgcggacggcagcggcgacatctcggccgcggagctggcgcacgtgctccacggcctcggcgagaaggccacggtccagcagtgccggcgcatgatcgagggcgtcgacaagaacggcgacggcctcatctccttcgacgagttcaaggtcatgatggccgccggcttcgctgccaagatggcctgatccgtcctccctcttcttggattcaatccgttgtcgtccgcggacagattgatttcgtccacgccttcctcgctccttcctctcgcgtgcggtgcagattaagtgggaattaagtgtacataattcaaggattaaagggcgggcattagagcgtacgtgcgttagtagattctttgtttctttgtcttcttggtggtgccgagtacgtaataaccagaaatctctcgcgaataattgtctcgcgattatctaaagatctgagatataatggaattggtgaggttgccggtt

SEQ ID NO: 64475 - protein, 191 aa, Triticum aestivum
  peptide (1)..(191): Ceres Seq. ID no. 12618539
MGKMKMPALFRRRSSSKSRSASPPTTPPREEQQEESRQAIGSPARSAEEEMERVFRKFDANGDGRISRPELAALFESLGHAATEDELTRMMFEADADGDGFISLEEFAALNATAPGDDEEDLRLAFKVFDADGSGDISAAELAHVLHGLGEKATVQQCRRMIEGVDKNGDGLISFDEFKVMMAAGFAAKMA

SEQ ID NO: 64476 - protein, 188 aa, Triticum aestivum
  peptide (1)..(188): Ceres Seq. ID no. 12618540
MKMPALFRRRSSSKSRSASPPTTPPREEQQEESRQAIGSPARSAEEEMERVFRKFDANGDGRISRPELAALFESLGHAATEDELTRMMFEADADGDGFISLEEFAALNATAPGDDEEDLRLAFKVFDADGSGDISAAELAHVLHGLGEKATVQQCRRMIEGVDKNGDGLISFDEFKVMMAAGFAAKMA

SEQ ID NO: 64477 - protein, 186 aa, Triticum aestivum
  peptide (1)..(186): Ceres Seq. ID no. 12618541
MPALFRRRSSSKSRSASPPTTPPREEQQEESRQAIGSPARSAEEEMERVFRKFDANGDGRISRPELAALFESLGHAATEDELTRMMFEADADGDGFISLEEFAALNATAPGDDEEDLRLAFKVFDADGSGDISAAELAHVLHGLGEKATVQQCRRMIEGVDKNGDGLISFDEFKVMMAAGFAAKMA

SEQ ID NO: 64478 - DNA, 1451 bp, Triticum aestivum
  misc_feature (1)..(1451): Ceres Seq. ID no. 12618197
aaaaagaaaaaatcaagctcccgtcgaaaagaagaaaggaaaaaacacagctctcacaccccgcctcggccgcgtctaaaaccctagcccccgccgccggcgagcgacgagatgatggaccagcggtggcgcccgacggtgaacgagcgggagttcatcgagcaggccctccagtcggacctccgcgtcgacggccgccgccccttcgacttccaccccttcgacttccgcaagctcacaatctccttcggcagggaggacggctccgcggaggtgctgctcggcgagacgtgcgtgatgggctatgtgaccgcccaattggtcccgccgtacaaggacaggccgaacgagggcacgctcgccatattcaccgagttctcgcccatggctgatcccgcctttgagccggggcggcccggggaagcggcgattgagctgggtcgtgtcatcgatcgtggcctaagggagagcagagccgtggatatggaatccttgtgtgttgttgcggggaagcatgtctgggcggtgcgcgttgaccttcacattctggacaatggggggaatctcatcgatgcagctaacatcgctgcattggcagctttgtctacattccggaggcctgaatgcacggttggtggggatgatggtcagcaagtcacagtacatgaccctgaggtcatggatccacttcccctaacaattcatcatctccccatagctgtaacctttgcatattttggtgacggtaatatcatggttatcgatccaacatacaaggaagaagctgttatgggaggaaggatgacagctacggttaactcgaatggtgatgtctgtgccattcagaaagctggtggagagggtgtcatgtcaagtgttatcatgcagtgtttaaggattgcttcggttaaagctgctgatatcacaagcaaaataaagaccaaggtcgataagtacactactgataaggcattgcagaaagtaaagcgtactccagcaatagttgctaaagaagttaacgttcctgatgtcgctatgaaggagagcatgcatagtgcaatggaaaaccaaacctcgaaggcacccaatgatgatcagcagataagtgaagattcaccagctgtagcaaatgacaaaaagcatgaggatgtcgagccagtgttgattgaatctaatccagaggtgaaaagtgtgtcaaattctggaagtgctggagagtcagatgaggtcaaggaaagcagatcaccggagagtctagtagatgctgtcaaaccaaaacataaaaggaagaagaaacaacatggcaagagttagattgactgtagccttaaagtcttaactgcatgatggttgcagacacagttagttagctttcttattctcttgatgtgcacatgctacagtggtacattattaaattttaagcaacgagtaatagtgctatcctttgc

SEQ ID NO: 64479 - protein, 400 aa, Triticum aestivum
  peptide (1)..(400): Ceres Seq. ID no. 12618198
MMDQRWRPTVNEREFIEQALQSDLRVDGRRPFDFHPFDFRKLTISFGREDGSAEVLLGETCVMGYVTAQLVPPYKDRPNEGTLAIFTEFSPMADPAFEPGRPGEAAIELGRVIDRGLRESRAVDMESLCVVAGKHVWAVRVDLHILDNGGNLIDAANIAALAALSTFRRPECTVGGDDGQQVTVHDPEVMDPLPLTIHHLPIAVTFAYFGDGNIMVIDPTYKEEAVMGGRMTATVNSNGDVCAIQKAGGEGVMSSVIMQCLRIASVKAADITSKIKTKVDKYTTDKALQKVKRTPAIVAKEVNVPDVAMKESMHSAMENQTSKAPNDDQQISEDSPAVANDKKHEDVEPVLIESNPEVKSVSNSGSAGESDEVKESRSPESLVDAVKPKHKRKKKQHGKS

SEQ ID NO: 64480 - protein, 399 aa, Triticum aestivum
  peptide (1)..(399): Ceres Seq. ID no. 12618199
MDQRWRPTVNEREFIEQALQSDLRVDGRRPFDFHPFDFRKLTISFGREDGSAEVLLGETCVMGYVTAQLVPPYKDRPNEGTLAIFTEFSPMADPAFEPGRPGEAAIELGRVIDRGLRESRAVDMESLCVVAGKHVWAVRVDLHILDNGGNLIDAANIAALAALSTFRRPECTVGGDDGQQVTVHDPEVMDPLPLTIHHLPIAVTFAYFGDGNIMVIDPTYKEEAVMGGRMTATVNSNGDVCAIQKAGGEGVMSSVIMQCLRIASVKAADITSKIKTKVDKYTTDKALQKVKRTPAIVAKEVNVPDVAMKESMHSAMENQTSKAPNDDQQISEDSPAVANDKKHEDVEPVLIESNPEVKSVSNSGSAGESDEVKESRSPESLVDAVKPKHKRKKKQHGKS

SEQ ID NO: 64481 - protein, 338 aa, Triticum aestivum
  peptide (1)..(338): Ceres Seq. ID no. 12618200
MGYVTAQLVPPYKDRPNEGTLAIFTEFSPMADPAFEPGRPGEAAIELGRVIDRGLRESRAVDMESLCVVAGKHVWAVRVDLHILDNGGNLIDAANIAALAALSTFRRPECTVGGDDGQQVTVHDPEVMDPLPLTIHHLPIAVTFAYFGDGNIMVIDPTYKEEAVMGGRMTATVNSNGDVCAIQKAGGEGVMSSVIMQCLRIASVKAADITSKIKTKVDKYTTDKALQKVKRTPAIVAKEVNVPDVAMKESMHSAMENQTSKAPNDDQQISEDSPAVANDKKHEDVEPVLIESNPEVKSVSNSGSAGESDEVKESRSPESLVDAVKPKHKRKKKQHGKS

SEQ ID NO: 64482 - DNA, 1459 bp, Triticum aestivum
  misc_feature (1)..(1459): Ceres Seq. ID no. 13597740
attttctctcgttgtccatttttccccaaacacgcggacgaaggaatcacccctaaaccctcctctccccgccgccgaagccgacatggccgtccaccacctcctccgccgcgggatctctggtgggtctcccctccaccctctgcgcggcctcctcctcgtatcgcaggagctcgggtggcgtcaggcgagctcggcggcggcgggggacgcagtggctgagctgaggggcgcgcgggaggacgtcaagcagctgctgaaggagaagtcctgccatcccatcctggttcgcttgggttggcatgatgctggtacttacgacaagaacattagtgagtggccccagtgtggtggagctaatggtagcttgaggtttgaaattgagttaaaacatgcggctaatgctggtcttgtgaatgctttgaagcttattcaagccatcaaggacaaatatgcaggtgttacttatgcggatctgtttcagcttgccagtgctacagctgtcgaggaagctggtggccccaaaatccccatgatctatggaagggttgatgtttctgcccctgatcaatgcccaccagaggggagactccctgctgctggtccgccttcacctgctgaacatttgcgagaagtattctacagaatgggcctgaatgacaaggaaattgttgcattgtcaggagcacacacacttggacgatcaagaccagagcgcagcggctggggtaaacctgaaacgaaatacactaaaaatggacctggtgcacctggggggcaatcttggacatcacagtggctcaagtttgataacagctatttcaaggatgtcaaagaacgacgagacgaggaccttctagttctgcctactgatgctgtgctctttgaggattcatcattcaagatttatgctgaaaagtatgctgaggaccaggatacattttttgaagactatgctgaagctcatgctaaattgagcaatcttgggtctaagtttgaccctcctaagggtgtatcactagactagctgatatttgctgctgatgaactgcattttggtgagtgaagatgacaaggctctgtttcttcaaactatttttgaggtgtaacaaattcggatccactgaagcagtattttgagttgtgtgctccattaccagaaataaaagcagcattggacagttcccggaccgaacatttatgatacttacatgttgtatcttcaaggtgatcaaatataaaacaatactaccaggctgttgcccctttgcgatatgtctgaaacagaacggtgcctagcaagcacactatgggatattttatttatctttttgtttgatcnnnaaaaaaaaaaaaaaaaaaaaaaaaaaaaaaaaaaaaaaaaaaaaaaaaaaaaaaaaaaaggaaaaaaaaaaaaaaaaaggtttttcaatcccgccaacctcgagggggggcccgg

SEQ ID NO: 64483 - protein, 341 aa, Triticum aestivum
  peptide (1)..(341): Ceres Seq. ID no. 13597741
FSLVVHFSPNTRTKESPLNPPLPAAEADMAVHHLLRRGISGGSPLHPLRGLLLVSQELGWRQASSAAAGDAVAELRGAREDVKQLLKEKSCHPILVRLGWHDAGTYDKNISEWPQCGGANGSLRFEIELKHAANAGLVNALKLIQAIKDKYAGVTYADLFQLASATAVEEAGGPKIPMIYGRVDVSAPDQCPPEGRLPAAGPPSPAEHLREVFYRMGLNDKEIVALSGAHTLGRSRPERSGWGKPETKYTKNGPGAPGGQSWTSQWLKFDNSYFKDVKERRDEDLLVLPTDAVLFEDSSFKIYAEKYAEDQDTFFEDYAEAHAKLSNLGSKFDPPKGVSLD

SEQ ID NO: 64484 - protein, 313 aa, Triticum aestivum
  peptide (1)..(313): Ceres Seq. ID no. 13597742
MAVHHLLRRGISGGSPLHPLRGLLLVSQELGWRQASSAAAGDAVAELRGAREDVKQLLKEKSCHPILVRLGWHDAGTYDKNISEWPQCGGANGSLRFEIELKHAANAGLVNALKLIQAIKDKYAGVTYADLFQLASATAVEEAGGPKIPMIYGRVDVSAPDQCPPEGRLPAAGPPSPAEHLREVFYRMGLNDKEIVALSGAHTLGRSRPERSGWGKPETKYTKNGPGAPGGQSWTSQWLKFDNSYFKDVKERRDEDLLVLPTDAVLFEDSSFKIYAEKYAEDQDTFFEDYAEAHAKLSNLGSKFDPPKGVSLD

SEQ ID NO: 64485 - DNA, 816 bp, Triticum aestivum
  misc_feature (1)..(816): Ceres Seq. ID no. 13597931
accaaaccccaaacccttctccccttttcttccccaacccttccggcggcggcggcggcgcgttggctctcgctccctccccaccgtctccgatggccctcgtcgccggctcctacgagcgcttcatctggggcttctccctcaaggccctcgccgcctccgccgccgaggaggcccagcccctcgcgccgctcttctcctacccggcccacgcggggcccatccgctgcgtggcggccgcgccgcgggcggggctcgcggcctccggcggcgccgacgactccatccgcctctacgacctgcgcgccgccgccgacctcggcccgcttctcgacccctccgccgccgtctccgcgctcgccttccactccatcggccccgtcccgcgcaacctcctcgccgcctccgacgacggcctgctccacctctacgacgccgacggctttgcgctcctcacctcgctccgcgtcttcccgcggggccgcgaggccgccgacgccctcgccgtgcacccctcgggccgggtcgcgctcgccgtcggccgcgccgggggcctctccatggtcaacctcctccgcggccgccgcagcttcacctgccgcctcgagcgcgccgcctccaccgtcgcctacgccgaggacgccgccggcggtgascgttttktkwtkkyykyykwgkwkwaggtywyyktkcatgactccgaggacgccaggatcatattcmatkwgatgccctkmgacataagagggttctcrccttagcwccatcacwagaactsraawttctgggtactgaactgaaaatcattatccatgt

SEQ ID NO: 64486 - protein, 252 aa, Triticum aestivum
  peptide (1)..(252): Ceres Seq. ID no. 15222233
  misc_feature (218)..(218): Xaa is any aa, unknown or other
  misc_feature (221)..(221): Xaa is any aa, unknown or other
  misc_feature (222)..(222): Xaa is any aa, unknown or other
  misc_feature (223)..(223): Xaa is any aa, unknown or other
  misc_feature (224)..(224): Xaa is any aa, unknown or other
  misc_feature (225)..(225): Xaa is any aa, unknown or other
  misc_feature (226)..(226): Xaa is any aa, unknown or other
  misc_feature (227)..(227): Xaa is any aa, unknown or other
  misc_feature (228)..(228): Xaa is any aa, unknown or other
  misc_feature (229)..(229): Xaa is any aa, unknown or other
  misc_feature (230)..(230): Xaa is any aa, unknown or other
  misc_feature (241)..(241): Xaa is any aa, unknown or other
  misc_feature (242)..(242): Xaa is any aa, unknown or other
  misc_feature (245)..(245): Xaa is any aa, unknown or other
  misc_feature (251)..(251): Xaa is any aa, unknown or other
QTPNPSPLFFPNPSGGGGGALALAPSPPSPMALVAGSYERFIWGFSLKALAASAAEEAQPLAPLFSYPAHAGPIRCVAAAPRAGLAASGGADDSIRLYDLRAAADLGPLLDPSAAVSALAFHSIGPVPRNLLAASDDGLLHLYDADGFALLTSLRVFPRGREAADALAVHPSGRVALAVGRAGGLSMVNLLRGRRSFTCRLERAASTVAYAEDAAGGXRFXXXXXXXXXXHDSEDARIIFXXMPXDIRGFXP

SEQ ID NO: 64487 - protein, 247 aa, Triticum aestivum
  peptide (1)..(247): Ceres Seq. ID no. 15222234
  misc_feature (219)..(219): Xaa is any aa, unknown or other
  misc_feature (221)..(221): Xaa is any aa, unknown or other
  misc_feature (222)..(222): Xaa is any aa, unknown or other
  misc_feature (223)..(223): Xaa is any aa, unknown or other
  misc_feature (224)..(224): Xaa is any aa, unknown or other
  misc_feature (225)..(225): Xaa is any aa, unknown or other
  misc_feature (226)..(226): Xaa is any aa, unknown or other
  misc_feature (227)..(227): Xaa is any aa, unknown or other
  misc_feature (229)..(229): Xaa is any aa, unknown or other
  misc_feature (230)..(230): Xaa is any aa, unknown or other
  misc_feature (231)..(231): Xaa is any aa, unknown or other
  misc_feature (241)..(241): Xaa is any aa, unknown or other
  misc_feature (242)..(242): Xaa is any aa, unknown or other
  misc_feature (243)..(243): Xaa is any aa, unknown or other
  misc_feature (246)..(246): Xaa is any aa, unknown or other
TKPQTLLPFSSPTLPAAAAARWLSLPPHRLRWPSSPAPTSASSGASPSRPSPPPPPRRPSPSRRSSPTRPTRGPSAAWRPRRGRGSRPPAAPTTPSASTTCAPPPTSARFSTPPPPSPRSPSTPSAPSRATSSPPPTTACSTSTTPTALRSSPRSASSRGAARPPTPSPCTPRAGSRSPSAAPGASPWSTSSAAAAASPAASSAPPPPSPTPRTPPAVXVXXXXXXXRXXXMTPRTPGSYXXXCPXT

SEQ ID NO: 64488 - protein, 222 aa, Triticum aestivum
  peptide (1)..(222): Ceres Seq. ID no. 15222235
  misc_feature (188)..(188): Xaa is any aa, unknown or other
  misc_feature (191)..(191): Xaa is any aa, unknown or other
  misc_feature (192)..(192): Xaa is any aa, unknown or other
  misc_feature (193)..(193): Xaa is any aa, unknown or other
  misc_feature (194)..(194): Xaa is any aa, unknown or other
  misc_feature (195)..(195): Xaa is any aa, unknown or other
  misc_feature (196)..(196): Xaa is any aa, unknown or other
  misc_feature (197)..(197): Xaa is any aa, unknown or other
  misc_feature (198)..(198): Xaa is any aa, unknown or other
  misc_feature (199)..(199): Xaa is any aa, unknown or other
  misc_feature (200)..(200): Xaa is any aa, unknown or other
  misc_feature (211)..(211): Xaa is any aa, unknown or other
  misc_feature (212)..(212): Xaa is any aa, unknown or other
  misc_feature (215)..(215): Xaa is any aa, unknown or other
  misc_feature (221)..(221): Xaa is any aa, unknown or other
MALVAGSYERFIWGFSLKALAASAAEEAQPLAPLFSYPAHAGPIRCVAAAPRAGLAASGGADDSIRLYDLRAAADLGPLLDPSAAVSALAFHSIGPVPRNLLAASDDGLLHLYDADGFALLTSLRVFPRGREAADALAVHPSGRVALAVGRAGGLSMVNLLRGRRSFTCRLERAASTVAYAEDAAGGXRFXXXXXXXXXXHDSEDARIIFXXMPXDIRGFXP

SEQ ID NO: 64489 - DNA, 1034 bp, Triticum aestivum
  misc_feature (1)..(1034): Ceres Seq. ID no. 12618176
atagaacatcctaatcgaaaaaatcacccaaccaaccgcctctacaagcgcagcccagatctcggctccttcccttcctcgaaccaagcatcagcaatggcgaccacggcagccgacgccacggccgcggttcccaaggagcagcagcccgccaacggttccgcggccgccaccaccggcggcgagcaggtcacgcgccactccgaggtcggacacaagagcctgctccagagcgacgccctctaccagtacatcctggagacgagcgtgtacccgcgcgagcacgagtgcatgaaggagctccgcgagatcaccgccaaccacccatggaacctgatgacgacgtcggcggacgagggccagttcctcaacatgctgctcaagctcatcggcgccaagaagaccatggagatcggcgtctacaccggctactccctgctcgccaccgcgctcgccatccccgacgacggcaccatcttggccatggacatcaaccgcgagaactacgagctggggctgccgtgcatcgagaaggccggcgtggcgcacaagatcgacttccgcgagggcccggcgctgcccgtcctggacgcgctgctggaggacgaggccaaccacgggaccttcgacttcgtcttcgtggacgccgacaaggacaactacctcaactaccacgagcgcctcatgaagctcgtcaaggtcggcggcctcctcggctacgacaacaccctctggaacggctccgtcgtgctccccgccgacgcccccatgcgcaagtacatccgctactaccgcgacttcgtcctcgagctcaacaaggccctcgccgccgaccagcgcgtcgagatctgccagctccccgtcggcgacggcatcaccctctgccgccgcgccaagtgaaccagagaacccatctccgccgctccgccatagatgccaagaacaagaattaattaattactccccattttgtctttcctgctcgccttctgtactctacatctatcttctgcaattcgtataaagatttctcc

SEQ ID NO: 64490 - protein, 299 aa, Triticum aestivum
  peptide (1)..(299): Ceres Seq. ID no. 12618177
IEHPNRKNHPTNRLYKRSPDLGSFPSSNQASAMATTAADATAAVPKEQQPANGSAAATTGGEQVTRHSEVGHKSLLQSDALYQYILETSVYPREHECMKELREITANHPWNLMTTSADEGQFLNMLLKLIGAKKTMEIGVYTGYSLLATALAIPDDGTILAMDINRENYELGLPCIEKAGVAHKIDFREGPALPVLDALLEDEANHGTFDFVFVDADKDNYLNYHERLMKLVKVGGLLGYDNTLWNGSVVLPADAPMRKYIRYYRDFVLELNKALAADQRVEICQLPVGDGITLCRRAK

SEQ ID NO: 64491 - protein, 267 aa, Triticum aestivum
  peptide (1)..(267): Ceres Seq. ID no. 12618178
MATTAADATAAVPKEQQPANGSAAATTGGEQVTRHSEVGHKSLLQSDALYQYILETSVYPREHECMKELREITANHPWNLMTTSADEGQFLNMLLKLIGAKKTMEIGVYTGYSLLATALAIPDDGTILAMDINRENYELGLPCIEKAGVAHKIDFREGPALPVLDALLEDEANHGTFDFVFVDADKDNYLNYHERLMKLVKVGGLLGYDNTLWNGSVVLPADAPMRKYIRYYRDFVLELNKALAADQRVEICQLPVGDGITLCRRAK

SEQ ID NO: 64492 - protein, 208 aa, Triticum aestivum
  peptide (1)..(208): Ceres Seq. ID no. 12618179
MEPDDDVGGRGPVPQHAAQAHRRQEDHGDRRLHRLLPARHRARHPRRRHHLGHGHQPRELRAGAAVHREGRRGAQDRLPRGPGAARPGRAAGGRGQPRDLRLRLRGRRQGQLPQLPRAPHEARQGRRPPRLRQHPLERLRRAPRRRPHAQVHPLLPRLRPRAQQGPRRRPARRDLPAPRRRRHHPLPPRQVNQRTHLRRSAIDAKNKN

SEQ ID NO: 64493 - DNA, 1612 bp, Triticum aestivum
  misc_feature (1)..(1612): Ceres Seq. ID no. 13655506
agaacatcctaatcgaaaattttccgcaagcaagcaagccgtatatgcacgcattatctcttcttcttcttcttcttcttcttcttcttctacctcttcttctccttctccttgtaggtggcagcgcctaccaagctcttttccgccggtgaccattccagtagtccatcacatgggtcaagacgagcgccagcatccagagctgccggacatggagaaggagctctctgccgacgcggtagcctgcgaccactgcagcggcccacaggcggtggtgtactgccgggccgacagcgccaggctctgcctgccgtgcgaccgccacgtgcacgccgccaacgcggtctgctcccgccacctgcgcgccccgctctgcgccgcatgccgcgcaaccggggccgtcttccgccacgccggtcccgaattcctctgctccaactgcgacttcgggaggagccgggacgccgagctgccgctgcacgaccgctgcacagtccaggggtacacgggacgaccctccgcgcacgacctcgccgctcttctcggggtccccgacttcgacaagccctcggccggcaaagccgacgactgttggtgggccatttgggaggagccccaggtgttcagcctggaggatctcatcgtgcccaccacttctagccatggcttccagcccctcgtcacgccgtcctcgcccaagatccacaactcacccgatggaaagaccaacgatgaggtcatacggcagttacgtgagctcgccgaggtcgacatgggcggcggtcagataacacctcgtgaggaggcagagcaagctgctcatctgttgccttccaggacagagtcacagcacaccactggaaatggcgatttcggcacagataacagccatgaggttgcaaccatgccamcccctagttatgagaacggcggatggaacaataacgattatcatgccctaaatggtgcctgcaagaccgagcacgaacaagagcaggctccagcaagctcagctgaagcatgcttgtcatcgtttgttcagatgtcagaactttgccccagcatgagcaatggtagcatgatggacgatggccagcaggcaaatcctggtactggcatgccaatgcaagctttccccaaaagaagtggctttgatgttgttgctggccctgaccgcgacattgtcatttcccgctataaagaaaagaggaggacaagaagattcgacaaacaggtgcgatatgagtcccgcaaagctcgtgcagacagcaggttgaggatcaaggggcgttttgcaaaggcaaatcagagttaagccttgactttgcagtatattttgcatcttggacagaaggaataacactaattaggagtgagtgcagatgatacataaggcgtgaacattttgtttgccttcagttcggcagatggtagttcatgtacaatctgaataatgtatgttgccaacatatgggctatattaatgttttgaggggagttgttcttagtccaacccttgtatatagtttccatctatgaactctgtaaaagtactacaggcaagtgagagtgacagtatgccatttttgcatggtttagtgaattttgtctc

SEQ ID NO: 64494 - protein, 437 aa, Triticum aestivum
  peptide (1)..(437): Ceres Seq. ID no. 15219746
  misc_feature (304)..(304): Xaa is any aa, unknown or other
EHPNRKFSASKQAVYARIISSSSSSSSSSSTSSSPSPCRWQRLPSSFPPVTIPVVHHMGQDERQHPELPDMEKELSADAVACDHCSGPQAVVYCRADSARLCLPCDRHVHAANAVCSRHLRAPLCAACRATGAVFRHAGPEFLCSNCDFGRSRDAELPLHDRCTVQGYTGRPSAHDLAALLGVPDFDKPSAGKADDCWWAIWEEPQVFSLEDLIVPTTSSHGFQPLVTPSSPKIHNSPDGKTNDEVIRQLRELAEVDMGGGQITPREEAEQAAHLLPSRTESQHTTGNGDFGTDNSHEVATMPXPSYENGGWNNNDYHALNGACKTEHEQEQAPASSAEACLSSFVQMSELCPSMSNGSMMDDGQQANPGTGMPMQAFPKRSGFDVVAGPDRDIVISRYKEKRRTRRFDKQVRYESRKARADSRLRIKGRFAKANQS

SEQ ID NO: 64495 - protein, 380 aa, Triticum aestivum
  peptide (1)..(380): Ceres Seq. ID no. 15219747
  misc_feature (247)..(247): Xaa is any aa, unknown or other
MGQDERQHPELPDMEKELSADAVACDHCSGPQAVVYCRADSARLCLPCDRHVHAANAVCSRHLRAPLCAACRATGAVFRHAGPEFLCSNCDFGRSRDAELPLHDRCTVQGYTGRPSAHDLAALLGVPDFDKPSAGKADDCWWAIWEEPQVFSLEDLIVPTTSSHGFQPLVTPSSPKIHNSPDGKTNDEVIRQLRELAEVDMGGGQITPREEAEQAAHLLPSRTESQHTTGNGDFGTDNSHEVATMPXPSYENGGWNNNDYHALNGACKTEHEQEQAPASSAEACLSSFVQMSELCPSMSNGSMMDDGQQANPGTGMPMQAFPKRSGFDVVAGPDRDIVISRYKEKRRTRRFDKQVRYESRKARADSRLRIKGRFAKANQS

SEQ ID NO: 64496 - protein, 367 aa, Triticum aestivum
  peptide (1)..(367): Ceres Seq. ID no. 15219748
  misc_feature (234)..(234): Xaa is any aa, unknown or other
MEKELSADAVACDHCSGPQAVVYCRADSARLCLPCDRHVHAANAVCSRHLRAPLCAACRATGAVFRHAGPEFLCSNCDFGRSRDAELPLHDRCTVQGYTGRPSAHDLAALLGVPDFDKPSAGKADDCWWAIWEEPQVFSLEDLIVPTTSSHGFQPLVTPSSPKIHNSPDGKTNDEVIRQLRELAEVDMGGGQITPREEAEQAAHLLPSRTESQHTTGNGDFGTDNSHEVATMPXPSYENGGWNNNDYHALNGACKTEHEQEQAPASSAEACLSSFVQMSELCPSMSNGSMMDDGQQANPGTGMPMQAFPKRSGFDVVAGPDRDIVISRYKEKRRTRRFDKQVRYESRKARADSRLRIKGRFAKANQS

SEQ ID NO: 64497 - DNA, 1025 bp, Triticum aestivum
  misc_feature (1)..(1025): Ceres Seq. ID no. 13598648
acccatcccaccacattcaagtcgaagaagctcctcgatctccatcactgcaaccagccacttgagctctgaatctttgaagctcagccagttcgccgcgaccaccgagagcctcaagtttcgccatgtcgagcgccggccagaagcagcagcagcagcagcaggcgaagaagccggcggcggcggaggacgtcgagatcaagaaggtcttctcccgcttcgacacggacggcgacggccggatctcgccgtccgagctggcggccgtgtcgcgcgccatcgcgccgccggccaccgagtccgcgcagggccgcgaggtggcgtccatgatggacgagctcgacaccgaccgcgacggctacgtggacctcggcgagttcgccgccttccacggccgcggccgcgaggagcgcgagctcgacgccgagctgcgcgacgccttcgacgtctacgacatcaacggcgacggccgcatctccgtcgccgagctcagcaaggtcctgagccgcatcggcgagggatgcagcaccgaggagtgcgagaagatgatcgcctccgtcgacgtcgacggcgacggctgcgtcggattcgaggagttcaagaagatgatgaccgccggtgacgccggcgcaccacctcaacccgaagcgatcgccgtgcctgacagcaacaaacccaagaaggagtgatacatgtgcttttgcttgtaaaaaaattgtaatccgagggagcgaattagttgtcagtccctgttggccatagtcttctggtctgaaaaaaaatgggaataaggatcaatgtgcaattgccattgtcgtgctgtacctctacgataacggttgtgtgtgcacggtagcagtactagtactagatattttctccgagtatggtcatcttgctacttcattttcacatgaaaatgaagtgccatgttgatgttgaagggtgataagcatccattatcaatgttacttgtaatcgcattcggcaataaatgtattgtcatcttatgatgtttgctattc

SEQ ID NO: 64498 - protein, 206 aa, Triticum aestivum
  peptide (1)..(206): Ceres Seq. ID no. 13598649
PIPPHSSRRSSSISITATSHLSSESLKLSQFAATTESLKFRHVERRPEAAAAAAGEEAGGGGGRRDQEGLLPLRHGRRRPDLAVRAGGRVARHRAAGHRVRAGPRGGVHDGRARHRPRRLRGPRRVRRLPRPRPRGARARRRAARRLRRLRHQRRRPHLRRRAQQGPEPHRRGMQHRGVREDDRLRRRRRRRLRRIRGVQEDDDRR

SEQ ID NO: 64499 - protein, 187 aa, Triticum aestivum; identical to SEQ ID NO: 56090
  peptide (1)..(187): Ceres Seq. ID no. 13598650

SEQ ID NO: 64500 - protein, 120 aa, Triticum aestivum; identical to SEQ ID NO: 56091
  peptide (1)..(120): Ceres Seq. ID no. 13598651

SEQ ID NO: 64501 - DNA, 1248 bp, Triticum aestivum
  misc_feature (1)..(1248): Ceres Seq. ID no. 13597134
acgagaccattacctagaacgtcctaatcgaaaaccatttctcgcatatatttttcttcccgtttcccgattcaagtcagcggttagggttcggagatctcggcgtcgcatcgcggccatggcgacaagcacgcttagcacagtcatggtgagcaatttgtcgctgaaagcagcactaagagatgtaaaggaattcttttccttttctggtgaccttgtgcatgttgaaatgcaaagtggtgacgagctgtctcaagttgcctacattgcttttaaagataagcaaggagctgagacagccatgcttctgacgggtgccacgatagtcgatatggctgtcatcgtaacaccagccactgattatgagctaccagctgatgttttagctgctctagagcccaaagatgcaaagtcctctgctcttgagaaggcagaggacatcgttgggaccatgctggccaaggggttcattcttggtagggatgcgctcgacaaagcaaaagctttagacgagaagcatcagctcacatcaactgcgactgctcgagtatcttcctttgacaagagaatcggtctgagtgagaagatcagcgttggtacttcagttgtaaatgataaagtaaaggaaatggatcagaaatatctagtttccgagaagactaggtcagcacttgcagctgctgaacagggcgtctctactgctggatctgccatcatgaagaacaggtatgtccttactggagcagcatgggtaactggtgccttcagtaaggttgcaaataccgcgaatgatgtcggggcaaaggcgaaggagaaaatagcggctgagcaggagggcaagaccgtagcggccgggcatgcacaagctgacatgtcggacgctcgtgaaaagcccagggatttggatggtgaagtcacaaagatacatgtctctgaaaaccctgaagatatccccatatctaccgctgcagttttccccattacagtagatgattccagcgatgcgtctccaccaccgcctgctactgctcttcccaagaaaccggaacctgcgcagggattgatactatgatgatctggctgatacatgaatgtaaatagacatatgaggtgggttgtttaattcaggctgtagcgttgtggctgctgtattgtgattcacctgtttgaaggttgaaatttatcaggaccgaaagagtttgggatttgtagcagccattttaattgatcaaacaatattatcatgct

SEQ ID NO: 64502 - protein, 356 aa, Triticum aestivum
  peptide (1)..(356): Ceres Seq. ID no. 13597135
RDHYLERPNRKPFLAYIFLPVSRFKSAVRVRRSRRRIAAMATSTLSTVMVSNLSLKAALRDVKEFFSFSGDLVHVEMQSGDELSQVAYIAFKDKQGAETAMLLTGATIVDMAVIVTPATDYELPADVLAALEPKDAKSSALEKAEDIVGTMLAKGFILGRDALDKAKALDEKHQLTSTATARVSSFDKRIGLSEKISVGTSVVNDKVKEMDQKYLVSEKTRSALAAAEQGVSTAGSAIMKNRYVLTGAAWVTGAFSKVANTANDVGAKAKEKIAAEQEGKTVAAGHAQADMSDAREKPRDLDGEVTKIHVSENPEDIPISTAAVFPITVDDSSDASPPPPATALPKKPEPAQGLIL

SEQ ID NO: 64503 - protein, 317 aa, Triticum aestivum
  peptide (1)..(317): Ceres Seq. ID no. 13597136
MATSTLSTVMVSNLSLKAALRDVKEFFSFSGDLVHVEMQSGDELSQVAYIAFKDKQGAETAMLLTGATIVDMAVIVTPATDYELPADVLAALEPKDAKSSALEKAEDIVGTMLAKGFILGRDALDKAKALDEKHQLTSTATARVSSFDKRIGLSEKISVGTSVVNDKVKEMDQKYLVSEKTRSALAAAEQGVSTAGSAIMKNRYVLTGAAWVTGAFSKVANTANDVGAKAKEKIAAEQEGKTVAAGHAQADMSDAREKPRDLDGEVTKIHVSENPEDIPISTAAVFPITVDDSSDASPPPPATALPKKPEPAQGLIL

SEQ ID NO: 64504 - protein, 308 aa, Triticum aestivum
  peptide (1)..(308): Ceres Seq. ID no. 13597137
MVSNLSLKAALRDVKEFFSFSGDLVHVEMQSGDELSQVAYIAFKDKQGAETAMLLTGATIVDMAVIVTPATDYELPADVLAALEPKDAKSSALEKAEDIVGTMLAKGFILGRDALDKAKALDEKHQLTSTATARVSSFDKRIGLSEKISVGTSVVNDKVKEMDQKYLVSEKTRSALAAAEQGVSTAGSAIMKNRYVLTGAAWVTGAFSKVANTANDVGAKAKEKIAAEQEGKTVAAGHAQADMSDAREKPRDLDGEVTKIHVSENPEDIPISTAAVFPITVDDSSDASPPPPATALPKKPEPAQGLIL

SEQ ID NO: 64505 - DNA, 1766 bp, Triticum aestivum
  misc_feature (1)..(1766): Ceres Seq. ID no. 12626166
caactggtcgagccgagaacacctcgtccctgtcgtcgcctccctccctccccgtccgccgttcgttggctcgtctctcttcttacccacctcgctccctccctccctccctcccggaaatcgcaagattttcaccggcttcccgttgacgtttccgccactgcggcagcacaattcgaaaccctcccgcacactcccctggccctcccccttccgtgcctaggcggcaacgctccttctcgcctcccctcccatctcctttataaccgagcgggcggcccctcccgcgtgaggcaccgaggacgggggcagaaccgcagcgcagccgagccgagaccagaccagacgaaccgcgccgagccctaccctcctccaccaccgggtctccctgcgagggcggaggagcgacatggagccggccgagaagaagccgccggcggtgtccgacctcggcgcctgggggatgaacgtcgtcagctccgtcggcctcatcatggccaacaagcagctcatgtcctccgccggctacgccttctccttcgccaccacgttgaccgggttccacttcaccgtcacggcgctcgtcggatggatttccaaggccaccggctactccgcctccaagcacgtccccctctgggagctcgtctggttctcgctcgtcgccaacgcctccatcaccgggatgaacctcagcctcatgctcaactctgtcgggttctatcagatctccaaattgagcatgattccggtggtttgcttgatggaatgggtactcaacagcaagcactacacaaccaaggttatatcagcagtggttgtcgtcgcagcgggcgtcgggatttgcaccgtcaccgatgtggaggtcaatgctaagggcttcatttgtgcttgcgtggctgtgttctgcacgtcgctgcaacagattacaattggctcctttcagaagaagtacaacattgggtcatttgagctgctgagcaaaactgcaccaatacaggcagtgtcacttattatactgggtccctttgtggattactacctaaatgggcgttggctattgaactacagtttttcaacaggggcaactttcttcatactgctttcatgctccttggctgtcttctgcaacatgagccagtatctctgcatcgggcggttctctgcaacctctttccaggtcctgggccacatgaaaacggtgtgcgtgctgatcctcggctgggttctgttcgactcggctctcaccatcaagaacatactcgggatgctgctcgccatcatgggcatggtggtctatagctgggccatggagtctgagaagaaggccacctcggcgatcccgcggaacaagagcgacatgctggacggggaggacgtgcccctcaagtcgagaacgagcggcattccgctgtcctctgatgacctcgaggaaggcccgatgaagagctagcctgtcgctgttattcattcattcttcttggttcttttgtatgtgtttgatccacaatgtccgccagtccagtcctcgaagctatcgacagtcttgttaattttgcctcttgcttgctgggtggagttccatcataggtgatgacgaccccggccggccggcctcggcgtagatgaccaccacttaggaaatttgtcaaggccgatatgggccgagccatggtgattcgtgatggctgttgttatagacgacagcaaattatacttatataatggaatacaggtgttcccccgttgtaaaaaaacgacaagag

SEQ ID NO: 64506 - protein, 347 aa, Triticum aestivum
  peptide (1)..(347): Ceres Seq. ID no. 12626167
MEPAEKKPPAVSDLGAWGMNVVSSVGLIMANKQLMSSAGYAFSFATTLTGFHFTVTALVGWISKATGYSASKHVPLWELVWFSLVANASITGMNLSLMLNSVGFYQISKLSMIPVVCLMEWVLNSKHYTTKVISAVVVVAAGVGICTVTDVEVNAKGFICACVAVFCTSLQQITIGSFQKKYNIGSFELLSKTAPIQAVSLIILGPFVDYYLNGRWLLNYSFSTGATFFILLSCSLAVFCNMSQYLCIGRFSATSFQVLGHMKTVCVLILGWVLFDSALTIKNILGMLLAIMGMVVYSWAMESEKKATSAIPRNKSDMLDGEDVPLKSRTSGIPLSSDDLEEGPMKS

SEQ ID NO: 64507 - protein, 329 aa, Triticum aestivum
  peptide (1)..(329): Ceres Seq. ID no. 12626168
MNVVSSVGLIMANKQLMSSAGYAFSFATTLTGFHFTVTALVGWISKATGYSASKHVPLWELVWFSLVANASITGMNLSLMLNSVGFYQISKLSMIPVVCLMEWVLNSKHYTTKVISAVVVVAAGVGICTVTDVEVNAKGFICACVAVFCTSLQQITIGSFQKKYNIGSFELLSKTAPIQAVSLIILGPFVDYYLNGRWLLNYSFSTGATFFILLSCSLAVFCNMSQYLCIGRFSATSFQVLGHMKTVCVLILGWVLFDSALTIKNILGMLLAIMGMVVYSWAMESEKKATSAIPRNKSDMLDGEDVPLKSRTSGIPLSSDDLEEGPMKS

SEQ ID NO: 64508 - protein, 319 aa, Triticum aestivum
  peptide (1)..(319): Ceres Seq. ID no. 12626169
MANKQLMSSAGYAFSFATTLTGFHFTVTALVGWISKATGYSASKHVPLWELVWFSLVANASITGMNLSLMLNSVGFYQISKLSMIPVVCLMEWVLNSKHYTTKVISAVVVVAAGVGICTVTDVEVNAKGFICACVAVFCTSLQQITIGSFQKKYNIGSFELLSKTAPIQAVSLIILGPFVDYYLNGRWLLNYSFSTGATFFILLSCSLAVFCNMSQYLCIGRFSATSFQVLGHMKTVCVLILGWVLFDSALTIKNILGMLLAIMGMVVYSWAMESEKKATSAIPRNKSDMLDGEDVPLKSRTSGIPLSSDDLEEGPMKS

SEQ ID NO: 64509 - DNA, 1512 bp, Triticum aestivum
  misc_feature (1)..(1512): Ceres Seq. ID no. 13597710
cagtccccgtcccagtcccaatcctaatcccgcccccaccagcggagcggcgtagccgccgcctcggccgccctcggcgcccgcgcctgagagccggcgacgatggcgaaccgcacggaccccctggcccggagcatccacggcaccaaccctcagaacctggtggagaagatcgtgcgggccaagatctaccagagcaactactggaaggagcagtgcttcggcctcacggcggagaccctggtcgacaaggccatggagctcgaccacaccggcggcacccacggcggcaaccgcaggccgacccccttcctctgcctcgccctcaagatgctccagatccagcccgacaaggaaatcgtcgtcgagttcatcaagaacgaggactacaagtatgtccgggttcttggggccttctacctgcgcctcactggcaccgtcgccgacgtttaccagtacctcgagccgctttacaacgactaccgcaagattaggcaaaagctcagcgatggaaaattcacgctgacacacgttgacgaattcattgacgagctcctgaccaaggactatagctgcgacactgccctcccccgcattcagaaaagatggatccttgaagcttctggaactctagaacctagaagaagtgcacttgaagacgattttgatgaagaggaggaagataaggaggatggacagcctatggacgtagacgagcctaacactcgtgaaaaggaccatcttcgtggaaggagccccaccaaagaacgggatagggaaagggagagggacagagacaggaaacacgaaaggcatcacagggaccgagatcatgacagagatcgggatcatgacagggactatggaagaggccgggaaagagatcgagacagagatagaggccgtgaaagagatagagagagggatagggaacgagaccgtcaccggacccgagatgacgattacaaccgagatcgagaccgggatggcagggaaagggaacgccgggacagagaccgtggcaggcacaggagttgctcaaggagcaggagccgggatcggcgtgaaagagaccgtgaagtgggagagctccgtaagaggcgtggccgtggtagtgccagtcctcctcgagggcgtgccgaggatggtccgagggaggagcctaataagaagagaaaggaaaagaaagagaagaagggcagcgggaacggtccagatcctaatgatccagagattatagagatgaacaagctgcgtgcatcgatagggttgggaccactgaagtagtggcacattgctgtaatgtattttgaagctccaagcttaaaaccaacaaaggattagctagcatttttcttttaacactgcaagcttgtcaaaataccctgtaatgtaactttggcggtttggcctgcttttctggctctaccttccgcggtcttttttgcatttttcttgagacacagtgaaggctgatgaaggaaagcatttgatttcaactgtattgtgttg

SEQ ID NO: 64510 - protein, 394 aa, Triticum aestivum
  peptide (1)..(394): Ceres Seq. ID no. 13597711
MANRTDPLARSIHGTNPQNLVEKIVRAKIYQSNYWKEQCFGLTAETLVDKAMELDHTGGTHGGNRRPTPFLCLALKMLQIQPDKEIVVEFIKNEDYKYVRVLGAFYLRLTGTVADVYQYLEPLYNDYRKIRQKLSDGKFTLTHVDEFIDELLTKDYSCDTALPRIQKRWILEASGTLEPRRSALEDDFDEEEEDKEDGQPMDVDEPNTREKDHLRGRSPTKERDRERERDRDRKHERHHRDRDHDRDRDHDRDYGRGRERDRDRDRGRERDRERDRERDRHRTRDDDYNRDRDRDGRERERRDRDRGRHRSCSRSRSRDRRERDREVGELRKRRGRGSASPPRGRAEDGPREEPNKKRKEKKEKKGSGNGPDPNDPEIIEMNKLRASIGLGPLK

SEQ ID NO: 64511 - protein, 343 aa, Triticum aestivum
  peptide (1)..(343): Ceres Seq. ID no. 13597712
MELDHTGGTHGGNRRPTPFLCLALKMLQIQPDKEIVVEFIKNEDYKYVRVLGAFYLRLTGTVADVYQYLEPLYNDYRKIRQKLSDGKFTLTHVDEFIDELLTKDYSCDTALPRIQKRWILEASGTLEPRRSALEDDFDEEEEDKEDGQPMDVDEPNTREKDHLRGRSPTKERDRERERDRDRKHERHHRDRDHDRDRDHDRDYGRGRERDRDRDRGRERDRERDRERDRHRTRDDDYNRDRDRDGRERERRDRDRGRHRSCSRSRSRDRRERDREVGELRKRRGRGSASPPRGRAEDGPREEPNKKRKEKKEKKGSGNGPDPNDPEIIEMNKLRASIGLGPLK

SEQ ID NO: 64512 - protein, 318 aa, Triticum aestivum
  peptide (1)..(318): Ceres Seq. ID no. 13597713
MLQIQPDKEIVVEFIKNEDYKYVRVLGAFYLRLTGTVADVYQYLEPLYNDYRKIRQKLSDGKFTLTHVDEFIDELLTKDYSCDTALPRIQKRWILEASGTLEPRRSALEDDFDEEEEDKEDGQPMDVDEPNTREKDHLRGRSPTKERDRERERDRDRKHERHHRDRDHDRDRDHDRDYGRGRERDRDRDRGRERDRERDRERDRHRTRDDDYNRDRDRDGRERERRDRDRGRHRSCSRSRSRDRRERDREVGELRKRRGRGSASPPRGRAEDGPREEPNKKRKEKKEKKGSGNGPDPNDPEIIEMNKLRASIGLGPLK

SEQ ID NO: 64513 - DNA, 1396 bp, Triticum aestivum
  misc_feature (1)..(1396): Ceres Seq. ID no. 14313471
atctagaagagcctgccagtctttgattcggctcaacaatggagatggtcctcgccgcagcagcaaactgtaccggtgccttgtcgtccaaccaccccaaaacgttcctcaaatcgcgtcgatcctcgctccaaatgcgggcctgcagatcgggccccgacgcgccgctcgccgtgtcgtccgccgccgcgccggaggagccgcgcccggtgcgcctgggcatcatgggctgcggctccatcgcgcgcaaggtcgcgcgctcaatgctgctcgtccccgccgccgacgtggccgccgtcgccagccgctccgagggcaaggcgcgcctcttcgccgccgacaacggccttcggagcggcacgcgcatccacggctcctacgaggcgctcctcgacgacccggacgtcgacgccgtctacatgccgctccccaccagcctccacgtcaagtgggcgaccgccgccgccgagcggggcaagcacctgctcctcgagaagcccaccgcgccctgcgccgccgacctcgagcccatcctcgccgcctgcgaggccaacggcgtccagttcatggactccaccatgtggatgcaccacccccgcactgccaagatgcgtcagctcgtcgccgatcaggacacaatcggagacgtcagatttataaacaccatggtcagctttctagcaaacgaagatttcctccagaatgacatccgggtaaagccagaccttgatggcctgggtgtgcttggtgacatcgggtggtactgcatccgtggaatcctgtgggctgttgactatgagctgcccaagaatgtggttgctctccatcaccctgtcaagaaccaagccggcgtgctccttgcttgcggcgcatcgctctactgggccgacggcaaggtcgccaccttccactgttctttccttaccaacctgaccatggacctcaccgtcgtcggcaccaacggtactattcatgtcaccgacttggtcatcccgtacgaagagaagtctgctccgttcagcgtcgcctccaagacgaacttcgccgaactctctaccggatgggatccacatccgagcaagcatgttgtcaccacggacctaccccaggaggggctcatggtccaggagttctgtaggctggtgcagggcatcagagatgccggtgtcaagcctgaggggaagtggccgggcatcacccgaaagacacagattgtcgtggatgcagtgaaggcttctattgacaatggatttgagtccgtcgatgttgccagctaaatacaacacataactggtgttcccacgttgtatcttcaccatgataaatctatttactgaaataatttgaacgattcttgtcatattgaggacaatattgcaatgatcaagtaagagct

SEQ ID NO: 64514 - protein, 412 aa, Triticum aestivum
  peptide (1)..(412): Ceres Seq. ID no. 14313472
MEMVLAAAANCTGALSSNHPKTFLKSRRSSLQMRACRSGPDAPLAVSSAAAPEEPRPVRLGIMGCGSIARKVARSMLLVPAADVAAVASRSEGKARLFAADNGLRSGTRIHGSYEALLDDPDVDAVYMPLPTSLHVKWATAAAERGKHLLLEKPTAPCAADLEPILAACEANGVQFMDSTMWMHHPRTAKMRQLVADQDTIGDVRFINTMVSFLANEDFLQNDIRVKPDLDGLGVLGDIGWYCIRGILWAVDYELPKNVVALHHPVKNQAGVLLACGASLYWADGKVATFHCSFLTNLTMDLTVVGTNGTIHVTDLVIPYEEKSAPFSVASKTNFAELSTGWDPHPSKHVVTTDLPQEGLMVQEFCRLVQGIRDAGVKPEGKWPGITRKTQIVVDAVKASIDNGFESVDVAS

SEQ ID NO: 64515 - protein, 410 aa, Triticum aestivum
  peptide (1)..(410): Ceres Seq. ID no. 14313473
MVLAAAANCTGALSSNHPKTFLKSRRSSLQMRACRSGPDAPLAVSSAAAPEEPRPVRLGIMGCGSIARKVARSMLLVPAADVAAVASRSEGKARLFAADNGLRSGTRIHGSYEALLDDPDVDAVYMPLPTSLHVKWATAAAERGKHLLLEKPTAPCAADLEPILAACEANGVQFMDSTMWMHHPRTAKMRQLVADQDTIGDVRFINTMVSFLANEDFLQNDIRVKPDLDGLGVLGDIGWYCIRGILWAVDYELPKNVVALHHPVKNQAGVLLACGASLYWADGKVATFHCSFLTNLTMDLTVVGTNGTIHVTDLVIPYEEKSAPFSVASKTNFAELSTGWDPHPSKHVVTTDLPQEGLMVQEFCRLVQGIRDAGVKPEGKWPGITRKTQIVVDAVKASIDNGFESVDVAS

SEQ ID NO: 64516 - protein, 380 aa, Triticum aestivum
  peptide (1)..(380): Ceres Seq. ID no. 14313474
MRACRSGPDAPLAVSSAAAPEEPRPVRLGIMGCGSIARKVARSMLLVPAADVAAVASRSEGKARLFAADNGLRSGTRIHGSYEALLDDPDVDAVYMPLPTSLHVKWATAAAERGKHLLLEKPTAPCAADLEPILAACEANGVQFMDSTMWMHHPRTAKMRQLVADQDTIGDVRFINTMVSFLANEDFLQNDIRVKPDLDGLGVLGDIGWYCIRGILWAVDYELPKNVVALHHPVKNQAGVLLACGASLYWADGKVATFHCSFLTNLTMDLTVVGTNGTIHVTDLVIPYEEKSAPFSVASKTNFAELSTGWDPHPSKHVVTTDLPQEGLMVQEFCRLVQGIRDAGVKPEGKWPGITRKTQIVVDAVKASIDNGFESVDVAS

SEQ ID NO: 64517 - DNA, 1720 bp, Triticum aestivum
  misc_feature (1)..(1720): Ceres Seq. ID no. 15169627
cgaaaacatctcagccccccgcatccattccaccagcgaacagagagcagaagagcaccacacgctcgccatggacacgtggcacatcttcctcggctcgatcctcctcgccatcccgctgatcctactcctccgcggccgcaagggcggccggctccgcgtcccgcccggcccgccgtccttgccggtgctgggcagcgtcgtgtggctgaccaactcgctcgccgacgttgagcccctgctccggcgcctcttcaagcgctacggccccatcgtgtccctgcgcgtggggtcccgcctctccatcttcgtcgccgaccgccgcctggcccacgcggcgctcgttgagcgcggcgccacgctcgcggaccgccccgcgctcccttcgctcaagctgctgggcgagaacaacaacaccatcacgcgcgccagctacgggcctgtctggcgcctcctccgccgcaacctcgtctccgagacgctgcacccgtcccgcgtccgcctcttcgcgcccgcgcgctcctgggtgcgccgcgtgctggccgagaagctgcgtgatgagtcgtcgtccggcggcgcggccgtcgtggagacgttccagtacgccatgttctgcctcctcgtgctcatgtgcttcggtgagcggctcgacgaggccacggtccgcgcgatcgccgccgcccagcgcgaacttctcatctacaggtcgaggaagatggccatcttctccttcctgccgtcggtgaccaagcatctctaccgcgaccgcctccagaccgtgcacgccatgcagcggaggaagaaggacctgttcgtgccgctgatcaacgctcggcgggagtacagaaaactcggcggcgagcccaagaaagagagcgcgttcgagcactcctacgtcgacgccctgctcgacataaagctccccgaggagggaaaccgcccgctcaccgacgacgagatgatcaacctctgttccgagttcctcgacgccgggaccgacaccacctccaccgggctgcagtggatcatggccgagctggtgaagaacccggccatccaggagaagctctacaaagagatcagcgccacgaagggggacgaccaggacgaggtctcggaggaggacgtccacaagatgccgtacctcaaggcggtggtcctcgagggcctccggaagcacccaccggcgcacttcgtgctgccgcacaaggcggcggcggacatggagatcggcggatacctgattcccaagggggcgacgatgaacttcatggtggccgagatgagcagggacgagcgggagtgggagaagccaacggagttcgtgccagagcggttcctgccaggcggcgcgggcgaagcggtggacgtgaccggcaaccgggagatcaagatgatgccgttcggcgtgggccggaggatctgcgccgggctgggcatcgccatgctccacctggagtacttcgtggccaacatggtgagggagttcgagtggcaggaggtcgccggcgaggaggtggacttcgccgagaagaacgagttcaccgtcgtcatgaagaagccgctgcgcccacgcctcgtgccacgaagggcctgagacaaaatccatctccatcagcaagtagtcaaaatcgaccagtagtccactcctatcgcttcggtcgttcttgtttttagtttactccatgttgataatggttaattagttgctgtacgatag

SEQ ID NO: 64518 - protein, 531 aa, Triticum aestivum
  peptide (1)..(531): Ceres Seq. ID no. 15169628
ENISAPRIHSTSEQRAEEHHTLAMDTWHIFLGSILLAIPLILLLRGRKGGRLRVPPGPPSLPVLGSVVWLTNSLADVEPLLRRLFKRYGPIVSLRVGSRLSIFVADRRLAHAALVERGATLADRPALPSLKLLGENNNTITRASYGPVWRLLRRNLVSETLHPSRVRLFAPARSWVRRVLAEKLRDESSSGGAAVVETFQYAMFCLLVLMCFGERLDEATVRAIAAAQRELLIYRSRKMAIFSFLPSVTKHLYRDRLQTVHAMQRRKKDLFVPLINARREYRKLGGEPKKESAFEHSYVDALLDIKLPEEGNRPLTDDEMINLCSEFLDAGTDTTSTGLQWIMAELVKNPAIQEKLYKEISATKGDDQDEVSEEDVHKMPYLKAVVLEGLRKHPPAHFVLPHKAAADMEIGGYLIPKGATMNFMVAEMSRDEREWEKPTEFVPERFLPGGAGEAVDVTGNREIKMMPFGVGRRICAGLGIAMLHLEYFVANMVREFEWQEVAGEEVDFAEKNEFTVVMKKPLRPRLVPRRA

SEQ ID NO: 64519 - protein, 508 aa, Triticum aestivum
  peptide (1)..(508): Ceres Seq. ID no. 15169629
MDTWHIFLGSILLAIPLILLLRGRKGGRLRVPPGPPSLPVLGSVVWLTNSLADVEPLLRRLFKRYGPIVSLRVGSRLSIFVADRRLAHAALVERGATLADRPALPSLKLLGENNNTITRASYGPVWRLLRRNLVSETLHPSRVRLFAPARSWVRRVLAEKLRDESSSGGAAVVETFQYAMFCLLVLMCFGERLDEATVRAIAAAQRELLIYRSRKMAIFSFLPSVTKHLYRDRLQTVHAMQRRKKDLFVPLINARREYRKLGGEPKKESAFEHSYVDALLDIKLPEEGNRPLTDDEMINLCSEFLDAGTDTTSTGLQWIMAELVKNPAIQEKLYKEISATKGDDQDEVSEEDVHKMPYLKAVVLEGLRKHPPAHFVLPHKAAADMEIGGYLIPKGATMNFMVAEMSRDEREWEKPTEFVPERFLPGGAGEAVDVTGNREIKMMPFGVGRRICAGLGIAMLHLEYFVANMVREFEWQEVAGEEVDFAEKNEFTVVMKKPLRPRLVPRRA

SEQ ID NO: 64520 - protein, 329 aa, Triticum aestivum
  peptide (1)..(329): Ceres Seq. ID no. 15169630
MFCLLVLMCFGERLDEATVRAIAAAQRELLIYRSRKMAIFSFLPSVTKHLYRDRLQTVHAMQRRKKDLFVPLINARREYRKLGGEPKKESAFEHSYVDALLDIKLPEEGNRPLTDDEMINLCSEFLDAGTDTTSTGLQWIMAELVKNPAIQEKLYKEISATKGDDQDEVSEEDVHKMPYLKAVVLEGLRKHPPAHFVLPHKAAADMEIGGYLIPKGATMNFMVAEMSRDEREWEKPTEFVPERFLPGGAGEAVDVTGNREIKMMPFGVGRRICAGLGIAMLHLEYFVANMVREFEWQEVAGEEVDFAEKNEFTVVMKKPLRPRLVPRRA

SEQ ID NO: 64521 - DNA, 675 bp, Triticum aestivum
  misc_feature (1)..(675): Ceres Seq. ID no. 12585873
aaaaaatttcacttttcccgtctccatctcactcagcggcggctgtgggcaacagaaccctagcgagtgaggcgggggcgcggtgcagcgccgcctcctccctccctcccaatctcctccctcgtctccctccctcccagtctcttttccgtccatggacagtggccgtgccgactaggtgagtggtggcagcgccatggagcgcggccgcacaacttcgatgtcggggaggagatgaggaggttcgtgatccctacggagtacctcgggcactgggcgttcgaggagctgctcagggaggccgaggaggagttcgggttccggcacgagggcgccctgcggattccctgtgacgtggaggtgttcgaaggcatcctgaggcttgtgggcgggaagaaggaggccgtgtcctactgctcttcttcggagcatgggatcttgtgcacatgatggtggtggccacttgttttctgtcgtccatttgttcccattcttggttcttggttcttctgagggggaataggaggaagggttcatcttctatgagctttacttgttccattattggttctcgattctttgaaggagaagaggaggaagagtccgtcgtctacaagagagcttcgatgagcttcacagttttacaagaggatgaaacgaaggagtcacatcttt

SEQ ID NO: 64522 - protein, 76 aa, Triticum aestivum
  peptide (1)..(76): Ceres Seq. ID no. 12585874
MMVVATCFLSSICSHSWFLVLLRGNRRKGSSSMSFTCSIIGSRFFEGEEEEESVVYKRASMSFTVLQEDETKESHL

SEQ ID NO: 64523 - protein, 75 aa, Triticum aestivum
  peptide (1)..(75): Ceres Seq. ID no. 12585875
MVVATCFLSSICSHSWFLVLLRGNRRKGSSSMSFTCSIIGSRFFEGEEEEESVVYKRASMSFTVLQEDETKESHL

SEQ ID NO: 64524 - protein, 71 aa, Triticum aestivum
  peptide (1)..(71): Ceres Seq. ID no. 12585876
MRRFVIPTEYLGHWAFEELLREAEEEFGFRHEGALRIPCDVEVFEGILRLVGGKKEAVSYCSSSEHGILCT

SEQ ID NO: 64525 - DNA, 1319 bp, Triticum aestivum
  misc_feature (1)..(1319): Ceres Seq. ID no. 15176854
atttcctcctccaccccagtagtagagatcatggcgaggagcgcgcgctcgatggcgttctttgtgctcgtcgccgtggccgtccgagccatctccgccgtcaccgacgggctgttgcccaacggggacttcgcgcaggggccggacaggtcggagatgaacggcacggtggtgaccgcgcgccacgccataccgcgctgggagatctccgggttcgtggagtacatcgcgcccgggcacagggaggaggacatgatcctgccgttgccgcccggcgcgtcggccgtgcggctgggcaacgacgccaccatccggcagcagctcaacgtcagccgccacatgttctattccgtctccttcatggccgcgcggtcgtgcgcccaggccgagaagctcaacgtgtcggtcgaccccgagttcggcctgctcccgatccagaccgtgtacaccagcaccggctgggacacctactcctgggccttcaaggccaggcacggcaccgggtggctgaccatccacaacaccggcgtcgaggaggacccggcgtgcggccccctcctgatcgccgtcgccatcaagaccctctacgccccccaccacaccaagggtaacatgctgaggaacggggacttcgagcaggggccgtacatcttccccggcacccggtggggcgtgctggtgccgccgatcacggaggacgtgcactcgccgctgtcgggctggactgtcatgtcggacaccaaggtggtcaagtacgtggacgcgccgcaccacgcggtgccgcggggcgcgcgcgccgtggagctggtggccggccgggagagcgcgctggtgcaggaggtgcgcaccgtgccggggcggacgtacaggctctccttcgccgtgggggacgccgccaacggctgcagcgggtccctggtggtggaggcgtacgcggggcgggggaccctgagggtgccctatgagtccctcggcacgggcggctccacgcccgcggcgctcgagttcacggccgtcgccaacgagacgcgcgtggtgttccagagctccagccacctcatgaagtccgacgccacgctgtgcgggcccgtcgtcgacgacgtctccctcgtcccggtgcgcgtgcacgctgcccgccggctgcgtttgtagcggatatctatcttttttgcagtagtttcggagttcgttgcgtttgtaccggccggcattcggtgcgccctgtgtctgaccgccgcgctggaggccttacgtgtctcgttagtcgcgtgtctgggtgacacaatatataacagtctccgtgaacggagacttcaacc

SEQ ID NO: 64526 - protein, 383 aa, Triticum aestivum
  peptide (1)..(383): Ceres Seq. ID no. 15176855
ISSSTPVVEIMARSARSMAFFVLVAVAVRAISAVTDGLLPNGDFAQGPDRSEMNGTVVTARHAIPRWEISGFVEYIAPGHREEDMILPLPPGASAVRLGNDATIRQQLNVSRHMFYSVSFMAARSCAQAEKLNVSVDPEFGLLPIQTVYTSTGWDTYSWAFKARHGTGWLTIHNTGVEEDPACGPLLIAVAIKTLYAPHHTKGNMLRNGDFEQGPYIFPGTRWGVLVPPITEDVHSPLSGWTVMSDTKVVKYVDAPHHAVPRGARAVELVAGRESALVQEVRTVPGRTYRLSFAVGDAANGCSGSLVVEAYAGRGTLRVPYESLGTGGSTPAALEFTAVANETRVVFQSSSHLMKSDATLCGPVVDDVSLVPVRVHAARRLRL

SEQ ID NO: 64527 - protein, 373 aa, Triticum aestivum
  peptide (1)..(373): Ceres Seq. ID no. 15176856
MARSARSMAFFVLVAVAVRAISAVTDGLLPNGDFAQGPDRSEMNGTVVTARHAIPRWEISGFVEYIAPGHREEDMILPLPPGASAVRLGNDATIRQQLNVSRHMFYSVSFMAARSCAQAEKLNVSVDPEFGLLPIQTVYTSTGWDTYSWAFKARHGTGWLTIHNTGVEEDPACGPLLIAVAIKTLYAPHHTKGNMLRNGDFEQGPYIFPGTRWGVLVPPITEDVHSPLSGWTVMSDTKVVKYVDAPHHAVPRGARAVELVAGRESALVQEVRTVPGRTYRLSFAVGDAANGCSGSLVVEAYAGRGTLRVPYESLGTGGSTPAALEFTAVANETRVVFQSSSHLMKSDATLCGPVVDDVSLVPVRVHAARRLRL

SEQ ID NO: 64528 - protein, 366 aa, Triticum aestivum
  peptide (1)..(366): Ceres Seq. ID no. 15176857
MAFFVLVAVAVRAISAVTDGLLPNGDFAQGPDRSEMNGTVVTARHAIPRWEISGFVEYIAPGHREEDMILPLPPGASAVRLGNDATIRQQLNVSRHMFYSVSFMAARSCAQAEKLNVSVDPEFGLLPIQTVYTSTGWDTYSWAFKARHGTGWLTIHNTGVEEDPACGPLLIAVAIKTLYAPHHTKGNMLRNGDFEQGPYIFPGTRWGVLVPPITEDVHSPLSGWTVMSDTKVVKYVDAPHHAVPRGARAVELVAGRESALVQEVRTVPGRTYRLSFAVGDAANGCSGSLVVEAYAGRGTLRVPYESLGTGGSTPAALEFTAVANETRVVFQSSSHLMKSDATLCGPVVDDVSLVPVRVHAARRLRL

SEQ ID NO: 64529 - DNA, 1052 bp, Triticum aestivum
  misc_feature (1)..(1052): Ceres Seq. ID no. 14302082
ctgtctctccctgctctctgtttctccgctcctcccagatccgcgcgtgcgttcctgttcacgttcctttccggcggcgtcgtcgtcttcctccagattcgactcgacgatttcccaagcgataatggcggaggaggggcacaaggtggtgctcaacgtgtacgacctcagcaacggcctggcgcgccagctctccacctccttcctcggcaagcccatcgaggccatatggcacacgggcgtggtggtgtacggcaacgagtacttcttcgggggcgggatccaggcggcgccggcgggggccacgcagtacggccgccccgtgcgggtcgtcgacctgggcgtcacccacctcccccgcgaggtcttcgaggactacctccgcgacatcgcgccgcgctacaccgccgccacctacagcctgctcacccacaactgcaacaactttagcaacgaggtcgcgcagttcctcgtcggcgccgggatccccgactacatcctcaacctgcccaacgaggtcatgtccagccccatgggcgccatgatcatgcccatgatccagaacctcgaggccacgctcaggaacaacgccgcgccccagaccacccagttcgtgcccacgccggcctctgtctccgtgccgcagccggtggcttcggccgacaaaacccctagttctacagcagctgccgctgctagtgcggcacctgttggctcttcttccaagaaagaagaagagaagaagatcgagaagcagactccagagaaagccgccgcggcagctccggctatggctgaccctctcgggagcatgagggggaaggtgcaggaggaggtgatgagggagtttgcggcgctcatggccagtgggacactgcgggcgagcgaggccgcggcgctggccatgcgccgggtcatggagcgccacggtgacggcgccagtatgcaggcctagtggcctgaaactattttacacacgttcgatctttgatgcaattgcaaactgatgcttacttgtattgcagcatgaaactcaattttatttgtctgac

SEQ ID NO: 64530 - protein, 317 aa, Triticum aestivum
  peptide (1)..(317): Ceres Seq. ID no. 14302083
CLSLLSVSPLLPDPRVRSCSRSFPAASSSSSRFDSTISQAIMAEEGHKVVLNVYDLSNGLARQLSTSFLGKPIEAIWHTGVVVYGNEYFFGGGIQAAPAGATQYGRPVRVVDLGVTHLPREVFEDYLRDIAPRYTAATYSLLTHNCNNFSNEVAQFLVGAGIPDYILNLPNEVMSSPMGAMIMPMIQNLEATLRNNAAPQTTQFVPTPASVSVPQPVASADKTPSSTAAAAASAAPVGSSSKKEEEKKIEKQTPEKAAAAAPAMADPLGSMRGKVQEEVMREFAALMASGTLRASEAAALAMRRVMERHGDGASMQA

SEQ ID NO: 64531 - protein, 276 aa, Triticum aestivum
  peptide (1)..(276): Ceres Seq. ID no. 14302084
MAEEGHKVVLNVYDLSNGLARQLSTSFLGKPIEAIWHTGVVVYGNEYFFGGGIQAAPAGATQYGRPVRVVDLGVTHLPREVFEDYLRDIAPRYTAATYSLLTHNCNNFSNEVAQFLVGAGIPDYILNLPNEVMSSPMGAMIMPMIQNLEATLRNNAAPQTTQFVPTPASVSVPQPVASADKTPSSTAAAAASAAPVGSSSKKEEEKKIEKQTPEKAAAAAPAMADPLGSMRGKVQEEVMREFAALMASGTLRASEAAALAMRRVMERHGDGASMQA

SEQ ID NO: 64532 - DNA, 922 bp, Triticum aestivum
  misc_feature (1)..(922): Ceres Seq. ID no. 12616626
tcccccgatccaaatccgaaatttttcccctccccgcagcccgctccctcctccgcgcccgcactgtagcccgagcgctcggctccaccgccgtgggctgtagccgccgtcgctgccatggcgaacgacgggtcccccaagtccggtgacatcccgccctaccccgagatgattctcgcggcgatcgaggcgctgggcgacaagaacggctcgagcaagtccgccatctccagctacatcgaggagaagtacgagggcctcccctcggcgcacgcctccctcctcacggccaacctcgccagcatgaaggaggccggcaagctcgccttcgtcaagaacaactacctcaaggctgacgctccctccgccaccccggcaaagcgcggccgcggccgcccgcctaaggaccctaacgcgccgcccaagccgaaggctgcgcccaaggaccccaacacgcccaagcgcggccggggccgcccgcccaaggctaaggatcccatggccgacgccgtcaaggatgccgtcgccaaggcgaccaccggcatgccccggggccgcggccgcccgccgggtccctcctcggccaagaaggccaaggtcgccaaggaggctgcctctccggctcccgcggacggctccgctcctgccaagcgtggccgtgggcgcccacgcaaggtggcggtgtgaggcctgcgtgctgatgcctttcggtctgtgtatctcgctgtggttgcgacggtggtaagctcctaggtgtgaccgtgcttcttcgatttgtgctccgtactaattgttccgtcggcttagttgctcagtatgtgttgtaacctaatcgagatgagtgtgcacaatggatggatggatgtttttagcttcggttgtagttgactgtgctgctgtgagtgaacatgttcattttttt

SEQ ID NO: 64533 - protein, 189 aa, Triticum aestivum; identical to SEQ ID NO: 55791
  peptide (1)..(189): Ceres Seq. ID no. 12616627

SEQ ID NO: 64534 - protein, 172 aa, Triticum aestivum; identical to SEQ ID NO: 55792
  peptide (1)..(172): Ceres Seq. ID no. 12616628

SEQ ID NO: 64535 - protein, 127 aa, Triticum aestivum; identical to SEQ ID NO: 55793
  peptide (1)..(127): Ceres Seq. ID no. 12616629

SEQ ID NO: 64536 - DNA, 1044 bp, Triticum aestivum
  misc_feature (1)..(1044): Ceres Seq. ID no. 13584819
aatcgaaaactctcggtctcgctagggttttgggattttagcctccagcgccgccgccgccgccccccagcgaattcgacaagcccccgagctcgccggatccgatggccgtcacgttctccgacctccacaccgccgacgggctcaaggccctcgaggcgcacctcgccggcaagacctacatctccggcgatgggatcaccaaggacgacgtcaaggtgttcgcggcggtgcccgtgaagcccagcgccgagttcccgaacgctgcccgctggtatgacaccgtcgccgcggctgttgcttcaaggttccctggccagtcctctggggtgagtgcatcatcggctcctgctgcagctgctcctgccgcttccaaggatgaagacgacgatgatgacatggatctgtttggcgatgagaccgaggaggacaagaaagctgcagctgagcgtgaggctgccaagcctgcaaagaagaaagaaagtggcaaatcctctgtcctcatggatatcaagccatgggacgatgagactgacatgaagaagttggaggaggctgtccgcagtgttcaaatggagggtctcacctggggtgcatctaagcttatgcccgtgggttatggcatcaagaagctccagatcatgctgacgatcattgacgacctcgtgtctgtcgacactcttattgaggaagtgctctgcgagacgcccatcaacgagtatgtccagtcgtgtgacatcgttgccttcaacaagatctagaatctttgttcacccacttgttgctgctggattcttggtactgggatctgtcgatctggaaaacattattgtcgtcccatttagttacccctcttacagaaatgctactggttttgtttttgagtgatgccctggtcttgaatgtctgctacctttaaatagttgaactgctgagcggtttgtaatggcgaaacatctatcatgtggagtaaaatcagtctttgataaaaaaaaaaaaaaaaaagcttatcgataccgtcgacctcgagggggggcccggtac

SEQ ID NO: 64537 - protein, 218 aa, Triticum aestivum
  peptide (1)..(218): Ceres Seq. ID no. 13584820
MAVTFSDLHTADGLKALEAHLAGKTYISGDGITKDDVKVFAAVPVKPSAEFPNAARWYDTVAAAVASRFPGQSSGVSASSAPAAAAPAASKDEDDDDDMDLFGDETEEDKKAAAEREAAKPAKKKESGKSSVLMDIKPWDDETDMKKLEEAVRSVQMEGLTWGASKLMPVGYGIKKLQIMLTIIDDLVSVDTLIEEVLCETPINEYVQSCDIVAFNKI

SEQ ID NO: 64538 - protein, 120 aa, Triticum aestivum
  peptide (1)..(120): Ceres Seq. ID no. 13584821
MDLFGDETEEDKKAAAEREAAKPAKKKESGKSSVLMDIKPWDDETDMKKLEEAVRSVQMEGLTWGASKLMPVGYGIKKLQIMLTIIDDLVSVDTLIEEVLCETPINEYVQSCDIVAFNKI

SEQ ID NO: 64539 - DNA, 757 bp, Triticum aestivum
  misc_feature (1)..(757): Ceres Seq. ID no. 12618180
attttggatactagtgttggtctcagagtcctccaccccggacctctctgttcaccgcacacgatcagcagaggcagcggcaaggaagatgacgacgacgacaaggaggagacccttgaaggtccctgagatggcgctgagggtgtgcgtgatccccctcgccttggcctccctgtgggagatggccaccaacaagcaagctaatgacacctacggagagatcagcttctccaacctctccggcttcaagtatttagttttcattaacgctgtcactgccgcctattccgtggtctccatcctgatgtcatccttcaagtccctcgctcgctatgattggctcattttcctcctggatcaggcggcggcgtacctgctggtgacatcgtgctcggcggcggcggagctggtgtacctggcgatggagggcgaccgggaggtgtcgtggggcgaggtgtgctcctacttcggtcggttctgcggcagggccaccgtgtccgtggcgctgcaggccgccgcgctgctctgcttcgtcgcgctctccctcgtctccgccttccgggtcttccgcgagttcgacgcccctggtgctcatgttgattgctcgggggactctgactccaagcaggaaggtagaggatgatccatcatgaacaatcgctgatatttggaccatcttttatgtgtcaatggttgacgatggcgatgcgtccttggttttctttacgaatgctgatttcggggggagaaatgttgt

SEQ ID NO: 64540 - protein, 213 aa, Triticum aestivum
  peptide (1)..(213): Ceres Seq. ID no. 12618181
FWILVLVSESSTPDLSVHRTRSAEAAARKMTTTTRRRPLKVPEMALRVCVIPLALASLWEMATNKQANDTYGEISFSNLSGFKYLVFINAVTAAYSVVSILMSSFKSLARYDWLIFLLDQAAAYLLVTSCSAAAELVYLAMEGDREVSWGEVCSYFGRFCGRATVSVALQAAALLCFVALSLVSAFRVFREFDAPGAHVDCSGDSDSKQEGRG

SEQ ID NO: 64541 - protein, 184 aa, Triticum aestivum
  peptide (1)..(184): Ceres Seq. ID no. 12618182
MTTTTRRRPLKVPEMALRVCVIPLALASLWEMATNKQANDTYGEISFSNLSGFKYLVFINAVTAAYSVVSILMSSFKSLARYDWLIFLLDQAAAYLLVTSCSAAAELVYLAMEGDREVSWGEVCSYFGRFCGRATVSVALQAAALLCFVALSLVSAFRVFREFDAPGAHVDCSGDSDSKQEGRG

SEQ ID NO: 64542 - protein, 170 aa, Triticum aestivum
  peptide (1)..(170): Ceres Seq. ID no. 12618183
MALRVCVIPLALASLWEMATNKQANDTYGEISFSNLSGFKYLVFINAVTAAYSVVSILMSSFKSLARYDWLIFLLDQAAAYLLVTSCSAAAELVYLAMEGDREVSWGEVCSYFGRFCGRATVSVALQAAALLCFVALSLVSAFRVFREFDAPGAHVDCSGDSDSKQEGRG

SEQ ID NO: 64543 - DNA, 1063 bp, Triticum aestivum
  misc_feature (1)..(1063): Ceres Seq. ID no. 12617472
aaaaccactacagcgtagtgagcggcccagatcagccgaagtcagccggcaagctccacgggaaaccctagctactcccggccggccgccgccgccgcgtctgccgtccacgctccacccgcgggagctcgcctcctcctccacccgctacccctcgaggccactccggacggccatggcgcagagggccgcgggcggccttctccgacggtccatcgggctcgcgccgccgacaaccgcgagggccctgagcaccagcgccaccacgccggccgcggcggcagagggagaggcggcggccaaggcgaggaggaacaagaagaagaacctgttcgacgtggcgcagttcctgccggactggggcgtcggctacagggttgccaagaccacctggcgcgacgtctcctaccagatcaccaagatcaacctctacaaggatggccgccacgggaaggcgtgggggattcggcacaaggccggcgtgcaagcagccgatgctccgataagaatcagcggggttaacaaacgtggttggaagtacataaaggcgtcgttgcaagatatccctggagcagagccgccagccgtcaccgctgcttagtcagttacccggctagatatttatttagcaggtggcaaaactggtccctgtagaagcttagtgctgaaactattcagaaggttgactgatctaccatctccatcatttcataattctcctttgtctctgcaagtgttttttttttgacccggaacaattcattccattactaaactggctcagcaatgtctctgcaaggggttaaacataggtgaaagggttttagcgcgggcgtgaggccaggttgtcgtggcctccatgcttgttactgaagctaaagatgatgtagcgtcaattttttttttttggttttttctttttgcaatgcctcatttccatcagaagcaagcgcttcaccaacaatgagaatcgatcataaggtgattctcgccatcgaagccgaggacactgcgttcctagaatgcaaattatgatcccgtgtaataaaagttttctcttgcg

SEQ ID NO: 64544 - protein, 199 aa, Triticum aestivum
  peptide (1)..(199): Ceres Seq. ID no. 12617473
KPLQRSERPRSAEVSRQAPRETLATPGRPPPPRLPSTLHPRELASSSTRYPSRPLRTAMAQRAAGGLLRRSIGLAPPTTARALSTSATTPAAAAEGEAAAKARRNKKKNLFDVAQFLPDWGVGYRVAKTTWRDVSYQITKINLYKDGRHGKAWGIRHKAGVQAADAPIRISGVNKRGWKYIKASLQDIPGAEPPAVTAA

SEQ ID NO: 64545 - protein, 141 aa, Triticum aestivum
  peptide (1)..(141): Ceres Seq. ID no. 12617474
MAQRAAGGLLRRSIGLAPPTTARALSTSATTPAAAAEGEAAAKARRNKKKNLFDVAQFLPDWGVGYRVAKTTWRDVSYQITKINLYKDGRHGKAWGIRHKAGVQAADAPIRISGVNKRGWKYIKASLQDIPGAEPPAVTAA

SEQ ID NO: 64546 - DNA, 961 bp, Triticum aestivum
  misc_feature (1)..(961): Ceres Seq. ID no. 13585404
ctatcctctctctctctccagcatcctctttctctccttcctcccatggagtcggcatagccactagccggttctgcccgttgagagcgctcatataccctccacacctccagatctgtggcctgttgtagtctctgcctcctcagaacaacaagcccccgcagccgcgcccggatcggatggacaccgccatgcaccccgccggcgccgacgacggcggcctcgccgacccgctcaccggcaacgcgggcacaggcaccgagggcattatttgtggtatgccagacttcaagatgggtggaaagaggggcgatgaatctgcccctactgatgctggtgatgaagacggcgaagatgatgacggggatgaggatggtgacttcgcggagggcgaagaggaaatctcggaaggagaggagtatgacaaccccaaggccagtgacgccaagaagaaacaaataggcgagggtgaggagaatggcgaggatgatgaggaagaacaagaggagcaggagggtggaggaggtgacgacgatgatgatgacgacgacaacgacgatgacaatgaggacgacgacgatgatgacgatgatgtcgctgctgaagacgatggagatggagtagaagaggaggatgatgacgatgatgaggaggaggacgatgaggactcgctccagcccccgaagaagaggaagaagtgaagcccttcgacgcggctgctttagtcaccatgcgacgagatgtgcctgtccttcactgtgttctggaaactttccttagagttaaaaatgcccccacacgatcacaatgtgtgggcttgtaggagcgattagagggaactttgttgtcaccgttgctttgcttctgtggagttgatcgaacagatgtttcgctaacataattgtacctgagtggcgaaagcctcaagatttgaatatgtcagtcaactctttttatctcc

SEQ ID NO: 64547 - protein, 173 aa, Triticum aestivum
  peptide (1)..(173): Ceres Seq. ID no. 13585405
MDTAMHPAGADDGGLADPLTGNAGTGTEGIICGMPDFKMGGKRGDESAPTDAGDEDGEDDDGDEDGDFAEGEEEISEGEEYDNPKASDAKKKQIGEGEENGEDDEEEQEEQEGGGGDDDDDDDDNDDDNEDDDDDDDDVAAEDDGDGVEEEDDDDDEEEDDEDSLQPPKKRKK

SEQ ID NO: 64548 - protein, 169 aa, Triticum aestivum
  peptide (1)..(169): Ceres Seq. ID no. 13585406
MHPAGADDGGLADPLTGNAGTGTEGIICGMPDFKMGGKRGDESAPTDAGDEDGEDDDGDEDGDFAEGEEEISEGEEYDNPKASDAKKKQIGEGEENGEDDEEEQEEQEGGGGDDDDDDDDNDDDNEDDDDDDDDVAAEDDGDGVEEEDDDDDEEEDDEDSLQPPKKRKK

SEQ ID NO: 64549 - protein, 140 aa, Triticum aestivum
  peptide (1)..(140): Ceres Seq. ID no. 13585407
MPDFKMGGKRGDESAPTDAGDEDGEDDDGDEDGDFAEGEEEISEGEEYDNPKASDAKKKQIGEGEENGEDDEEEQEEQEGGGGDDDDDDDDNDDDNEDDDDDDDDVAAEDDGDGVEEEDDDDDEEEDDEDSLQPPKKRKK

SEQ ID NO: 64550 - DNA, 921 bp, Triticum aestivum
  misc_feature (1)..(921): Ceres Seq. ID no. 12617475
cccttggaatggttacacaacttccctcacaggatgagacttctatcagcaagaaacaactcctggcacgtcttgatgtttgcatgggcggaagggttgctgaagagcttatatttggggaagaaaatgttactactggtgccagaaatgatcttcatactgcaacagagctcgcccagtatatggtatcaaactgtgggatgagtaatgctattggtcctgtgcatgtaaaagaacgaccaagtgttgacatgcaatcaagaatagatgcagaggtgggcagactcctaagagaagcttatgaacgggtgacacatttactgaagaagcatgagaagcaattacatgctttagcgaatgctctgctggagcgtgaaactctgacggcagatgagatcaacaaagtagttcatccctaccaagaagaaccacagcttcccttccaagaagaagcctttgcgctaacttagacatattaccttttgttgcatcaaggtggtagtttcgactgtaaatccgtgtacagtaattggaaagtcattactcaccattttgcgaagtggggtaaacttgggtgcatttccttctcggcaccattaggctggcatgcaggaaattgaaagatgagattatcggagggtgttgcatgattgtgagctattgacatatctgtgacgcggcgagactcaccagcgcctgccttttacccaacatgaagcccctgagctgagaagtgcatcacgcttggtttagatagggaagcaatacagatgtgacattgcatattttggattctagattatttcttcttttcaattctatgcctcgccattgtttaaaggaaaccgtacatataactgtctcattctattgcgtcgtaacatgttacgcggatgtggtcaattattagttggcatgttc

SEQ ID NO: 64551 - protein, 155 aa, Triticum aestivum
  peptide (1)..(155): Ceres Seq. ID no. 12617476
LGMVTQLPSQDETSISKKQLLARLDVCMGGRVAEELIFGEENVTTGARNDLHTATELAQYMVSNCGMSNAIGPVHVKERPSVDMQSRIDAEVGRLLREAYERVTHLLKKHEKQLHALANALLERETLTADEINKVVHPYQEEPQLPFQEEAFALT

SEQ ID NO: 64552 - protein, 153 aa, Triticum aestivum
  peptide (1)..(153): Ceres Seq. ID no. 12617477
MVTQLPSQDETSISKKQLLARLDVCMGGRVAEELIFGEENVTTGARNDLHTATELAQYMVSNCGMSNAIGPVHVKERPSVDMQSRIDAEVGRLLREAYERVTHLLKKHEKQLHALANALLERETLTADEINKVVHPYQEEPQLPFQEEAFALT

SEQ ID NO: 64553 - protein, 128 aa, Triticum aestivum
  peptide (1)..(128): Ceres Seq. ID no. 12617478
MGGRVAEELIFGEENVTTGARNDLHTATELAQYMVSNCGMSNAIGPVHVKERPSVDMQSRIDAEVGRLLREAYERVTHLLKKHEKQLHALANALLERETLTADEINKVVHPYQEEPQLPFQEEAFALT

SEQ ID NO: 64554 - DNA, 849 bp, Triticum aestivum
  misc_feature (1)..(849): Ceres Seq. ID no. 13598517
gtattcttccccgagcgagtggcgcacctctggaattgttttctgttttctcctccccacaatgtccatctccgggaacggccacctccccgccgccgccgcctccaccggcctgccggaccactcctccgcctccgcgtcagactccgaggccgagggagacgccgactacctccccatctccggcgccgcctcggacaccgacagcgaccccgaccccgatctcgcatctcaccgccgcctcgacgcggtcgacaacggcgtctccgagctggatatcgcctccgacgacgaagaaagcgacgaagaagaaggcacgggcgcgacggaggccgcggcctccttggacgacgagcgtaggcggcgcgcccagctgcccgcgggcgccgcggcccggatcgtggacgcgatgcgcggcgtggcgttccccggcgcgccgccgccctgggcgggcgccgtccccgacgagcagtggctcgagcgcctccgctccctccgcggcggccgcgactagacagagcagatgagttctcgacccacagatcactgtgagttgtgagagcttctgatccgcctttgtactgaaggaacattcctgtatcgccatagatccagtagaattgcctctcgctgcttcggaatgaaactcgtgcgcagatcatcgccgatgagatcagtgatcaacactggacgctgttcttgtgtatggattttatggaggtttggtttttttttcgaaaaaaaaaaaaaaaaaaaaaaaaaaaaaaaaaaaaaaaaaaaaaaaaaaaaaaaaagaaaaaaaaaaaaaaaaaggcttatcaataccgtcaacctcaagggggggcccgg

SEQ ID NO: 64555 - protein, 174 aa, Triticum aestivum
  peptide (1)..(174): Ceres Seq. ID no. 13598518
ILPRASGAPLELFSVFSSPQCPSPGTATSPPPPPPPACRTTPPPPRQTPRPRETPTTSPSPAPPRTPTATPTPISHLTAASTRSTTASPSWISPPTTKKATKKKARARRRPRPPWTTSVGGAPSCPRAPRPGSWTRCAAWRSPARRRPGRAPSPTSSGSSASAPSAAAATRQSR

SEQ ID NO: 64556 - protein, 170 aa, Triticum aestivum
  peptide (1)..(170): Ceres Seq. ID no. 13598519
YSSPSEWRTSGIVFCFLLPTMSISGNGHLPAAAASTGLPDHSSASASDSEAEGDADYLPISGAASDTDSDPDPDLASHRRLDAVDNGVSELDIASDDEESDEEEGTGATEAAASLDDERRRRAQLPAGAAARIVDAMRGVAFPGAPPPWAGAVPDEQWLERLRSLRGGRD

SEQ ID NO: 64557 - protein, 150 aa, Triticum aestivum
  peptide (1)..(150): Ceres Seq. ID no. 13598520
MSISGNGHLPAAAASTGLPDHSSASASDSEAEGDADYLPISGAASDTDSDPDPDLASHRRLDAVDNGVSELDIASDDEESDEEEGTGATEAAASLDDERRRRAQLPAGAAARIVDAMRGVAFPGAPPPWAGAVPDEQWLERLRSLRGGRD

SEQ ID NO: 64558 - DNA, 982 bp, Triticum aestivum
  misc_feature (1)..(982): Ceres Seq. ID no. 12598739
gaagaaatcagatcaaagggggaaggaagcgaggcacagggcaccgcactgctccacttcgccttctcctccaagccacgaactccggcgactccaccacaagcccccgagcagcccgccctctccgaccaccgccatgtcgaggcgcggcgactgggtctacgagaacaacggcgggacctgcgtggccatcgccggcgcggactactgcgtggtcgccgccgacacccgcctctccgtcggatacaacatcctcacgcgcgagcactccaagatctgcgagctggccgataaatgtgtaatagcatcttctggcttccaaggtgacatcaaagctctacagaagaacttagctgccagggaactgctataccagcaccagcacaataaaaggatgagctgcccagcaatggcacaattgctctccaacaccctgtactacaagcgattcttcccatactatgctttcaacgtgcttggtgggcttgacagtgaagggaaaggatgtgtctactcatatgatgctgttgggtcctacgagaggaccggttacagtgctcagggatcaggatctaccttgatcatgccagtgctggacaaccagctaaaatcacctagtccactattagttcctgcaagagatgctgtcacccctttgtccgagtcagaggcggtcgacctagttaaggatgtctttgcatctgcaactgagagggacatctacaccggggacaaggtggagattgtagtcatcaacaaagctgggactaggcgcgagtacatcgagttgaggaaggactaagtttgcgccgcggttgccatttgcttccctagatatagggaattattatgcccagagctgctacttgatagaaacacccgtgcttgctttgcttccgtgatgatgtaccaggatcgacccagcttgctttgttaaactactttgttgtttcatgcatatgagatgctgagctatttgttg

SEQ ID NO: 64559 - protein, 266 aa, Triticum aestivum
  peptide (1)..(266): Ceres Seq. ID no. 12598740
KKSDQRGKEARHRAPHCSTSPSPPSHELRRLHHKPPSSPPSPTTAMSRRGDWVYENNGGTCVAIAGADYCVVAADTRLSVGYNILTREHSKICELADKCVIASSGFQGDIKALQKNLAARELLYQHQHNKRMSCPAMAQLLSNTLYYKRFFPYYAFNVLGGLDSEGKGCVYSYDAVGSYERTGYSAQGSGSTLIMPVLDNQLKSPSPLLVPARDAVTPLSESEAVDLVKDVFASATERDIYTGDKVEIVVINKAGTRREYIELRKD

SEQ ID NO: 64560 - protein, 221 aa, Triticum aestivum
  peptide (1)..(221): Ceres Seq. ID no. 12598741
MSRRGDWVYENNGGTCVAIAGADYCVVAADTRLSVGYNILTREHSKICELADKCVIASSGFQGDIKALQKNLAARELLYQHQHNKRMSCPAMAQLLSNTLYYKRFFPYYAFNVLGGLDSEGKGCVYSYDAVGSYERTGYSAQGSGSTLIMPVLDNQLKSPSPLLVPARDAVTPLSESEAVDLVKDVFASATERDIYTGDKVEIVVINKAGTRREYIELRKD

SEQ ID NO: 64561 - protein, 135 aa, Triticum aestivum
  peptide (1)..(135): Ceres Seq. ID no. 12598742
MSCPAMAQLLSNTLYYKRFFPYYAFNVLGGLDSEGKGCVYSYDAVGSYERTGYSAQGSGSTLIMPVLDNQLKSPSPLLVPARDAVTPLSESEAVDLVKDVFASATERDIYTGDKVEIVVINKAGTRREYIELRKD

SEQ ID NO: 64562 - DNA, 1157 bp, Triticum aestivum
  misc_feature (1)..(1157): Ceres Seq. ID no. 13579986
aggattggagaaaagcagagtgggccgacgtcgtcgccctccgcaggtcaagctcggcagctccagctccacctcgaaaccgaagccgccgccgccgccgccggcagcggaggaggaggaggaggaggagggagatggcgtcgggcctggtgacggaggacgtgacggtggggcggctggtccggatccggcgcacggtgatgcacatgctgcgcgaccggggctacctggtggtggagcacgagctgtccatgacccgccgcgacttccagcgcaagtacggcgagtccttccaccgcgaggacatgctcatcaacaagtgcaagaagaacgaccccaacgaccagatatacgtgttcttcccgaacgacgagaaggtggggatgaagcacatcaagaagtacgtcgaaatgatgaacgccgagaaagtctccagggctatattggtcgtgcagcagaacctcaccccatttgcaaaatcgtttctccaagaactggagccaaagatccacttggaggttttccaggacgcggaaatgcttataaatatcaaggaacatgttcttgttccggagcatcaagtgcttgctaatgaggaaaagaagacgttattggcgcggtacactttaaaggaaactcagctaccaagaatacagattacagatcccattgcgaggtactacggcctcaaacgagggcaggtggtgaagatcatcaggcccagcgagacagccggcagatacgtcacatatcgctatgttgtatgacagtacacaagtgaggtgaaggtcaaggaacctaaaacatggtgatttttgcagttacacacgacacacatacccattcgcttggagaaaaacggcatcgcttcaagcaaccattcttaaggatcgcatgcctgttacgtaaaaggattcttaataagctgagtgtatggagcataagcaaaatcctcatgttgtaccattgtttcgtgaactttatagaacatacagaaccgaaactagtgtgctgagagcaatgaaaggctctgcagttctggctgctacatcatttgaacgaaccattcttgaaactccatgattctggtcctgacgttgtgtgagtgtgtgtgtgtggtggtgatatgcgtgatgaacttgtttgcaatatacccc

SEQ ID NO: 64563 - protein, 254 aa, Triticum aestivum
  peptide (1)..(254): Ceres Seq. ID no. 13579987
DWRKAEWADVVALRRSSSAAPAPPRNRSRRRRRRQRRRRRRRREMASGLVTEDVTVGRLVRIRRTVMHMLRDRGYLVVEHELSMTRRDFQRKYGESFHREDMLINKCKKNDPNDQIYVFFPNDEKVGMKHIKKYVEMMNAEKVSRAILVVQQNLTPFAKSFLQELEPKIHLEVFQDAEMLINIKEHVLVPEHQVLANEEKKTLLARYTLKETQLPRIQITDPIARYYGLKRGQVVKIIRPSETAGRYVTYRYVV

SEQ ID NO: 64564 - protein, 210 aa, Triticum aestivum
  peptide (1)..(210): Ceres Seq. ID no. 13579988
MASGLVTEDVTVGRLVRIRRTVMHMLRDRGYLVVEHELSMTRRDFQRKYGESFHREDMLINKCKKNDPNDQIYVFFPNDEKVGMKHIKKYVEMMNAEKVSRAILVVQQNLTPFAKSFLQELEPKIHLEVFQDAEMLINIKEHVLVPEHQVLANEEKKTLLARYTLKETQLPRIQITDPIARYYGLKRGQVVKIIRPSETAGRYVTYRYVV

SEQ ID NO: 64565 - protein, 196 aa, Triticum aestivum
  peptide (1)..(196): Ceres Seq. ID no. 13579989
GLEKSRVGRRRRPPQVKLGSSSSTSKPKPPPPPPAAEEEEEEEGDGVGPGDGGRDGGAAGPDPAHGDAHAARPGLPGGGARAVHDPPRLPAQVRRVLPPRGHAHQQVQEERPQRPDIRVLPERREGGDEAHQEVRRNDERRESLQGYIGRAAEPHPICKIVSPRTGAKDPLGGFPGRGNAYKYQGTCSCSGASSAC

SEQ ID NO: 64566 - DNA, 1164 bp, Triticum aestivum
  misc_feature (1)..(1164): Ceres Seq. ID no. 15173077
atcatccacacatacgaacacacacaacattgtcatttagttgttcttgcttgctgctgctgaaatacctgcatgctagcatcccctgctcagaagaaacagaggtctggaggtctgtcttttcatcctggttttgttattggttcgtcgaggagaagatagtttcttggaggtgcaagctaggcgctgaggaggtcggacatggaggatgtggccaagttcttgtttgggatttccgggaatgtcattgctctatttctcttcctatccccggtgcctactttctggaggatcattcggaacaaatccacagaggaattctccggggtgccatacaacatgacgctcctcaactgcctcctctccgcctggtacgggctgccgttcgtgtccccgaacaacgtcctggtgtcgacgatcaacggcgtgggcgcggcgatcgagacggtgtacgtggtgatcttcctcgtcttcgcgtcgaacaagaaggcgaggctccggacgctcggcctggcgtcggccgtcgcgacggtgttcgcggtcgtggcgctcgtctcgatgctcgtcctgcacggcccggcacgcaagctcctcgccggcctcgccatgaccgtcttctccatctgcatgtacgcctcgcccctctccatcatgaggatggtgatcaagacgaagagcgtggagtacatgccgttcctgctgtcgctggcggtgttcctgtgcggcacgtcgtggttcatttacggcttgctcggccacgacctcttcgtcacgatccccaacgggtgcgggagcgtcctgggcgccgcgcagctcatcctttacgccatctaccggaacaacaagggcaacgccgcggccggcgctggcaagctacagggcgacgacgtggagatgtccgtcgacggcaggaacggcaaggtcgccgatagcgacgatcgcggtgcggcggggtcgacgaagaccggcaagatggtcggccaggtttagctagatcggtcgaagatcagccatattatgtgctttttctaccagtatcttgttactgcaagaatcccgcgtgttggccttgcgtaattagccaatataggactagcctttaattgccaccttgtacctgtttgtaagctatgtattgcatacgtgtactaatgtctcaagctg

SEQ ID NO: 64567 - protein, 309 aa, Triticum aestivum
  peptide (1)..(309): Ceres Seq. ID no. 15173078
HPHIRTHTTLSFSCSCLLLLKYLHASIPCSEETEVWRSVFSSWFCYWFVEEKIVSWRCKLGAEEVGHGGCGQVLVWDFRECHCSISLPIPGAYFLEDHSEQIHRGILRGAIQHDAPQLPPLRLVRAAVRVPEQRPGVDDQRRGRGDRDGVRGDLPRLRVEQEGEAPDARPGVGRRDGVRGRGARLDARPARPGTQAPRRPRHDRLLHLHVRLAPLHHEDGDQDEERGVHAVPAVAGGVPVRHVVVHLRLARPRPLRHDPQRVRERPGRRAAHPLRHLPEQQGQRRGRRWQATGRRRGDVRRRQERQGRR

SEQ ID NO: 64568 - protein, 262 aa, Triticum aestivum
  peptide (1)..(262): Ceres Seq. ID no. 15173079
MEDVAKFLFGISGNVIALFLFLSPVPTFWRIIRNKSTEEFSGVPYNMTLLNCLLSAWYGLPFVSPNNVLVSTINGVGAAIETVYVVIFLVFASNKKARLRTLGLASAVATVFAVVALVSMLVLHGPARKLLAGLAMTVFSICMYASPLSIMRMVIKTKSVEYMPFLLSLAVFLCGTSWFIYGLLGHDLFVTIPNGCGSVLGAAQLILYAIYRNNKGNAAAGAGKLQGDDVEMSVDGRNGKVADSDDRGAAGSTKTGKMVGQV

SEQ ID NO: 64569 - protein, 216 aa, Triticum aestivum
  peptide (1)..(216): Ceres Seq. ID no. 15173080
MTLLNCLLSAWYGLPFVSPNNVLVSTINGVGAAIETVYVVIFLVFASNKKARLRTLGLASAVATVFAVVALVSMLVLHGPARKLLAGLAMTVFSICMYASPLSIMRMVIKTKSVEYMPFLLSLAVFLCGTSWFIYGLLGHDLFVTIPNGCGSVLGAAQLILYAIYRNNKGNAAAGAGKLQGDDVEMSVDGRNGKVADSDDRGAAGSTKTGKMVGQV

SEQ ID NO: 64570 - DNA, 927 bp, Triticum aestivum
  misc_feature (1)..(927): Ceres Seq. ID no. 15226980
atttccattcgcatccccggctagccaaccctgttctcccgctcgcgcatctcaggctcctgcgttgcaggaaggaactcactcaagtatggacgccctctcctgctttgcgccgcctgcgatgctctcccggtcctttgcggacgcggccatcgcgcgcgcgctccacttctctccctcggccggctgctcccccgtcccggagccgtccatcgtcgccgacctcggcgcctgcagcgcggcagccacgacggcctcgtcctcctcctgcggccccgtggcgatgcttcccccggcggcaccgtccgcgcgttgcaggctgggacccgcgggcggccgcgcggggaagcgccggccgcggccgtccaagcgcgtgcccaccacgtacataaacaccgacgcggcaaccttccgtctcatggtgcagcacgtcaccggcgccgaggccgagccgcaggtcgacgccgacgccggcctcggtgtcctcctgtcgcccttcgactttgatcacttgctaccgtcggaccctgcggcggccgcggcccaagtcgccgcgtacgcccttccggcggcggcggcagagcagccgtgcttcccgacgctggactcgtggaacgtcatgtacgacaagaactaggtgactttgggtcgaaactgaagctctaggctctgtataaacatcatgcagcaagatgaaggcgccgttgcgtctggcttgtgatgtattgctccctttggtcgttgcagagcagtaggagaggattagagatgtagtagtagtgctgtatgcaagtgcgagtaccaccagactaccagtatagcacgcactagcagtgtaggaatgcagaggtgctccttggtctcctcgccggttgcactcgctgcttcaacttaggtagttcaatctgcctgttcttggttcttgcc

SEQ ID NO: 64571 - protein, 211 aa, Triticum aestivum
  peptide (1)..(211): Ceres Seq. ID no. 15226981
FPFASPASQPCSPARASQAPALQEGTHSSMDALSCFAPPAMLSRSFADAAIARALHFSPSAGCSPVPEPSIVADLGACSAAATTASSSSCGPVAMLPPAAPSARCRLGPAGGRAGKRRPRPSKRVPTTYINTDAATFRLMVQHVTGAEAEPQVDADAGLGVLLSPFDFDHLLPSDPAAAAAQVAAYALPAAAAEQPCFPTLDSWNVMYDKN

SEQ ID NO: 64572 - protein, 182 aa, Triticum aestivum
  peptide (1)..(182): Ceres Seq. ID no. 15226982
MDALSCFAPPAMLSRSFADAAIARALHFSPSAGCSPVPEPSIVADLGACSAAATTASSSSCGPVAMLPPAAPSARCRLGPAGGRAGKRRPRPSKRVPTTYINTDAATFRLMVQHVTGAEAEPQVDADAGLGVLLSPFDFDHLLPSDPAAAAAQVAAYALPAAAAEQPCFPTLDSWNVMYDKN

SEQ ID NO: 64573 - protein, 171 aa, Triticum aestivum
  peptide (1)..(171): Ceres Seq. ID no. 15226983
MLSRSFADAAIARALHFSPSAGCSPVPEPSIVADLGACSAAATTASSSSCGPVAMLPPAAPSARCRLGPAGGRAGKRRPRPSKRVPTTYINTDAATFRLMVQHVTGAEAEPQVDADAGLGVLLSPFDFDHLLPSDPAAAAAQVAAYALPAAAAEQPCFPTLDSWNVMYDKN

SEQ ID NO: 64574 - DNA, 809 bp, Triticum aestivum
  misc_feature (1)..(809): Ceres Seq. ID no. 15173178
aaaacacgcattctcgccactggcaggctctctccctaacgccaggcccactgctaactcttcccacccttctcttctccatcacgagcgccggcggcggctggtagagaggcgagccgagaggtgcggctacgagcggaagaggcgaggagctcgagcgagcgatggggcggaggatcctcaacgacgcgctgcgcacgatggtgaacgcggagcggcgggggaaggcgacggcgcaactccagcccatctccggcgtcatgatctccttccttaacatcatgaagcaccgaggttacataaaaaatttcgaggtctttgatccacatagggttggaaaaatcaccgtggaacttcagggaaggattaaagattgcaaagctctcacttacaggcaggacctcagagctacggaaatagaaaaatacagaactaggatgcttccaacacggcagtggggctatgttgtggtgaccaccccaaatggcgttttagatcacgaggaagcaattaggcagaatgtgggtggccaggtcctcggttacttccattgagaaggaaaacacagttatcccatgctgagtcagctctgggttgcattttattttgttatgatgactgaagtcattttattttgacatttagagcttgctgcttttgttcatggccagcagaaaatgcgattacatctcagaagtatgtctcgcaacactgacataaatattgtaatccttctttgggacaggtatttctgtaggtgtaatacacccatgtacttcgagatacacgagtaaagctctagtttgagc

SEQ ID NO: 64575 - protein, 129 aa, Triticum aestivum
  peptide (1)..(129): Ceres Seq. ID no. 15173179
MGRRILNDALRTMVNAERRGKATAQLQPISGVMISFLNIMKHRGYIKNFEVFDPHRVGKITVELQGRIKDCKALTYRQDLRATEIEKYRTRMLPTRQWGYVVVTTPNGVLDHEEAIRQNVGGQVLGYFH

SEQ ID NO: 64576 - protein, 117 aa, Triticum aestivum
  peptide (1)..(117): Ceres Seq. ID no. 15173180
MVNAERRGKATAQLQPISGVMISFLNIMKHRGYIKNFEVFDPHRVGKITVELQGRIKDCKALTYRQDLRATEIEKYRTRMLPTRQWGYVVVTTPNGVLDHEEAIRQNVGGQVLGYFH

SEQ ID NO: 64577 - protein, 97 aa, Triticum aestivum
  peptide (1)..(97): Ceres Seq. ID no. 15173181
MISFLNIMKHRGYIKNFEVFDPHRVGKITVELQGRIKDCKALTYRQDLRATEIEKYRTRMLPTRQWGYVVVTTPNGVLDHEEAIRQNVGGQVLGYFH

SEQ ID NO: 64578 - DNA, 1045 bp, Triticum aestivum
  misc_feature (1)..(1045): Ceres Seq. ID no. 13597213
attctcatttcccctgcttccagaacaccaccactccccacggacgactcttctcgccgcgcaaaccctagctagctaaatctcccatggcgacggcgaggctgcgatccgcgtcggcgtcctccctccgcgggatcctcctccgccactgctccgcgcccccgcgcgccgtctcagattttcaggttcctggatctgcaacatggaggcatttctcaacatgcaggcctaaccctcttgcaaaagggaacagctttggctcaatggcttctctgtacagccagacaagatgggcttctcaagccactgctgtgaaagaaactgaccccagtggcggcaagataagcattgggcccaaatccaagcagatcaaggaggaggacaaagatgatggactggtttatcagggaccgatatcatcaaccatcaagaaagtgaagcttctgtccctgtccacctgctgcctctctgtgtcgctaggccctgtcataacgttcatgacttcgcccgacatgaatgtgatcctcaagggaggagtcgcatccaccgtgatcttcctcagtgccacaacaaccgcagccctgcactggttcgtgagcccctacatccacaagctgagatggaggcagggttcagatagcttcgaggcggagataatgtcatggctggctacacccctgaagaagacgatcaagtttgctgacatcaggcccgcagagactaaccggcctttcgtcaccttcagggccgacgggaacttctacttcgtcgacgccgaccacttccccaacaaggccttgctggagaggctcacgcctaagctccccaacgagtccgcgttcaagaacttgtgatggaagctactgttttgcccgcattcgtgctcttgaacctggctgagctatcgagtcctttttcctgtagctaatacttgtgagaatttgtggtataaggtatcgccgttgtttttagttcagtacggagatttgtgaatcgctggcgtggaatatttttaactcctggacgattttgaataagtagcagc

SEQ ID NO: 64579 - protein, 255 aa, Triticum aestivum
  peptide (1)..(255): Ceres Seq. ID no. 13597214
MATARLRSASASSLRGILLRHCSAPPRAVSDFQVPGSATWRHFSTCRPNPLAKGNSFGSMASLYSQTRWASQATAVKETDPSGGKISIGPKSKQIKEEDKDDGLVYQGPISSTIKKVKLLSLSTCCLSVSLGPVITFMTSPDMNVILKGGVASTVIFLSATTTAALHWFVSPYIHKLRWRQGSDSFEAEIMSWLATPLKKTIKFADIRPAETNRPFVTFRADGNFYFVDADHFPNKALLERLTPKLPNESAFKNL

SEQ ID NO: 64580 - protein, 196 aa, Triticum aestivum
  peptide (1)..(196): Ceres Seq. ID no. 13597215
MASLYSQTRWASQATAVKETDPSGGKISIGPKSKQIKEEDKDDGLVYQGPISSTIKKVKLLSLSTCCLSVSLGPVITFMTSPDMNVILKGGVASTVIFLSATTTAALHWFVSPYIHKLRWRQGSDSFEAEIMSWLATPLKKTIKFADIRPAETNRPFVTFRADGNFYFVDADHFPNKALLERLTPKLPNESAFKNL

SEQ ID NO: 64581 - DNA, 690 bp, Triticum aestivum
  misc_feature (1)..(690): Ceres Seq. ID no. 12617479
cgattctccgctcgcctgctctgctccgccgcctctctggaaaaaaacacacaggtggcactgaataatagacaaggatggcttctactggcgtgaaagatttctaccggcagaagaagaaaggaggtgttggcaaaacttcagcatcttctaagaagaaaacacagaattacactggaggggcctctgttggggcctcaaataaggctcagacagcagcactaatttctcacggatccttagacctcagagatgatttcagtgagcaagaggagcagctgcggcagtttgacatggacatgaagtttggcccgtgcatcggtgtcaaccggcttcagcgctgggagcgtgcttccgccatgggcctccagccaccgccccaccttcgtgatctcctagcgcgcgcctcctccggaaacaaccgcaacaacggcggcccctcccctgaatgcctctgggagggtaagatctagaatcaaatttcttccgccgcaagtgctccttggcaacctagcatggcttgcctactgtagtctgaaactctgagcccgttttaccacgcggaactcctgctgttgcaccgtatccttggttgtttgcttatcagatgttgctacctcaactcctgcgagtgtcatcttcagtttgccgaaaaaaaaaaaaaaaaaagcttatcgataccgtcgacct

SEQ ID NO: 64582 - protein, 131 aa, Triticum aestivum
  peptide (1)..(131): Ceres Seq. ID no. 12617480
MASTGVKDFYRQKKKGGVGKTSASSKKKTQNYTGGASVGASNKAQTAALISHGSLDLRDDFSEQEEQLRQFDMDMKFGPCIGVNRLQRWERASAMGLQPPPHLRDLLARASSGNNRNNGGPSPECLWEGKI

SEQ ID NO: 64583 - DNA, 704 bp, Triticum aestivum
  misc_feature (1)..(704): Ceres Seq. ID no. 13655766
gataggaacaggcggaaccgtagacgaagcctcggacggaacgatacagagaagcctcggaaggggagcgatcggaaggggagggcggagagatggggatccggttcgtgctgctggtgaacaagcaggggcagacgcggctggcgcagtactacgagcacctctccctcgacgagcgccgcgccctcgagggcgagatcgtccgcaagtgcctcgcccgcaccgaccagcagtgctctttcgtggagcaccggaactacaaggtcgtctaccggcgctacgcctccctcttcttcctcgtcggcgtcgacaacgatgagaatgagttagccatccttgaattcatacatcttctcgtggaaaccatggaccgtcactttggcaacgtgtgtgagcttgacatcatgttccatctggagaaagtccacttcatgcttgaagagatggtgatgaatggttgcatcgtggagacgagcaaacagaacatattggcgcccatccagcttatggagaaaacctcgtaaatagtgtgtgaactcaagagcgcctaggtgatgcttagcctcttcctcccgccttcaccatagattcccccgttgtgtgaggagaaatgccgaacaactgctgtatgcatgggtggctgtgttcacccgactggaaaatgtgaaatgttctgtaatgttgaaaatgaagaccccatcatt

SEQ ID NO: 64584 - protein, 143 aa, Triticum aestivum
  peptide (1)..(143): Ceres Seq. ID no. 13655767
MGIRFVLLVNKQGQTRLAQYYEHLSLDERRALEGEIVRKCLARTDQQCSFVEHRNYKVVYRRYASLFFLVGVDNDENELAILEFIHLLVETMDRHFGNVCELDIMFHLEKVHFMLEEMVMNGCIVETSKQNILAPIQLMEKTS

SEQ ID NO: 64585 - protein, 105 aa, Triticum aestivum
  peptide (1)..(105): Ceres Seq. ID no. 13655768
IGTGGTVDEASDGTIQRSLGRGAIGRGGRRDGDPVRAAGEQAGADAAGAVLRAPLPRRAPRPRGRDRPQVPRPHRPAVLFRGAPELQGRLPALRLPLLPRRRRQR

SEQ ID NO: 64586 - DNA, 1334 bp, Triticum aestivum
  misc_feature (1)..(1334): Ceres Seq. ID no. 13598735
cccccctcccgttcsaacawwattgcaagcgattgcwgccaaacaggtcgatttcgaccgatctcctccgcatatgtggttctctgctgcccttgccgcttctcctcccacccaccttgtcctcgcgcgcacggggaaacgacgccggtgagatggctcctccccgcacggtgatctgcgtgggtgacgtccacggctacatctccaagctggagagcctgtgggcgaacctccagtccgcgctccccgccgacgccttcgccgccgcgctcgtcatcttcctcggggactacaacgaccgcggcccggacacccgccgcgtcctcgacttcctcctcgcgctcccggcccgccacccggctcagcgccacgtcttcctctgcggcaaccacgacctcgccttcgccgccttcgtcggagcgctgccgccgccccccgacggttcccctttcgccgccacctgggaccaatacatcgacaatgaggcccacgagggctggttccgcgggccggggcacgaggatatgcacgtgcaggggaggagatggggcggcgtcatcaaggagaggtggaaccccaagaagggcctcccgtacaagggctctatctacgatgcgcagcccaccttcgagtcctacggcgtcgcccatggatcaccagatctcatgaaagctgtgcctgaggagcacaagaagtttctgcatgacttggtttgggtccatgaagaggaagacgttcgtattgatacagatggaggccagattctatgcaaactgatcgcggttcatgccggcctggaaaagtccttggatttgaatgagcagcttagagttttgagaactagagacacaagggtgccaaaagttcaaatgcttagcgggaggcaggatgtttggaacataccacaggatctggccggcaagcagaccatcgttgtaagtgggcatcatgggaagctccacgtggacggtctcaggttcatcatcgacgaaggtggcgggtacgcagataaacctatagcggccgttgttttcccttcaaagtgatcaggagcacagagggaacggcctcccagaattaatctagacaccatcggaaatgcaagatatttttttttgttactgtcgtaacatgagcaattggacgactggtatgthcatctgccaaaatggagtataatatttcaaaaaacacagaattggggttttaatgtataatgtcgaggaaataagtcaaaaaaaaaaaaaaaaaaaaaaaaaaaaaaaaaaaaaaaaaaaaataaaaaaaaaaaaaaaaaagcttatcgataccgtcracctcragggggggcccgg

SEQ ID NO: 64587 - protein, 347 aa, Triticum aestivum
  peptide (1)..(347): Ceres Seq. ID no. 15222412
  misc_feature (5)..(5): Xaa is any aa, unknown or other
  misc_feature (6)..(6): Xaa is any aa, unknown or other
  misc_feature (7)..(7): Xaa is any aa, unknown or other
  misc_feature (12)..(12): Xaa is any aa, unknown or other
PLPFXXXCKRLXPNRSISTDLLRICGSLLPLPLLLPPTLSSRARGNDAGEMAPPRTVICVGDVHGYISKLESLWANLQSALPADAFAAALVIFLGDYNDRGPDTRRVLDFLLALPARHPAQRHVFLCGNHDLAFAAFVGALPPPPDGSPFAATWDQYIDNEAHEGWFRGPGHEDMHVQGRRWGGVIKERWNPKKGLPYKGSIYDAQPTFESYGVAHGSPDLMKAVPEEHKKFLHDLVWVHEEEDVRIDTDGGQILCKLIAVHAGLEKSLDLNEQLRVLRTRDTRVPKVQMLSGRQDVWNIPQDLAGKQTIVVSGHHGKLHVDGLRFIIDEGGGYADKPIAAVVFPSK

SEQ ID NO: 64588 - protein, 297 aa, Triticum aestivum
  peptide (1)..(297): Ceres Seq. ID no. 15222413
MAPPRTVICVGDVHGYISKLESLWANLQSALPADAFAAALVIFLGDYNDRGPDTRRVLDFLLALPARHPAQRHVFLCGNHDLAFAAFVGALPPPPDGSPFAATWDQYIDNEAHEGWFRGPGHEDMHVQGRRWGGVIKERWNPKKGLPYKGSIYDAQPTFESYGVAHGSPDLMKAVPEEHKKFLHDLVWVHEEEDVRIDTDGGQILCKLIAVHAGLEKSLDLNEQLRVLRTRDTRVPKVQMLSGRQDVWNIPQDLAGKQTIVVSGHHGKLHVDGLRFIIDEGGGYADKPIAAVVFPSK

SEQ ID NO: 64589 - protein, 173 aa, Triticum aestivum
  peptide (1)..(173): Ceres Seq. ID no. 15222414
MHVQGRRWGGVIKERWNPKKGLPYKGSIYDAQPTFESYGVAHGSPDLMKAVPEEHKKFLHDLVWVHEEEDVRIDTDGGQILCKLIAVHAGLEKSLDLNEQLRVLRTRDTRVPKVQMLSGRQDVWNIPQDLAGKQTIVVSGHHGKLHVDGLRFIIDEGGGYADKPIAAVVFPSK

SEQ ID NO: 64590 - DNA, 657 bp, Triticum aestivum
  misc_feature (1)..(657): Ceres Seq. ID no. 12598184
gaaaaaaaaatcccaaacccaaagcactagctatattactctagcacaccacacaatcacaatggcatgcaaagctgccatcttcgtcgcgctgagcctcctcctctccgccgtcgccgccaacggctgcggaagcacctattgccaaccgccggtcgtcgtgccgacaccacccgtcgtcgttccgccgccataccatggaggaggagggcacggccacggccacggccacggagggcagtgctccatcaacgtgctcaacctgagggtgtgcgccaacgttctcggtggactgctcggcctcaagatcggcgttccggcgcgcgaccagtgctgcccgctgctccaggggttggccgacctcgacgccgccgtctgcctctgcaccgccgtcagggccaacatcctcggcctccacctcaacgtgcctgtggacatcagcctcctcctcaaccactgcggcaagacgtgcccgtctggtttcatttgcccagcccattaacggacgtattgttgcatgggctccgaataagatttgccttccgtactttgtttttttatttcatcaaatgtggatctgttccactcccacatttcaattgtgtaaccagtactacttttgttttttggcaaacagagcatatactcttcgtattg

SEQ ID NO: 64591 - protein, 197 aa, Triticum aestivum
  peptide (1)..(197): Ceres Seq. ID no. 12598185
MQSCHLRRAEPPPLRRRRQRLRKHLLPTAGRRADTTRRRSAAIPWRRRARPRPRPRRAVLHQRAQPEGVRQRSRWTARPQDRRSGARPVLPAAPGVGRPRRRRLPLHRRQGQHPRPPPQRACGHQPPPQPLRQDVPVWFHLPSPLTDVLLHGLRIRFAFRTLFFYFIKCGSVPLPHFNCVTSTTFVFWQTEHILFVL

SEQ ID NO: 64592 - protein, 166 aa, Triticum aestivum
  peptide (1)..(166): Ceres Seq. ID no. 12598186
KKKSQTQSTSYITLAHHTITMACKAAIFVALSLLLSAVAANGCGSTYCQPPVVVPTPPVVVPPPYHGGGGHGHGHGHGGQCSINVLNLRVCANVLGGLLGLKIGVPARDQCCPLLQGLADLDAAVCLCTAVRANILGLHLNVPVDISLLLNHCGKTCPSGFICPAH

SEQ ID NO: 64593 - protein, 146 aa, Triticum aestivum
  peptide (1)..(146): Ceres Seq. ID no. 12598187
MACKAAIFVALSLLLSAVAANGCGSTYCQPPVVVPTPPVVVPPPYHGGGGHGHGHGHGGQCSINVLNLRVCANVLGGLLGLKIGVPARDQCCPLLQGLADLDAAVCLCTAVRANILGLHLNVPVDISLLLNHCGKTCPSGFICPAH

SEQ ID NO: 64594 - DNA, 1152 bp, Triticum aestivum
  misc_feature (1)..(1152): Ceres Seq. ID no. 12626061
ccctcccctcccctcccctccgagcgagctcccgagcagcagcggcggccggcctccctccccctctccctcgcgcgcgccccagccgctcgcgccggtccgcccctccccctccagcggcgtcggcggaaggcattgcgccgagcagtcatcacagtccaagacaatggttgcacaagcctttaccgtcgatttggataagcctcttgtatttcaggttggtcatctggaggaacagtatcaagactgggttcaccagccaattgttagcaaggaggggccacggttttttgccaatgatgtattggagttcttaacacgtacgaaatggtgggcagttcctctcatttggttgcctgttgtttgctggtgcctgaatacatcgatccaaatgggccacacagttccagaagtagcgctgatggttgtggcaggaatatttatctggacactggttgaatacgtgctacatcggtacctgttccacatagatactaaaagttactggacaaacacggctcattatcttctgcatggatgccatcacaagcatccaatggatgggcttcgacttgtatttccaccaactgccgcagccatcttgtgctatccgttctggaattttgtcaagctcttcacaactacaactaccactcctggcgtgtttggaggtggcctgttgggttacgtgatctatgattgcacacactactacctgcatcacgcccacccttcattcgatccagcaaaatatctcaagaaataccatctgaaccatcacttcagaatccaaaacaagggctttggaataacatcaaccctgtgggaccatgtgtttggaacgctgccttcaacgaaaaccgccggcaagagctcttgagttgttgtaccgccttgcagtgcgagaatcaagactgtccaatggttgataacggattgaacggacggatgaacaaacaattaatcggagacgtcactgaagtgcttacatcctcactgatgtgtcgcgaatagagtggttccagacttgagcatatgttgtcatgtgtacagaggtttttctatctaaatagtatagcaccagcgtcgttcatttgtggctgttggtggccagtataatttttgggacaaattaagtaattgcattgcttg

SEQ ID NO: 64595 - protein, 292 aa, Triticum aestivum
  peptide (1)..(292): Ceres Seq. ID no. 12626062
PPLPSPPSELPSSSGGRPPSPSPSRAPQPLAPVRPSPSSGVGGRHCAEQSSQSKTMVAQAFTVDLDKPLVFQVGHLEEQYQDWVHQPIVSKEGPRFFANDVLEFLTRTKWWAVPLIWLPVVCWCLNTSIQMGHTVPEVALMVVAGIFIWTLVEYVLHRYLFHIDTKSYWTNTAHYLLHGCHHKHPMDGLRLVFPPTAAAILCYPFWNFVKLFTTTTTTPGVFGGGLLGYVIYDCTHYYLHHAHPSFDPAKYLKKYHLNHHFRIQNKGFGITSTLWDHVFGTLPSTKTAGKSS

SEQ ID NO: 64596 - protein, 237 aa, Triticum aestivum
  peptide (1)..(237): Ceres Seq. ID no. 12626063
MVAQAFTVDLDKPLVFQVGHLEEQYQDWVHQPIVSKEGPRFFANDVLEFLTRTKWWAVPLIWLPVVCWCLNTSIQMGHTVPEVALMVVAGIFIWTLVEYVLHRYLFHIDTKSYWTNTAHYLLHGCHHKHPMDGLRLVFPPTAAAILCYPFWNFVKLFTTTTTTPGVFGGGLLGYVIYDCTHYYLHHAHPSFDPAKYLKKYHLNHHFRIQNKGFGITSTLWDHVFGTLPSTKTAGKSS

SEQ ID NO: 64597 - protein, 162 aa, Triticum aestivum
  peptide (1)..(162): Ceres Seq. ID no. 12626064
MGHTVPEVALMVVAGIFIWTLVEYVLHRYLFHIDTKSYWTNTAHYLLHGCHHKHPMDGLRLVFPPTAAAILCYPFWNFVKLFTTTTTTPGVFGGGLLGYVIYDCTHYYLHHAHPSFDPAKYLKKYHLNHHFRIQNKGFGITSTLWDHVFGTLPSTKTAGKSS

SEQ ID NO: 64598 - DNA, 1208 bp, Triticum aestivum
  misc_feature (1)..(1208): Ceres Seq. ID no. 13597809
cccaaccccccagacccaccgccacccaccaaaacacggactcctctcgctcgctcgctcgccgccgccggctgctgctccgcgcggccgtcgccgggcgtgcttcagtcagctcgcgcccctcctcgtgagctcgaaatacctcaagatgtcggagcattctgagagcaaggctgaaaagctcatgggcaacatcatggatactattgctgacaggctccccaagcagaagtctgacaatatcatgagcaacatcatggataccatttctgacaagctccctaagcagaggtctggccgtttcgatccaggctcagtcgctgatgtgaagaacaagatgtttggtcgtcagaggtccctccatggagttttgggtggcggaaagtctgctgatgtgttgttatggaggaacaagaagatatcttccagtgttttgggtctcgcaacagctatctgggttttcttcgagtggcttgattaccacttcttgacaatcatttcatttgcccttgttattggaatggtggttcagtttgtttggtccaacttctcaaggtcttctgaaataccccgggttaagttgccagaggacctgtttgtgaacattgctgttgccatcggtgcccaagtaaacaagttccttggtttccttcaagatgtgtcttgtgaaagaaacttgaagcattttgtattggcaattgttggattgtgggctgcttctgtagctgggagctggttcaacttcctgactgtcatttacattgggtttgtctgcgcgcacacgctccctgtgctgtacgagaagtacgaggaccaggtcgacgacttcctctacagcatcctgggcctgctccgagagcagtaccagaaactcgacagcggcgtcctgagcaggataccctccaagaggaacaagaagagcgagtagattgattagatcagatggacactcatgatttatcgagtgaaatcccagctattatttattctgcctagtttgtgtgctgcagacctgtagtgtgtctcaactatcatgtgagagaatgtgtgctcaagtgcttcctgaacggaacgctggtttaaattcaaccgcgacgcatgcgtctgttgtcccatttattattagtgggatgctgctcaacaaactggtgagaccagaagttgtatgcatatattggaaattgagctgaaatccgctgtgctttgtc

SEQ ID NO: 64599 - protein, 308 aa, Triticum aestivum
  peptide (1)..(308): Ceres Seq. ID no. 15222200
PTPQTHRHPPKHGLLSLARSPPPAAAPRGRRRACFSQLAPLLVSSKYLKMSEHSESKAEKLMGNIMDTIADRLPKQKSDNIMSNIMDTISDKLPKQRSGRFDPGSVADVKNKMFGRQRSLHGVLGGGKSADVLLWRNKKISSSVLGLATAIWVFFEWLDYHFLTIISFALVIGMVVQFVWSNFSRSSEIPRVKLPEDLFVNIAVAIGAQVNKFLGFLQDVSCERNLKHFVLAIVGLWAASVAGSWFNFLTVIYIGFVCAHTLPVLYEKYEDQVDDFLYSILGLLREQYQKLDSGVLSRIPSKRNKKSE

SEQ ID NO: 64600 - protein, 259 aa, Triticum aestivum
  peptide (1)..(259): Ceres Seq. ID no. 15222201
MSEHSESKAEKLMGNIMDTIADRLPKQKSDNIMSNIMDTISDKLPKQRSGRFDPGSVADVKNKMFGRQRSLHGVLGGGKSADVLLWRNKKISSSVLGLATAIWVFFEWLDYHFLTIISFALVIGMVVQFVWSNFSRSSEIPRVKLPEDLFVNIAVAIGAQVNKFLGFLQDVSCERNLKHFVLAIVGLWAASVAGSWFNFLTVIYIGFVCAHTLPVLYEKYEDQVDDFLYSILGLLREQYQKLDSGVLSRIPSKRNKKSE

SEQ ID NO: 64601 - protein, 247 aa, Triticum aestivum
  peptide (1)..(247): Ceres Seq. ID no. 15222202
MGNIMDTIADRLPKQKSDNIMSNIMDTISDKLPKQRSGRFDPGSVADVKNKMFGRQRSLHGVLGGGKSADVLLWRNKKISSSVLGLATAIWVFFEWLDYHFLTIISFALVIGMVVQFVWSNFSRSSEIPRVKLPEDLFVNIAVAIGAQVNKFLGFLQDVSCERNLKHFVLAIVGLWAASVAGSWFNFLTVIYIGFVCAHTLPVLYEKYEDQVDDFLYSILGLLREQYQKLDSGVLSRIPSKRNKKSE

SEQ ID NO: 64602 - DNA, 1171 bp, Triticum aestivum
  misc_feature (1)..(1171): Ceres Seq. ID no. 13662721
gaatatacggttacacccacaagcttcccctgcacacacgcgaccaactcttacgccgccgccgccgccgccggcggagagatggactcccggggcttcgattccacgggccgcgagttttccagcgccacggagatgtgggcccaggagatcggcgccaccgcctccgcctcggcctccgaagtccctccgggcgccgccgccgcggctccaagcaatggggacgccggcgaggaggcgggcggagaagggaagcgcgaggagtggtactccaaaggaatcgcctactggcagggcgtggaggcgtcgaccgagggcgtcctgggagggtacgggtgcgtcaacgacgccgacgtcaagggcagcgccgccttcctccgccctctcctcaccgagcgattcggcgccgcgaagcgccatcttgtcgcgcttgattgtggctcgggcatcgggcgggttacaaagaattttcttatcaagcatttcaatgaggttgatctcgttgagccagtagcccattttctagaagcggcacgggaaaatcttagtagctgtatggatgtagagcaggatacgcataaggctgcaaacttttattgtacacctcttcaggacttcactcctgaggaaggaagatatgatgtgatatggatccagtggtgcatagggcaacttactgatgatgattttatttcattttttaaccgcgcaaaggttgggctcaaaccagatggtttttttgttctgaaagagaacattgcaaaaaatggatttgttttagacaaggaggataacagtgtcactaggtctgatgcatatttcagggagctatttaacaagtgtggattgtatatccacagcatcaagaaccaaaaggagctaccagaggaactatttgctgtcagaatgtacgcattggtgaccagccagccaaaggtcacaaaaaatggcaagagagggcggcctaaaaattcaccccgtataatccgctcttgaaggggggactattgtgccagcgtattgtctggcaatgtactgttgttcacttgtttctagtcgcaatttagctcggtctacattttgttttgagcatgctgtctttttcagagatcaaatccactagttgctgtcgaaacttaatgcatatggcatctagcaccttttgattctg

SEQ ID NO: 64603 - protein, 331 aa, Triticum aestivum
  peptide (1)..(331): Ceres Seq. ID no. 13662722
EYTVTPTSFPCTHATNSYAAAAAAGGEMDSRGFDSTGREFSSATEMWAQEIGATASASASEVPPGAAAAAPSNGDAGEEAGGEGKREEWYSKGIAYWQGVEASTEGVLGGYGCVNDADVKGSAAFLRPLLTERFGAAKRHLVALDCGSGIGRVTKNFLIKHFNEVDLVEPVAHFLEAARENLSSCMDVEQDTHKAANFYCTPLQDFTPEEGRYDVIWIQWCIGQLTDDDFISFFNRAKVGLKPDGFFVLKENIAKNGFVLDKEDNSVTRSDAYFRELFNKCGLYIHSIKNQKELPEELFAVRMYALVTSQPKVTKNGKRGRPKNSPRIIRS

SEQ ID NO: 64604 - protein, 304 aa, Triticum aestivum
  peptide (1)..(304): Ceres Seq. ID no. 13662723
MDSRGFDSTGREFSSATEMWAQEIGATASASASEVPPGAAAAAPSNGDAGEEAGGEGKREEWYSKGIAYWQGVEASTEGVLGGYGCVNDADVKGSAAFLRPLLTERFGAAKRHLVALDCGSGIGRVTKNFLIKHFNEVDLVEPVAHFLEAARENLSSCMDVEQDTHKAANFYCTPLQDFTPEEGRYDVIWIQWCIGQLTDDDFISFFNRAKVGLKPDGFFVLKENIAKNGFVLDKEDNSVTRSDAYFRELFNKCGLYIHSIKNQKELPEELFAVRMYALVTSQPKVTKNGKRGRPKNSPRIIRS

SEQ ID NO: 64605 - protein, 286 aa, Triticum aestivum
  peptide (1)..(286): Ceres Seq. ID no. 13662724
MWAQEIGATASASASEVPPGAAAAAPSNGDAGEEAGGEGKREEWYSKGIAYWQGVEASTEGVLGGYGCVNDADVKGSAAFLRPLLTERFGAAKRHLVALDCGSGIGRVTKNFLIKHFNEVDLVEPVAHFLEAARENLSSCMDVEQDTHKAANFYCTPLQDFTPEEGRYDVIWIQWCIGQLTDDDFISFFNRAKVGLKPDGFFVLKENIAKNGFVLDKEDNSVTRSDAYFRELFNKCGLYIHSIKNQKELPEELFAVRMYALVTSQPKVTKNGKRGRPKNSPRIIRS

SEQ ID NO: 64606 - DNA, 809 bp, Triticum aestivum
  misc_feature (1)..(809): Ceres Seq. ID no. 15173263
atctcagatcaaagtttctttttcttattctcttgtgcgccaactcattccttcgttgctcatgactgaatttcttggaatttgtagagaatttttgggtcctgatccgaggagaggagatgtcggacagcgaagagcaccagttcgagtcgaaggcagacgccggcgcttccaagacctacccgcagcaggccggcaccattcgcaagaacggctacatcgtcatcaagaaccgcccctgcaaggttgtggaggtttcaacatctaaaaccgggaagcatggtcatgccaagtgccactttgttgctattgacatcttcaccggcaagaaacttgaagatattgtgccatcttctcacaactgtgatgttcctcatgtgaatcgcacagaataccagctcattgatatatctgaggatggatttgtgagtctgctcactgataatggtaacaccaaagatgacctcaagctcccgactgatgaaaccctccttggccagatcaaggatgggtttgctgaagggaaggacctggtggtgtctgtcatgtccgccatgggagaggagcagattaatgcgctcaaggacattggccccaagtagtctgccctgttagccatggacatcggccccaagagtgtggttcatttgtctctgccggttaagatggatttgggtgtcacagccgttgaggaattgtatctttttgcacaactaagttgtcagtgtttggttgatttgtagtcctaaattcatgggtgactgtatcctaaaactgtcgctccggggtttattgacccctcttgactg

SEQ ID NO: 64607 - protein, 160 aa, Triticum aestivum
  peptide (1)..(160): Ceres Seq. ID no. 15173264
MSDSEEHQFESKADAGASKTYPQQAGTIRKNGYIVIKNRPCKVVEVSTSKTGKHGHAKCHFVAIDIFTGKKLEDIVPSSHNCDVPHVNRTEYQLIDISEDGFVSLLTDNGNTKDDLKLPTDETLLGQIKDGFAEGKDLVVSVMSAMGEEQINALKDIGPK

SEQ ID NO: 64608 - protein, 88 aa, Triticum aestivum
  peptide (1)..(88): Ceres Seq. ID no. 15173265
SQIKVSFSYSLVRQLIPSLLMTEFLGICREFLGPDPRRGDVGQRRAPVRVEGRRRRFQDLPAAGRHHSQERLHRHQEPPLQGCGGFNI

SEQ ID NO: 64609 - DNA, 1278 bp, Triticum aestivum
  misc_feature (1)..(1278): Ceres Seq. ID no. 13656155
atacatcacctcggccggcgctgctaccgatctcctccagagtccaagcctcctcacccaaagccatggccgcgcggcgtcgctccctcctcatgctcctgcccctcctcctctcccacttcctctccctcgccgccgccttccagtcggacgagctgctcctccacgacgacgacgagttcgagggcacccgggtctcctccaccccctccccccggccgccctcgacgccgccggtagtgtcctcccgccgccgatccgcggacgcgacgcaggcggctggcgcctccgagtccgacaccgtccagttcaccctcgagcacgacctcggagccggcctagggttcgcccccgccgggtccttctccgcccgcctcaagtcctcggcccacggctcccagactctcactaagctccggtttacgaggaatgagttgactgaggatgaaaagaatgcatttaagaaattacttgaagaagatagtttttacacaataaggctaccgtctaatgtgttggatcctacaagaaacgattatatttattcctcgatcaaagcgagatgcattccacgtgacagcttggatgaacatattgtcatccacatggacggtgtaaatattttggctgttaattatggttccgtcggtggatgccaatatccccggccaatgaaagtaccgtcaaaatggacattcaattcatacactattctgaagactgctgaccaagcaccaagaactccatcatttgtagagcaattaatagaaactgagagtggactcggtgaagtgatgaaaccacctgagaaatctttctgggctaaatattggatgtacatcattcctcttggtctcattgtcatgaacgctgtcacagcagcagcaaacataccggaggagcaagctggagggcagggtcaagctccagcacaaatggcgccaattgctgctccaaggagaagatgatggcttcctatattctttgcatgccatagattcacaaacaatggacagaggatggatctgcttgaccttccccagaacaggggcagtactagcggcaacaagactcacttgggtttttcttttctcgcattcagaaactcacctttgttgtagaatcacctcagaaaaggttgcgtgttctggtcgcatctacacgcgtatttttgcctgttgatagaaattaccatcagtctttaactcggtgcaaactgcatgccttaatattcagaactagcttaattacaaatatcaaacattgtatgttttgctc

SEQ ID NO: 64610 - protein, 321 aa, Triticum aestivum
  peptide (1)..(321): Ceres Seq. ID no. 15219802
TSPRPALLPISSRVQASSPKAMAARRRSLLMLLPLLLSHFLSLAAAFQSDELLLHDDDEFEGTRVSSTPSPRPPSTPPVVSSRRRSADATQAAGASESDTVQFTLEHDLGAGLGFAPAGSFSARLKSSAHGSQTLTKLRFTRNELTEDEKNAFKKLLEEDSFYTIRLPSNVLDPTRNDYIYSSIKARCIPRDSLDEHIVIHMDGVNILAVNYGSVGGCQYPRPMKVPSKWTFNSYTILKTADQAPRTPSFVEQLIETESGLGEVMKPPEKSFWAKYWMYIIPLGLIVMNAVTAAANIPEEQAGGQGQAPAQMAPIAAPRRR

SEQ ID NO: 64611 - protein, 300 aa, Triticum aestivum
  peptide (1)..(300): Ceres Seq. ID no. 15219803
MAARRRSLLMLLPLLLSHFLSLAAAFQSDELLLHDDDEFEGTRVSSTPSPRPPSTPPVVSSRRRSADATQAAGASESDTVQFTLEHDLGAGLGFAPAGSFSARLKSSAHGSQTLTKLRFTRNELTEDEKNAFKKLLEEDSFYTIRLPSNVLDPTRNDYIYSSIKARCIPRDSLDEHIVIHMDGVNILAVNYGSVGGCQYPRPMKVPSKWTFNSYTILKTADQAPRTPSFVEQLIETESGLGEVMKPPEKSFWAKYWMYIIPLGLIVMNAVTAAANIPEEQAGGQGQAPAQMAPIAAPRRR

SEQ ID NO: 64612 - protein, 291 aa, Triticum aestivum
  peptide (1)..(291): Ceres Seq. ID no. 15219804
MLLPLLLSHFLSLAAAFQSDELLLHDDDEFEGTRVSSTPSPRPPSTPPVVSSRRRSADATQAAGASESDTVQFTLEHDLGAGLGFAPAGSFSARLKSSAHGSQTLTKLRFTRNELTEDEKNAFKKLLEEDSFYTIRLPSNVLDPTRNDYIYSSIKARCIPRDSLDEHIVIHMDGVNILAVNYGSVGGCQYPRPMKVPSKWTFNSYTILKTADQAPRTPSFVEQLIETESGLGEVMKPPEKSFWAKYWMYIIPLGLIVMNAVTAAANIPEEQAGGQGQAPAQMAPIAAPRRR

SEQ ID NO: 64613 - DNA, 1154 bp, Triticum aestivum
  misc_feature (1)..(1154): Ceres Seq. ID no. 13597493
cagagctcacacagtgctggacacgccgcgacgagtcggaggggaaagatcaagatggaggcggccgcctccaatccgtcgagcaagaggatcgccctggtcaccggagggaacaaaggggtcgggctggagacgtgcaggcagctcgcgtccaaggggctcaaggtcgtgctgacggcgaggaacgagggcaggggactagaggcggtcgaaggcgtcaggcgctccggtgctgacgtcgtcttccatcagctggatgtcaccgaccctgacagcgtcgcccggctggcggatttcgtcagggatcagttcgggaagctcgatatcctgataaacaatgcaggcatttcaggcgtcgatcgagatccagttctggttgcgaaagttaaagaacaggttgaaagcatggatgtagatcagagagttcaatggatgaaagaaaattccaaggagacatatgaggaagcaaaagaatgcatgagaacaaactactatggggcaaagcttgtcacggaggcactacttcctcttcttcagttgtcctcctctgggagaattgtcaatgtctcatcaggcttttcactgctaagaaacttcaacagtgaaaaactgaagaatgagtttaacaacgctgacaatcttactgaaaagagactagaggagctgttggattcgttcctagaagatttcaaggccaatttgatagaggcacatgggtggccgaccggtggctcgtcagcctacaaagtcgccaaagctgccctcaatgcttacacaaggattctcgccaagaagtaccctaggatgcgcatcaactgtttgacgcctggttatgtcaagagcgacatgtcgatgcacatgggagttttgacgcccgaggagggcgctagcaaccctgtgaaggtcgctctcttgcccgacgatggcccgacgggtgcttattttgatagggatggcgtggcctcgtttgtgtgactctgtcgtacgtgtaatgttttcgtccggttttactctcagaatatgagacaccgtaacagtagttgtcaataaacagtgtgcagtttaacctgtgctgtgcactcgaatcgacatgcaaaattgacaaatttgatcaaaaaaaaaaaaaaaaaagcttatcgataccgtcgacctcg

SEQ ID NO: 64614 - protein, 324 aa, Triticum aestivum
  peptide (1)..(324): Ceres Seq. ID no. 13597494
QSSHSAGHAATSRRGKIKMEAAASNPSSKRIALVTGGNKGVGLETCRQLASKGLKVVLTARNEGRGLEAVEGVRRSGADVVFHQLDVTDPDSVARLADFVRDQFGKLDILINNAGISGVDRDPVLVAKVKEQVESMDVDQRVQWMKENSKETYEEAKECMRTNYYGAKLVTEALLPLLQLSSSGRIVNVSSGFSLLRNFNSEKLKNEFNNADNLTEKRLEELLDSFLEDFKANLIEAHGWPTGGSSAYKVAKAALNAYTRILAKKYPRMRINCLTPGYVKSDMSMHMGVLTPEEGASNPVKVALLPDDGPTGAYFDRDGVASFV

SEQ ID NO: 64615 - protein, 306 aa, Triticum aestivum
  peptide (1)..(306): Ceres Seq. ID no. 13597495
MEAAASNPSSKRIALVTGGNKGVGLETCRQLASKGLKVVLTARNEGRGLEAVEGVRRSGADVVFHQLDVTDPDSVARLADFVRDQFGKLDILINNAGISGVDRDPVLVAKVKEQVESMDVDQRVQWMKENSKETYEEAKECMRTNYYGAKLVTEALLPLLQLSSSGRIVNVSSGFSLLRNFNSEKLKNEFNNADNLTEKRLEELLDSFLEDFKANLIEAHGWPTGGSSAYKVAKAALNAYTRILAKKYPRMRINCLTPGYVKSDMSMHMGVLTPEEGASNPVKVALLPDDGPTGAYFDRDGVASFV

SEQ ID NO: 64616 - protein, 189 aa, Triticum aestivum
  peptide (1)..(189): Ceres Seq. ID no. 13597496
MDVDQRVQWMKENSKETYEEAKECMRTNYYGAKLVTEALLPLLQLSSSGRIVNVSSGFSLLRNFNSEKLKNEFNNADNLTEKRLEELLDSFLEDFKANLIEAHGWPTGGSSAYKVAKAALNAYTRILAKKYPRMRINCLTPGYVKSDMSMHMGVLTPEEGASNPVKVALLPDDGPTGAYFDRDGVASFV

SEQ ID NO: 64617 - DNA, 1289 bp, Triticum aestivum
  misc_feature (1)..(1289): Ceres Seq. ID no. 13597831
ttctgcgatttccatttgcttcctccgtcttctccatcccccctccctgctgccgaccatccctgagcactcccagtcccaggccattagcctagctagctaccccctccatgcgagggcggcaatggcgcccgcctccgcctccttcgccgtctccctctccgcccccgtccgcttaattccgcccagatgcttccgcggtaggccgaggtggtcccgcccaatcagggcttcgagcgacacgaagggcgccccgaacggggagcggaggatcggggctctggagaggagggtgggggatttgagggcgcttgtcgcctcggtgcctcctgctgttgtctcgatcaggaaaaacattggactaaattccattgccggtttcggtttcggcattgcatttttggctgctctcgcaagacaggtcatcataagaactcaacagcaagatagtagtggttctgtttctgatctagtaaggcgcgggcatctaaaatctgggcaacgtgggattgcaaagccacgtgtgtacaatgatcctttcaataattcattagtcaagatcgatgaagatacttctactgctcagatgtttggcaaggagtaccgcatggctcctgtccggcttacaaatgaacaacaggcaatgcatcagaaaaggagatcacatgcatatcagtggaaaaggcccactgtgtttcttaaagaaggtgatcccctgccaccagatgtcgatccagagacagttagatggattccagtaaaccacccatttgctgctggttcggttgaagtagatgaggagactgccaaaaggaatgtttaccaaaaggatggcgtcccgtcccgtgtaaaagccgaacatgaagctttgcgggcaaggctagaggcttcaaatgatgtaacaccattctctaacggtccaaggggtatgcaacatagtgcaagatcatcgaagttatcagacgagccatctgggaatctgcaacagtctaaacctgacatggtgaatgaccaaaatggccaaccaatgttagagcctgagcctgagcccaagagctctgacaacggttcactatcaaaaagcttggaaggacagtaacggtgtgaattgtataaacccttcggcactttgttttgttatgtagtgttgtcaggttttagctgtagatagaggagttttggaacaacagatttacgtactgaacacatgatatggagcagtgttattgttatgtgctgctgtatatctgatattttttttgcccgaagatctccagatgcacgatctc

SEQ ID NO: 64618 - protein, 365 aa, Triticum aestivum
  peptide (1)..(365): Ceres Seq. ID no. 15222207
SAISICFLRLLHPPSLLPTIPEHSQSQAISLASYPLHARAAMAPASASFAVSLSAPVRLIPPRCFRGRPRWSRPIRASSDTKGAPNGERRIGALERRVGDLRALVASVPPAVVSIRKNIGLNSIAGFGFGIAFLAALARQVIIRTQQQDSSGSVSDLVRRGHLKSGQRGIAKPRVYNDPFNNSLVKIDEDTSTAQMFGKEYRMAPVRLTNEQQAMHQKRRSHAYQWKRPTVFLKEGDPLPPDVDPETVRWIPVNHPFAAGSVEVDEETAKRNVYQKDGVPSRVKAEHEALRARLEASNDVTPFSNGPRGMQHSARSSKLSDEPSGNLQQSKPDMVNDQNGQPMLEPEPEPKSSDNGSLSKSLEGQ

SEQ ID NO: 64619 - protein, 324 aa, Triticum aestivum
  peptide (1)..(324): Ceres Seq. ID no. 15222208
MAPASASFAVSLSAPVRLIPPRCFRGRPRWSRPIRASSDTKGAPNGERRIGALERRVGDLRALVASVPPAVVSIRKNIGLNSIAGFGFGIAFLAALARQVIIRTQQQDSSGSVSDLVRRGHLKSGQRGIAKPRVYNDPFNNSLVKIDEDTSTAQMFGKEYRMAPVRLTNEQQAMHQKRRSHAYQWKRPTVFLKEGDPLPPDVDPETVRWIPVNHPFAAGSVEVDEETAKRNVYQKDGVPSRVKAEHEALRARLEASNDVTPFSNGPRGMQHSARSSKLSDEPSGNLQQSKPDMVNDQNGQPMLEPEPEPKSSDNGSLSKSLEGQ

SEQ ID NO: 64620 - DNA, 1217 bp, Triticum aestivum
  misc_feature (1)..(1217): Ceres Seq. ID no. 13656156
agaaactaatccgagccacacatccccgtttcacaaccaagccaaagctccccactcctccccattccacgccgccgcaccccgaaccctagcgccccatccatccagcgagcggtagccatgccggcggacgcgaagatccggtggggggagctcgaggaggacgacgggggcgacctcgacttccttctcccgccgcgggtggtcatcgggcccgacgagaacggcttcaagaagacgatcgagtaccgcttcgacgacgacggcaacaaggtcaaggtcaccaccaccacccgcgtccgcaagctcgcccgcgcgcgcctctccaaggccgctgtcgagcgccgcaactgggccaagttcggcgacgccgccagcggcgacgacgcctccgcgcgcctcaccgtcgtctccaccgaggagatcctcctcgagcgcccgcgcgccccagggagcaaagctgatgaaccaagtgcttctggtgacccactggcaatggcaagcaagggaggtgctgttctcatggtttgcagaacctgtggtaagaagggtgaccactggacctcaaagtgcccctacaaggacctcgctccaccaactgatgcatcggacatgcctcctacttctgacggccctgcagcactgagtggccctgccaagggctcatacgttgctccaaggctgagggctggtgctgttcataccgatgctgggcacgacatgaggcgcaggaacgatgagaactctgtccgtgttaccaatctgtcggaggacacccgcgagcccgacctccttgagctgttccgcacgtttggcccggtcagccgtgtctacgttgcggtggatcagaagactggaatgagcaggggctttgggttcgtcaacttcgttcacagggaggacgccgagaaggccatcagcaagctcaatgggtatggttatgataacctcatcctccatgtggagatggctgcacctaggcctacttagttactgcctattaagcatccagatttcctacaagtgtcgtatcattatggtctccgaaataccagtacttttgtgtcgtgggcttgtgtcgtgttttgccttgttgagaataactacactctgttgatgaaaaagtgaatttttttaaaaaaaaaaaaaaaaaaaaaaaaaaaaaaaaaaaaaaaaaaaaaaagaaaaaaaaaaaaaaaaaagcttatcgataccgt

SEQ ID NO: 64621 - protein, 289 aa, Triticum aestivum
  peptide (1)..(289): Ceres Seq. ID no. 13656157
MPADAKIRWGELEEDDGGDLDFLLPPRVVIGPDENGFKKTIEYRFDDDGNKVKVTTTTRVRKLARARLSKAAVERRNWAKFGDAASGDDASARLTVVSTEEILLERPRAPGSKADEPSASGDPLAMASKGGAVLMVCRTCGKKGDHWTSKCPYKDLAPPTDASDMPPTSDGPAALSGPAKGSYVAPRLRAGAVHTDAGHDMRRRNDENSVRVTNLSEDTREPDLLELFRTFGPVSRVYVAVDQKTGMSRGFGFVNFVHREDAEKAISKLNGYGYDNLILHVEMAAPRPT

SEQ ID NO: 64622 - protein, 164 aa, Triticum aestivum
  peptide (1)..(164): Ceres Seq. ID no. 13656158
MASKGGAVLMVCRTCGKKGDHWTSKCPYKDLAPPTDASDMPPTSDGPAALSGPAKGSYVAPRLRAGAVHTDAGHDMRRRNDENSVRVTNLSEDTREPDLLELFRTFGPVSRVYVAVDQKTGMSRGFGFVNFVHREDAEKAISKLNGYGYDNLILHVEMAAPRPT

SEQ ID NO: 64623 - protein, 155 aa, Triticum aestivum
  peptide (1)..(155): Ceres Seq. ID no. 13656159
MVCRTCGKKGDHWTSKCPYKDLAPPTDASDMPPTSDGPAALSGPAKGSYVAPRLRAGAVHTDAGHDMRRRNDENSVRVTNLSEDTREPDLLELFRTFGPVSRVYVAVDQKTGMSRGFGFVNFVHREDAEKAISKLNGYGYDNLILHVEMAAPRPT

SEQ ID NO: 64624 - DNA, 1428 bp, Triticum aestivum
  misc_feature (1)..(1428): Ceres Seq. ID no. 15169639
ccggccactggccaagcatgaagcatccccattccttttcctttccgtagctttcttctttgccgctttgcgtgcctccctctctcgctctctcgtccgcagcagctgggacgatggggacgatgaggtcgtcggcggtggcggtagcggcgcggaagcagcagctgctgccatgcttggccctgctgcttcttgcgggggcggcgtccgcccaggcccagaagtacaacgcggtgttcaacttcggcgactccatcactgacacgggcaacctgtgcacgagcgggaagccgacggcgatcaccttcacgcagcccccctacggcgagacctacttcggcacccccacctgccggtgctccgacggccgcgtcatcgtcgacttcctcagcaccaagtttggggtgcctttcctgccaccgtccaaggcgaacggcacggacttcaagcagggtgcgaacatggccatcacgggggcgacggccatggacgcgcccttcttccgcggcctcggcctctcggacaagatctggaacaacgggcccatcagcttccagatccagtggttccagcagatcgccgccactgtgtgcgggaacgactgcaagcggtacctgcgcgagtcactggtggtgttcggcgagttcggcggcaacgactacaacgcgatgctgttcggcaactacaacccggaccaagcgagcaggtacacgaccaagatcgtcaacaccatcatcaggggcgtggagaaggtggtggcaatgggggccagggacgtggtggtgcccggggtgctccccatcggctgcttccccatctacctcaccgtctacggcaccaacagcagcgccgactacgacgccctcggctgcctccgcaagttcaacgacctctccaccttccacaacaacctgctccaggccaagatcgcccgcctccggaagcgctacggccgggcggcgcgcatcatgtacggcgacttctactccgccgtctacgacatggtccagaacccaaacaaatacggattcaacgcggctttcgaggcgtgctgcggctccgggggaggcaagtacaactacgccaacagcgcgaggtgcgggatgcagggcgcggcggcgtgcgccaacccggccgaccacctcagctgggacggcatccacctcaccgaggctgcctacaagcagatcaccgacggctggctcaacgggccctactgcagcccgcccatcctccacacttaaacattattttatttatttatttatatatggagttgggtagtattatttattatttgatttgaggttgagtttaccgaaaggaaaaagggaaatttgattcagtgccgtatggtggtgctgagatgtatacgttgcccaagaaaaaaaaatggaggcaactcttgaataaattgttaatgtttcc

SEQ ID NO: 64625 - protein, 376 aa, Triticum aestivum
  peptide (1)..(376): Ceres Seq. ID no. 15169640
MGTMRSSAVAVAARKQQLLPCLALLLLAGAASAQAQKYNAVFNFGDSITDTGNLCTSGKPTAITFTQPPYGETYFGTPTCRCSDGRVIVDFLSTKFGVPFLPPSKANGTDFKQGANMAITGATAMDAPFFRGLGLSDKIWNNGPISFQIQWFQQIAATVCGNDCKRYLRESLVVFGEFGGNDYNAMLFGNYNPDQASRYTTKIVNTIIRGVEKVVAMGARDVVVPGVLPIGCFPIYLTVYGTNSSADYDALGCLRKFNDLSTFHNNLLQAKIARLRKRYGRAARIMYGDFYSAVYDMVQNPNKYGFNAAFEACCGSGGGKYNYANSARCGMQGAAACANPADHLSWDGIHLTEAAYKQITDGWLNGPYCSPPILHT

SEQ ID NO: 64626 - protein, 373 aa, Triticum aestivum
  peptide (1)..(373): Ceres Seq. ID no. 15169641
MRSSAVAVAARKQQLLPCLALLLLAGAASAQAQKYNAVFNFGDSITDTGNLCTSGKPTAITFTQPPYGETYFGTPTCRCSDGRVIVDFLSTKFGVPFLPPSKANGTDFKQGANMAITGATAMDAPFFRGLGLSDKIWNNGPISFQIQWFQQIAATVCGNDCKRYLRESLVVFGEFGGNDYNAMLFGNYNPDQASRYTTKIVNTIIRGVEKVVAMGARDVVVPGVLPIGCFPIYLTVYGTNSSADYDALGCLRKFNDLSTFHNNLLQAKIARLRKRYGRAARIMYGDFYSAVYDMVQNPNKYGFNAAFEACCGSGGGKYNYANSARCGMQGAAACANPADHLSWDGIHLTEAAYKQITDGWLNGPYCSPPILHT

SEQ ID NO: 64627 - protein, 260 aa, Triticum aestivum
  peptide (1)..(260): Ceres Seq. ID no. 15169642
MAITGATAMDAPFFRGLGLSDKIWNNGPISFQIQWFQQIAATVCGNDCKRYLRESLVVFGEFGGNDYNAMLFGNYNPDQASRYTTKIVNTIIRGVEKVVAMGARDVVVPGVLPIGCFPIYLTVYGTNSSADYDALGCLRKFNDLSTFHNNLLQAKIARLRKRYGRAARIMYGDFYSAVYDMVQNPNKYGFNAAFEACCGSGGGKYNYANSARCGMQGAAACANPADHLSWDGIHLTEAAYKQITDGWLNGPYCSPPILHT

SEQ ID NO: 64628 - DNA, 1159 bp, Triticum aestivum
  misc_feature (1)..(1159): Ceres Seq. ID no. 13662725
cccaagcgaagccaaaggcagccttcacctgtacgcggcgcccaatctagtccaacccctccgccggcgccagatcgcggaggaccctgccgtctcccgcccattctccgcaaaggtctccatgctcatgagatgcaagcacatttgattttctataagttcaacgggcactaatgttaactgaagtattttcctcgatggaggctgaagctgattttgatgttgaagattccagatcaaacaatgaactgcaggagttgtggccagttggtgagatagacccaaagagagggcgattcccttgttgcattgtctggactcctcttcctgtagtttcatggcttgctccttacatagggcatgttggaatctgtcaggaggatggatctgtcctggattttgctggttcaaatttagtgagcatggataattttgcatatggttctgtcgctagatacctccagctggacagaaagaagtgctgctttcctgctaatctggcggcacatgtatgcgagtggtcatacaaacacacagaagttggaacagcaacatcatgggatggagccctgcaactgggcacgagacatttccagcacaaatactacaacctgttcacctgcaactgttactcattcgtggcaaactgcctgaaccggcttgcccacggtggttcggcggagtggaatgttttgaatgtggcagctcttgtttggctgcacggcgagtgggtggacaaaatgtctatcgttcggtcattcgcgccattcgtaactgtgacgtgcatcggtatttttatggccggctggtctttcctaatagggatattggcgttctgtttgcttctgatagggtggtttgtctttgctgtatactgcacgaaaggtttggtgtgctgatattacattgcgactgaacctggtgaggaattgtggaaataatctgtctgggaccattcatccatgctcgtgattattcgtctgaaacttatcaaaacactgcacctgctaaggcctcctttgctgtgtaggatatgaacactacagaaatgggaaagctgtagaaagtgagatacatgtatctgaaattctatgaatggaaatatgaaaagagatatcatttggttcagacggtatgatttttagcattgagtattttt

SEQ ID NO: 64629 - protein, 241 aa, Triticum aestivum
  peptide (1)..(241): Ceres Seq. ID no. 13662726
MLTEVFSSMEAEADFDVEDSRSNNELQELWPVGEIDPKRGRFPCCIVWTPLPVVSWLAPYIGHVGICQEDGSVLDFAGSNLVSMDNFAYGSVARYLQLDRKKCCFPANLAAHVCEWSYKHTEVGTATSWDGALQLGTRHFQHKYYNLFTCNCYSFVANCLNRLAHGGSAEWNVLNVAALVWLHGEWVDKMSIVRSFAPFVTVTCIGIFMAGWSFLIGILAFCLLLIGWFVFAVYCTKGLVC

SEQ ID NO: 64630 - protein, 233 aa, Triticum aestivum
  peptide (1)..(233): Ceres Seq. ID no. 13662727
MEAEADFDVEDSRSNNELQELWPVGEIDPKRGRFPCCIVWTPLPVVSWLAPYIGHVGICQEDGSVLDFAGSNLVSMDNFAYGSVARYLQLDRKKCCFPANLAAHVCEWSYKHTEVGTATSWDGALQLGTRHFQHKYYNLFTCNCYSFVANCLNRLAHGGSAEWNVLNVAALVWLHGEWVDKMSIVRSFAPFVTVTCIGIFMAGWSFLIGILAFCLLLIGWFVFAVYCTKGLVC

SEQ ID NO: 64631 - protein, 158 aa, Triticum aestivum
  peptide (1)..(158): Ceres Seq. ID no. 13662728
MDNFAYGSVARYLQLDRKKCCFPANLAAHVCEWSYKHTEVGTATSWDGALQLGTRHFQHKYYNLFTCNCYSFVANCLNRLAHGGSAEWNVLNVAALVWLHGEWVDKMSIVRSFAPFVTVTCIGIFMAGWSFLIGILAFCLLLIGWFVFAVYCTKGLVC

SEQ ID NO: 64632 - DNA, 1276 bp, Triticum aestivum
  misc_feature (1)..(1276): Ceres Seq. ID no. 14303600
gaaaaagtaatcctgttatctcctcgcgtcgccctcggcgcaataataaaagcgcaacggcacccagcgatctaggcctcctcctcgctcgcatcgccttccctccgctcgcgtctgctacacttcctctcccggcccggctagatctcgccggcaggagatggcggacgcgaagcagcagcaggccgcggcgcccactggcgtctggaagacgatcaagccattcgtcaatggcggcgcctccgggatgctcgccacctgcgtcatccagcccatcgacatgatcaaggtgaagatccagttgggcgagggatctgcagctcaggtcgcaaagaccatgtatgctaatgagggccttggttccttttacaagggtttgtcagctggtttactaaggcaagcgacctatacgacagctcgtcttggatccttcagggttttgacaaacaaagcaattgaggcaaatgatgggaagccattgccacttgttcagaaagcttttattggtctgactgctggagcgattggcgcatgtgtgggcagtcctgctgatttggcactcattaggatgcaagctgactcgaccctaccagcagcacagcggcgtcactacaagaatgcattccatgcactctaccgtatcaccgctgatgaaggcgtccttgcgctttggaagggtgcaggcccaactgtggtgagagccatgtcactgaatatgggtatgcttgcgtcctatgatcaaagtgttgagctgttcagagacaaattgggtgccggggaatatcagactgttattggagccagtgccatttctggattctgtgcggctgcttgcagtctgccctttgattacgtgaaaacacaaattcagaagatgcaacctgatgccactggcaagtacccatacactgggtctttggactgcgccatgcaaaccttgaagaccggtggcccatttaagttctactccggcttccctgtatattgtgtcaggatcgccccgcatgtcatgatgacgtggctcttcttgaatcaaatccagaagtaccagaagaagatcggcatataagatctccagttggagacaagagtaccaatccttgttcgacacatttaataactttccagcagctttgcactcccgtggttgtttttggtagacagagttttaagcaatttttaccgtagcttacatttgctgtggtactcttgacgttgttacaataatcacataatcacattatttgttgtatttggggcaatttttttggcgggc

SEQ ID NO: 64633 - protein, 302 aa, Triticum aestivum
  peptide (1)..(302): Ceres Seq. ID no. 14303601
MADAKQQQAAAPTGVWKTIKPFVNGGASGMLATCVIQPIDMIKVKIQLGEGSAAQVAKTMYANEGLGSFYKGLSAGLLRQATYTTARLGSFRVLTNKAIEANDGKPLPLVQKAFIGLTAGAIGACVGSPADLALIRMQADSTLPAAQRRHYKNAFHALYRITADEGVLALWKGAGPTVVRAMSLNMGMLASYDQSVELFRDKLGAGEYQTVIGASAISGFCAAACSLPFDYVKTQIQKMQPDATGKYPYTGSLDCAMQTLKTGGPFKFYSGFPVYCVRIAPHVMMTWLFLNQIQKYQKKIGI

SEQ ID NO: 64634 - protein, 273 aa, Triticum aestivum
  peptide (1)..(273): Ceres Seq. ID no. 14303602
MLATCVIQPIDMIKVKIQLGEGSAAQVAKTMYANEGLGSFYKGLSAGLLRQATYTTARLGSFRVLTNKAIEANDGKPLPLVQKAFIGLTAGAIGACVGSPADLALIRMQADSTLPAAQRRHYKNAFHALYRITADEGVLALWKGAGPTVVRAMSLNMGMLASYDQSVELFRDKLGAGEYQTVIGASAISGFCAAACSLPFDYVKTQIQKMQPDATGKYPYTGSLDCAMQTLKTGGPFKFYSGFPVYCVRIAPHVMMTWLFLNQIQKYQKKIGI

SEQ ID NO: 64635 - protein, 262 aa, Triticum aestivum
  peptide (1)..(262): Ceres Seq. ID no. 14303603
MIKVKIQLGEGSAAQVAKTMYANEGLGSFYKGLSAGLLRQATYTTARLGSFRVLTNKAIEANDGKPLPLVQKAFIGLTAGAIGACVGSPADLALIRMQADSTLPAAQRRHYKNAFHALYRITADEGVLALWKGAGPTVVRAMSLNMGMLASYDQSVELFRDKLGAGEYQTVIGASAISGFCAAACSLPFDYVKTQIQKMQPDATGKYPYTGSLDCAMQTLKTGGPFKFYSGFPVYCVRIAPHVMMTWLFLNQIQKYQKKIGI

SEQ ID NO: 64636 - DNA, 1783 bp, Triticum aestivum
  misc_feature (1)..(1783): Ceres Seq. ID no. 13655852
cccgaatccaaatccgccattgcacagccggaccagtgccactcgaaccccacgtaccctctctatcccaaccctagcgcggcggcggcgtcgatggcgtcgatggcgtcgatcccgtctgacgaggtctccgagaacggccacggcaacggaaacggcccatccccgccgcgcgccaagcgcccccgcgcagcgttgatctcggccgcccagatccgcgacgagttcgcgcatcacgaccccgcagttgcccgcgtcaacaacggcagcttcggctgctgcccggcctccgtgctcgaagcgcaggcgcgctggcagcgcctcttcctcgctcagcccgacgccttctacttcgacggccttcagccggggctccgccgctcccgcgcagccgtcgcggcccttgtcaacgctggggacgtctccgagatttccctcgtcgacaacgctaccaccgctgctgcaatcgtgctgcagcatgccgcctggagctttgccgaggggcacttcgctcgtggcgacgctgtgctcatgctccattacgcctacggagcagtaaagaaatctatccaggcctacgttgcccgcgcgggcgccactgtcgtcgaggtacccctcccgttcccggtcacctcccctgacgccattattgcggagttccatgctgcgctcgctgttgccaaggccggtggtcgtaaggtccggcttgctgtcattgatcacatcacctccatgcccagtgttctcattccagtcaaggagctagttgccatttgtcgccatgagggtgtcgacaaagtttttgttgatgctgcacactctgttgggcaagtccctgtcgatgtgcgagacattggggcggatttctacactagcaacctccacaagtggttcttttgccccccggccgtggctttcttacacacccgcaagggtggcccgataacctctcagctccaccaccctgttgtgtcacatgaatatggcaacgggctacctatggagagtggatggattgggacacgggattacagtgcccagatcgtcgttcctgaagctattcactttgtgaaccgatttgaaggtgggattgaggggatacgcagccggaaccatgagaaggtaattgagatggggaggatgcttgccgaagcatgggggacagttcttggatcaccaccagtaatgtgtggaagcatggctatggtagggatgcctagttgtctttgcattgagagtgacgatgatgcactgagagtgcggaccatgttgaggaaggatttcaaagttgaggtgcctatatactacaatagcagacaggttaaagtgcaagagatggcaaaggataatagtagtgatccagtgacggggtatgtaagaatctcacaccaggtttacaatgtcaaggaggagtatgagaggctgagagatgctgtcaataagcttgttgctgaggggttcaccagtgccgaattgaggccagctgagaagcaagaagctctggcttgatgacgtggcatctagccagcactccatccgaagatggattaattagttgtggatctgtgccagaagcctgtgctgcaccgagatcgagttctttggtagcccgctcaatggcatcgccatttgatgtagtgtactttcacatactgacaaatgttgtatttgagcttgcaataacgtgcactggaatggaatgtatgtcttctcccttcacttgcatttttgagctgtaatgtaagaataatgatctgaatgcaaggagacttgcatgctttct

SEQ ID NO: 64637 - protein, 502 aa, Triticum aestivum
  peptide (1)..(502): Ceres Seq. ID no. 13655853
PESKSAIAQPDQCHSNPTYPLYPNPSAAAASMASMASIPSDEVSENGHGNGNGPSPPRAKRPRAALISAAQIRDEFAHHDPAVARVNNGSFGCCPASVLEAQARWQRLFLAQPDAFYFDGLQPGLRRSRAAVAALVNAGDVSEISLVDNATTAAAIVLQHAAWSFAEGHFARGDAVLMLHYAYGAVKKSIQAYVARAGATVVEVPLPFPVTSPDAIIAEFHAALAVAKAGGRKVRLAVIDHITSMPSVLIPVKELVAICRHEGVDKVFVDAAHSVGQVPVDVRDIGADFYTSNLHKWFFCPPAVAFLHTRKGGPITSQLHHPVVSHEYGNGLPMESGWIGTRDYSAQIVVPEAIHFVNRFEGGIEGIRSRNHEKVIEMGRMLAEAWGTVLGSPPVMCGSMAMVGMPSCLCIESDDDALRVRTMLRKDFKVEVPIYYNSRQVKVQEMAKDNSSDPVTGYVRISHQVYNVKEEYERLRDAVNKLVAEGFTSAELRPAEKQEALA

SEQ ID NO: 64638 - protein, 471 aa, Triticum aestivum
  peptide (1)..(471): Ceres Seq. ID no. 13655854
MASMASIPSDEVSENGHGNGNGPSPPRAKRPRAALISAAQIRDEFAHHDPAVARVNNGSFGCCPASVLEAQARWQRLFLAQPDAFYFDGLQPGLRRSRAAVAALVNAGDVSEISLVDNATTAAAIVLQHAAWSFAEGHFARGDAVLMLHYAYGAVKKSIQAYVARAGATVVEVPLPFPVTSPDAIIAEFHAALAVAKAGGRKVRLAVIDHITSMPSVLIPVKELVAICRHEGVDKVFVDAAHSVGQVPVDVRDIGADFYTSNLHKWFFCPPAVAFLHTRKGGPITSQLHHPVVSHEYGNGLPMESGWIGTRDYSAQIVVPEAIHFVNRFEGGIEGIRSRNHEKVIEMGRMLAEAWGTVLGSPPVMCGSMAMVGMPSCLCIESDDDALRVRTMLRKDFKVEVPIYYNSRQVKVQEMAKDNSSDPVTGYVRISHQVYNVKEEYERLRDAVNKLVAEGFTSAELRPAEKQEALA

SEQ ID NO: 64639 - protein, 468 aa, Triticum aestivum
  peptide (1)..(468): Ceres Seq. ID no. 13655855
MASIPSDEVSENGHGNGNGPSPPRAKRPRAALISAAQIRDEFAHHDPAVARVNNGSFGCCPASVLEAQARWQRLFLAQPDAFYFDGLQPGLRRSRAAVAALVNAGDVSEISLVDNATTAAAIVLQHAAWSFAEGHFARGDAVLMLHYAYGAVKKSIQAYVARAGATVVEVPLPFPVTSPDAIIAEFHAALAVAKAGGRKVRLAVIDHITSMPSVLIPVKELVAICRHEGVDKVFVDAAHSVGQVPVDVRDIGADFYTSNLHKWFFCPPAVAFLHTRKGGPITSQLHHPVVSHEYGNGLPMESGWIGTRDYSAQIVVPEAIHFVNRFEGGIEGIRSRNHEKVIEMGRMLAEAWGTVLGSPPVMCGSMAMVGMPSCLCIESDDDALRVRTMLRKDFKVEVPIYYNSRQVKVQEMAKDNSSDPVTGYVRISHQVYNVKEEYERLRDAVNKLVAEGFTSAELRPAEKQEALA

SEQ ID NO: 64640 - DNA, 1104 bp, Triticum aestivum
  misc_feature (1)..(1104): Ceres Seq. ID no. 12625870
tcccacccctttacctcgtgcgatcactgagaaccataggtagaagaaaccctcgaagagcagctcttaggctcgcactctcgaatcctagcccccttgtccgcttcaattggagtcgcagggtgagggtaccgggtcgagcttctgggccagcatggtgcccagggacatggtgaatgcccccgccgaaaggctgcacgtccaagggtctgtcgtgaacaagaagtgtgagacgaaggtgccaaataaaatccacaagtcggagagggagaagcggaagcgaggcacgcagaatgacctctttaatgagctgggagccatgctagaaccagacaggcagaacaacgggaaggcatgtgtattgggtgacactacacggatactgaaggatttagtttcacaagtggaatctcttcggaaggagaatagcacactgaagaatgaatctcactatgttgtgttggagagaaatgaactgcgtgatgacaacagcatgcttcgcaatgaaatccaggagcttcagaacaagctgagaatgcgtctgcaaagcaaccctatttggagccaggatactactacaagatcagccgttgcagtaccttatcccacaagcggagtgttcccagtacagcattcaccacattcaccagtcatcacctcgacggcactttctctgcaacctgtaatcactgagcaatgctatgctgccccactacgagagctgcagctcttcccagaagtttcacctacatccactgaagatagcgaactgtcacaagaccagtggatttccaatagtgtaacaaggccccaggcacggtacccaacaccagcggcgatgtcgccagtaaatgagttcccaatccttccaaggatgggagaggagcaacaatatagtagtggcactagtgaggaagacggtccacacagggtttaagtacataacacaatttgcttcaccgtttgagaagtttctgtagtgtgagtggagtgtgtttctctgcaacagatacatatgcagacgtgcatgtaaactccaatctgtctccgaatcttgatcttaactggttaaataggtgataataaaaaatgctttacaccctc

SEQ ID NO: 64641 - protein, 260 aa, Triticum aestivum
  peptide (1)..(260): Ceres Seq. ID no. 12625871
MVPRDMVNAPAERLHVQGSVVNKKCETKVPNKIHKSEREKRKRGTQNDLFNELGAMLEPDRQNNGKACVLGDTTRILKDLVSQVESLRKENSTLKNESHYVVLERNELRDDNSMLRNEIQELQNKLRMRLQSNPIWSQDTTTRSAVAVPYPTSGVFPVQHSPHSPVITSTALSLQPVITEQCYAAPLRELQLFPEVSPTSTEDSELSQDQWISNSVTRPQARYPTPAAMSPVNEFPILPRMGEEQQYSSGTSEEDGPHRV

SEQ ID NO: 64642 - protein, 255 aa, Triticum aestivum
  peptide (1)..(255): Ceres Seq. ID no. 12625872
MVNAPAERLHVQGSVVNKKCETKVPNKIHKSEREKRKRGTQNDLFNELGAMLEPDRQNNGKACVLGDTTRILKDLVSQVESLRKENSTLKNESHYVVLERNELRDDNSMLRNEIQELQNKLRMRLQSNPIWSQDTTTRSAVAVPYPTSGVFPVQHSPHSPVITSTALSLQPVITEQCYAAPLRELQLFPEVSPTSTEDSELSQDQWISNSVTRPQARYPTPAAMSPVNEFPILPRMGEEQQYSSGTSEEDGPHRV

SEQ ID NO: 64643 - protein, 205 aa, Triticum aestivum
  peptide (1)..(205): Ceres Seq. ID no. 12625873
MLEPDRQNNGKACVLGDTTRILKDLVSQVESLRKENSTLKNESHYVVLERNELRDDNSMLRNEIQELQNKLRMRLQSNPIWSQDTTTRSAVAVPYPTSGVFPVQHSPHSPVITSTALSLQPVITEQCYAAPLRELQLFPEVSPTSTEDSELSQDQWISNSVTRPQARYPTPAAMSPVNEFPILPRMGEEQQYSSGTSEEDGPHRV

SEQ ID NO: 64644 - DNA, 1283 bp, Triticum aestivum
  misc_feature (1)..(1283): Ceres Seq. ID no. 13579918
tatctccctgcagtagacatcgcattcaggcacacataatcagcaattcagcagagtcgccaccatgggcgccaccaatcataccttgcaagcgctgctcccatggctcctcctgttcgtgcagcaggccgccgcggccagcggcgggtgcgagtgcacgaccgccacggacggggcggacaagcagggcgcgatgaagctgaagctggtcgccatcgcgtccatcctcaccgccggggcggctggcgtgctggtgccggtgctcggccgctccatggccgcgctgcgccccgacggcgacatcttcttcgcggtcaaggcgtttgccgctggcgtcatacttgccaccggcatggtgcacatcctgccggcggcgttcgacgggctcacctccccgtgcatccacaaaggcggcggggacaggaacggcttcccttttgccggccttgtggccatgtctgcagccatggccacaatggtgatagactcgctggctgctgggtactaccgccggtctcacttcagcaaggcgcgcccacttgacaacattgacatgcccggagatgaggaagggagggccgatcatccacatatgcacgcgcatggccattcacatggtgaggcaattgttgtcagctcaccggaggaggcggcgatagctgacacaatccggcacagggtggtatctcaggttctagagctgggaatcttggtgcattcagtgataattggtgtgtcattaggagcatctgtgaggccatccaccatcaagcctctggtcggtgccctcagcttccatcaattctttgaaggcataggcttgggtggttgcattgtacaggctaatttcaaggtaagggcaaccatcatcatggcaacgtttttctccctgaccgcacccgtgggcatcgtgctagggattgcgatttcatctagctataatgtgcatagctctactgccttcattattgagggagtcttcaactcagcctcggcagggattttgatctacatgtccctggtggaccttctagcaacagatttcaataacccaaagctacagacaaatacaaagcttcagctgatgacatatcttgcacttttcctaggtgcagggatgatgtccatgcttgccatatgggcatagagatcttcaaagcaattgctaaatttgcacttgtatttcctgctaaagttgaagtatgcattgtattcatccaggggttgtccatttccccaaaataatacacccttggtgaaaaattaaccatattcatccattg

SEQ ID NO: 64645 - protein, 360 aa, Triticum aestivum
  peptide (1)..(360): Ceres Seq. ID no. 13579919
MGATNHTLQALLPWLLLFVQQAAAASGGCECTTATDGADKQGAMKLKLVAIASILTAGAAGVLVPVLGRSMAALRPDGDIFFAVKAFAAGVILATGMVHILPAAFDGLTSPCIHKGGGDRNGFPFAGLVAMSAAMATMVIDSLAAGYYRRSHFSKARPLDNIDMPGDEEGRADHPHMHAHGHSHGEAIVVSSPEEAAIADTIRHRVVSQVLELGILVHSVIIGVSLGASVRPSTIKPLVGALSFHQFFEGIGLGGCIVQANFKVRATIIMATFFSLTAPVGIVLGIAISSSYNVHSSTAFIIEGVFNSASAGILIYMSLVDLLATDFNNPKLQTNTKLQLMTYLALFLGAGMMSMLAIWA

SEQ ID NO: 64646 - protein, 317 aa, Triticum aestivum
  peptide (1)..(317): Ceres Seq. ID no. 13579920
MKLKLVAIASILTAGAAGVLVPVLGRSMAALRPDGDIFFAVKAFAAGVILATGMVHILPAAFDGLTSPCIHKGGGDRNGFPFAGLVAMSAAMATMVIDSLAAGYYRRSHFSKARPLDNIDMPGDEEGRADHPHMHAHGHSHGEAIVVSSPEEAAIADTIRHRVVSQVLELGILVHSVIIGVSLGASVRPSTIKPLVGALSFHQFFEGIGLGGCIVQANFKVRATIIMATFFSLTAPVGIVLGIAISSSYNVHSSTAFIIEGVFNSASAGILIYMSLVDLLATDFNNPKLQTNTKLQLMTYLALFLGAGMMSMLAIWA

SEQ ID NO: 64647 - protein, 290 aa, Triticum aestivum
  peptide (1)..(290): Ceres Seq. ID no. 13579921
MAALRPDGDIFFAVKAFAAGVILATGMVHILPAAFDGLTSPCIHKGGGDRNGFPFAGLVAMSAAMATMVIDSLAAGYYRRSHFSKARPLDNIDMPGDEEGRADHPHMHAHGHSHGEAIVVSSPEEAAIADTIRHRVVSQVLELGILVHSVIIGVSLGASVRPSTIKPLVGALSFHQFFEGIGLGGCIVQANFKVRATIIMATFFSLTAPVGIVLGIAISSSYNVHSSTAFIIEGVFNSASAGILIYMSLVDLLATDFNNPKLQTNTKLQLMTYLALFLGAGMMSMLAIWA

SEQ ID NO: 64648 - DNA, 1499 bp, Triticum aestivum
  misc_feature (1)..(1499): Ceres Seq. ID no. 13597498
ctctcacacggctttccctctctctcctcccgttcgaactaggaatccgaggtgagcacgggcaaagcgatggccgcggccaggccgcaccacagggcgccgccggggcgcgtgcccacgaggtgcgtcgccgcgctctgcgccgcctgcttcctcctcggcgtctgcgtcgtcaaccgctactgggcggttcccgagccacccgattgcccaagcaaggcgaactctgggcgttcgagggccgtgctgagccaagcacaaacccgcgaagtcatcatcgcgttggacagaacgatatcggacatcgagatgcgcctggccgccgccagagccgcgcagatgaggaaccaaggcgtgtcgccgagtgattcagccgctgaccagggaaacatgcgacctagattgcttttcgtcatgggtatcatgaccacattcgataatcggaggcgcagagactctatcaggaagacgtggatgccacaaggtgagcgtttgcgaatgctggagaaggacaagggcattgtcacgcgttttgttattggacgaagtgcaaatcctggtcctgacagtgaagtggagcgtgccatggatgcagaagagaaagaatacaatgatattcttagacttaatcacgttgaaggccaggatgggcttcctttgaagattcagatgtttctttcaagtgctctgtccacgtgggatgctgatttctatgtcaaagttgacgatgatgttcatgtcaacattggtattaccagatcgattttggcacgacataggtcaaaacctcgggtgtacatcggctgcatgaaatccggacctgtgatcgctaacaatgaatctaaatattacgaaccagatcattggaagtttgggactgcgggtaacaactactttaggcacgcaacacggcagctgtatgctataacaagggacttggcgacctacatatcagcaaacaagcatatcttgcacaaatatacaaatgaagatgtatcatttggttcttggttgattgggttggatgttgagcatgttgatgagagaagcctttgttgtggtattcctccagactgcgaatggaaggcgcaggctgggaacccatgtggggcatccttcgactggaactgctccggcgtctgcaatccagcagagagaatggaggaggtgcaccggcgatgctgggaacatcgcgaggctgctctgccacaagcgcaggagtcttgacaatcaaggggtggtggcatccttgtgctgctccatgtaaactcatgtaaattattcggtagacgaagacgcagcagctgtcgtgccgttgtctgggttcttggagctacacatttttgccttccgacgccgtgcatttgcatgaattggaggggaaatttgaacagagctacggcatagtgaaggttttgcatcgtgtatgtaagatatccgatatgtgaaaatgaatgcaggaaagctctgcaaattgtgtcgtcatgattaaatggtcg

SEQ ID NO: 64649 - protein, 385 aa, Triticum aestivum
  peptide (1)..(385): Ceres Seq. ID no. 13597499
MAAARPHHRAPPGRVPTRCVAALCAACFLLGVCVVNRYWAVPEPPDCPSKANSGRSRAVLSQAQTREVIIALDRTISDIEMRLAAARAAQMRNQGVSPSDSAADQGNMRPRLLFVMGIMTTFDNRRRRDSIRKTWMPQGERLRMLEKDKGIVTRFVIGRSANPGPDSEVERAMDAEEKEYNDILRLNHVEGQDGLPLKIQMFLSSALSTWDADFYVKVDDDVHVNIGITRSILARHRSKPRVYIGCMKSGPVIANNESKYYEPDHWKFGTAGNNYFRHATRQLYAITRDLATYISANKHILHKYTNEDVSFGSWLIGLDVEHVDERSLCCGIPPDCEWKAQAGNPCGASFDWNCSGVCNPAERMEEVHRRCWEHREAALPQAQES

SEQ ID NO: 64650 - protein, 305 aa, Triticum aestivum
  peptide (1)..(305): Ceres Seq. ID no. 13597500
MRLAAARAAQMRNQGVSPSDSAADQGNMRPRLLFVMGIMTTFDNRRRRDSIRKTWMPQGERLRMLEKDKGIVTRFVIGRSANPGPDSEVERAMDAEEKEYNDILRLNHVEGQDGLPLKIQMFLSSALSTWDADFYVKVDDDVHVNIGITRSILARHRSKPRVYIGCMKSGPVIANNESKYYEPDHWKFGTAGNNYFRHATRQLYAITRDLATYISANKHILHKYTNEDVSFGSWLIGLDVEHVDERSLCCGIPPDCEWKAQAGNPCGASFDWNCSGVCNPAERMEEVHRRCWEHREAALPQAQES

SEQ ID NO: 64651 - protein, 295 aa, Triticum aestivum
  peptide (1)..(295): Ceres Seq. ID no. 13597501
MRNQGVSPSDSAADQGNMRPRLLFVMGIMTTFDNRRRRDSIRKTWMPQGERLRMLEKDKGIVTRFVIGRSANPGPDSEVERAMDAEEKEYNDILRLNHVEGQDGLPLKIQMFLSSALSTWDADFYVKVDDDVHVNIGITRSILARHRSKPRVYIGCMKSGPVIANNESKYYEPDHWKFGTAGNNYFRHATRQLYAITRDLATYISANKHILHKYTNEDVSFGSWLIGLDVEHVDERSLCCGIPPDCEWKAQAGNPCGASFDWNCSGVCNPAERMEEVHRRCWEHREAALPQAQES

SEQ ID NO: 64652 - DNA, 1230 bp, Triticum aestivum
  misc_feature (1)..(1230): Ceres Seq. ID no. 13590233
tcgagatctccccacgggccaaggccaggagccaacaaacgcaaggccaccgccgcctctgcgcctccgcagtcgccgttctgcgcccttgcccgccaccgcccggagagatggcgaaggcgttttacgcggtgggtttctggatccgggagaccggtcaggccctcgaccgcctcggctgtcgcctccaggggaactacttcttccacgagcagatttcaaggcatcgcacacttatgaacatctttgacaaagcccctcatgttcacaaagaggcatttgtcgctccaagtgcatcccttattggcgatgttgaagttgggcaagggtcttcaatttggtacggatgcattttaagaggtgatgcaaataacgttcaagttggatctgagaccaatatacaggacaattctgttgtgcatgtggcaaaatctaatctaagtggaaaagtctttccaactatcattggagacaatgtcacagtagggcatagtgctgtattacaaggatgcactgttgaggatgaagcttttgttggtatgggggctaccctgttagatggtgttgttgtggaaaagcatgggatggtcgctgctggagcccttgtaagacagaacacgaggatcccttgtggagaggtatggggtggaaaccctgcaaaatttctgaggaagctcacagacgaggagatcgcttttattgcggaatcagctgccaactattccaacttagccaaggcacatgctgttgagaatgctaaacccttggaaaagattgattttgagaaagtgctgcgcaagaaatttgctcaccaggacaatgaacacgattccatgcttagtgtcactcgagaggtccctccagagctggcgccccccagtcctactcctgcccaataagcttttcttatcaccaccttcagtttggattcttatatctctatctgtccagtgagtttggcagtttacttttacttaagtaattttgggtcgagcaatgttctaaagctgaccatgcacttcaatttctgtattccatatgttcaagatccatggaacaaatagatccatttcgcacaaatttaccagtagcatgcgctgcgtgcatagtttactctggctgaaattgcgagatgcactggaggcagcacatgaactgttggcctgtagttaaatgcttaattgaataaatattttgataacaaaaagtactgaaggacaaattttattg

SEQ ID NO: 64653 - protein, 298 aa, Triticum aestivum
  peptide (1)..(298): Ceres Seq. ID no. 13590234
EISPRAKARSQQTQGHRRLCASAVAVLRPCPPPPGEMAKAFYAVGFWIRETGQALDRLGCRLQGNYFFHEQISRHRTLMNIFDKAPHVHKEAFVAPSASLIGDVEVGQGSSIWYGCILRGDANNVQVGSETNIQDNSVVHVAKSNLSGKVFPTIIGDNVTVGHSAVLQGCTVEDEAFVGMGATLLDGVVVEKHGMVAAGALVRQNTRIPCGEVWGGNPAKFLRKLTDEEIAFIAESAANYSNLAKAHAVENAKPLEKIDFEKVLRKKFAHQDNEHDSMLSVTREVPPELAPPSPTPAQ

SEQ ID NO: 64654 - protein, 262 aa, Triticum aestivum
  peptide (1)..(262): Ceres Seq. ID no. 13590235
MAKAFYAVGFWIRETGQALDRLGCRLQGNYFFHEQISRHRTLMNIFDKAPHVHKEAFVAPSASLIGDVEVGQGSSIWYGCILRGDANNVQVGSETNIQDNSVVHVAKSNLSGKVFPTIIGDNVTVGHSAVLQGCTVEDEAFVGMGATLLDGVVVEKHGMVAAGALVRQNTRIPCGEVWGGNPAKFLRKLTDEEIAFIAESAANYSNLAKAHAVENAKPLEKIDFEKVLRKKFAHQDNEHDSMLSVTREVPPELAPPSPTPAQ

SEQ ID NO: 64655 - protein, 220 aa, Triticum aestivum
  peptide (1)..(220): Ceres Seq. ID no. 13590236
MNIFDKAPHVHKEAFVAPSASLIGDVEVGQGSSIWYGCILRGDANNVQVGSETNIQDNSVVHVAKSNLSGKVFPTIIGDNVTVGHSAVLQGCTVEDEAFVGMGATLLDGVVVEKHGMVAAGALVRQNTRIPCGEVWGGNPAKFLRKLTDEEIAFIAESAANYSNLAKAHAVENAKPLEKIDFEKVLRKKFAHQDNEHDSMLSVTREVPPELAPPSPTPAQ

SEQ ID NO: 64656 - DNA, 1300 bp, Triticum aestivum
  misc_feature (1)..(1300): Ceres Seq. ID no. 12617675
aaccacagttcacacggcgcacggcgagctcagtacagtacagcgaggggaaggagcactggggggacagtagctagcgttgcgagttccccggccaatggcaatggcgtggtggaagaacggcgccttggtcgccgcggcgaccctcgccgtggccgcggtggtctgcgccggcgtggcggcggcggcgagcaagttcgacgacgtggtgcagcccagctgggccaacgaccacgtcctctacgaggatgacctcctcaagctccgcctcgacagctcctccggcgggggattcgcgtccaagaacaagttcttgtacggcaaggccaccgccgacctgaagctcgtgccgggggactccgccggcgtcgtcacggctttctatctgtcgtcggcgggggacaagcacaacgagttcgacttcgagttcctgggcaacgtcaccggcgagccgtacctggtgcagaccaacctgtacatcgacggcgtgggcaacccgggagcagcgcatcgacctctggttcgaccccaccgccgacttccacacctacgccgtgctctggaaccccagccaggtcgtcttcctcgtcgacgacacccccatccgcgtctacgacaacaagaacgcctccgccaccaagcccaagggccaccaccgccaccccaacaacgccaccaccgccgccacccagacggcgtccgcgttcccgtcgccgcagcccatggccgtgtacagctccatctggaacgcggacgactgggccacgcgcggcgggctggtcaagacggactggtcgcacgcgccgttcgtggccaccttccgggacgtgcgcgtggagggctgcgcctgggccgccaacgcctccgactcggacgccggcgaggtggcgcgctgcagcggcagctcctggggcaaggagggccgctactggtggaaggagaaggacatgcaggagctgtccgtgcaccagagccaccagctggtgtgggcgcgcgcgcaccacctcgtctacgactactgcgtcgacaccgaccgcttccccgtccagccgcccgagtgcgccggccgctgatccgccgcgtcgtcgccggccgcctccatggaaatcttttattagcactccgtagaatggatccatgacatcgatggatcgtcgtagctgctcgtttcagtttcgatttaggtccgtagcctctccgatgagcttcgatcgtgtttgctatctctgccttgcagttctcttgttcttgttgttatgttggggtgtcctgtataaattcgtccgtggaagtgatgctc

SEQ ID NO: 64657 - protein, 347 aa, Triticum aestivum
  peptide (1)..(347): Ceres Seq. ID no. 12617676
MAMAWWKNGALVAAATLAVAAVVCAGVAAAASKFDDVVQPSWANDHVLYEDDLLKLRLDSSSGGGFASKNKFLYGKATADLKLVPGDSAGVVTAFYLSSAGDKHNEFDFEFLGNVTGEPYLVQTNLYIDGVGNPGAAHRPLVRPHRRLPHLRRALEPQPGRLPRRRHPHPRLRQQERLRHQAQGPPPPPQQRHHRRHPDGVRVPVAAAHGRVQLHLERGRLGHARRAGQDGLVARAVRGHLPGRARGGLRLGRQRLRLGRRRGGALQRQLLGQGGPLLVEGEGHAGAVRAPEPPAGVGARAPPRLRLLRRHRPLPRPAARVRRPLIRRVVAGRLHGNLLLALRRMDP

SEQ ID NO: 64658 - protein, 345 aa, Triticum aestivum
  peptide (1)..(345): Ceres Seq. ID no. 12617677
MAWWKNGALVAAATLAVAAVVCAGVAAAASKFDDVVQPSWANDHVLYEDDLLKLRLDSSSGGGFASKNKFLYGKATADLKLVPGDSAGVVTAFYLSSAGDKHNEFDFEFLGNVTGEPYLVQTNLYIDGVGNPGAAHRPLVRPHRRLPHLRRALEPQPGRLPRRRHPHPRLRQQERLRHQAQGPPPPPQQRHHRRHPDGVRVPVAAAHGRVQLHLERGRLGHARRAGQDGLVARAVRGHLPGRARGGLRLGRQRLRLGRRRGGALQRQLLGQGGPLLVEGEGHAGAVRAPEPPAGVGARAPPRLRLLRRHRPLPRPAARVRRPLIRRVVAGRLHGNLLLALRRMDP

SEQ ID NO: 64659 - DNA, 1750 bp, Triticum aestivum
  misc_feature (1)..(1750): Ceres Seq. ID no. 15169663
cgcgcgccacgccaagcagagcaaacccacgccgccgccgccgccgccgccgccgtcgtattcgcccacgcgcgcacagaagactccactccctcctctcgcagccatggcggtggcggacaaggcggtcgccgggggcggcgaggcccagcagccggagccggagccggagccggccgccgaggcctcaacgttcgccgagctgggcgtctgccgcgagctggtggaggcctgcgacgccatggggtggaagcagcccaccaagatccaggcgggggccatcccccacgccctccaagggagggacgtgattgggctggggcagacggggtcggggaagacgggcgcgttcgcgctgcccatcatccaggcgctgctcgagcaccgccagcccttcttcgcctgcatcatgtcgcccacgagggagctggcgattcagattgcggagcagtttgaggcgttagggtcagctatcggcttggtttgctcagtgcttgttggaggagttgaccggatgcagcaagtgttatccattgcaaaacgtccacatattgtggttggaactcctggccgtcttttggaccatttgaaagatacaaaaggttttagcctaactaaagtgaaatacctggtacttgatgaagctgataaattacttaatttggagttcaaggaatcacttgatgatattctgaaggtcattcctaaagaaaggagaacttaccttttttcagccacaatgaccaaaaaggtaagcaaactgcaacgtgcttgtctcagaaaccctgttaaggtggaagtatcctccaaatattctacagtggacacacttaaacaagagtggtatttcgttcctgcagattactaggattgttatcttgttcatgttctgaatgagttgccagggagcatgatcatgatcttcgtgcggacctgcgagtcaacaagactccttgctctcactttaaggaatcttggttttaaagctctctctatcagtggccagatgagtcaggacaaaagactaggtgctttaaacaagttcaaagcaaaagatttcaacatccttatctgcaccgacgtggcgagtcgtggtcttgacattcaaggagttgatgtggttatgaattatgatattccaatgaattctaaggattatgtccatcgggttggtaggactgcgcgtgcagggcaatcgggatatgccgtctcttttgtgaatcagtatgaggctgagtggtttaagctgattgagcagctccttggaagggaaattcctgaccggaaggtagatatggatgaaatcctgatacttcgtgagcatatatcagattcaaagaggattgcactgacgaaactgagggaggacggtggtcacaagaagagaaggaaggtggcggaggacgacgatgatgaagaagaggaggctccaagaggccaccgacagaaaccgaggtctttcaagaaatcatcaaggcggtgatagcactcgagtgcagataagtcggaacctcctgcctgatgaccagtagaatccgtacataccgctccacctcgcgaaagctatttatcggaattttgtccttagttcgtccgatgcaccagccatattgttagttactaagttgcaccagcgctatctatgctaccttttgtttgaaagtcaggccactttgagcaaatagccagtatttctctgtttgacacaagattttacatctaatctatatgaatatttcacctttacatc

SEQ ID NO: 64660 - protein, 288 aa, Triticum aestivum
  peptide (1)..(288): Ceres Seq. ID no. 15169664
ARHAKQSKPTPPPPPPPPSYSPTRAQKTPLPPLAAMAVADKAVAGGGEAQQPEPEPEPAAEASTFAELGVCRELVEACDAMGWKQPTKIQAGAIPHALQGRDVIGLGQTGSGKTGAFALPIIQALLEHRQPFFACIMSPTRELAIQIAEQFEALGSAIGLVCSVLVGGVDRMQQVLSIAKRPHIVVGTPGRLLDHLKDTKGFSLTKVKYLVLDEADKLLNLEFKESLDDILKVIPKERRTYLFSATMTKKVSKLQRACLRNPVKVEVSSKYSTVDTLKQEWYFVPADY

SEQ ID NO: 64661 - protein, 253 aa, Triticum aestivum
  peptide (1)..(253): Ceres Seq. ID no. 15169665
MAVADKAVAGGGEAQQPEPEPEPAAEASTFAELGVCRELVEACDAMGWKQPTKIQAGAIPHALQGRDVIGLGQTGSGKTGAFALPIIQALLEHRQPFFACIMSPTRELAIQIAEQFEALGSAIGLVCSVLVGGVDRMQQVLSIAKRPHIVVGTPGRLLDHLKDTKGFSLTKVKYLVLDEADKLLNLEFKESLDDILKVIPKERRTYLFSATMTKKVSKLQRACLRNPVKVEVSSKYSTVDTLKQEWYFVPADY

SEQ ID NO: 64662 - protein, 208 aa, Triticum aestivum
  peptide (1)..(208): Ceres Seq. ID no. 15169666
MGWKQPTKIQAGAIPHALQGRDVIGLGQTGSGKTGAFALPIIQALLEHRQPFFACIMSPTRELAIQIAEQFEALGSAIGLVCSVLVGGVDRMQQVLSIAKRPHIVVGTPGRLLDHLKDTKGFSLTKVKYLVLDEADKLLNLEFKESLDDILKVIPKERRTYLFSATMTKKVSKLQRACLRNPVKVEVSSKYSTVDTLKQEWYFVPADY

SEQ ID NO: 64663 - DNA, 2293 bp, Triticum aestivum
  misc_feature (1)..(2293): Ceres Seq. ID no. 14302243
cccctcccctcccgtgcttctctccaccccgcccccgcgccacagccgaaccctacacccgcgcgcgcgaggggccgccccgatctgcgagatgtggcgcagccgcgtgtcgcggggcctccgggaggccaaggccgccgccgccgccgcgtccaggcgcttctccaccacctcgtcctacacggtggtggatcacacctacgatgcggtcgtggttggcgctggaggcgcggggctcagggccgcgattgggctctcggagcatgggttcaacaccgcctgcatcaccaagctcttccccacgcggtcacataccgtggcagcgcagggaggtataaacgctgctcttggaaacatgagtgaagatgactggaggtggcatatgtatgatacagtcaagggaagtgattggctcggtgaccaagatgctatccagtatatgtgtagagaagcaccaaaggctgttatagagcttgagaactatggattaccattttccagaactgaagatggaaaaatttatcaacgcgcttttggaggccaaagcttagattttggaaaaggtggtcaggcctatcgatgtgcatgcgctgctgacagaacagggcatgctatgctacacacactttatgggcaggcgatgaagcacaatactcagttttttgttgaatattttgcgctggaccttatcatggacaaagaaggcacctgccagggggtaattgcactaaacatggaggatggtacccttcatcgtttccgttcaacaaatactattttagcaacaggaggttatggcagagcttacttctctgctacttcagctcacacatgtactggtgatggcaatgctatggttgcacgtgctgggttaccccttcaggatcttgagtttgtgcagttccatcctacaggcatttacggtgctggatgccttataactgaaggttcccggggcgaaggtggtattcttaggaacagcgaaggtgagaggttcatggaacgatatgcccctaccgctaaagatcttgcatctcgtgatgttgtttcaagatctatgactatggaaattagagaaggacgtggtgtaggaccaatgaaggaccatctctacctgcaccttaatcatcttcctccagaagttctgaaggaaaggcttcctggtatatctgagactgctgctatttttgctggtgttgatgtcaccaaagagcctattcctgttttgccgactgtgcattataatatgggcggtatcccgacaaattatcatgggcaggtggtggatatcaagggtgataacccagacacaattattcctggtctgatggctgctggggaggcagcttgtgcatctgttcatggtgcaaaccgtcttggtgcaaattcacttcttgacattgttgtatttgggagggcttgtgcaaatagggttgctgagatttccaagccaggagagacacagaaacctcttgaaaaagacgcaggggagaagaccattgcttggttggacaagctgagaaatgctaatggatcactgccaacttcgaagatccgcctcaacatgcaacgtattatgcaaaataatgctgcagttttccgcacacaggaaactctaacagaaggttgcgagctgattagtgaagcacagaaaagtttccacgatgtcaagctcagtgacagaagtctcatatggaattcggatttgatagagaccatagaattagaaaacctgctaataaatgcatgcataaccatgcattcagctgaggctcgccaagagagcagaggagctcatgctcgtgaagatttcaagacaagagatgacgacaagtggatgaagcactcgctagggtactgggaggatgaaaaggttagactagaatacaggccagttcacatgaacaccttggatgatgaagtcgagactttcccgccgaaggcacgtgtttactaatccggacaaggctgtcgacgtttcagttgtttgataagggtatagctcacagcgcggtgtcttccgagtagaaataaatttgcaggggccctccattctcccaaagcttcagaactgtaatataatcgggaatcgccaatatactttccctgaccagtgtaaacttgttgaaagcttctgatgattctattttggtcctgtatcacccctttggttggtaggaataaagacgcataccaagttttgaaggtgtttgaatctgtaaataacctttggcgtgagctgtgaacacaatggttcttttgtctattgtggcttctattaagctttaaactt

SEQ ID NO: 64664 - protein, 651 aa, Triticum aestivum
  peptide (1)..(651): Ceres Seq. ID no. 14302244
PSPPVLLSTPPPRHSRTLHPRARGAAPICEMWRSRVSRGLREAKAAAAAASRRFSTTSSYTVVDHTYDAVVVGAGGAGLRAAIGLSEHGFNTACITKLFPTRSHTVAAQGGINAALGNMSEDDWRWHMYDTVKGSDWLGDQDAIQYMCREAPKAVIELENYGLPFSRTEDGKIYQRAFGGQSLDFGKGGQAYRCACAADRTGHAMLHTLYGQAMKHNTQFFVEYFALDLIMDKEGTCQGVIALNMEDGTLHRFRSTNTILATGGYGRAYFSATSAHTCTGDGNAMVARAGLPLQDLEFVQFHPTGIYGAGCLITEGSRGEGGILRNSEGERFMERYAPTAKDLASRDVVSRSMTMEIREGRGVGPMKDHLYLHLNHLPPEVLKERLPGISETAAIFAGVDVTKEPIPVLPTVHYNMGGIPTNYHGQVVDIKGDNPDTIIPGLMAAGEAACASVHGANRLGANSLLDIVVFGRACANRVAEISKPGETQKPLEKDAGEKTIAWLDKLRNANGSLPTSKIRLNMQRIMQNNAAVFRTQETLTEGCELISEAQKSFHDVKLSDRSLIWNSDLIETIELENLLINACITMHSAEARQESRGAHAREDFKTRDDDKWMKHSLGYWEDEKVRLEYRPVHMNTLDDEVETFPPKARVY

SEQ ID NO: 64665 - protein, 621 aa, Triticum aestivum
  peptide (1)..(621): Ceres Seq. ID no. 14302245
MWRSRVSRGLREAKAAAAAASRRFSTTSSYTVVDHTYDAVVVGAGGAGLRAAIGLSEHGFNTACITKLFPTRSHTVAAQGGINAALGNMSEDDWRWHMYDTVKGSDWLGDQDAIQYMCREAPKAVIELENYGLPFSRTEDGKIYQRAFGGQSLDFGKGGQAYRCACAADRTGHAMLHTLYGQAMKHNTQFFVEYFALDLIMDKEGTCQGVIALNMEDGTLHRFRSTNTILATGGYGRAYFSATSAHTCTGDGNAMVARAGLPLQDLEFVQFHPTGIYGAGCLITEGSRGEGGILRNSEGERFMERYAPTAKDLASRDVVSRSMTMEIREGRGVGPMKDHLYLHLNHLPPEVLKERLPGISETAAIFAGVDVTKEPIPVLPTVHYNMGGIPTNYHGQVVDIKGDNPDTIIPGLMAAGEAACASVHGANRLGANSLLDIVVFGRACANRVAEISKPGETQKPLEKDAGEKTIAWLDKLRNANGSLPTSKIRLNMQRIMQNNAAVFRTQETLTEGCELISEAQKSFHDVKLSDRSLIWNSDLIETIELENLLINACITMHSAEARQESRGAHAREDFKTRDDDKWMKHSLGYWEDEKVRLEYRPVHMNTLDDEVETFPPKARVY

SEQ ID NO: 64666 - protein, 533 aa, Triticum aestivum
  peptide (1)..(533): Ceres Seq. ID no. 14302246
MSEDDWRWHMYDTVKGSDWLGDQDAIQYMCREAPKAVIELENYGLPFSRTEDGKIYQRAFGGQSLDFGKGGQAYRCACAADRTGHAMLHTLYGQAMKHNTQFFVEYFALDLIMDKEGTCQGVIALNMEDGTLHRFRSTNTILATGGYGRAYFSATSAHTCTGDGNAMVARAGLPLQDLEFVQFHPTGIYGAGCLITEGSRGEGGILRNSEGERFMERYAPTAKDLASRDVVSRSMTMEIREGRGVGPMKDHLYLHLNHLPPEVLKERLPGISETAAIFAGVDVTKEPIPVLPTVHYNMGGIPTNYHGQVVDIKGDNPDTIIPGLMAAGEAACASVHGANRLGANSLLDIVVFGRACANRVAEISKPGETQKPLEKDAGEKTIAWLDKLRNANGSLPTSKIRLNMQRIMQNNAAVFRTQETLTEGCELISEAQKSFHDVKLSDRSLIWNSDLIETIELENLLINACITMHSAEARQESRGAHAREDFKTRDDDKWMKHSLGYWEDEKVRLEYRPVHMNTLDDEVETFPPKARVY

SEQ ID NO: 64667 - DNA, 2032 bp, Triticum aestivum
  misc_feature (1)..(2032): Ceres Seq. ID no. 12586556
catggccccgccgtcgtcttctcctccccttccggcatgggcggcggcgaacgccctcttccgacgccaccgccgccttctcccgctcctccttcccccggtgtccctctgcgccctcctacccgtcctctcccactgcctcgtttccggcctcgccggcaaccccttcgtcgcctcccgcctcatcctcgcctcctcgcgcctctccctcacattctccctcctcctcctctcccaccttccagcctcttccctctcgcccttctccttcaactcgctcatacgcgcgtcgcctccaggcctcaccctccgcctgttcgaacaaatgcgccgccggggcgttcccacggataactacaccctccccttcttgatccatgcctgttccggcagtgacatggcactgggacagtccctgcacgggaagagcgtccgtcttggttacagctcccacatcttcacgcagacggcgctgatgaacatgtactttgggtgtggcttggctgtttccgccggcagggtgttcgatgaaatgcaggcgagggatgtggttgcatggaccggcatggtctctggttatgtggactctggaatgcaccttcgagctgctgaggtctttaaggagatgagaggcggtgaggaggttacaaggcctaatgtagcaacgttggtgtcggttgcttctgcgtatgccagtcttggctccctggagtatgctaaggggctgcacggctatgtggagaaggtggggttgcgaggcgatttgattctgacgaatgcactgatggatatgtatggaaagtgtggtagcatagagtcagctcgtgctctgtttgatttcatgcatgagaaggacctactttcatggacaacgatgatttcagggttggcttctcatggacatggcaaagaagcggttgctttgtttttaagcatgcgcgaggtgggagtactgccggactcaaccaccttcatcgtggttctgtctgcttgtagccatgctggactggtggatgaggggatatcaatcttcaattccatggcgagtgagtacaaggtcaccccagatattaagcactatggttgcatggtggatcttttcagcagggcaggacttctttcacgtgcttatgagcttattgatagcatgccttttgagccaaacttggcaattcttggagcattgctgagtgcatgcagtgtcaataatgaactggagattggggaactagttctccagaagattgattctgtttgctcctataaaggaggtgctggtgtgcttctgtccaacatctacgctaaccagaacttatggcatgaagttgattccattagaaggaagataagaaatggtaccatacccagaaagccacctggtcagagttcggtggcatcagaagttcctttcatgagtttgtgatttggagcttttagagagaaatccactttgctgtcactgttaaccttgactggcaaaatggctgattttcatgcgaactggtaaggaagtctcatcaattacttttacgacaaggcagcttatgaagtactcccccgttcctaaatatttgtctttttagagattttaaatggactaccacatacggatgtatatagacatattttagagtgtggattcactcattttgcttcgtatgtagtcacttgttgaaatctctagaaagacaaatatttaggaacggagggagtagatatcagcgtattatgtcaaaaaaagtactccctccgagattccagcgtgtcacccattttgttactgtgttgaaattgttgtggcttttactattgagtattaagtagcgagcatattatacctgtggaatcataagcacattgaccgactgaacttctgtttgctttatctaacaggagatgaggtctctcggcagcatatttcgcagattagctttccatagcgcgcacagaaacactaaacttcatacgcaaacttcttcccctcaccaactcccccttatcatttaggagataagacaaagtataccatctc

SEQ ID NO: 64668 - protein, 473 aa, Triticum aestivum
  peptide (1)..(473): Ceres Seq. ID no. 12586557
MAPPSSSPPLPAWAAANALFRRHRRLLPLLLPPVSLCALLPVLSHCLVSGLAGNPFVASRLILASSRLSLTFSLLLLSHLPASSLSPFSFNSLIRASPPGLTLRLFEQMRRRGVPTDNYTLPFLIHACSGSDMALGQSLHGKSVRLGYSSHIFTQTALMNMYFGCGLAVSAGRVFDEMQARDVVAWTGMVSGYVDSGMHLRAAEVFKEMRGGEEVTRPNVATLVSVASAYASLGSLEYAKGLHGYVEKVGLRGDLILTNALMDMYGKCGSIESARALFDFMHEKDLLSWTTMISGLASHGHGKEAVALFLSMREVGVLPDSTTFIVVLSACSHAGLVDEGISIFNSMASEYKVTPDIKHYGCMVDLFSRAGLLSRAYELIDSMPFEPNLAILGALLSACSVNNELEIGELVLQKIDSVCSYKGGAGVLLSNIYANQNLWHEVDSIRRKIRNGTIPRKPPGQSSVASEVPFMSL

SEQ ID NO: 64669 - protein, 365 aa, Triticum aestivum
  peptide (1)..(365): Ceres Seq. ID no. 12586558
MRRRGVPTDNYTLPFLIHACSGSDMALGQSLHGKSVRLGYSSHIFTQTALMNMYFGCGLAVSAGRVFDEMQARDVVAWTGMVSGYVDSGMHLRAAEVFKEMRGGEEVTRPNVATLVSVASAYASLGSLEYAKGLHGYVEKVGLRGDLILTNALMDMYGKCGSIESARALFDFMHEKDLLSWTTMISGLASHGHGKEAVALFLSMREVGVLPDSTTFIVVLSACSHAGLVDEGISIFNSMASEYKVTPDIKHYGCMVDLFSRAGLLSRAYELIDSMPFEPNLAILGALLSACSVNNELEIGELVLQKIDSVCSYKGGAGVLLSNIYANQNLWHEVDSIRRKIRNGTIPRKPPGQSSVASEVPFMSL

SEQ ID NO: 64670 - protein, 341 aa, Triticum aestivum
  peptide (1)..(341): Ceres Seq. ID no. 12586559
MALGQSLHGKSVRLGYSSHIFTQTALMNMYFGCGLAVSAGRVFDEMQARDVVAWTGMVSGYVDSGMHLRAAEVFKEMRGGEEVTRPNVATLVSVASAYASLGSLEYAKGLHGYVEKVGLRGDLILTNALMDMYGKCGSIESARALFDFMHEKDLLSWTTMISGLASHGHGKEAVALFLSMREVGVLPDSTTFIVVLSACSHAGLVDEGISIFNSMASEYKVTPDIKHYGCMVDLFSRAGLLSRAYELIDSMPFEPNLAILGALLSACSVNNELEIGELVLQKIDSVCSYKGGAGVLLSNIYANQNLWHEVDSIRRKIRNGTIPRKPPGQSSVASEVPFMSL

SEQ ID NO: 64671 - DNA, 1201 bp, Triticum aestivum
  misc_feature (1)..(1201): Ceres Seq. ID no. 13598595
gaaattggcgccacctccctcccgtgctcgcccctcgcctgggctctcgacccatccctgctcgaaccctaacctcagatggcgcttcccgcgtgagagaacgctgccgcggcagcagcgttgaggggggcttcgtcgtagtcagcgcgacagatgtataagcagggggcggccggaggtgcggggccggaccggaagcgcatcagcgacgcgctcgataagcacctggagaaggcggccgcgtcgccctccacgtcgagaggctcggcgggtgcccgaggcaaccacaaccgcgtcgtagtgccgtcctccatccccaagggccgctgctccgaaggggagtctgaatctgacagtgaagcatcagatgttagtggctctgatggagaagacacctcatggatttcatggtattgcaacctaagagggaatgagttcttctgtgaagtcgatgatgattacattcaagatgacttcaatctttgtgggcttagcagtcaagttccatattatgattatgctcttgatctcattttagatatcgagtcttctcatggtgatattttcacagaagaacaaaatgagctagtggaatcagctgctgagatgttgtatgggctaattcatgcgcgatacattctgaccagtaaagggttggctgctatgctggagaaatacaagaactatgactttggacgatgtccacgggtttattgctgtggccaaccatgtctaccagttggacaatcggatattcaccgatctagtacagtgaagatatactgtcctaagtgcgaagacatctactatccacggtctaaataccaaggcaatattgatggagcctactttgggacaacatttcctcacctgtttctgatgacgtacgatcacctcaagccccagaagccctcgcagcgctatgttcctcgcgtatttggcttcaagctccacaaccacaagccatgatgcggaggtgaaggaaaagataagaggccccggaagactactgtaagagtgcaatcgccagatcatgctgcccacccatattgtgtgccctgtctggtctatttaacattgaaatattggtataaaagaagacatgagacgatgttgtaacctaattccagctctactggctagtaaatctggacctctgtttccaaaaccagcagctatcgagaaatcaaagttatggtcg

SEQ ID NO: 64672 - protein, 271 aa, Triticum aestivum
  peptide (1)..(271): Ceres Seq. ID no. 13598596
MYKQGAAGGAGPDRKRISDALDKHLEKAAASPSTSRGSAGARGNHNRVVVPSSIPKGRCSEGESESDSEASDVSGSDGEDTSWISWYCNLRGNEFFCEVDDDYIQDDFNLCGLSSQVPYYDYALDLILDIESSHGDIFTEEQNELVESAAEMLYGLIHARYILTSKGLAAMLEKYKNYDFGRCPRVYCCGQPCLPVGQSDIHRSSTVKIYCPKCEDIYYPRSKYQGNIDGAYFGTTFPHLFLMTYDHLKPQKPSQRYVPRVFGFKLHNHKP

SEQ ID NO: 64673 - DNA, 1046 bp, Triticum aestivum
  misc_feature (1)..(1046): Ceres Seq. ID no. 13597570
actctccgatcgttcccttcgcctatctgcaggtctgcatccacacaacacaagcccacgcccacgcccacgcccacgcgcccccaaacccaaaaccctaccacgcctccgcgcccatggcccctaccgcgccgcagccgccccgcccctccgccgccgccccctccgcggcgccggtcgacgcgctcttcctccagaacctgatgaaccgcgtccagctccgcccgcccttcctcgacaccaactccttcctcacccaggacctcgacgacttcctcctcaacgagttcgccgcgctctccgccgcggcgggcgagtcctacgacgacgacgacgacgacgaagaaggggaggacggcggcctctccgacggggaggcctccggggaggccaggcggcgccggatgctctcgcgggaggaggccaagctggagaaggagatcgtccggatggtgctcgccggcgacggggacgcccttaagcccaactcgggccagtccgtcgccgtcggcgaccaccacgtgtgcgtcggcttccacgacgaggccggtggggagtaccgcgtgtgggagtggcacggccacgtcatgctctttgacgacgaggacggctactccgccgagtacatctacgggaaccacttcgagccgctcgctgccgccgctgccagggccaagcagaaggagaaggagaagagagagaaggacctcacctcgggccttcgggatttgattgtgggtgatggggacagtgccaatggcttgaatttgaatggcaatggcggaggccccagggtggtgcgcaggaacgtcgtaaatgcccctgcagcagcgcctgcaaggtaatcctttctagcagttccaccgggctgcacgaagtgaatgcatcaataccaggggcagagccaataaagtttaatcttttttcctctaatgcttgtttaagcggtctcttttgatctaaggagaaaggctctgtaattcacttttggcatgatatatacaatgtgcccactggattttgggatggaatttttattcaatact

SEQ ID NO: 64674 - protein, 280 aa, Triticum aestivum
  peptide (1)..(280): Ceres Seq. ID no. 13597571
SPIVPFAYLQVCIHTTQAHAHAHAHAPPNPKPYHASAPMAPTAPQPPRPSAAAPSAAPVDALFLQNLMNRVQLRPPFLDTNSFLTQDLDDFLLNEFAALSAAAGESYDDDDDDEEGEDGGLSDGEASGEARRRRMLSREEAKLEKEIVRMVLAGDGDALKPNSGQSVAVGDHHVCVGFHDEAGGEYRVWEWHGHVMLFDDEDGYSAEYIYGNHFEPLAAAAARAKQKEKEKREKDLTSGLRDLIVGDGDSANGLNLNGNGGGPRVVRRNVVNAPAAAPAR

SEQ ID NO: 64675 - protein, 242 aa, Triticum aestivum
  peptide (1)..(242): Ceres Seq. ID no. 13597572
MAPTAPQPPRPSAAAPSAAPVDALFLQNLMNRVQLRPPFLDTNSFLTQDLDDFLLNEFAALSAAAGESYDDDDDDEEGEDGGLSDGEASGEARRRRMLSREEAKLEKEIVRMVLAGDGDALKPNSGQSVAVGDHHVCVGFHDEAGGEYRVWEWHGHVMLFDDEDGYSAEYIYGNHFEPLAAAAARAKQKEKEKREKDLTSGLRDLIVGDGDSANGLNLNGNGGGPRVVRRNVVNAPAAAPAR

SEQ ID NO: 64676 - protein, 213 aa, Triticum aestivum
  peptide (1)..(213): Ceres Seq. ID no. 13597573
MNRVQLRPPFLDTNSFLTQDLDDFLLNEFAALSAAAGESYDDDDDDEEGEDGGLSDGEASGEARRRRMLSREEAKLEKEIVRMVLAGDGDALKPNSGQSVAVGDHHVCVGFHDEAGGEYRVWEWHGHVMLFDDEDGYSAEYIYGNHFEPLAAAAARAKQKEKEKREKDLTSGLRDLIVGDGDSANGLNLNGNGGGPRVVRRNVVNAPAAAPAR

SEQ ID NO: 64677 - DNA, 1572 bp, Triticum aestivum
  misc_feature (1)..(1572): Ceres Seq. ID no. 13597574
atcaatcacttgccatcctaccaccttgtgacattccaaacacaaacctacactccacaacccgcaccacatatcaacaacgaaagttcttgttgccgacatggacggcgtcacagccaacaccaccacgatcagtccccggaagctgcgggtgatgctctactcgtccccactcatggggcacctcgtccccatgatagagctcgccaagctcttcgccgctcgtgggctagccatcacggtagtcctcatggacccgccgtatgataccggcgccacgggccccttcctcagcggtgtctccgcggccaacccctccatttctttccatcgtctgccacaggtcaagctcccagagtctgacgactccgtgatgccagccttagcgttcgcccgtctctccaacccacacctacattacttcctcgccggcgcatctccggacttcctcgtggtggacttcttctgcagtgccgccatggacgtagccgcggagctcggcatccccgcctacttcttctccacctccggcgcccagatcctggctttctttatgcacctcacggttctgcatgggaaaagcacgaggagcttccgggaaatgggcgaagaactcgtgcacgtaccggggatcaccccgtttccggcgacgcactccatccagccactcatggatcgtgacggtgcgtcctaccaggcattactaaatgtgagcctcaacctattccgatcacagggcatcttcatcaacaccttccgctcgctggaacctcgtgccatggacaccatcctcgcggggcactccgccccagctggcctctcgacgcccccagtctactgcattgggccgctagtcaagtcagaggaggtgggcgtgaagcgtggagacgagtgcctcgcgtggttggacacgcaacccaaggccagtgtggtgttcctgtgctttggcagcctcggccggttcaacgccgaacaaaccagggaagtggcaaccgtgctggaggctagtggacaaaggttcctctgggttgtgcggagcccgccgagcgacgacacgactacagagccggacttggatgtgctgctttcgaagggtttcctggaccggaccaagggcaggggcctcgtcgtgaagtcatgggcaccacaaggtgatgttctagcacatcatgccgtgggaagttttgtgacacactgcgggtggaactcggtgctcgagtctactatggcaggtgtgcctatgctggcctggccattgtacgcggagcaaaagatgaatgcggtgttcctcgagaaagagatggagttggctgtcatgatggaagggtacgataaggagatggtggaggcaaaggagattgccaaaaagatcaggtggatgatggattcggaaggcgggagggtgctccgagagcggactctagcggtgatgtggcaggccaatgaggctctactcgagggtggagaatcagaggcaacattgacagagcttgttgatgtgtgggttaaagcttgacatgtgcaacatcatttatgaatgatcatggaaataaagagtgagcattgggtctt

SEQ ID NO: 64678 - protein, 471 aa, Triticum aestivum
  peptide (1)..(471): Ceres Seq. ID no. 15222131
MDGVTANTTTISPRKLRVMLYSSPLMGHLVPMIELAKLFAARGLAITVVLMDPPYDTGATGPFLSGVSAANPSISFHRLPQVKLPESDDSVMPALAFARLSNPHLHYFLAGASPDFLVVDFFCSAAMDVAAELGIPAYFFSTSGAQILAFFMHLTVLHGKSTRSFREMGEELVHVPGITPFPATHSIQPLMDRDGASYQALLNVSLNLFRSQGIFINTFRSLEPRAMDTILAGHSAPAGLSTPPVYCIGPLVKSEEVGVKRGDECLAWLDTQPKASVVFLCFGSLGRFNAEQTREVATVLEASGQRFLWVVRSPPSDDTTTEPDLDVLLSKGFLDRTKGRGLVVKSWAPQGDVLAHHAVGSFVTHCGWNSVLESTMAGVPMLAWPLYAEQKMNAVFLEKEMELAVMMEGYDKEMVEAKEIAKKIRWMMDSEGGRVLRERTLAVMWQANEALLEGGESEATLTELVDVWVKA

SEQ ID NO: 64679 - protein, 453 aa, Triticum aestivum
  peptide (1)..(453): Ceres Seq. ID no. 15222132
MLYSSPLMGHLVPMIELAKLFAARGLAITVVLMDPPYDTGATGPFLSGVSAANPSISFHRLPQVKLPESDDSVMPALAFARLSNPHLHYFLAGASPDFLVVDFFCSAAMDVAAELGIPAYFFSTSGAQILAFFMHLTVLHGKSTRSFREMGEELVHVPGITPFPATHSIQPLMDRDGASYQALLNVSLNLFRSQGIFINTFRSLEPRAMDTILAGHSAPAGLSTPPVYCIGPLVKSEEVGVKRGDECLAWLDTQPKASVVFLCFGSLGRFNAEQTREVATVLEASGQRFLWVVRSPPSDDTTTEPDLDVLLSKGFLDRTKGRGLVVKSWAPQGDVLAHHAVGSFVTHCGWNSVLESTMAGVPMLAWPLYAEQKMNAVFLEKEMELAVMMEGYDKEMVEAKEIAKKIRWMMDSEGGRVLRERTLAVMWQANEALLEGGESEATLTELVDVWVKA

SEQ ID NO: 64680 - protein, 446 aa, Triticum aestivum
  peptide (1)..(446): Ceres Seq. ID no. 15222133
MGHLVPMIELAKLFAARGLAITVVLMDPPYDTGATGPFLSGVSAANPSISFHRLPQVKLPESDDSVMPALAFARLSNPHLHYFLAGASPDFLVVDFFCSAAMDVAAELGIPAYFFSTSGAQILAFFMHLTVLHGKSTRSFREMGEELVHVPGITPFPATHSIQPLMDRDGASYQALLNVSLNLFRSQGIFINTFRSLEPRAMDTILAGHSAPAGLSTPPVYCIGPLVKSEEVGVKRGDECLAWLDTQPKASVVFLCFGSLGRFNAEQTREVATVLEASGQRFLWVVRSPPSDDTTTEPDLDVLLSKGFLDRTKGRGLVVKSWAPQGDVLAHHAVGSFVTHCGWNSVLESTMAGVPMLAWPLYAEQKMNAVFLEKEMELAVMMEGYDKEMVEAKEIAKKIRWMMDSEGGRVLRERTLAVMWQANEALLEGGESEATLTELVDVWVKA

SEQ ID NO: 64681 - DNA, 1511 bp, Triticum aestivum
  misc_feature (1)..(1511): Ceres Seq. ID no. 13597502
aaagctaaagaaacaaggtagtgtagccagccatcaagtacaccgcagtgctgcaccgagcggctctaggctagcggagttgagtgtcgtcagacagccaccaccttccagttccagccatggccacggcgtcggcggcgcggatagtgccggtgctgctggccctcgcggccctcatctgcgcggcggcggaggcgtcgccagcgaaggtgccggcgatgtacgtgttcggggactcaacggccgacgtcggcagcaacaactacctgcctggcagcgcggtgccgcgggccaacttcccgcacaacggcgtcgacttccccacctcgcgccccaccggccgcttcagcaatggcttcaacggcatcgacttcttagctctgaacatgggcttcaagcgcagccccccgccgttcctctcggtggccaacagaaccaacaggcagatcgcgcgagggctgctgggagcaaacttcgcctccgcaggatcaggcgttcttgacacgacgggtgactccatcgtctcgatgagcaagcaggtcgagcagttcgccattctgcgatgcaacatctctgcgcgcatcggcaaagaggcggccgacaccgtgctgtcgaggtccctgtttgtcatcagcaccggcggcaacgacatcttcgccttcttctcggcgaacagcacgccgacggccgcgcagatgcagctgttcaccgccaacctggtttcgcagtacaaaaatcatgtgaaggctctgttcggcctcggggcgaggaagttggccgtgatcgacgtcccgccgatcgggtgctgcccctacccgagaagcctgcaccctctcggtgcctgtatcgacgtcctcaacgagctgacccgtgggctcaacaagggcgtcaaggacgccatgcatggcctcagcgtcagcttgggtggcctcaagtactccatcgggagctcccacgccgtcgtgcaaagcatcatgaagcacccccaaagactagggttcaaggaggtgaccatggcgtgctgcggctccggcaagttcaacggcaagtcgggctgcacgcccaacgccacgctgtgcgacaaccggcacgagtacctcttctgggacctgctgcacccgactcacgccacgtccaagctcgccgccgcggccatctacaacggctcgctgcacttcgcagcgcccataaacttcaggcagctagcggaggaccagtgctagatagactgatagagcacgcacggccgcgtgcgcggtcgtgtctgctgcgttattaggtttgcttcacgtgtctgtgatggtgatgtttgtgtgtaggatatgtatgcacagtggtgttcgtctgtggtttcatttgtgtattgttaggtgggtgcctggcgtagtgtggaacctaaagatcaaaatggtaccatntntgtaangcaggttaattacttntcgaggtttgtatgtagtactgtanatccgaatgaactaaaatttaattaaatatattntagtattttt

SEQ ID NO: 64682 - protein, 367 aa, Triticum aestivum
  peptide (1)..(367): Ceres Seq. ID no. 13597503
MATASAARIVPVLLALAALICAAAEASPAKVPAMYVFGDSTADVGSNNYLPGSAVPRANFPHNGVDFPTSRPTGRFSNGFNGIDFLALNMGFKRSPPPFLSVANRTNRQIARGLLGANFASAGSGVLDTTGDSIVSMSKQVEQFAILRCNISARIGKEAADTVLSRSLFVISTGGNDIFAFFSANSTPTAAQMQLFTANLVSQYKNHVKALFGLGARKLAVIDVPPIGCCPYPRSLHPLGACIDVLNELTRGLNKGVKDAMHGLSVSLGGLKYSIGSSHAVVQSIMKHPQRLGFKEVTMACCGSGKFNGKSGCTPNATLCDNRHEYLFWDLLHPTHATSKLAAAAIYNGSLHFAAPINFRQLAEDQC

SEQ ID NO: 64683 - protein, 334 aa, Triticum aestivum
  peptide (1)..(334): Ceres Seq. ID no. 13597504
MYVFGDSTADVGSNNYLPGSAVPRANFPHNGVDFPTSRPTGRFSNGFNGIDFLALNMGFKRSPPPFLSVANRTNRQIARGLLGANFASAGSGVLDTTGDSIVSMSKQVEQFAILRCNISARIGKEAADTVLSRSLFVISTGGNDIFAFFSANSTPTAAQMQLFTANLVSQYKNHVKALFGLGARKLAVIDVPPIGCCPYPRSLHPLGACIDVLNELTRGLNKGVKDAMHGLSVSLGGLKYSIGSSHAVVQSIMKHPQRLGFKEVTMACCGSGKFNGKSGCTPNATLCDNRHEYLFWDLLHPTHATSKLAAAAIYNGSLHFAAPINFRQLAEDQC

SEQ ID NO: 64684 - protein, 278 aa, Triticum aestivum
  peptide (1)..(278): Ceres Seq. ID no. 13597505
MGFKRSPPPFLSVANRTNRQIARGLLGANFASAGSGVLDTTGDSIVSMSKQVEQFAILRCNISARIGKEAADTVLSRSLFVISTGGNDIFAFFSANSTPTAAQMQLFTANLVSQYKNHVKALFGLGARKLAVIDVPPIGCCPYPRSLHPLGACIDVLNELTRGLNKGVKDAMHGLSVSLGGLKYSIGSSHAVVQSIMKHPQRLGFKEVTMACCGSGKFNGKSGCTPNATLCDNRHEYLFWDLLHPTHATSKLAAAAIYNGSLHFAAPINFRQLAEDQC

SEQ ID NO: 64685 - DNA, 1041 bp, Triticum aestivum
  misc_feature (1)..(1041): Ceres Seq. ID no. 13584519
cgcgttccgtaggtagcgagctccgccccggatctggccgtcgagcgatggcctcgacgagggatctcgccatagcgtccatctcggtcgccgcaggcgccgtagccgccgcggccgcgctcctgtactcctactcggcaaccaattccaagccccagagcccgcccccgcccccgccgtgcaccgagccactccccgtcaacggctgcgccgccaggcatccgccagcgcaggaccccttcaaaaccaccaagagggaagggttcatctcatgggacgactacttcatggcgattgcgttcctttcagccgagcgttcaaaggatcctaaccggcaggttggcgcatgcttggttagccaagagggcattatcctaggtataggttacaatggattcccaagaggctgttcagatgataagcttccttgggcaaagaaatctgcaagaggggatccattggagacaaaatatccttatgttgttcatgctgaagttaatgctattttaaatacaaaccatgcttcagcggctggacagaagttatacgtcactatgttcccctgtaatgagtgtgctaagattatcatccagtcaggtgtatctgaagtcatctattttgtagagaaaaggattgacaactcagatcatgtttatgttgcttctcacaacttattatcaatggctggtgtgaaggtcaggaagcatcagccacaaatggcacaaataccaatcaactttcaggatccaagggtytaatgaatgaactgtgcgcccttaggtaatgcaaatgtgcaccaatgccttaacaattatgtcagtcattcaaaggctgtcatgctgggttatatactcccccggggggcctagctgttgtatattgtaatcagtcgaattactagatcgagaaaagcacctgtaactagttgcatcctgttgcgaaatttgtatgtgctcagcatcatgaaccattyttctgtaaactgtggctgcaccatgatttaactctcactacggtcgattcttgctgtagtaaatcgtg

SEQ ID NO: 64686 - protein, 251 aa, Triticum aestivum
  peptide (1)..(251): Ceres Seq. ID no. 15222794
  misc_feature (251)..(251): Xaa is any aa, unknown or other
RSVGSELRPGSGRRAMASTRDLAIASISVAAGAVAAAAALLYSYSATNSKPQSPPPPPPCTEPLPVNGCAARHPPAQDPFKTTKREGFISWDDYFMAIAFLSAERSKDPNRQVGACLVSQEGIILGIGYNGFPRGCSDDKLPWAKKSARGDPLETKYPYVVHAEVNAILNTNHASAAGQKLYVTMFPCNECAKIIIQSGVSEVIYFVEKRIDNSDHVYVASHNLLSMAGVKVRKHQPQMAQIPINFQDPRX

SEQ ID NO: 64687 - protein, 236 aa, Triticum aestivum
  peptide (1)..(236): Ceres Seq. ID no. 15222795
  misc_feature (236)..(236): Xaa is any aa, unknown or other
MASTRDLAIASISVAAGAVAAAAALLYSYSATNSKPQSPPPPPPCTEPLPVNGCAARHPPAQDPFKTTKREGFISWDDYFMAIAFLSAERSKDPNRQVGACLVSQEGIILGIGYNGFPRGCSDDKLPWAKKSARGDPLETKYPYVVHAEVNAILNTNHASAAGQKLYVTMFPCNECAKIIIQSGVSEVIYFVEKRIDNSDHVYVASHNLLSMAGVKVRKHQPQMAQIPINFQDPRX

SEQ ID NO: 64688 - protein, 156 aa, Triticum aestivum
  peptide (1)..(156): Ceres Seq. ID no. 15222796
  misc_feature (156)..(156): Xaa is any aa, unknown or other
MAIAFLSAERSKDPNRQVGACLVSQEGIILGIGYNGFPRGCSDDKLPWAKKSARGDPLETKYPYVVHAEVNAILNTNHASAAGQKLYVTMFPCNECAKIIIQSGVSEVIYFVEKRIDNSDHVYVASHNLLSMAGVKVRKHQPQMAQIPINFQDPRX

SEQ ID NO: 64689 - DNA, 1535 bp, Triticum aestivum
  misc_feature (1)..(1535): Ceres Seq. ID no. 15225423
cactgaattttgttggcgttgagttggaggcgccattggccttttcttgccctctctcatggtgtccattgtgcagctgcagagaaggcgaacagaagcagcagcgtcagcgagaggcatccttccggacagggaggagaggatggatctttctgtgccccgaggcgagttcccgatcccaatgcacgccgccgcctcgccctacgggggcatcggcggcgggggcgtcgccgtcgccgaccatgccatggagctccaccatgaccacgccaaccacaacggccagtcccagtcccaggcgcaggacatgccgtcgcctcccgctgctgtgtctgaggacagctccgggaagaagcgcgcggcggccattgccggcggagcgggagggccggcggtcaagtaccgggagtgcctcaagaaccacgcggcggccatcggcggcaacgccaccgacgggtgcggcgagttcatgcccagcggcgaggagggctcgctggaggcgctcaagtgctccgcctgcggctgccaccgcaatttccaccgcaaggagctcgacgacttcgacggcgacagctgcgcctcgcacggctacggctacggccaccacgccgtccgccgcctgctcggccccgccgtgccgcaccaccacaagagcagcgggggcctcctcgtcaccgcggaccactacggcgcctacgccgcggcgcgcgcgctccctccgccgccgcccccgccgctgggacaccaccaccagatcatcatgccgctcaacatgatccagacgtccgagtcggacgagatggacggcagcggcggcggcggtatcatgggcgacggcagaggcgggctagcctcaggcggcggcggcggctcctcctcgtccaagaagcgcttccgcaccaagttcaccgccgagcagaaggggcgcatgctggagttcgcggagaacgtggggtggcgtctccagaagctggacgacgccatggtgcagcacttctgccaggagatcggcgtcaagcgccgggtcctcaaggtctggatgcacaacaacaagcacaacctcgccagcaggccgctccctacctcgcctgcgcagccgcagtcacagtcgatgccgctggcgatgtcaatgccgatgccgatgcaagtgccgccgtcgcagcccgggccttcgggccaccgcggccccagctccccgcatgcgcagggggagctcaagctcgactgacggcacaaagaagccctggtgtctgtcaacggcgccatggtggctgattctgctagcgttagtaagccgcattgccattaatttcactgttccatcggagcgatcgatcgaagcagagagaagagaagagaaccaaaaaacaaacccgagtctatcaccatctccatttttttcctttctctgtttatcttgtcataaggttggggagcaagcatgagaggggggacataggcgaaccggactgagctccactcaatttcaatttatttttcctggacctagtttttttcgaaaaaaaaaaaaaaaa

SEQ ID NO: 64690 - protein, 389 aa, Triticum aestivum
  peptide (1)..(389): Ceres Seq. ID no. 15225424
MVSIVQLQRRRTEAAASARGILPDREERMDLSVPRGEFPIPMHAAASPYGGIGGGGVAVADHAMELHHDHANHNGQSQSQAQDMPSPPAAVSEDSSGKKRAAAIAGGAGGPAVKYRECLKNHAAAIGGNATDGCGEFMPSGEEGSLEALKCSACGCHRNFHRKELDDFDGDSCASHGYGYGHHAVRRLLGPAVPHHHKSSGGLLVTADHYGAYAAARALPPPPPPPLGHHHQIIMPLNMIQTSESDEMDGSGGGGIMGDGRGGLASGGGGGSSSSKKRFRTKFTAEQKGRMLEFAENVGWRLQKLDDAMVQHFCQEIGVKRRVLKVWMHNNKHNLASRPLPTSPAQPQSQSMPLAMSMPMPMQVPPSQPGPSGHRGPSSPHAQGELKLD

SEQ ID NO: 64691 - protein, 361 aa, Triticum aestivum
  peptide (1)..(361): Ceres Seq. ID no. 15225425
MDLSVPRGEFPIPMHAAASPYGGIGGGGVAVADHAMELHHDHANHNGQSQSQAQDMPSPPAAVSEDSSGKKRAAAIAGGAGGPAVKYRECLKNHAAAIGGNATDGCGEFMPSGEEGSLEALKCSACGCHRNFHRKELDDFDGDSCASHGYGYGHHAVRRLLGPAVPHHHKSSGGLLVTADHYGAYAAARALPPPPPPPLGHHHQIIMPLNMIQTSESDEMDGSGGGGIMGDGRGGLASGGGGGSSSSKKRFRTKFTAEQKGRMLEFAENVGWRLQKLDDAMVQHFCQEIGVKRRVLKVWMHNNKHNLASRPLPTSPAQPQSQSMPLAMSMPMPMQVPPSQPGPSGHRGPSSPHAQGELKLD

SEQ ID NO: 64692 - protein, 348 aa, Triticum aestivum
  peptide (1)..(348): Ceres Seq. ID no. 15225426
MHAAASPYGGIGGGGVAVADHAMELHHDHANHNGQSQSQAQDMPSPPAAVSEDSSGKKRAAAIAGGAGGPAVKYRECLKNHAAAIGGNATDGCGEFMPSGEEGSLEALKCSACGCHRNFHRKELDDFDGDSCASHGYGYGHHAVRRLLGPAVPHHHKSSGGLLVTADHYGAYAAARALPPPPPPPLGHHHQIIMPLNMIQTSESDEMDGSGGGGIMGDGRGGLASGGGGGSSSSKKRFRTKFTAEQKGRMLEFAENVGWRLQKLDDAMVQHFCQEIGVKRRVLKVWMHNNKHNLASRPLPTSPAQPQSQSMPLAMSMPMPMQVPPSQPGPSGHRGPSSPHAQGELKLD

SEQ ID NO: 64693 - DNA, 2159 bp, Triticum aestivum
  misc_feature (1)..(2159): Ceres Seq. ID no. 13584520
atcaacggtgaccctcgatagggtttcatcgtcagagaggaaaagccgaaaaggggatctgaggtcagagtgatgcgccgcctgccttctgccgagctccagcctcgcgccgccgcccttgcctgaggcctcctatgaggatcgagtggtgcttcagaagagacgaccggggagctgcagttcccaatcgaagtagcagctccttttcgagctgccatccgcagtcgaaggaatcaagcggctcctctccgagtcgtggtccgcaatccaagcggctccttttttcagcggcaatccggattcaaagcagtccttcccgggctgcaatcagaaacaggtcctgtttcagttttaataaagtctacgagctgttggctccctcacgtggcaggaacgtagctgctataaatctggcctggcggcaaccgtggtacccgccagttttaagaggatacgatcatctcccttcggcgagcgatggccaaaccatccgtggacggcctaggcaaatcctccctcgatatggtggaggacaatggagttgacaggctcagcaagttgcctgatgacgttttgctcaacattgtggagcgacttgatatcgctgatgttgcacgaaccaccatcctctccagacgttggaagcagatccctgctatactctcaaagatttttataatggttgcttcttttcaacccaagcatgaaggtaggaagttaacctcagatgatatagttcgggccaacaccaacgtgctggaagcaaccaggagcatactggtaaagagggctggaggtccacacaccattcacctgctgcgcatgcaattctacttgggagatgagtccattttcattggtcatgctgttgccaacaccatagcaacacacaaggttgcttcagttgagtttacaatcttgaccaaggtgcgcacaaagtttaccaataatgacctgctcactcatgggaggcagttcatgtcattccttgattcgtgtccaaacacatttggtggtcttgcacgcctcacgctagagaatttgaggttaggagaatcagactttcccaaaattttcagtatatgcaagcaactcgaggtcctctgcctctaccactgtgatatgggcattgagtctttgctggaagtggaacactcacaactcagtgaactggtgattggccgtagcgtgcttattaagagggttgatctgaagtgggtaccaaaactcacagtactgaaatttaatatgtttcgatctcaagatgaccccttctgtcttggctatgtcccacttctccagactgtgagcatcattaatactggtttttcttggcacaagatgctcaagataagcgagttgctgggtgaaaccgccataagcaacctgcatttgaacttcaaaagtgaaaagatttgggtcaagccggaaggtcgaagacaattgttaccagtgttacacaagctaaggcttgtgaatttgattaacatttctgaagaatgcgatctgacttggataatgttcatacttcaaggtgcacccacccttaaggaactacgcatcttggtgcgggaccatttatgtgaaatggtaactggggagcggagaaaaaagtatgcctttagcgaggagaaggacaagggactagagtgggaaccatctgcatctgatttcaagcaccacaaccttgctgagctcagaatctatgggaggtttgaagcagaagaaaaaatcgtgcgctttgccaggaatatcatggaagcagcggtgaatctcgaggacataaaactttataagagtccagtgtgtgagaattgcaagcacatgctccaggagtggacgttgaaggagaagtcgttgcttagctacaaactcagcaaggggatgctgtcttcgctcgtccggattcagttcccaagtttaggggaaatttttacttggccaaagtactggtcttagctgcaagctgtggttttttttttgaggggttgcaagctgcagttcacaggagttgttgtatgcatcgattaattctcactagtcaaccttttaaattattcctgttttgagattgtactgagtcgaggaggataaggagtaactcttgacattagtgtgaagtattttggcaaatgaaagtttcggatgtgttattcgtg

SEQ ID NO: 64694 - protein, 493 aa, Triticum aestivum
  peptide (1)..(493): Ceres Seq. ID no. 13584521
MAKPSVDGLGKSSLDMVEDNGVDRLSKLPDDVLLNIVERLDIADVARTTILSRRWKQIPAILSKIFIMVASFQPKHEGRKLTSDDIVRANTNVLEATRSILVKRAGGPHTIHLLRMQFYLGDESIFIGHAVANTIATHKVASVEFTILTKVRTKFTNNDLLTHGRQFMSFLDSCPNTFGGLARLTLENLRLGESDFPKIFSICKQLEVLCLYHCDMGIESLLEVEHSQLSELVIGRSVLIKRVDLKWVPKLTVLKFNMFRSQDDPFCLGYVPLLQTVSIINTGFSWHKMLKISELLGETAISNLHLNFKSEKIWVKPEGRRQLLPVLHKLRLVNLINISEECDLTWIMFILQGAPTLKELRILVRDHLCEMVTGERRKKYAFSEEKDKGLEWEPSASDFKHHNLAELRIYGRFEAEEKIVRFARNIMEAAVNLEDIKLYKSPVCENCKHMLQEWTLKEKSLLSYKLSKGMLSSLVRIQFPSLGEIFTWPKYWS

SEQ ID NO: 64695 - protein, 478 aa, Triticum aestivum
  peptide (1)..(478): Ceres Seq. ID no. 13584522
MVEDNGVDRLSKLPDDVLLNIVERLDIADVARTTILSRRWKQIPAILSKIFIMVASFQPKHEGRKLTSDDIVRANTNVLEATRSILVKRAGGPHTIHLLRMQFYLGDESIFIGHAVANTIATHKVASVEFTILTKVRTKFTNNDLLTHGRQFMSFLDSCPNTFGGLARLTLENLRLGESDFPKIFSICKQLEVLCLYHCDMGIESLLEVEHSQLSELVIGRSVLIKRVDLKWVPKLTVLKFNMFRSQDDPFCLGYVPLLQTVSIINTGFSWHKMLKISELLGETAISNLHLNFKSEKIWVKPEGRRQLLPVLHKLRLVNLINISEECDLTWIMFILQGAPTLKELRILVRDHLCEMVTGERRKKYAFSEEKDKGLEWEPSASDFKHHNLAELRIYGRFEAEEKIVRFARNIMEAAVNLEDIKLYKSPVCENCKHMLQEWTLKEKSLLSYKLSKGMLSSLVRIQFPSLGEIFTWPKYWS

SEQ ID NO: 64696 - protein, 426 aa, Triticum aestivum
  peptide (1)..(426): Ceres Seq. ID no. 13584523
MVASFQPKHEGRKLTSDDIVRANTNVLEATRSILVKRAGGPHTIHLLRMQFYLGDESIFIGHAVANTIATHKVASVEFTILTKVRTKFTNNDLLTHGRQFMSFLDSCPNTFGGLARLTLENLRLGESDFPKIFSICKQLEVLCLYHCDMGIESLLEVEHSQLSELVIGRSVLIKRVDLKWVPKLTVLKFNMFRSQDDPFCLGYVPLLQTVSIINTGFSWHKMLKISELLGETAISNLHLNFKSEKIWVKPEGRRQLLPVLHKLRLVNLINISEECDLTWIMFILQGAPTLKELRILVRDHLCEMVTGERRKKYAFSEEKDKGLEWEPSASDFKHHNLAELRIYGRFEAEEKIVRFARNIMEAAVNLEDIKLYKSPVCENCKHMLQEWTLKEKSLLSYKLSKGMLSSLVRIQFPSLGEIFTWPKYWS

SEQ ID NO: 64697 - DNA, 1200 bp, Triticum aestivum
  misc_feature (1)..(1200): Ceres Seq. ID no. 12617527
cttccccactatacttccaagcaaaggcgagaaccctagcctcacgagcaccgtgcagcggagatcccgaccatcaccgcgatgcaggccccgacgaacccccccgtcgacctcccgccgctggtggcgccgccgccgcgggtgaaggcgccgaccccgcgcccccctccgccggcctcgctccagcccgactccccgggcgtcttcttcaccaacgccgccgcagccgccccactgggctccgcccaccgccgcatcgccatcgccgtcgatctgtcagacgagtccgcctacgccgtaagctgggccgtcgccaactacctccggcccggggacgccgtcatcctcctgcacgtccgctccaccaatgtcctctacggcgccgattggggctccgtcacccccacatcccccgaggacgacgctgaggtcgccgcgcgcaagatggaggaggacttcgacgccctcaccgcttccaaggccgacgacctggccaagccactcgaggaggccaagatcccctacaagatccacatcgtcaaggatcacgacatgaaggagagactctgcctcgaggtggagaggctagggcttagcgccgtgatcatggggagcaaggggtttggtgcggcgcggcgggccagcaagggaaggctcgggagtatgagtgattactgcgtccaccactgtatttgccccgtggtggtggtgcgttcccctgatgatgctgtagcagagggcggggagtctgccactacgatggaggcggcggttggtgcagacgacgtgctgcaccctgtgccagaggaggatgctgagtaccatgacgccgctgaggagcacaaggatacttgattggatctatgcatcgatgtcctgttggatccagcatgtaaaggttctagcagtcgactgttggctgagtgctacctcgtggtttctgctgagcacattagctgttcgttagactttactgttcatgtcgatctgtgcttccactctgttgtatttggtgaacatttgttctctagaacttttgtgcttctttggatatcaaattatatgttgctgatgagacagtttgactacttagagaaccacatgattgcctgctatacttactcggttttgctaaaaaaaaaaaaaaaaaaaaaaaaaaaaagaaaaaaaaaaaaaaaaaagcttatcgataccgtcgac

SEQ ID NO: 64698 - protein, 257 aa, Triticum aestivum
  peptide (1)..(257): Ceres Seq. ID no. 12617528
MQAPTNPPVDLPPLVAPPPRVKAPTPRPPPPASLQPDSPGVFFTNAAAAAPLGSAHRRIAIAVDLSDESAYAVSWAVANYLRPGDAVILLHVRSTNVLYGADWGSVTPTSPEDDAEVAARKMEEDFDALTASKADDLAKPLEEAKIPYKIHIVKDHDMKERLCLEVERLGLSAVIMGSKGFGAARRASKGRLGSMSDYCVHHCICPVVVVRSPDDAVAEGGESATTMEAAVGADDVLHPVPEEDAEYHDAAEEHKDT

SEQ ID NO: 64699 - protein, 141 aa, Triticum aestivum
  peptide (1)..(141): Ceres Seq. ID no. 12617529
SPLYFQAKARTLASRAPCSGDPDHHRDAGPDEPPRRPPAAGGAAAAGEGADPAPPSAGLAPARLPGRLLHQRRRSRPTGLRPPPHRHRRRSVRRVRLRRKLGRRQLPPARGRRHPPARPLHQCPLRRRLGLRHPHIPRGRR

SEQ ID NO: 64700 - protein, 136 aa, Triticum aestivum
  peptide (1)..(136): Ceres Seq. ID no. 12617530
MEEDFDALTASKADDLAKPLEEAKIPYKIHIVKDHDMKERLCLEVERLGLSAVIMGSKGFGAARRASKGRLGSMSDYCVHHCICPVVVVRSPDDAVAEGGESATTMEAAVGADDVLHPVPEEDAEYHDAAEEHKDT

SEQ ID NO: 64701 - DNA, 1875 bp, Triticum aestivum
  misc_feature (1)..(1875): Ceres Seq. ID no. 14302263
aaaatccaaatctcatcgtcatccccccgcacccccaacccaacccctcccaccccacctccggcgaccggatcggcagggcgcgatggcgaacatcgacatggcggcggtgctggcggacatggaccgggacgcggcggcggacgcgcggacgccgcggaccaagctcgtgtgcacgctcggcccggcctcccgctccgtgcccatgctcgagaagctgctccgcgccgggatgaacgtcgcgcgcttcaacttctcccacggcacccacgagtaccacaaggagaccctcgacgccctccgccaggccatgcacaacaccggcatcctctgcgccgtcatgctcgacaccaagggacctgagattcgtactggatttttgaaggatggtaaaccaatcaaactgacaaagggtcaagaaatcactgtttccactgactacgatatcaagggcgacacgaacaccatctccatgagctacaagaaacttcctcaggatgtgaagcctgggcatgtcatactatgtgctgatggtaccatctccttgtctgttctgtcttgcgacccagcagctggaactgtcagatgtaggtgtgagaacactgcaatgcttggagagaggaagaattgtaatctgccaggaattgtcgtggaccttcctacgctgacggagaaggataaggaggacattttgggatggggtgtgcctaatgacattgacatgattgctttgtcatttgtccgcaaaggatcagatttggtgaccgtcaggcagcttcttggacagcatgcaaagcgcatcaagttaatgtcaaaggttgaaaaccaagagggcattgtaaactttgatgacattctgagggaaaccgatgcctttatggttgccagaggtgatcttggaatggagattccagttgagaagatattccttgcacagaaaatgatgatctacaagtgcaaccttgctggcaagcctgtggtcacagcgacccagatgcttgagtcaatgatcaagtccccgaggccaacccgtgccgaggctactgacgtcgcaaatgcggtgcttgatggaactgactgtgtcatgctcagtggtgaaagcgctgccggagcataccctgaggtggctgtgaagatcatggcgcgcatctgcgtggaggcggagtcttccctggacaacgacgccgtcttcaaggagatgatcaaggccgcgcccctcccgatgagcccgctggagtccctcgcgtcctcggccgtgcgaaccgccaacaaggccagggccactctgatcgtcgtcctgacccgtggcggcaccacggcgaagctggtggccaagtaccggcccagggtgccgatcctgtcggtggtcgtcccggtgctgacgaccgactcgttcgactggaccgtcagctccgagggccccgccaggcacagcctgatctacaggggcctgatcccgctcctcgccgagggctccgccaaggccaccgactcggagtcgacggaggagatcctccaggcggcgctcaagtcggccgtgaagaagcagctctgcaaggctggtgacgccgtcgtcgtcctgcaccgcatcggcgtcgcctccgtcatcaagatctgcaccgtcaagtgagcgccatcgccgggcgctcggcggcccttgctgccgtggcgaactctctgttcttgtggagacgaattgataatcgccgtaccgtccgttgcagtttgttgcatagatccgatccgagctggtaaattaggagggagaggactccgttaatatagagctcttttattattattaccgttggttgatatgatatgccccctgtagtatggtgtttggcaggtgtcatgcctgcacaaatttttctc

SEQ ID NO: 64702 - protein, 542 aa, Triticum aestivum
  peptide (1)..(542): Ceres Seq. ID no. 14302264
KSKSHRHPPAPPTQPLPPHLRRPDRQGAMANIDMAAVLADMDRDAAADARTPRTKLVCTLGPASRSVPMLEKLLRAGMNVARFNFSHGTHEYHKETLDALRQAMHNTGILCAVMLDTKGPEIRTGFLKDGKPIKLTKGQEITVSTDYDIKGDTNTISMSYKKLPQDVKPGHVILCADGTISLSVLSCDPAAGTVRCRCENTAMLGERKNCNLPGIVVDLPTLTEKDKEDILGWGVPNDIDMIALSFVRKGSDLVTVRQLLGQHAKRIKLMSKVENQEGIVNFDDILRETDAFMVARGDLGMEIPVEKIFLAQKMMIYKCNLAGKPVVTATQMLESMIKSPRPTRAEATDVANAVLDGTDCVMLSGESAAGAYPEVAVKIMARICVEAESSLDNDAVFKEMIKAAPLPMSPLESLASSAVRTANKARATLIVVLTRGGTTAKLVAKYRPRVPILSVVVPVLTTDSFDWTVSSEGPARHSLIYRGLIPLLAEGSAKATDSESTEEILQAALKSAVKKQLCKAGDAVVVLHRIGVASVIKICTVK

SEQ ID NO: 64703 - protein, 514 aa, Triticum aestivum
  peptide (1)..(514): Ceres Seq. ID no. 14302265
MANIDMAAVLADMDRDAAADARTPRTKLVCTLGPASRSVPMLEKLLRAGMNVARFNFSHGTHEYHKETLDALRQAMHNTGILCAVMLDTKGPEIRTGFLKDGKPIKLTKGQEITVSTDYDIKGDTNTISMSYKKLPQDVKPGHVILCADGTISLSVLSCDPAAGTVRCRCENTAMLGERKNCNLPGIVVDLPTLTEKDKEDILGWGVPNDIDMIALSFVRKGSDLVTVRQLLGQHAKRIKLMSKVENQEGIVNFDDILRETDAFMVARGDLGMEIPVEKIFLAQKMMIYKCNLAGKPVVTATQMLESMIKSPRPTRAEATDVANAVLDGTDCVMLSGESAAGAYPEVAVKIMARICVEAESSLDNDAVFKEMIKAAPLPMSPLESLASSAVRTANKARATLIVVLTRGGTTAKLVAKYRPRVPILSVVVPVLTTDSFDWTVSSEGPARHSLIYRGLIPLLAEGSAKATDSESTEEILQAALKSAVKKQLCKAGDAVVVLHRIGVASVIKICTVK

SEQ ID NO: 64704 - protein, 509 aa, Triticum aestivum
  peptide (1)..(509): Ceres Seq. ID no. 14302266
MAAVLADMDRDAAADARTPRTKLVCTLGPASRSVPMLEKLLRAGMNVARFNFSHGTHEYHKETLDALRQAMHNTGILCAVMLDTKGPEIRTGFLKDGKPIKLTKGQEITVSTDYDIKGDTNTISMSYKKLPQDVKPGHVILCADGTISLSVLSCDPAAGTVRCRCENTAMLGERKNCNLPGIVVDLPTLTEKDKEDILGWGVPNDIDMIALSFVRKGSDLVTVRQLLGQHAKRIKLMSKVENQEGIVNFDDILRETDAFMVARGDLGMEIPVEKIFLAQKMMIYKCNLAGKPVVTATQMLESMIKSPRPTRAEATDVANAVLDGTDCVMLSGESAAGAYPEVAVKIMARICVEAESSLDNDAVFKEMIKAAPLPMSPLESLASSAVRTANKARATLIVVLTRGGTTAKLVAKYRPRVPILSVVVPVLTTDSFDWTVSSEGPARHSLIYRGLIPLLAEGSAKATDSESTEEILQAALKSAVKKQLCKAGDAVVVLHRIGVASVIKICTVK

SEQ ID NO: 64705 - DNA, 959 bp, Triticum aestivum
  misc_feature (1)..(959): Ceres Seq. ID no. 13597898
gcactactacagtccaagccgcaccgctctctcgctagccacctccctctcgtccgccaccgcattaactcttcgcccaccgcttcccaacaaacccgccgcccgcccttgaccgcggcagccatggcgctcgcagcggcacaacgccagcggtcggcgtcggccgtgctggtcgcggcggtgctgctatcgctttcactctcactctcatgcgtgcaggcgcaggcgccgcacgtggcggtgccaccttcggctcccccgaaggcggcggcggcgcctgggccggccgcggggttgagcgcggcgtgcctcaactcgctgctcaacatgtcggactgcctgccgtacgtgcaggccgggagcaaggcgcgggcgccggacaagccgtgctgcccggagctggccggcatggtgggctccaaccccgtctgcctctgcgagctcctctccggggccgccgactccctcggcatcgccgtcgactacgcccgcgcgctcgcgctccccggcgtctgccgcgtcgccaccccgcccatcaccacctgcgcagcaatgggatacaacgttcgtctgggcccgtctccggcgcccgcgccgggatctccctcgcccatgtcgcccggcggcagcccacagtaccccgctggtccttcgccgttcgcctcgccgccggagtcgcccaagcccagccacgcggcgcgccgcttccacgccgccggcgccctygtcgccctcgccgcctccttygccgtcgggatggccttcttytaagcggacaaggccagcgagactgttaaccgttcgataaaaatctgtcgcgtgaatgtcatggacatgctttctccgtctctagtctgtgcgctagtactccagtatgatgattctaggtagataagataatacagtaccagttatttcccgccaatatgttatgtgctatgctaatcaattgatctgtc

SEQ ID NO: 64706 - protein, 256 aa, Triticum aestivum
  peptide (1)..(256): Ceres Seq. ID no. 15222229
  misc_feature (242)..(242): Xaa is any aa, unknown or other
  misc_feature (249)..(249): Xaa is any aa, unknown or other
  misc_feature (256)..(256): Xaa is any aa, unknown or other
ALLQSKPHRSLASHLPLVRHRINSSPTASQQTRRPPLTAAAMALAAAQRQRSASAVLVAAVLLSLSLSLSCVQAQAPHVAVPPSAPPKAAAAPGPAAGLSAACLNSLLNMSDCLPYVQAGSKARAPDKPCCPELAGMVGSNPVCLCELLSGAADSLGIAVDYARALALPGVCRVATPPITTCAAMGYNVRLGPSPAPAPGSPSPMSPGGSPQYPAGPSPFASPPESPKPSHAARRFHAAGAXVALAASXAVGMAFX

SEQ ID NO: 64707 - protein, 215 aa, Triticum aestivum
  peptide (1)..(215): Ceres Seq. ID no. 15222230
  misc_feature (201)..(201): Xaa is any aa, unknown or other
  misc_feature (208)..(208): Xaa is any aa, unknown or other
  misc_feature (215)..(215): Xaa is any aa, unknown or other
MALAAAQRQRSASAVLVAAVLLSLSLSLSCVQAQAPHVAVPPSAPPKAAAAPGPAAGLSAACLNSLLNMSDCLPYVQAGSKARAPDKPCCPELAGMVGSNPVCLCELLSGAADSLGIAVDYARALALPGVCRVATPPITTCAAMGYNVRLGPSPAPAPGSPSPMSPGGSPQYPAGPSPFASPPESPKPSHAARRFHAAGAXVALAASXAVGMAFX

SEQ ID NO: 64708 - protein, 195 aa, Triticum aestivum
  peptide (1)..(195): Ceres Seq. ID no. 15222231
  misc_feature (173)..(173): Xaa is any aa, unknown or other
  misc_feature (180)..(180): Xaa is any aa, unknown or other
  misc_feature (187)..(187): Xaa is any aa, unknown or other
MRAGAGAARGGATFGSPEGGGGAWAGRGVERGVPQLAAQHVGLPAVRAGREQGAGAGQAVLPGAGRHGGLQPRLPLRAPLRGRRLPRHRRRLRPRARAPRRLPRRHPAHHHLRSNGIQRSSGPVSGARAGISLAHVARRQPTVPRWSFAVRLAAGVAQAQPRGAPLPRRRRPXRPRRLLXRRDGLLXSGQGQRDC

SEQ ID NO: 64709 - DNA, 1342 bp, Triticum aestivum
  misc_feature (1)..(1342): Ceres Seq. ID no. 13656196
atcccggtccggggcgcacatccatctcccatgcccgcacctccacctgagctggactccctggtatagcgagcgcgccgaccaactccatagctggggcttctccaatcaatccagccggccagagcgcagctcccgcccacccttccccggtccccgtctcttccgcaaaggagcagccgcgccattgccgtgggaggaagcaatgggggcgacacgcgcggacgccgacgagaaggaggaaggcgtgatggcgacggacttcttttggtcgtacacggacgaaccgcacgcgtcccgccgccgggagatcctggccaagtacccgcagatcaaggagctcttcggctcggatcctctcgccttcatcaagatagccgcagttgtttcgcttcagctatggaccgccacgctcctgcgagatgcaggctggtcgaagatactgccggtcgcttacttcttcggttcctttctgaatcacaatctcttccttgcgatccacgagctcagccacaacctcgccttcgccaccccatccctgaaccgctggctaggcatcttcgcaaacctgcccatcggcgtcccaatgtcggtgacattccagaaataccacctggagcaccaccggttccaaggcgtggacgggatcgacatggacatccccagccagacagaggcgcacgtcgtaaagaacaccgtcagcaaatccatctgggtcgtgctccagctcttcttctacgcgctcaggccgctcttcctgaagccgaagcccccgggcctgtgggagttcaccaacctgacgatccaggtcgcgctcgacgcggcaatggtgtacctctacggctggaagtcgctggcctacctcatcctgtctacgttcctcggtggcggcatgcacccgatggccggccacttcatctcggagcactacgtcttcagcccggagcaggagacctactcgtactacgggccgctgaacctgatgacgtggcacgtcgggtaccacaacgagcaccacgacttccccaggatccccggcgccaagctgcacaaggtgaaggagatcgcgccggagtactatgacagtctgaaatcatacaggtcctggagccaggtgatatacatgtacgtcatggaccagacggtaggccctttcagccggatgaagcggaaggcgcccaagaaagatttgtagaagaaacctctgcctgtaggttaagttttgccacacatagctgttttagatgatgttttgatcccctgggccactgtctcactgaactactgaagtgttaactcgaaggtattttgcttgtgtgttcagggaacttgcacttgttcc

SEQ ID NO: 64710 - protein, 397 aa, Triticum aestivum
  peptide (1)..(397): Ceres Seq. ID no. 13656197
SRSGAHIHLPCPHLHLSWTPWYSERADQLHSWGFSNQSSRPERSSRPPFPGPRLFRKGAAAPLPWEEAMGATRADADEKEEGVMATDFFWSYTDEPHASRRREILAKYPQIKELFGSDPLAFIKIAAVVSLQLWTATLLRDAGWSKILPVAYFFGSFLNHNLFLAIHELSHNLAFATPSLNRWLGIFANLPIGVPMSVTFQKYHLEHHRFQGVDGIDMDIPSQTEAHVVKNTVSKSIWVVLQLFFYALRPLFLKPKPPGLWEFTNLTIQVALDAAMVYLYGWKSLAYLILSTFLGGGMHPMAGHFISEHYVFSPEQETYSYYGPLNLMTWHVGYHNEHHDFPRIPGAKLHKVKEIAPEYYDSLKSYRSWSQVIYMYVMDQTVGPFSRMKRKAPKKDL

SEQ ID NO: 64711 - protein, 329 aa, Triticum aestivum
  peptide (1)..(329): Ceres Seq. ID no. 13656198
MGATRADADEKEEGVMATDFFWSYTDEPHASRRREILAKYPQIKELFGSDPLAFIKIAAVVSLQLWTATLLRDAGWSKILPVAYFFGSFLNHNLFLAIHELSHNLAFATPSLNRWLGIFANLPIGVPMSVTFQKYHLEHHRFQGVDGIDMDIPSQTEAHVVKNTVSKSIWVVLQLFFYALRPLFLKPKPPGLWEFTNLTIQVALDAAMVYLYGWKSLAYLILSTFLGGGMHPMAGHFISEHYVFSPEQETYSYYGPLNLMTWHVGYHNEHHDFPRIPGAKLHKVKEIAPEYYDSLKSYRSWSQVIYMYVMDQTVGPFSRMKRKAPKKDL

SEQ ID NO: 64712 - protein, 314 aa, Triticum aestivum
  peptide (1)..(314): Ceres Seq. ID no. 13656199
MATDFFWSYTDEPHASRRREILAKYPQIKELFGSDPLAFIKIAAVVSLQLWTATLLRDAGWSKILPVAYFFGSFLNHNLFLAIHELSHNLAFATPSLNRWLGIFANLPIGVPMSVTFQKYHLEHHRFQGVDGIDMDIPSQTEAHVVKNTVSKSIWVVLQLFFYALRPLFLKPKPPGLWEFTNLTIQVALDAAMVYLYGWKSLAYLILSTFLGGGMHPMAGHFISEHYVFSPEQETYSYYGPLNLMTWHVGYHNEHHDFPRIPGAKLHKVKEIAPEYYDSLKSYRSWSQVIYMYVMDQTVGPFSRMKRKAPKKDL

SEQ ID NO: 64713 - DNA, 1099 bp, Triticum aestivum
  misc_feature (1)..(1099): Ceres Seq. ID no. 13597506
actagtagcagctatagctagcctacgagccacacacatcacatcaaagcgcatccagcaggcaatggcgtcctcctcctcgtctccgctgctcatgttgctgctgctgccgctcctgcgcgccatggcgcgcccgtgctccgccgtcgacgccatcggcacctactgcgccaagaacggcaccagcgcggagacgcaggccagcatcgaccaggtcctcgcggcgctcgtcccgcgcgcctcggccgcctactacgccacggccaccgccggccgctcctcgtccgcggtctggggcctcgcgcagtgccgcggcgacgtgccgcgccaggactgctcgctctgcctcgccgccgcggccaaggaggtcgcgtcgtcctgccgcggcagctccgacggccgggtcttctacgactactgcctgctccggtactccacctccaacttcgtcggcctcgcggacacgggctacacgctcatcctcctcaacacccagaacgccaccggcgtcgacctggccgcgttcgaccgggcgcaggggaaactcatgtcccgcgtcgcctccgaggccggcgacgccgccaacaaggggcttgcgacggacacgacgaggctcggcagcgagggcggcggagccaagacgaccatctacgggctcggctggtgcaccagggacatcacggcggcggactgcgggctttgcgtggcgcaggcggtggcggagctgcccaactactgccggtaccggcgtgggtgccgcgtcatctacagcagctgcatggcgcgctacgaggtgtaccccttcttcttccccctcgacggcgccgacgagtcggccgacgagctcggacagtgcgacaagatcgtcttgaactacccgtgatgggtggagtacagctacgtagtcaactacggtgctagtatctactgtacgtagcactctagctcgttgtgcgtacctggtggtggcgaatccatttgtagtgtatggctagctcgtagctagcctagaatccaagcagggtcaaaataattttcgttaagtgcaaaataataagcgaaaaactagccttgtgttcctcgcacatgtttgcttgcg

SEQ ID NO: 64714 - protein, 293 aa, Triticum aestivum
  peptide (1)..(293): Ceres Seq. ID no. 15222116
LVAAIASLRATHITSKRIQQAMASSSSSPLLMLLLLPLLRAMARPCSAVDAIGTYCAKNGTSAETQASIDQVLAALVPRASAAYYATATAGRSSSAVWGLAQCRGDVPRQDCSLCLAAAAKEVASSCRGSSDGRVFYDYCLLRYSTSNFVGLADTGYTLILLNTQNATGVDLAAFDRAQGKLMSRVASEAGDAANKGLATDTTRLGSEGGGAKTTIYGLGWCTRDITAADCGLCVAQAVAELPNYCRYRRGCRVIYSSCMARYEVYPFFFPLDGADESADELGQCDKIVLNYP

SEQ ID NO: 64715 - protein, 272 aa, Triticum aestivum
  peptide (1)..(272): Ceres Seq. ID no. 15222117
MASSSSSPLLMLLLLPLLRAMARPCSAVDAIGTYCAKNGTSAETQASIDQVLAALVPRASAAYYATATAGRSSSAVWGLAQCRGDVPRQDCSLCLAAAAKEVASSCRGSSDGRVFYDYCLLRYSTSNFVGLADTGYTLILLNTQNATGVDLAAFDRAQGKLMSRVASEAGDAANKGLATDTTRLGSEGGGAKTTIYGLGWCTRDITAADCGLCVAQAVAELPNYCRYRRGCRVIYSSCMARYEVYPFFFPLDGADESADELGQCDKIVLNYP

SEQ ID NO: 64716 - protein, 262 aa, Triticum aestivum
  peptide (1)..(262): Ceres Seq. ID no. 15222118
MLLLLPLLRAMARPCSAVDAIGTYCAKNGTSAETQASIDQVLAALVPRASAAYYATATAGRSSSAVWGLAQCRGDVPRQDCSLCLAAAAKEVASSCRGSSDGRVFYDYCLLRYSTSNFVGLADTGYTLILLNTQNATGVDLAAFDRAQGKLMSRVASEAGDAANKGLATDTTRLGSEGGGAKTTIYGLGWCTRDITAADCGLCVAQAVAELPNYCRYRRGCRVIYSSCMARYEVYPFFFPLDGADESADELGQCDKIVLNYP

SEQ ID NO: 64717 - DNA, 1682 bp, Triticum aestivum
  misc_feature (1)..(1682): Ceres Seq. ID no. 12625948
ccatcaagacaggcagacagttccgtgggcaccagaaccacaccccttcccgttcagacgcggcggaagatcgaatcggccgcgcacggcgatggcgacgactccaccgccgccgccgcttcctctcctcctccttcccctcctcctgctcgcggccttctccgccgccgaggagtttccgcgcgacgggaaggtgatagacctggacgacagcaacttcgaggcggccctcagctccatcgatttcctcttcgtcgacttctacgcgccatggtgcggccactgcaagcgcctcgcccccgagttagatgaagctgcaccggtgttggtgggattgagtgagcccatcatggttgccaaagtaaatgccgacaagtacaggaagcttggatcaaaatatggagtggatgggttccctactctaatgctctttatacatggggtccctattgaatacactggttcaaggaaagctgacttgcttgtccgcaatcttaagaagtttgttgcgcctgatgtttctactcttgagtcggattctgcaatcaagagctttgttgagaatgccggcacaagctttccgatgttcatcggttttggggtcaacgagtcattgattgctgaatatggaggaaaatacaagaaaagagcatggtttgccgtcgcaaaagatttttctgaggactggatggcgacatatgattttaataagatcccagcattggttgcagttcatccaaagtataatgaacaaagtgtgttctatggcccatttgaaggacgtttcttggaggattttgtaaggcaatcgctgctgcctttgactgtccccatcaacaccgagacactgaaattgctggatgatgatgacagaaaagttgtcctcgcaattttggaggatgactcggatgtaaattctacccagctggtaaaaattttgaggtctgctgctcatgcgaaccgtgatttggtgtttggatatgttggagtcaaacaatgggaggagtttgtggagacttttgatgtttccaagagctcacaattgccaaagctgctagtgtgggacagaaatgaagagtatgaactagtggagggttcagagaagttagaagaaggcgaccaagcatcccaattaagccaattccttgagggatatagagcagggagaacaataaagaagaaagtcagtggcccttccttcatgggtttcatgcactctcttgtcagcatgaactcattatacattctcatgtttgttgttgctcttctcggtgtcatgatgtactttactggccaagatgatactcagccaagacgggttcatgacgagtgatagcttcttgcatgaaaagaaggttatcaaccaggagttctagctcggaggtcgtattgccacctttgaactgttgttagccctgaagaggtcaggttttagcggttgcttgtgatattcgccgtttctctgtcagcaatcatcaggtcctgcattttctctgcccccgtttctgtttgttggttagagcttagcaactagcccccatgtaaagctagaaacacttcctaattttgccacttgtgtggagtttttatttattttattgcgagggttatatggtgtatcatactctgccaaacttttgtacaactgaactgatacaagtattaataatgtgtgaattgtg

SEQ ID NO: 64718 - protein, 443 aa, Triticum aestivum
  peptide (1)..(443): Ceres Seq. ID no. 12625949
HQDRQTVPWAPEPHPFPFRRGGRSNRPRTAMATTPPPPPLPLLLLPLLLLAAFSAAEEFPRDGKVIDLDDSNFEAALSSIDFLFVDFYAPWCGHCKRLAPELDEAAPVLVGLSEPIMVAKVNADKYRKLGSKYGVDGFPTLMLFIHGVPIEYTGSRKADLLVRNLKKFVAPDVSTLESDSAIKSFVENAGTSFPMFIGFGVNESLIAEYGGKYKKRAWFAVAKDFSEDWMATYDFNKIPALVAVHPKYNEQSVFYGPFEGRFLEDFVRQSLLPLTVPINTETLKLLDDDDRKVVLAILEDDSDVNSTQLVKILRSAAHANRDLVFGYVGVKQWEEFVETFDVSKSSQLPKLLVWDRNEEYELVEGSEKLEEGDQASQLSQFLEGYRAGRTIKKKVSGPSFMGFMHSLVSMNSLYILMFVVALLGVMMYFTGQDDTQPRRVHDE

SEQ ID NO: 64719 - protein, 413 aa, Triticum aestivum
  peptide (1)..(413): Ceres Seq. ID no. 12625950
MATTPPPPPLPLLLLPLLLLAAFSAAEEFPRDGKVIDLDDSNFEAALSSIDFLFVDFYAPWCGHCKRLAPELDEAAPVLVGLSEPIMVAKVNADKYRKLGSKYGVDGFPTLMLFIHGVPIEYTGSRKADLLVRNLKKFVAPDVSTLESDSAIKSFVENAGTSFPMFIGFGVNESLIAEYGGKYKKRAWFAVAKDFSEDWMATYDFNKIPALVAVHPKYNEQSVFYGPFEGRFLEDFVRQSLLPLTVPINTETLKLLDDDDRKVVLAILEDDSDVNSTQLVKILRSAAHANRDLVFGYVGVKQWEEFVETFDVSKSSQLPKLLVWDRNEEYELVEGSEKLEEGDQASQLSQFLEGYRAGRTIKKKVSGPSFMGFMHSLVSMNSLYILMFVVALLGVMMYFTGQDDTQPRRVHDE

SEQ ID NO: 64720 - protein, 327 aa, Triticum aestivum
  peptide (1)..(327): Ceres Seq. ID no. 12625951
MVAKVNADKYRKLGSKYGVDGFPTLMLFIHGVPIEYTGSRKADLLVRNLKKFVAPDVSTLESDSAIKSFVENAGTSFPMFIGFGVNESLIAEYGGKYKKRAWFAVAKDFSEDWMATYDFNKIPALVAVHPKYNEQSVFYGPFEGRFLEDFVRQSLLPLTVPINTETLKLLDDDDRKVVLAILEDDSDVNSTQLVKILRSAAHANRDLVFGYVGVKQWEEFVETFDVSKSSQLPKLLVWDRNEEYELVEGSEKLEEGDQASQLSQFLEGYRAGRTIKKKVSGPSFMGFMHSLVSMNSLYILMFVVALLGVMMYFTGQDDTQPRRVHDE

SEQ ID NO: 64721 - DNA, 509 bp, Triticum aestivum
  misc_feature (1)..(509): Ceres Seq. ID no. 13656047
aggaaaatagacattccaacgcagttcccccacccccacctcgcctgagcaggtcgccggcgaccgacaggccttcagctcgcccccaacctccccacccctcccgcgacgacccggggggaggcgccgagcgagcaggggggatggagttcacggaggcgtacaagcagacgggcccgtgctgcttctctcccgacgcccgcttcctcgccgtcgcctgcgactaccgcctcgtggtccgcgacgtcgtcaccctcaaggtggtgcagttgttttcatgtgtagacaagataaactttttggagtgggcaccagattcagaatacattctatgtggactttacaagcggccaatggtgcaggcttggtcgctgagccagcctgactggacctgtaagattgatgaaggatctgcagggattgcttatgctcgctggagtcctgacagtcgtcatatactcactacatcagagttccaactccgtttgactgtatggtctcttgtaaat

SEQ ID NO: 64722 - protein, 169 aa, Triticum aestivum
  peptide (1)..(169): Ceres Seq. ID no. 13656048
ENRHSNAVPPPPPRLSRSPATDRPSARPQPPHPSRDDPGGGAERAGGMEFTEAYKQTGPCCFSPDARFLAVACDYRLVVRDVVTLKVVQLFSCVDKINFLEWAPDSEYILCGLYKRPMVQAWSLSQPDWTCKIDEGSAGIAYARWSPDSRHILTTSEFQLRLTVWSLVN

SEQ ID NO: 64723 - protein, 122 aa, Triticum aestivum
  peptide (1)..(122): Ceres Seq. ID no. 13656049
MEFTEAYKQTGPCCFSPDARFLAVACDYRLVVRDVVTLKVVQLFSCVDKINFLEWAPDSEYILCGLYKRPMVQAWSLSQPDWTCKIDEGSAGIAYARWSPDSRHILTTSEFQLRLTVWSLVN

SEQ ID NO: 64724 - DNA, 1296 bp, Triticum aestivum
  misc_feature (1)..(1296): Ceres Seq. ID no. 13656050
aagatcaacaccaaacctctagatatagctggtatctttacctcgcgccgcccgaagacatggtatccgcgacgacgatgcaccaccggcgccgctccattctccagctggccctcctactactggcggcgtcaccggcggcaatgctggcggccggcggagcctgcgagagagaggagttcccggccggcaggagctacgcgacgtgcgcggatctccctgccctcggcgcctcgctgcactggacgtacgacgcggcggcctcgtcgttgtccctggcattcgcggccaagccgcccggcgcgagcggcgccggctgggtggcttggggggtcaaccccaccggcgatggcatgaagggcgcgcagacgctcctcgccttcaagagcaaaggcgcatacgtcgtcaacacgtacaacctcaccgggtaccgcccgctcagcgcggcgtccacgccgatcgcgttcgaggccaccgagctcgccgccgacgagggcgccgacgggaaggtgcggctctacggcacgctgcagctgcccaagggcatggaggccgtgaaccacatctggcaggtagggtcgacggtggccaatggggtgccggccaagcacgcgttcgcgcaggagaacctcgaggcgaagggcagtcttgtgctcaccggtgccggagcgacggaggccgcgccagctccggtgtttatctctcacgactatctcgattaaccagtagcagtagtgtttgggatacaaaattcaagagagaaagagagagtggggaaggagaaggaagtaggtaaggaagaacagagctggcaacaatctgcaaaaaaaaacacacacacacacacacacaccaatcttggggatgatccgtcgggaaagaaaattaagagtattaagaaaactaagaatactatgagcacttctaattcagatgatttcacaatagttcccccacaaaaaacatcaacatgagtgacaacaatgtgagtgatcatgagcataattttaatttgtctactataaagtatgcaaattcggtgagaaccaatttttgataatatgtgttctgggcgtcaatctccgttcaattgcaatcaaccgcccatattatgcttcaagggttggatgtacaacagtagtgttttttctagagaaaatttggagcgttctccttgtttgggtgatgtaccatgtaaaaaattactttcactgatatatctgcgtacaataaaaatctttatagaggaaaaaacataacaaatgtattttttatgatcaaataatatgttgatac

SEQ ID NO: 64725 - protein, 239 aa, Triticum aestivum
  peptide (1)..(239): Ceres Seq. ID no. 13656051
DQHQTSRYSWYLYLAPPEDMVSATTMHHRRRSILQLALLLLAASPAAMLAAGGACEREEFPAGRSYATCADLPALGASLHWTYDAAASSLSLAFAAKPPGASGAGWVAWGVNPTGDGMKGAQTLLAFKSKGAYVVNTYNLTGYRPLSAASTPIAFEATELAADEGADGKVRLYGTLQLPKGMEAVNHIWQVGSTVANGVPAKHAFAQENLEAKGSLVLTGAGATEAAPAPVFISHDYLD

SEQ ID NO: 64726 - protein, 220 aa, Triticum aestivum
  peptide (1)..(220): Ceres Seq. ID no. 13656052
MVSATTMHHRRRSILQLALLLLAASPAAMLAAGGACEREEFPAGRSYATCADLPALGASLHWTYDAAASSLSLAFAAKPPGASGAGWVAWGVNPTGDGMKGAQTLLAFKSKGAYVVNTYNLTGYRPLSAASTPIAFEATELAADEGADGKVRLYGTLQLPKGMEAVNHIWQVGSTVANGVPAKHAFAQENLEAKGSLVLTGAGATEAAPAPVFISHDYLD

SEQ ID NO: 64727 - protein, 214 aa, Triticum aestivum
  peptide (1)..(214): Ceres Seq. ID no. 13656053
MHHRRRSILQLALLLLAASPAAMLAAGGACEREEFPAGRSYATCADLPALGASLHWTYDAAASSLSLAFAAKPPGASGAGWVAWGVNPTGDGMKGAQTLLAFKSKGAYVVNTYNLTGYRPLSAASTPIAFEATELAADEGADGKVRLYGTLQLPKGMEAVNHIWQVGSTVANGVPAKHAFAQENLEAKGSLVLTGAGATEAAPAPVFISHDYLD

SEQ ID NO: 64728 - DNA, 1375 bp, Triticum aestivum
  misc_feature (1)..(1375): Ceres Seq. ID no. 13656028
acctagaacatcctaatcgaaaagatattttcctcctctccgtgcggacaactccactccactcgtccactcctactaccagcttctcactcccactcccgcaggcgggtgatccatggccacggcgctccgcctcccgtctctcctctcctcccgcgccgcccctaccaccgccgctcgcgctaccatccgagggaatcggacaggatcgttcactcacagggtcgccgcgcagcctgacgacaccaccgccaccacctccacctccaccacgccggctccgcccgccgggttcacgcctccggttcccaagcggttcgaggtcaagcccggccagtcaaacaacatcgccggcgccgccctcgctttgcccttccgcctcggcaccggcgtcttcgtcctaggatatggagtgacacttgttgatgctaacgagatatcaccagatcaatatgctttggatttccaaggtcggaaggtgaaagaaacgtcgaaggtggggcagtgccctcgacctgctaagcctattgaaatatacgagtttgaaggatgtccattttgtcgaaaggtcagagagatggtatccgtcctggaccttgatgttttatattacccttgtcctaaaggcagcccaaccttccggccaaaggttctagagatgggtggaaagaaacagtttccttacatggtcgatccaaacacaggagttgctatgtatgaatcagatgacatcataaattacctggcaaaaacttacggtgatggaagtgttccaattatgctaaaacttggtctattgacaacaataacggcagggcttgcattgagtgggcgtagcgggaaggggtcttcctacagtcctgcaaagcttccatctcagccaatagagatatgggcatacgagggatctcctttctgtaaaatagcgcgtgagacccttgtcgaattggagttgccacacttgctacacagctgtgcgcgtggcagccccaagcgacaggatttttttgagaaatatggtcttttccaggcgccttatatcgaggatcctaacacgggggtaaagatgttcgaaagcgccgacatcgtagagtatctgagggcaacatatgctgcttgagaatccctgtcactgtcttttctcagtaaataactaaatattgagctcatagctgccatgtctcttctcatgtagtagatcacattctttactaggaaaaatggtgcatactagatatgtaaggtgtaaattatattcgctgcagctgagacagcgtctttgctatctaagagacactgaatctgaggccgtagaaaagggaaaaaaaaaaaaaaaaaagcttatcgataccgtcgacctcgagggggggcccgg

SEQ ID NO: 64729 - protein, 334 aa, Triticum aestivum
  peptide (1)..(334): Ceres Seq. ID no. 13656029
MATALRLPSLLSSRAAPTTAARATIRGNRTGSFTHRVAAQPDDTTATTSTSTTPAPPAGFTPPVPKRFEVKPGQSNNIAGAALALPFRLGTGVFVLGYGVTLVDANEISPDQYALDFQGRKVKETSKVGQCPRPAKPIEIYEFEGCPFCRKVREMVSVLDLDVLYYPCPKGSPTFRPKVLEMGGKKQFPYMVDPNTGVAMYESDDIINYLAKTYGDGSVPIMLKLGLLTTITAGLALSGRSGKGSSYSPAKLPSQPIEIWAYEGSPFCKIARETLVELELPHLLHSCARGSPKRQDFFEKYGLFQAPYIEDPNTGVKMFESADIVEYLRATYAA

SEQ ID NO: 64730 - protein, 180 aa, Triticum aestivum
  peptide (1)..(180): Ceres Seq. ID no. 13656030
MVSVLDLDVLYYPCPKGSPTFRPKVLEMGGKKQFPYMVDPNTGVAMYESDDIINYLAKTYGDGSVPIMLKLGLLTTITAGLALSGRSGKGSSYSPAKLPSQPIEIWAYEGSPFCKIARETLVELELPHLLHSCARGSPKRQDFFEKYGLFQAPYIEDPNTGVKMFESADIVEYLRATYAA

SEQ ID NO: 64731 - DNA, 1379 bp, Triticum aestivum
  misc_feature (1)..(1379): Ceres Seq. ID no. 15169674
ccattccgactctctctccaccgaaacagaaacaccaacctcccctcggccggcgaccatggcggaggccgcggccgcaggagcgacgcctctcctccgcaacctccccgatgagatcgtgctctgggagatcctcgcccgccttgaccccagatcgctcatccgctgccgcgccgtccgccgcgcctggcgccgcgccacctccacccgtcgcttcctcctggcccaccacgcacgccagcccgcattccccatcgccgccgacaacaggtaccgtaacttcctcgccttcgaccaccggtccgccgccaccgccgacgcccagttccacaccgtcgcccggcttggcgggtccttcagtctggagctctgctgcgacggcctcctcctcgtcgccaagtctggcatgcttggcaatcgcgcccgcctcgccgtctgcaacccggtaacgcgtcagcacgcctccctcccgcccctgccggacttcaacatcctggggatgtacctacacggacctaccgacgagtaccggctgttactgcaatggaggggcgcaatggactggggggacgacagtgactttgactcgcctacaggcaaaaatggctgctatgtctttgcgctgggatccgaccagccaccgaggtacatcgggttgtcggagcccaaattctcgtcggcttacttccacggacctgcccgggtgcgtgatagcctgcattggtgcctgttttatcgcccaggcgagaccccactggaggattgtgaggctggatgggaactggtggtatttgacaccatagctgagtcatttcggcagatgcatgctccagttgatcccaccaagtcatgcatccttgagatggatgacatgcttggcatctattgctgtaacaaggctgcggaagttgttgatatatgggtgttgccgaactacgacagtgaggtttgggacttgaagtaccgggttgcattgccgatcgcagaaatcaggggaaagcttgaaggccatgatggtgagtgctattggtatgtgaccgttgcttcgggtggtggtgacgagctcttgctggccagttttggtcgttcgctgttttacattgacactcatggcaaactggttgctagcttccaagacatctttccctctaggcatcggctcaaacaaactcttgttccgcatgatttcttcagaacagtaaaaggtcaggctgtcgacgcttcacctttcatctgacggatgttgagagaggcggtgcttcttaacaggctagttttcatatcctcgtgagttgtaatgtctatgtattggatcaagtatgggcctgctgatttcttctttttgtgtcaatcagaagtgactgtcatgtggttgcatg

SEQ ID NO: 64732 - protein, 411 aa, Triticum aestivum
  peptide (1)..(411): Ceres Seq. ID no. 15169675
HSDSLSTETETPTSPRPATMAEAAAAGATPLLRNLPDEIVLWEILARLDPRSLIRCRAVRRAWRRATSTRRFLLAHHARQPAFPIAADNRYRNFLAFDHRSAATADAQFHTVARLGGSFSLELCCDGLLLVAKSGMLGNRARLAVCNPVTRQHASLPPLPDFNILGMYLHGPTDEYRLLLQWRGAMDWGDDSDFDSPTGKNGCYVFALGSDQPPRYIGLSEPKFSSAYFHGPARVRDSLHWCLFYRPGETPLEDCEAGWELVVFDTIAESFRQMHAPVDPTKSCILEMDDMLGIYCCNKAAEVVDIWVLPNYDSEVWDLKYRVALPIAEIRGKLEGHDGECYWYVTVASGGGDELLLASFGRSLFYIDTHGKLVASFQDIFPSRHRLKQTLVPHDFFRTVKGQAVDASPFI

SEQ ID NO: 64733 - protein, 392 aa, Triticum aestivum
  peptide (1)..(392): Ceres Seq. ID no. 15169676
MAEAAAAGATPLLRNLPDEIVLWEILARLDPRSLIRCRAVRRAWRRATSTRRFLLAHHARQPAFPIAADNRYRNFLAFDHRSAATADAQFHTVARLGGSFSLELCCDGLLLVAKSGMLGNRARLAVCNPVTRQHASLPPLPDFNILGMYLHGPTDEYRLLLQWRGAMDWGDDSDFDSPTGKNGCYVFALGSDQPPRYIGLSEPKFSSAYFHGPARVRDSLHWCLFYRPGETPLEDCEAGWELVVFDTIAESFRQMHAPVDPTKSCILEMDDMLGIYCCNKAAEVVDIWVLPNYDSEVWDLKYRVALPIAEIRGKLEGHDGECYWYVTVASGGGDELLLASFGRSLFYIDTHGKLVASFQDIFPSRHRLKQTLVPHDFFRTVKGQAVDASPFI

SEQ ID NO: 64734 - protein, 276 aa, Triticum aestivum
  peptide (1)..(276): Ceres Seq. ID no. 15169677
MLGNRARLAVCNPVTRQHASLPPLPDFNILGMYLHGPTDEYRLLLQWRGAMDWGDDSDFDSPTGKNGCYVFALGSDQPPRYIGLSEPKFSSAYFHGPARVRDSLHWCLFYRPGETPLEDCEAGWELVVFDTIAESFRQMHAPVDPTKSCILEMDDMLGIYCCNKAAEVVDIWVLPNYDSEVWDLKYRVALPIAEIRGKLEGHDGECYWYVTVASGGGDELLLASFGRSLFYIDTHGKLVASFQDIFPSRHRLKQTLVPHDFFRTVKGQAVDASPFI

SEQ ID NO: 64735 - DNA, 699 bp, Triticum aestivum
  misc_feature (1)..(699): Ceres Seq. ID no. 13597511
aaaaaaaacacaccgactccactgcatctgcttcgccgcgggcgagtccggccgccggcgatgcggggcccgcacaaccgcccccagtgcacgccggcccaccaggcgggcgccctcctcctggtcgccgtcaccttcctcctcacccgcctcctctccgcccctccccctgccccgcccttccccacccccggcccccggctctccgccgcggccgaccacctccgcgtctacgtctacgccgaggacgaggtcgacggcctgcgcgcgctgctccgcggccgcgacggcgccgtctccgccgccacctgcctcaagggccagtggggaacgcaggtgaagatccaccagcttctcctgaggtcaaggtataggacactggacaaggacgaagcgcatctcttctttgttcccagctacgtcaaatgtgttcgcatgaccggagctctcacagacaaggaaatcaatcagacatatgtcaaggttctgagtcagatgtcatatttccgcagatcgggtgggcgtgaccacatttttgtcttcccaagtggtgctggagctcacctgtttcgctcgtgggcaacttttctgaatcgatccatcatcctcactccagagggtgaccgtactgacaagcgaggtataagcgcatttaatacatggaaagacattattatcccggggaatgtggatgattct

SEQ ID NO: 64736 - protein, 233 aa, Triticum aestivum
  peptide (1)..(233): Ceres Seq. ID no. 13597512
KKNTPTPLHLLRRGRVRPPAMRGPHNRPQCTPAHQAGALLLVAVTFLLTRLLSAPPPAPPFPTPGPRLSAAADHLRVYVYAEDEVDGLRALLRGRDGAVSAATCLKGQWGTQVKIHQLLLRSRYRTLDKDEAHLFFVPSYVKCVRMTGALTDKEINQTYVKVLSQMSYFRRSGGRDHIFVFPSGAGAHLFRSWATFLNRSIILTPEGDRTDKRGISAFNTWKDIIIPGNVDDS

SEQ ID NO: 64737 - protein, 213 aa, Triticum aestivum
  peptide (1)..(213): Ceres Seq. ID no. 13597513
MRGPHNRPQCTPAHQAGALLLVAVTFLLTRLLSAPPPAPPFPTPGPRLSAAADHLRVYVYAEDEVDGLRALLRGRDGAVSAATCLKGQWGTQVKIHQLLLRSRYRTLDKDEAHLFFVPSYVKCVRMTGALTDKEINQTYVKVLSQMSYFRRSGGRDHIFVFPSGAGAHLFRSWATFLNRSIILTPEGDRTDKRGISAFNTWKDIIIPGNVDDS

SEQ ID NO: 64738 - protein, 123 aa, Triticum aestivum
  peptide (1)..(123): Ceres Seq. ID no. 13597514
KKHTDSTASASPRASPAAGDAGPAQPPPVHAGPPGGRPPPGRRHLPPHPPPLRPSPCPALPHPRPPALRRGRPPPRLRLRRGRGRRPARAAPRPRRRRLRRHLPQGPVGNAGEDPPASPEVKV

SEQ ID NO: 64739 - DNA, 1953 bp, Triticum aestivum
  misc_feature (1)..(1953): Ceres Seq. ID no. 13584538
aatccgccgactgctccgtttatttaaccgagccgtcccattcttggagagcaagaagcacgccaccacctcgcgtccccaaagaatccccatcccttcccctcccctcccctccccggccgcacacagatccggcgaccgacaacaagccatggtgtccaacggggagctgtcgcagccgcaggcgggggagtacggcctcgccgtcatgcgccgccggcccaagaccaagatcgtctgcacgctcggcccggcctcccgctccgtcgacatgatcgagaagctgctgcgcgccggcatgtgcgtcgcccgcttcaacttctcccacggctcccacgactaccaccaggagacgctcgacaacctgcacgccgccatggaccgcaccgggatcctctgcgccgtcatgctcgacaccaagggtccagagatccgtactggatttttgaaagatgggaagcctatccagttgaggaagggccaagaaattgtgatctccacagattatagcataaagggggacgacaagatgatatcgatgagctataagaagctagcagttgatctgaagccaggcagtgtcatattatgcgctgatggtaccatcactcttacagtgcttcattgtgacaaagagcaaggtctcgttcgctgctgttgtgagaacactgctatgcttggtgagaggaagaatgtcaatcttccaggggtcgttgttgatctgccaacactcactgaaaaggacagggaggatatccttcaatggggcgtcccgaacaagattgacatgattgctttgtcgtttgtccgcaaaggttcagatcttgtggaggtcaggaaggtacttggggagcatgccaagtcaataatgctgatgtcaaaggttgagaaccaggaaggagtagctaactttgacgatatcctggcacagtctgatgcttttatggtggcaagaggtgatttggggatggaaattcctgtagagaagatcttttatgcacagaaggtgatgattttcaagtgcaacattcagggcaagccagttgtgactgcaacccagatgttggagtctatgatcaagtctcctcggcctactcgagcggaagcaactgatgtggccaacgcagttcttgatggcactgactgtgtgatgctcagtggtgagacagcggctggggcttatccagaactggcagtgcaaactatggccaagatctgcttgcaggccgagtcatgcgtggactattctgctgtttttaaatcaatcatgtcatcagccccgattcccatgagcccattggagagccttgcctcatcagctgtccgcacagccaactcagccaaggcgacgcttatcttggtactgaccaggggaggaacaactgcaaggcttgtagccaagtacaggccatccatgccgatactgtctgtggtggttcctgagctcaagacggtcgagtttgactggatctgcagcgacgaggggcctgccaggcaaagcctcatcgtgaggggcgtgatccctatgctcagtgctggcactgccaaggcgtttgacagcgaagccacggaagaggcactgaggtttgccatgaagaacgccaaggagatgggcctttgcaacgctggtgactccattgtggcccttcaccgcatcgggaatgcatctgtcatcaagctcttgaccgtgtaagctagtggcagcgaagcgacaatgcaacaccattttgcccggggattttcccttctttctttttgcgaggctacgcatacccacagttttttgctgccaagattgcggcagtgcaacctggttaaaactttgtgttatcaagttgtggctgtttactctttatgagagggtttagccaccaaaactattatcgcagcagcttgttttgctactactactataacttatatgcaacgattgaactacctgatagttgctcc

SEQ ID NO: 64740 - protein, 563 aa, Triticum aestivum
  peptide (1)..(563): Ceres Seq. ID no. 13584539
IRRLLRLFNRAVPFLESKKHATTSRPQRIPIPSPPLPSPAAHRSGDRQQAMVSNGELSQPQAGEYGLAVMRRRPKTKIVCTLGPASRSVDMIEKLLRAGMCVARFNFSHGSHDYHQETLDNLHAAMDRTGILCAVMLDTKGPEIRTGFLKDGKPIQLRKGQEIVISTDYSIKGDDKMISMSYKKLAVDLKPGSVILCADGTITLTVLHCDKEQGLVRCCCENTAMLGERKNVNLPGVVVDLPTLTEKDREDILQWGVPNKIDMIALSFVRKGSDLVEVRKVLGEHAKSIMLMSKVENQEGVANFDDILAQSDAFMVARGDLGMEIPVEKIFYAQKVMIFKCNIQGKPVVTATQMLESMIKSPRPTRAEATDVANAVLDGTDCVMLSGETAAGAYPELAVQTMAKICLQAESCVDYSAVFKSIMSSAPIPMSPLESLASSAVRTANSAKATLILVLTRGGTTARLVAKYRPSMPILSVVVPELKTVEFDWICSDEGPARQSLIVRGVIPMLSAGTAKAFDSEATEEALRFAMKNAKEMGLCNAGDSIVALHRIGNASVIKLLTV

SEQ ID NO: 64741 - protein, 513 aa, Triticum aestivum
  peptide (1)..(513): Ceres Seq. ID no. 13584540
MVSNGELSQPQAGEYGLAVMRRRPKTKIVCTLGPASRSVDMIEKLLRAGMCVARFNFSHGSHDYHQETLDNLHAAMDRTGILCAVMLDTKGPEIRTGFLKDGKPIQLRKGQEIVISTDYSIKGDDKMISMSYKKLAVDLKPGSVILCADGTITLTVLHCDKEQGLVRCCCENTAMLGERKNVNLPGVVVDLPTLTEKDREDILQWGVPNKIDMIALSFVRKGSDLVEVRKVLGEHAKSIMLMSKVENQEGVANFDDILAQSDAFMVARGDLGMEIPVEKIFYAQKVMIFKCNIQGKPVVTATQMLESMIKSPRPTRAEATDVANAVLDGTDCVMLSGETAAGAYPELAVQTMAKICLQAESCVDYSAVFKSIMSSAPIPMSPLESLASSAVRTANSAKATLILVLTRGGTTARLVAKYRPSMPILSVVVPELKTVEFDWICSDEGPARQSLIVRGVIPMLSAGTAKAFDSEATEEALRFAMKNAKEMGLCNAGDSIVALHRIGNASVIKLLTV

SEQ ID NO: 64742 - protein, 494 aa, Triticum aestivum
  peptide (1)..(494): Ceres Seq. ID no. 13584541
MRRRPKTKIVCTLGPASRSVDMIEKLLRAGMCVARFNFSHGSHDYHQETLDNLHAAMDRTGILCAVMLDTKGPEIRTGFLKDGKPIQLRKGQEIVISTDYSIKGDDKMISMSYKKLAVDLKPGSVILCADGTITLTVLHCDKEQGLVRCCCENTAMLGERKNVNLPGVVVDLPTLTEKDREDILQWGVPNKIDMIALSFVRKGSDLVEVRKVLGEHAKSIMLMSKVENQEGVANFDDILAQSDAFMVARGDLGMEIPVEKIFYAQKVMIFKCNIQGKPVVTATQMLESMIKSPRPTRAEATDVANAVLDGTDCVMLSGETAAGAYPELAVQTMAKICLQAESCVDYSAVFKSIMSSAPIPMSPLESLASSAVRTANSAKATLILVLTRGGTTARLVAKYRPSMPILSVVVPELKTVEFDWICSDEGPARQSLIVRGVIPMLSAGTAKAFDSEATEEALRFAMKNAKEMGLCNAGDSIVALHRIGNASVIKLLTV

SEQ ID NO: 64743 - DNA, 1456 bp, Triticum aestivum
  misc_feature (1)..(1456): Ceres Seq. ID no. 13655812
aacggtagcatcgctcgtgatagcactgcaacctgggaaccactttctttacattgctctcagtcgagtcaccacttgccagcgatggagagctgcagcttggtcgacacggccgccgccgctctctgctcgacaccgggcgcgcgccgccgcggccgcgccgggagcgccgcgaggttcttcaactgctccagctcctccagagagcacggggtgagcgcgtcctactccatcggccggatgctgagcggggtgaggtcggcggcgcggaggaagctgttcaggagcgagcccgagtggatgggcgtcaactggccggactccatcggccaccattggtggacatccctggagaacaacttcgtgctcgaggcctccgaggacgagtacggcggggtcgtcgtcgacgccgacaggctgccgtccgacgaggccgccttcgcccggtcgctagcggcgtccctctcctactggcagtccgtgggaaagaaaggggtgtggctgaaattgccagtggatcgatctgagtttgttccaatagcagtcaaggaaggattcaagtaccaccacgcggaggaggcctacttgatgctgacgtactggatccccgacgagccgtctctgctcccagcgaacgcttctcatcaggtcggcgtcgggggcttcgtgatcaatgatcaaatggaggtcctagtggtgcaagagaagtatcgcggctgggcgttggatggtgtctggaaactccccacggggttcattcaggagtcagaagaaatatacacgggagccatcagagaggtgcaggaagaaacaggggttgacactgaattcgtggatgtggttgccttcaggcacgcgcacaacgtggcgtttcagaagtcggacctgttcttcatctgcatgctgaggcctctgtcgagcgcgatcaagatcgacgaaacagagattcaggcagcaaagtggatgccgctggaggagttcgtgaagcagccgttcatccaggaggaccacatgttccagaagatcatggacatctgcatccagcggctgaggaagtgctactgcggcctcacggcgcacaacgtcgtctccaagttcgacggcaggcagtccaccctctactacaacgtgggcgagcccgaggatgtcaactgcgacgctgcctgacgggtcgccggattctttttttctttgctctgcgaccgtctaggcgttgtgcggtgcaaagttgtagcattaaggaggcaactggattggcctctgtatatacgtgtaggagactgtaattagacatgggcgggacgggttagctctgtcgcgtagtaatgtgtactactattcgtcagtgtaccggtggtggcaattatctagaagaaatggcagtgatctggaagatatatctttctttcagtttcagtgtattgtgcactttgaaaagaccatgtttctccacgct

SEQ ID NO: 64744 - protein, 388 aa, Triticum aestivum
  peptide (1)..(388): Ceres Seq. ID no. 15220558
NGSIARDSTATWEPLSLHCSQSSHHLPAMESCSLVDTAAAALCSTPGARRRGRAGSAARFFNCSSSSREHGVSASYSIGRMLSGVRSAARRKLFRSEPEWMGVNWPDSIGHHWWTSLENNFVLEASEDEYGGVVVDADRLPSDEAAFARSLAASLSYWQSVGKKGVWLKLPVDRSEFVPIAVKEGFKYHHAEEAYLMLTYWIPDEPSLLPANASHQVGVGGFVINDQMEVLVVQEKYRGWALDGVWKLPTGFIQESEEIYTGAIREVQEETGVDTEFVDVVAFRHAHNVAFQKSDLFFICMLRPLSSAIKIDETEIQAAKWMPLEEFVKQPFIQEDHMFQKIMDICIQRLRKCYCGLTAHNVVSKFDGRQSTLYYNVGEPEDVNCDAA

SEQ ID NO: 64745 - protein, 360 aa, Triticum aestivum
  peptide (1)..(360): Ceres Seq. ID no. 15220559
MESCSLVDTAAAALCSTPGARRRGRAGSAARFFNCSSSSREHGVSASYSIGRMLSGVRSAARRKLFRSEPEWMGVNWPDSIGHHWWTSLENNFVLEASEDEYGGVVVDADRLPSDEAAFARSLAASLSYWQSVGKKGVWLKLPVDRSEFVPIAVKEGFKYHHAEEAYLMLTYWIPDEPSLLPANASHQVGVGGFVINDQMEVLVVQEKYRGWALDGVWKLPTGFIQESEEIYTGAIREVQEETGVDTEFVDVVAFRHAHNVAFQKSDLFFICMLRPLSSAIKIDETEIQAAKWMPLEEFVKQPFIQEDHMFQKIMDICIQRLRKCYCGLTAHNVVSKFDGRQSTLYYNVGEPEDVNCDAA

SEQ ID NO: 64746 - protein, 308 aa, Triticum aestivum
  peptide (1)..(308): Ceres Seq. ID no. 15220560
MLSGVRSAARRKLFRSEPEWMGVNWPDSIGHHWWTSLENNFVLEASEDEYGGVVVDADRLPSDEAAFARSLAASLSYWQSVGKKGVWLKLPVDRSEFVPIAVKEGFKYHHAEEAYLMLTYWIPDEPSLLPANASHQVGVGGFVINDQMEVLVVQEKYRGWALDGVWKLPTGFIQESEEIYTGAIREVQEETGVDTEFVDVVAFRHAHNVAFQKSDLFFICMLRPLSSAIKIDETEIQAAKWMPLEEFVKQPFIQEDHMFQKIMDICIQRLRKCYCGLTAHNVVSKFDGRQSTLYYNVGEPEDVNCDAA

SEQ ID NO: 64747 - DNA, 1057 bp, Triticum aestivum
  misc_feature (1)..(1057): Ceres Seq. ID no. 12617450
cacaacagcaaagcatccagcatcgccaacttccaaaatcaacctacgttgtacacttttcgagccctatccagttctattttctatacacttctcgagccccatccagttttgcgttcgtgccgctcgatccaatcctaccttagcttgcgaagacatggcttctcgtcaggatcaggctagctaccacgccggggaggccaaggcccgcgccgaggagaagacggggtacgtcgtgggcgcggcgcaggacaaggcgagggaggccaaggacacggcgtccgacgccgcgggccgtgccatgggcaggggcggcgacgccaaggaggcgaccaaggagaaggcgtacgaggccaaggacgcggcgtcggacgccaccggccgcgccatggacaagggccgcggcgccgcggaggccaccaaggagaagggctgcgaggccaaggacaaggccgccggcaccgcgcagcagaccgggagctacatcgcccagacggccgaggccgccaagcagaaggcggccggcgccgcccagtacaccatcgacacggcccgtgccggcaccgagcagaccgggagctacatcgagcagacggccgaggccgccaagcagaaggccggcgcggccgcgcagtatgccatggacaccgccgtcgccggcaaggacaagaccggcagcctcctcgtgcaggcaggggagacggtgaagggcgcggcggtgggggcgaaggacgccgtgatgaacacgatcggaatgggcggcggcaccaacggcagcaccgacgtccccgccaaggacaccagcacgtacaagcccgggaccagggattactaatcgtgtgccattgtcaaggcgaccctgatgtatctttctaagctgtagtttaatttctacgtggccatctgtcgccactttggtttctaaattagctcacctcgtggaggttgtaacttgtcaggacctagacaaatgcccaatgaagcattcctgactcctcccttccatgcttgtttccgtgttcacaatttaataaagttggaatcctagtgtctctcc

SEQ ID NO: 64748 - protein, 277 aa, Triticum aestivum
  peptide (1)..(277): Ceres Seq. ID no. 12617451
TTAKHPASPTSKINLRCTLFEPYPVLFSIHFSSPIQFCVRAARSNPTLACEDMASRQDQASYHAGEAKARAEEKTGYVVGAAQDKAREAKDTASDAAGRAMGRGGDAKEATKEKAYEAKDAASDATGRAMDKGRGAAEATKEKGCEAKDKAAGTAQQTGSYIAQTAEAAKQKAAGAAQYTIDTARAGTEQTGSYIEQTAEAAKQKAGAAAQYAMDTAVAGKDKTGSLLVQAGETVKGAAVGAKDAVMNTIGMGGGTNGSTDVPAKDTSTYKPGTRDY

SEQ ID NO: 64749 - protein, 225 aa, Triticum aestivum
  peptide (1)..(225): Ceres Seq. ID no. 12617452
MASRQDQASYHAGEAKARAEEKTGYVVGAAQDKAREAKDTASDAAGRAMGRGGDAKEATKEKAYEAKDAASDATGRAMDKGRGAAEATKEKGCEAKDKAAGTAQQTGSYIAQTAEAAKQKAAGAAQYTIDTARAGTEQTGSYIEQTAEAAKQKAGAAAQYAMDTAVAGKDKTGSLLVQAGETVKGAAVGAKDAVMNTIGMGGGTNGSTDVPAKDTSTYKPGTRDY

SEQ ID NO: 64750 - protein, 177 aa, Triticum aestivum
  peptide (1)..(177): Ceres Seq. ID no. 12617453
MGRGGDAKEATKEKAYEAKDAASDATGRAMDKGRGAAEATKEKGCEAKDKAAGTAQQTGSYIAQTAEAAKQKAAGAAQYTIDTARAGTEQTGSYIEQTAEAAKQKAGAAAQYAMDTAVAGKDKTGSLLVQAGETVKGAAVGAKDAVMNTIGMGGGTNGSTDVPAKDTSTYKPGTRDY

SEQ ID NO: 64751 - DNA, 1207 bp, Triticum aestivum
  misc_feature (1)..(1207): Ceres Seq. ID no. 13584480
aggaagccacactcccgcagctgcagcgaatttacactgcaggtcgaggctagctgagatccatggcgtcgagcagggcgatcttggccatgggcctccttgccgccgtgctgtcccccgccttgtcaaagcggtcgtttatctccatgccagccgacgtgagtagtcctgtgaccctggccaacggcctctcctacggttaccacgccaactcctgcccgcagctgcaagacattgtgtggccgatcgtggagagcgcggtcctgggtgaggtggccatcgccgccggcctcctccgtatcttcttccacgactgctttcctcagggctgcgacgcgtccgtccttctgacgggacccaacagcgagcgggacctgccgccgaaccagacgctgcagccgcgtgcgatgcagctcatcgaggacgtccgcgtcaaggtacacgccgcctgtggcgccaccgtctcctgcgccgacatcatcgccctcgccacccgcgacgccgtcttcgtggccggggaaagcgaaatgttctacttctacgacctgccgctcggccggtttgacagcctcgagccggctaatagcagcgccgtcttcgacctcccgcagtccaccgccgacgccaacacgctcatcaacgtcttcaagagccgcaacctcgagccgatcgacctcgtcgcactctctggcgcgcacactgtcgggaaggcgcagtgcagctccttcaacaaccgcttctccgaggacgccgacttcgcccggaggctcgccgccaactgctccagcgacccgaaccggctgcaggacctcgacgtggaaacccccatcgtgttggacaaccagtacttcaaaaacctgatggagggaaagggggtgttcacctccgaccaagtgctcatcagcgacgggcgcaccgactgggcggtcaaaggcctcgccgagaacaaatattggttctacagccagttccgtgactccttggtgaagctgagtcagtaccaacccggaggaaacgtgggcgagatccgccgcaacagctgcttcacgcccaacggacagagcattcccgccaccgccggtgacgaggggttcgcagcctctgcttgagttcaccgctcactacgggatcgtcgtttagtttgcttgtagtaagagtataagctcgtgtgtactctgcttcgttcaatcctctttcatgatggctc

SEQ ID NO: 64752 - protein, 348 aa, Triticum aestivum
  peptide (1)..(348): Ceres Seq. ID no. 13584481
MASSRAILAMGLLAAVLSPALSKRSFISMPADVSSPVTLANGLSYGYHANSCPQLQDIVWPIVESAVLGEVAIAAGLLRIFFHDCFPQGCDASVLLTGPNSERDLPPNQTLQPRAMQLIEDVRVKVHAACGATVSCADIIALATRDAVFVAGESEMFYFYDLPLGRFDSLEPANSSAVFDLPQSTADANTLINVFKSRNLEPIDLVALSGAHTVGKAQCSSFNNRFSEDADFARRLAANCSSDPNRLQDLDVETPIVLDNQYFKNLMEGKGVFTSDQVLISDGRTDWAVKGLAENKYWFYSQFRDSLVKLSQYQPGGNVGEIRRNSCFTPNGQSIPATAGDEGFAASA

SEQ ID NO: 64753 - protein, 339 aa, Triticum aestivum
  peptide (1)..(339): Ceres Seq. ID no. 13584482
MGLLAAVLSPALSKRSFISMPADVSSPVTLANGLSYGYHANSCPQLQDIVWPIVESAVLGEVAIAAGLLRIFFHDCFPQGCDASVLLTGPNSERDLPPNQTLQPRAMQLIEDVRVKVHAACGATVSCADIIALATRDAVFVAGESEMFYFYDLPLGRFDSLEPANSSAVFDLPQSTADANTLINVFKSRNLEPIDLVALSGAHTVGKAQCSSFNNRFSEDADFARRLAANCSSDPNRLQDLDVETPIVLDNQYFKNLMEGKGVFTSDQVLISDGRTDWAVKGLAENKYWFYSQFRDSLVKLSQYQPGGNVGEIRRNSCFTPNGQSIPATAGDEGFAASA

SEQ ID NO: 64754 - protein, 320 aa, Triticum aestivum
  peptide (1)..(320): Ceres Seq. ID no. 13584483
MPADVSSPVTLANGLSYGYHANSCPQLQDIVWPIVESAVLGEVAIAAGLLRIFFHDCFPQGCDASVLLTGPNSERDLPPNQTLQPRAMQLIEDVRVKVHAACGATVSCADIIALATRDAVFVAGESEMFYFYDLPLGRFDSLEPANSSAVFDLPQSTADANTLINVFKSRNLEPIDLVALSGAHTVGKAQCSSFNNRFSEDADFARRLAANCSSDPNRLQDLDVETPIVLDNQYFKNLMEGKGVFTSDQVLISDGRTDWAVKGLAENKYWFYSQFRDSLVKLSQYQPGGNVGEIRRNSCFTPNGQSIPATAGDEGFAASA

SEQ ID NO: 64755 - DNA, 1324 bp, Triticum aestivum
  misc_feature (1)..(1324): Ceres Seq. ID no. 15179784
acgaattcccctcccctccccgctaaccccgccgcatggaaaacgcaggcccggcaggggatccgcccggcgaatccatcgaatccccgctcctgcccgcgccggagaccaagatgccgccaccggtgccggccgtccggctcggggcgccgccgccgcccccgtgcctcaggacccacggggccaagatggcgcgccggcacatgtacgactggatcgtgctgctcctcctcgccgccatcgaggtcgcgctcaacctcatcacgcccttccaccgcttcgtcgccgagttcatgatggaggacctccgctaccccatgaagcccaacaccatccccgtctgggccgtcccgatatacgccgtcatcctgccgatgctcatcttcgccgccatctatgtcaagaagaagaatgcctacgacctgcatcacgccatactaggcctgctgttctccgtgctcatcaccggcgtcctcaccgatgcgatcaaggacggcgtcggccggcctcgccccaacttctactatcgatgctttcctgacggagtgccgaactatgaggcggtcactcgacaagtcatatgccacggagacgcaaaagtcatcaaagaagggcacaagagcttccccagtggccacacttcatggtcctttgccgggctgggcttcctgtcgtggtaccttgccggcaagatcagggtgtttgaccggggcggacacattgccaagctctgtgtcgtgatcctgccactgctcttcgctgcgatggtcggcgtgtcgcgggtcgcagactactggcaccactggcgggacgtgtttgccggtgggatcctcgggctggttgttgcttcgttctgctatctgcagttcttcccgcatccggctagcaaacacgggctgtggcctcatgcattccggcatcaggatcctaacccggaaactgagaaccaaggaacaacagatccccatcagtcggtgctgccgtccatggtacaacatgttgcctccatggagatgagaaccaatggccgagcgttggataacatggaggctggcagcggcagagcctggtaactgaatacgaccaccatggggatggggccaggcacgcaccaccatgagagacatcaccttgtaggtaggtaggtactagtagaactcttgttttgtagtatatgtttcttgtaaagacaaatgaaattgcgcgatttggttcgttgttggaccgaagtagatctagtccttgagttttcagaatcaatccgttgatctagtcctaaacaagtgcattttctgttcatgcaaatgcagtatatacttttgcc

SEQ ID NO: 64756 - protein, 345 aa, Triticum aestivum
  peptide (1)..(345): Ceres Seq. ID no. 15179785
MENAGPAGDPPGESIESPLLPAPETKMPPPVPAVRLGAPPPPPCLRTHGAKMARRHMYDWIVLLLLAAIEVALNLITPFHRFVAEFMMEDLRYPMKPNTIPVWAVPIYAVILPMLIFAAIYVKKKNAYDLHHAILGLLFSVLITGVLTDAIKDGVGRPRPNFYYRCFPDGVPNYEAVTRQVICHGDAKVIKEGHKSFPSGHTSWSFAGLGFLSWYLAGKIRVFDRGGHIAKLCVVILPLLFAAMVGVSRVADYWHHWRDVFAGGILGLVVASFCYLQFFPHPASKHGLWPHAFRHQDPNPETENQGTTDPHQSVLPSMVQHVASMEMRTNGRALDNMEAGSGRAW

SEQ ID NO: 64757 - protein, 319 aa, Triticum aestivum
  peptide (1)..(319): Ceres Seq. ID no. 15179786
MPPPVPAVRLGAPPPPPCLRTHGAKMARRHMYDWIVLLLLAAIEVALNLITPFHRFVAEFMMEDLRYPMKPNTIPVWAVPIYAVILPMLIFAAIYVKKKNAYDLHHAILGLLFSVLITGVLTDAIKDGVGRPRPNFYYRCFPDGVPNYEAVTRQVICHGDAKVIKEGHKSFPSGHTSWSFAGLGFLSWYLAGKIRVFDRGGHIAKLCVVILPLLFAAMVGVSRVADYWHHWRDVFAGGILGLVVASFCYLQFFPHPASKHGLWPHAFRHQDPNPETENQGTTDPHQSVLPSMVQHVASMEMRTNGRALDNMEAGSGRAW

SEQ ID NO: 64758 - protein, 294 aa, Triticum aestivum
  peptide (1)..(294): Ceres Seq. ID no. 15179787
MARRHMYDWIVLLLLAAIEVALNLITPFHRFVAEFMMEDLRYPMKPNTIPVWAVPIYAVILPMLIFAAIYVKKKNAYDLHHAILGLLFSVLITGVLTDAIKDGVGRPRPNFYYRCFPDGVPNYEAVTRQVICHGDAKVIKEGHKSFPSGHTSWSFAGLGFLSWYLAGKIRVFDRGGHIAKLCVVILPLLFAAMVGVSRVADYWHHWRDVFAGGILGLVVASFCYLQFFPHPASKHGLWPHAFRHQDPNPETENQGTTDPHQSVLPSMVQHVASMEMRTNGRALDNMEAGSGRAW

SEQ ID NO: 64759 - DNA, 1235 bp, Triticum aestivum
  misc_feature (1)..(1235): Ceres Seq. ID no. 13597519
atcctacactgagtttagctagatcaatttgtgagcttagcatatctgcgatggcttccaggacatggcatttcttgctcgccctcttcctcctgtcctccgctgcgtatgggcagctctcgccgtccttctacgccacgagctgccccctgctggagctcaccgtgcgcgccaccatgatcgctgcgctcctcgccgagcgccgaatgggcgcctccctcctcaggctccacttccatgactgctttgttcaaggctgtgacggatccattcttctggatgacgtgggcagcttcgtcggcgagaagacggccttcccgaacgtgaactccgtgcgcggctacgaggtgatcgaccggatcaaggccaacgtggagctgctctgccccggcgtcgtctcctgtgccgacatcgtcgccctcgcagcacgcgacggcacgtttctgctaggcgggccgagctgggcggtgccgctgggccggcgggactcgacgacggcgagcctggcggaggcgaacgccgacctcccggggccgacgctgaacctcgaccagctcatccgcgcgttcgacaagaagcagctgaccccgcgggacctgacggcgctgtcgggcgcgcacaccatcggcttctcgcagtgccagttcttccgcggccacatctacaacgacaccaacatcgacccggcgttcgcggcgctgcgccggcaggcatgccccgccgcggcccccgccggcgactccaacctggcgcccttcgacgcgcagacccagctcgtcttcgacaacgcctactaccgcaacctagtcgcccaacgcggcctgctgcactcggatcaggagctcttcaacggcgcctcccaggatgcgctggtgcgccagtacggctccaacccggcgctcttcgccgccgacttcgtggccgccatgatcaagatgggcaacatcgcccccctcaccgggtccagcggccagatcaggcgcaactgcagggtcgtcaacagctagctgattggtcgtctaaatgatcaattgatcatgctacgtgatgatggagatgtctcaagtttggttggctacgaaggtaaccaaccagcatgcatgcatggcagaataagagccgtttggttcaggtttagatgattgttgcctttgtccgtgcttcatcatgtaagttgccggtctctgcagtactactatcatggaaatcaagcaactctcgaatgtgtatttgcc

SEQ ID NO: 64760 - protein, 334 aa, Triticum aestivum
  peptide (1)..(334): Ceres Seq. ID no. 13597520
PTLSLARSICELSISAMASRTWHFLLALFLLSSAAYGQLSPSFYATSCPLLELTVRATMIAALLAERRMGASLLRLHFHDCFVQGCDGSILLDDVGSFVGEKTAFPNVNSVRGYEVIDRIKANVELLCPGVVSCADIVALAARDGTFLLGGPSWAVPLGRRDSTTASLAEANADLPGPTLNLDQLIRAFDKKQLTPRDLTALSGAHTIGFSQCQFFRGHIYNDTNIDPAFAALRRQACPAAAPAGDSNLAPFDAQTQLVFDNAYYRNLVAQRGLLHSDQELFNGASQDALVRQYGSNPALFAADFVAAMIKMGNIAPLTGSSGQIRRNCRVVNS

SEQ ID NO: 64761 - protein, 318 aa, Triticum aestivum
  peptide (1)..(318): Ceres Seq. ID no. 13597521
MASRTWHFLLALFLLSSAAYGQLSPSFYATSCPLLELTVRATMIAALLAERRMGASLLRLHFHDCFVQGCDGSILLDDVGSFVGEKTAFPNVNSVRGYEVIDRIKANVELLCPGVVSCADIVALAARDGTFLLGGPSWAVPLGRRDSTTASLAEANADLPGPTLNLDQLIRAFDKKQLTPRDLTALSGAHTIGFSQCQFFRGHIYNDTNIDPAFAALRRQACPAAAPAGDSNLAPFDAQTQLVFDNAYYRNLVAQRGLLHSDQELFNGASQDALVRQYGSNPALFAADFVAAMIKMGNIAPLTGSSGQIRRNCRVVNS

SEQ ID NO: 64762 - protein, 276 aa, Triticum aestivum
  peptide (1)..(276): Ceres Seq. ID no. 13597522
MIAALLAERRMGASLLRLHFHDCFVQGCDGSILLDDVGSFVGEKTAFPNVNSVRGYEVIDRIKANVELLCPGVVSCADIVALAARDGTFLLGGPSWAVPLGRRDSTTASLAEANADLPGPTLNLDQLIRAFDKKQLTPRDLTALSGAHTIGFSQCQFFRGHIYNDTNIDPAFAALRRQACPAAAPAGDSNLAPFDAQTQLVFDNAYYRNLVAQRGLLHSDQELFNGASQDALVRQYGSNPALFAADFVAAMIKMGNIAPLTGSSGQIRRNCRVVNS

SEQ ID NO: 64763 - DNA, 1077 bp, Triticum aestivum
  misc_feature (1)..(1077): Ceres Seq. ID no. 12617991
aacctccattgctgcgtgctcccttcctcctctctaaccaagcacctcctcttgcgctgcgggtgctggctacctagaggtggcgtgctggatggtcgctgaggcggtcgggttcatgatgtcccgcgcggcggacggcggcaccatggcgccggagctcgtcacccgggacttcctcggcggctgccaggcgcccgcccccggcgatgaccccaggcacgacgcggccgcccggcacgactccgtcatgcccggcaagccaccgctgcagaagcaccggagcccgccgccgtcggccaggggggacctcaacctcttccccgcctccggcgccgccatggcgccactgccgacgatggcgccggcggcggactgcgccgccaccaccacgtaccacagcgtgtgcacgatcgagaaggtcaagaccgcgctggagcggttcgagcgcgggaagcaggggcaggggcagcaccaccaccagcagcagcacagcggcgcgggcgcgaccgcgggcgcctccccgtcctcctcctcggtcaccacgtcctccgtcaagcgccgcggggacgccggcgccgtggagcagggcgacggctgcgactccccgtccgcgggcgggggcatggtggccgccgcatgcccgcgctgcttcctctacgtgctcatcgcccggagcgacccccgctgcccgcgctgcgagtcgcacgtgccgccacccccggccccggcgcccaagaagaagccgcggatcgacctcaacgtcggcttcctcggaacctagccatgccaagccaagaagaagtaggtcaagatggttgtcgtccgtcctcgtcctcgtcctcgtcctcggcgcgttaggtaggcagcaggcctccggtgctcggattggccacgacgacgccattgtttttctgatgccaccgacggattccggtacataggggaggcgctccagatttttgcttgtccatttccaagtatggccggccgtccgtccgtccgtccccgattctgtcatgtcagatcaatcaaacactcgacagaacatgaatgaatgaaactactattcctactggg

SEQ ID NO: 64764 - protein, 244 aa, Triticum aestivum
  peptide (1)..(244): Ceres Seq. ID no. 12617992
MTPGTTRPPGTTPSCPASHRCRSTGARRRRPGGTSTSSPPPAPPWRHCRRWRRRRTAPPPPRTTACARSRRSRPRWSGSSAGSRGRGSTTTSSSTAARARPRAPPRPPPRSPRPPSSAAGTPAPWSRATAATPRPRAGAWWPPHARAASSTCSSPGATPAARAASRTCRHPRPRRPRRSRGSTSTSASSEPSHAKPRRSRSRWLSSVLVLVLVLGALGRQQASGARIGHDDAIVFLMPPTDSGT

SEQ ID NO: 64765 - protein, 229 aa, Triticum aestivum
  peptide (1)..(229): Ceres Seq. ID no. 12617993
MVAEAVGFMMSRAADGGTMAPELVTRDFLGGCQAPAPGDDPRHDAAARHDSVMPGKPPLQKHRSPPPSARGDLNLFPASGAAMAPLPTMAPAADCAATTTYHSVCTIEKVKTALERFERGKQGQGQHHHQQQHSGAGATAGASPSSSSVTTSSVKRRGDAGAVEQGDGCDSPSAGGGMVAAACPRCFLYVLIARSDPRCPRCESHVPPPPAPAPKKKPRIDLNVGFLGT

SEQ ID NO: 64766 - protein, 221 aa, Triticum aestivum
  peptide (1)..(221): Ceres Seq. ID no. 12617994
MMSRAADGGTMAPELVTRDFLGGCQAPAPGDDPRHDAAARHDSVMPGKPPLQKHRSPPPSARGDLNLFPASGAAMAPLPTMAPAADCAATTTYHSVCTIEKVKTALERFERGKQGQGQHHHQQQHSGAGATAGASPSSSSVTTSSVKRRGDAGAVEQGDGCDSPSAGGGMVAAACPRCFLYVLIARSDPRCPRCESHVPPPPAPAPKKKPRIDLNVGFLGT

SEQ ID NO: 64767 - DNA, 902 bp, Triticum aestivum
  misc_feature (1)..(902): Ceres Seq. ID no. 12586454
aaaccacgcgaaggggaaacccaaattccatcccgacttctctacctctccggcctccacccaggagagccctaagccggaagcaccttacccttaagctctcttgacctctccccatggcgtccgcgtggtgcctcttggcgccggccgccgcgccggtggcggcgccgggcgctctcggcgtctccgcctccgaatccagaggcgtcttcgtcgcgcgggcggcggtccctgcgaggatgcggcgcaggtggggttcgctcgtggtgtgcgtagcccccgacgaggagaagattacgcggcgctcgcccctcgatttccccatcgaatgggagaaacctaagcctgggaggagacctgacatcttcccaaagttcagccctatgaaaacaccattgccccatccattaccagctgatgatcctttggatgatgatgaggaagaagaagaggaagaagcccaacctcaagaagaaccccaggaggatgatcctgacaaagaggatcctgaggaagatgacccagacaagccaattgagtaattttggatgaggtggcctgtggtagatagaaaccgtgtcgtattttccagagaatatgtggggtttgagctattcagaaatgttagtttgtgtcggcttatataggctctagacataagtttgctcagcaaggacctttgagcttttctgaagctatacaaattttgttccactagtttcaatatgaatttatatgtattcttctgaaaggtatttgcctatacgacacaataagctgttgaatgttcagtagttatgttcactgatttgatactccaatgtgctgaaagtgcattataagcaattaggtagttgtaatattggcaataacttggcatcagttagaatgacacattggtc

SEQ ID NO: 64768 - protein, 141 aa, Triticum aestivum
  peptide (1)..(141): Ceres Seq. ID no. 12586455
MASAWCLLAPAAAPVAAPGALGVSASESRGVFVARAAVPARMRRRWGSLVVCVAPDEEKITRRSPLDFPIEWEKPKPGRRPDIFPKFSPMKTPLPHPLPADDPLDDDEEEEEEEAQPQEEPQEDDPDKEDPEEDDPDKPIE

SEQ ID NO: 64769 - protein, 100 aa, Triticum aestivum
  peptide (1)..(100): Ceres Seq. ID no. 12586456
MRRRWGSLVVCVAPDEEKITRRSPLDFPIEWEKPKPGRRPDIFPKFSPMKTPLPHPLPADDPLDDDEEEEEEEAQPQEEPQEDDPDKEDPEEDDPDKPIE

SEQ ID NO: 64770 - DNA, 2075 bp, Triticum aestivum
  misc_feature (1)..(2075): Ceres Seq. ID no. 13591098
ctctctccgcttctattctcttcctgccaggctccgtccgtccgccaccgatccgtcatcccctctgcgcccccttctccggcagccgccgcccgcccgccgtcgacatcccccaggggtccgcccggccctccgccgcatcggccatggcgtcgccggcgctcatctccgacaccgaccagtggaaggccctccaggcgcacgtcggcgcgatccacaagacgcacctgcgcgacctcatgacggacgccgatcgatgcaaggcaatgacagccgaattcgagggcgtcttcctggactactcgaggcagcaggccaccacggagaccgtcgacaagctcttcaagctggcagaggctgcaaagctcaaggagaagattgacaagatgtttaaaggcgaaaagataaataccacggagaacagatcagtgctccatgtggctttgagagctccaagagatgcagtcataaacagtgacggtgtgaacgtggtccccgaagtttgggctgttaaggataaaatcaagcagttttcagagactttcaggagtggctcatgggttggggcaaccgggaaaccgttgacaaatgttgtctcagttggaattggtggcagcttccttggacctctgtttgtgcatacggctctccagactgacccagaagcagcagaatctgccaaaggccgacaactgagatttcttgcaaatgttgatccggttgatgttgcacggagcatcaaagatttagaccctgcaaccactcttgttgtggttgtctcaaagaccttcacgacagctgaaacaatgttaaatgctcgaactatcaaggagtggattgtctcttctcttggacctcaggctgtttccaaacacatgattgctgtcagtactaatcttaagcttgtcaaggagttcggaattgaccctaacaacgcctttgcattctgggactgggttggcggccgctatagtgtttgcagtgctgtcggtgttctgcccttatctcttcagtatggatttccaattgttcagaaatttctggagggtgcttccagcattgacaaccacttccacacatcttcatttgagaaaaatatacctgtactccttggtttgttgagtgtgtggaatgtttcatttcttggatatccggctagggcaatattgccatactctcaagcacttgagaaactagcaccacatattcagcagcttagcatggagagtaatggaaagggtgtctccattgatggtgttcgacttccatatgaggctggtgaaattgattttggtgaacctggaacaaacgggcaacacagcttctatcaattaatccatcagggaagagttattccttgtgattttattggtgtcataaaaagccagcagcctgtttacttgaaaggggaaacggttagcaatcatgatgagttgatgtccaatttctttgctcagcctgacgcacttgcttatggaaagactcctgaacaattacgcagcgagaaagttcccgaaaatcttatctctcacaagacttttcagggcaaccggccatcactgagtttcttgctgtcttcattatctgcctatgagattggacagcttttatccatctatgagcaccggatcgcagttcagggtttcatatggggaatcaactcgtttgaccagtggggagtggagctgggcaagtcactggcttctacagtgaggaaacagttgcatgcatcacgcatggaaggaaagcccgtcgagggcttcaaccccagcagcgcaagtttgctcacacggtttcttgcggttaaaccatcaaccccatatgacacaacagtgcttccaaaagtgtaagccgagggaggtttagtagtcctaaaaaaagaagtgtaacctgaggttgagactgataatcgacaagctatgttgagcttgtggcataacaagttttcttccttctttcttgcgacttgttacaaccagtctggttgtactgtaattttgaagttcctcttgcttcagcttggagaaagacaagtaaactatgacgaaataatgaaataaatatatcgactcgtg

SEQ ID NO: 64771 - protein, 615 aa, Triticum aestivum
  peptide (1)..(615): Ceres Seq. ID no. 13591099
LSASILFLPGSVRPPPIRHPLCAPFSGSRRPPAVDIPQGSARPSAASAMASPALISDTDQWKALQAHVGAIHKTHLRDLMTDADRCKAMTAEFEGVFLDYSRQQATTETVDKLFKLAEAAKLKEKIDKMFKGEKINTTENRSVLHVALRAPRDAVINSDGVNVVPEVWAVKDKIKQFSETFRSGSWVGATGKPLTNVVSVGIGGSFLGPLFVHTALQTDPEAAESAKGRQLRFLANVDPVDVARSIKDLDPATTLVVVVSKTFTTAETMLNARTIKEWIVSSLGPQAVSKHMIAVSTNLKLVKEFGIDPNNAFAFWDWVGGRYSVCSAVGVLPLSLQYGFPIVQKFLEGASSIDNHFHTSSFEKNIPVLLGLLSVWNVSFLGYPARAILPYSQALEKLAPHIQQLSMESNGKGVSIDGVRLPYEAGEIDFGEPGTNGQHSFYQLIHQGRVIPCDFIGVIKSQQPVYLKGETVSNHDELMSNFFAQPDALAYGKTPEQLRSEKVPENLISHKTFQGNRPSLSFLLSSLSAYEIGQLLSIYEHRIAVQGFIWGINSFDQWGVELGKSLASTVRKQLHASRMEGKPVEGFNPSSASLLTRFLAVKPSTPYDTTVLPKV

SEQ ID NO: 64772 - protein, 567 aa, Triticum aestivum
  peptide (1)..(567): Ceres Seq. ID no. 13591100
MASPALISDTDQWKALQAHVGAIHKTHLRDLMTDADRCKAMTAEFEGVFLDYSRQQATTETVDKLFKLAEAAKLKEKIDKMFKGEKINTTENRSVLHVALRAPRDAVINSDGVNVVPEVWAVKDKIKQFSETFRSGSWVGATGKPLTNVVSVGIGGSFLGPLFVHTALQTDPEAAESAKGRQLRFLANVDPVDVARSIKDLDPATTLVVVVSKTFTTAETMLNARTIKEWIVSSLGPQAVSKHMIAVSTNLKLVKEFGIDPNNAFAFWDWVGGRYSVCSAVGVLPLSLQYGFPIVQKFLEGASSIDNHFHTSSFEKNIPVLLGLLSVWNVSFLGYPARAILPYSQALEKLAPHIQQLSMESNGKGVSIDGVRLPYEAGEIDFGEPGTNGQHSFYQLIHQGRVIPCDFIGVIKSQQPVYLKGETVSNHDELMSNFFAQPDALAYGKTPEQLRSEKVPENLISHKTFQGNRPSLSFLLSSLSAYEIGQLLSIYEHRIAVQGFIWGINSFDQWGVELGKSLASTVRKQLHASRMEGKPVEGFNPSSASLLTRFLAVKPSTPYDTTVLPKV

SEQ ID NO: 64773 - protein, 536 aa, Triticum aestivum
  peptide (1)..(536): Ceres Seq. ID no. 13591101
MTDADRCKAMTAEFEGVFLDYSRQQATTETVDKLFKLAEAAKLKEKIDKMFKGEKINTTENRSVLHVALRAPRDAVINSDGVNVVPEVWAVKDKIKQFSETFRSGSWVGATGKPLTNVVSVGIGGSFLGPLFVHTALQTDPEAAESAKGRQLRFLANVDPVDVARSIKDLDPATTLVVVVSKTFTTAETMLNARTIKEWIVSSLGPQAVSKHMIAVSTNLKLVKEFGIDPNNAFAFWDWVGGRYSVCSAVGVLPLSLQYGFPIVQKFLEGASSIDNHFHTSSFEKNIPVLLGLLSVWNVSFLGYPARAILPYSQALEKLAPHIQQLSMESNGKGVSIDGVRLPYEAGEIDFGEPGTNGQHSFYQLIHQGRVIPCDFIGVIKSQQPVYLKGETVSNHDELMSNFFAQPDALAYGKTPEQLRSEKVPENLISHKTFQGNRPSLSFLLSSLSAYEIGQLLSIYEHRIAVQGFIWGINSFDQWGVELGKSLASTVRKQLHASRMEGKPVEGFNPSSASLLTRFLAVKPSTPYDTTVLPKV

SEQ ID NO: 64774 - DNA, 1539 bp, Triticum aestivum
  misc_feature (1)..(1539): Ceres Seq. ID no. 15225826
tttttcgccacagatattcccaaagcatctcctttctttccccgttgctctcctcctcggattcctcttcccctgccccctcctccctcctactctgctcctacccgcccgtattattcttcccttccccctctctctctgcttttccctcgtgcccgatcttcccaccagcactccagcagagcgccagttctgccaaggaaacgccggaggcgggccggcatgcgcgtggacgacgccgacaagcccgattctgcagacgccggagcggagaagcccgccgagctcccctcgcctcatatggagagtgtttgcgagaacaccacaactgctgatttcaagcagagtaactttggaaatttccttccaaatgttagatcaggcggttggtcagatattggaagtcgccagtacatggaagatacccatgtgtgtattgccgatctagctaaaaactttggttatccaacagtggataaagaagttgtttccttttatggggtctttgatgggcatggtggaaaagatgctgcccatttcgttcgcgataatctgccaagggtcattgtggaagatgctgattttcctctggagcttgagaaagtagtgagcagatcctttgtgcagattgatagtcagtttgccgataaatgctctcaccagagaactctgtcgtccggcacaacggcacttacagcaatgatttttggaaggtcccttctggtcgcgaacgctggtgattgcagagcagtactttcccggtgtggcatcgcaatggagatgtcgatggaccacaggccctgcagcctcagcgaaaagctgcgggtcgagtcgctcggtggctacgtggacgacggctacctgaacggtctgctgggagtcaccagagccctcggcgactggcacctcgagggaatgaaggaggccagcaggcccgggggaggccccctgagcgcggagccggagatcaagctgaccacgctgaccaaggacgacgagttcctggtgatcggcagcgacgggctgtgggacgtcttctcgaaccagaacgccgtggacttcgcccggcggcgcctccaggagcacaacgacgtgaagcgctgctgcagggagatcgtcgaggaggcgataaggcgcggagccacagacaatttaacagcagtgctggtctcattccacctggtggcgcctcctcagatcagagtgaatcagccacgtagggtggcgcggagcatctcggccgacgggctcaacagcctcaggatactcctgggaagccaatgacggcgctcttctcgtgccgccgtgatcaggtgctgtgccggtgcttgctgagctctaattgtatgtagtcgtgtccgtgcttcgttgttgatgttgttagctgctgttatgttaccccattgttgttgaggcagtggctgttattcttgttggtaattaagccaacgaacatgtgagctcatagttgtgagcatttcttagctgctggaaactaggcatgtcctggtgaagaggctgcgtgccttgctgtgctgt

SEQ ID NO: 64775 - protein, 427 aa, Triticum aestivum
  peptide (1)..(427): Ceres Seq. ID no. 15225827
FFATDIPKASPFFPRCSPPRIPLPLPPPPSYSAPTRPYYSSLPPLSLLFPRARSSHQHSSRAPVLPRKRRRRAGMRVDDADKPDSADAGAEKPAELPSPHMESVCENTTTADFKQSNFGNFLPNVRSGGWSDIGSRQYMEDTHVCIADLAKNFGYPTVDKEVVSFYGVFDGHGGKDAAHFVRDNLPRVIVEDADFPLELEKVVSRSFVQIDSQFADKCSHQRTLSSGTTALTAMIFGRSLLVANAGDCRAVLSRCGIAMEMSMDHRPCSLSEKLRVESLGGYVDDGYLNGLLGVTRALGDWHLEGMKEASRPGGGPLSAEPEIKLTTLTKDDEFLVIGSDGLWDVFSNQNAVDFARRRLQEHNDVKRCCREIVEEAIRRGATDNLTAVLVSFHLVAPPQIRVNQPRRVARSISADGLNSLRILLGSQ

SEQ ID NO: 64776 - protein, 353 aa, Triticum aestivum
  peptide (1)..(353): Ceres Seq. ID no. 15225828
MRVDDADKPDSADAGAEKPAELPSPHMESVCENTTTADFKQSNFGNFLPNVRSGGWSDIGSRQYMEDTHVCIADLAKNFGYPTVDKEVVSFYGVFDGHGGKDAAHFVRDNLPRVIVEDADFPLELEKVVSRSFVQIDSQFADKCSHQRTLSSGTTALTAMIFGRSLLVANAGDCRAVLSRCGIAMEMSMDHRPCSLSEKLRVESLGGYVDDGYLNGLLGVTRALGDWHLEGMKEASRPGGGPLSAEPEIKLTTLTKDDEFLVIGSDGLWDVFSNQNAVDFARRRLQEHNDVKRCCREIVEEAIRRGATDNLTAVLVSFHLVAPPQIRVNQPRRVARSISADGLNSLRILLGSQ

SEQ ID NO: 64777 - protein, 327 aa, Triticum aestivum
  peptide (1)..(327): Ceres Seq. ID no. 15225829
MESVCENTTTADFKQSNFGNFLPNVRSGGWSDIGSRQYMEDTHVCIADLAKNFGYPTVDKEVVSFYGVFDGHGGKDAAHFVRDNLPRVIVEDADFPLELEKVVSRSFVQIDSQFADKCSHQRTLSSGTTALTAMIFGRSLLVANAGDCRAVLSRCGIAMEMSMDHRPCSLSEKLRVESLGGYVDDGYLNGLLGVTRALGDWHLEGMKEASRPGGGPLSAEPEIKLTTLTKDDEFLVIGSDGLWDVFSNQNAVDFARRRLQEHNDVKRCCREIVEEAIRRGATDNLTAVLVSFHLVAPPQIRVNQPRRVARSISADGLNSLRILLGSQ

SEQ ID NO: 64778 - DNA, 1336 bp, Triticum aestivum
  misc_feature (1)..(1336): Ceres Seq. ID no. 13597523
gagagaggagagaaaggaaggaaagggagccgaagaaagctctccccccctccccgaattccatcctatttcttctgcccctctcctcgcctcgcccggaccccggccggccggattcccgcaggaggaggaggaggaggaggtggggatggggagggaggacaggttcccggtctgggaggccgcgctcggcgccggggtcgccgccgtcttcgccgcgggcctcgtcggggtctacctctccatgccggactccgactacagcttcctcaagttgccccgcaacctccacgaactacaaatcctcactggccatcttgagaactataccagtgactacaccgtacaggtgttgataggctactgtgctgtgtacattttcatgcagaccttcatgatcccagggacaatattcatgtcattgcttgctggtgctctattcgggcaactccggggtgtggctctggttgtctttgctgcctcagctggtgcttcttcatgctttttcctgtcgaagctgattggaaaaccgctggtgttcgtgctgtggccagacaagctcacattcttccagaagcaggttgccaaaagaagagaaaagctgttgaattacatgcttttcctcagggtcaccccaacactgccaaataccttcatcaacttggcctcgcccattgttgatgtgcccttccataccttcttactggcaactcttatcggtctcatcccagcagcctacgtgaccgtgagggctgggattgctctgggagagttaacatcgctcagcgacctgtacgacacccagtcagtagctctgctgttcttgatcggcgtggtctcggtcacaccagcattgttgagcaaggacgaggcgcaagacacggcaccagaaatcgcagcaggcgcctcatgaacaccaaagaggagtcacctagcccacctgtacataccaaggcacagcatgcggcggcttcattggatttgggcctacaggccttgtgaggtggatgacacatggtttgcgagttcacatgacgacacagcagcacggcgggaccttggacccaagtccgcctatcacccgcgtgccggagatgtgcgttgccgtgagaacactgtttcaattcatggccaccccccacattgtttgttatgaatgaatctgggaagcacaatgcccatccacaggcaagatgcttcggatgtgtagacaagtagtgtgtgtgccgttcgtcagcctgcgatgctgtttatttagatggaactggcagctagtccaaatccttgtatatatattgaccagattcattcaatccatattcagtggttcaatgcc

SEQ ID NO: 64779 - protein, 303 aa, Triticum aestivum
  peptide (1)..(303): Ceres Seq. ID no. 15222119
REERKEGKGAEESSPPLPEFHPISSAPLLASPGPRPAGFPQEEEEEEVGMGREDRFPVWEAALGAGVAAVFAAGLVGVYLSMPDSDYSFLKLPRNLHELQILTGHLENYTSDYTVQVLIGYCAVYIFMQTFMIPGTIFMSLLAGALFGQLRGVALVVFAASAGASSCFFLSKLIGKPLVFVLWPDKLTFFQKQVAKRREKLLNYMLFLRVTPTLPNTFINLASPIVDVPFHTFLLATLIGLIPAAYVTVRAGIALGELTSLSDLYDTQSVALLFLIGVVSVTPALLSKDEAQDTAPEIAAGAS

SEQ ID NO: 64780 - protein, 254 aa, Triticum aestivum
  peptide (1)..(254): Ceres Seq. ID no. 15222120
MGREDRFPVWEAALGAGVAAVFAAGLVGVYLSMPDSDYSFLKLPRNLHELQILTGHLENYTSDYTVQVLIGYCAVYIFMQTFMIPGTIFMSLLAGALFGQLRGVALVVFAASAGASSCFFLSKLIGKPLVFVLWPDKLTFFQKQVAKRREKLLNYMLFLRVTPTLPNTFINLASPIVDVPFHTFLLATLIGLIPAAYVTVRAGIALGELTSLSDLYDTQSVALLFLIGVVSVTPALLSKDEAQDTAPEIAAGAS

SEQ ID NO: 64781 - protein, 222 aa, Triticum aestivum
  peptide (1)..(222): Ceres Seq. ID no. 15222121
MPDSDYSFLKLPRNLHELQILTGHLENYTSDYTVQVLIGYCAVYIFMQTFMIPGTIFMSLLAGALFGQLRGVALVVFAASAGASSCFFLSKLIGKPLVFVLWPDKLTFFQKQVAKRREKLLNYMLFLRVTPTLPNTFINLASPIVDVPFHTFLLATLIGLIPAAYVTVRAGIALGELTSLSDLYDTQSVALLFLIGVVSVTPALLSKDEAQDTAPEIAAGAS

SEQ ID NO: 64782 - DNA, 1364 bp, Triticum aestivum
  misc_feature (1)..(1364): Ceres Seq. ID no. 13597524
aaaccctgcaagcactggacaaccacagaaacccagaccccccgccgccgccgccgccatggtcgccgccggagctcttcacgctggcagccgtgtcctcctaccgatccgccgaagcttcagcacaccctggtcccacgtccgctcccacctccactccaccaagcccccttctgctccactcccgcccccacctccgccgccgccttcttcccacgccgcgtccgcgcgcttcacccctgccttcacccctaccactaggaggagcggatcaatcgggtccggggtagtcgcgtggtacctgggctcgatcgaggcgcggcccctgctgaccaagagcatcacggctgccacaatttacaccgttgccgacctcacctcccagatgatcacacttcctcctgaggagtcactcgatctaattaggactctgcgcatggctagttatgggatgctgttctcaggaccttcactgcactattggttcaactttatctcaaaagtagtccccaaaaaggatgtagtgagcaccttcaagaagatgtttctaggacaagcagtttatggcccaattattaattgtattttcttctcgtataatgcaggattacaaggtgagacgatcccagagatcattgcaagattaaagcgggatataattccgaccatcaaaagtgggctcatttattggcctctttgtgacttcatcactttcaagtttatccctgttcatttgcagccgctagtaagcaattcctttgcgtttctttggaccatctacctaacatacatggccggcttaaagaaaccaggcgtggaggtgatcacgagctcttagtcataatcaaatgactgagtttctgccagttatttctgaaaggaagtcttcatgggcattacttggaactatgacggggccgtcattaccaccactagctcatttaagctttcaatgttcaacgacgaaaacggagacaaactgcttgctaggcatatttcgtattcagtagagtagtatccaccaggcttttctagcttgcgtacagttttgggtaggcatttctgtatggatggtagaatgacactaggcatttctcccatctttctgaagtttgtcatattgcacttagaaacaagcagtttttaccaaattgtctgtgcccagttatgcagatgttaggtaaaattgttcttgtccctaagataaagtggacaaggtaaggtttacgcttgaagatctctacatacaatgcaacatttattagcggatagttatgtacatctccctcccttgtacgcagaaagaagacgattacacagtttgttcgcttaaaaaaaaaaaaaaaaaagcttatcgataccgt

SEQ ID NO: 64783 - protein, 278 aa, Triticum aestivum
  peptide (1)..(278): Ceres Seq. ID no. 13597525
NPASTGQPQKPRPPAAAAAMVAAGALHAGSRVLLPIRRSFSTPWSHVRSHLHSTKPPSAPLPPPPPPPPSSHAASARFTPAFTPTTRRSGSIGSGVVAWYLGSIEARPLLTKSITAATIYTVADLTSQMITLPPEESLDLIRTLRMASYGMLFSGPSLHYWFNFISKVVPKKDVVSTFKKMFLGQAVYGPIINCIFFSYNAGLQGETIPEIIARLKRDIIPTIKSGLIYWPLCDFITFKFIPVHLQPLVSNSFAFLWTIYLTYMAGLKKPGVEVITSS

SEQ ID NO: 64784 - protein, 259 aa, Triticum aestivum
  peptide (1)..(259): Ceres Seq. ID no. 13597526
MVAAGALHAGSRVLLPIRRSFSTPWSHVRSHLHSTKPPSAPLPPPPPPPPSSHAASARFTPAFTPTTRRSGSIGSGVVAWYLGSIEARPLLTKSITAATIYTVADLTSQMITLPPEESLDLIRTLRMASYGMLFSGPSLHYWFNFISKVVPKKDVVSTFKKMFLGQAVYGPIINCIFFSYNAGLQGETIPEIIARLKRDIIPTIKSGLIYWPLCDFITFKFIPVHLQPLVSNSFAFLWTIYLTYMAGLKKPGVEVITSS

SEQ ID NO: 64785 - protein, 150 aa, Triticum aestivum
  peptide (1)..(150): Ceres Seq. ID no. 13597527
MITLPPEESLDLIRTLRMASYGMLFSGPSLHYWFNFISKVVPKKDVVSTFKKMFLGQAVYGPIINCIFFSYNAGLQGETIPEIIARLKRDIIPTIKSGLIYWPLCDFITFKFIPVHLQPLVSNSFAFLWTIYLTYMAGLKKPGVEVITSS

SEQ ID NO: 64786 - DNA, 1709 bp, Triticum aestivum
  misc_feature (1)..(1709): Ceres Seq. ID no. 13662854
aaaaaaaaaccaattccatctgaagaaaattagcatcacctagccgccgccactgccgccgccgccgccgggaacatggccgcgcggcggtataccgagcacgaagaggcgctcgagatcaagtcccttcgccgcatcatcgccgcctacatcaactatcaagatgcagcagagaaagatgtcaagagatatgaacgttcattcaaaaagctttctcctgcccacaaggaacttctatttcaccttggtcttaagtaccaacgactgagatggtgtatatccatgaatacatcttttatcatgaatatgcttgaggcatttgaacctcctttcgacatgagtcagtgtgtagatggtgattgtcatgattgtgcagagcacatgcacggacatagtcatgctgataccataaataattctgaattgcttgctcagcattgttgcccagaggaaggtgcaaatactagagaaactgagaacaagaaggatgaggaagtccacatggtgggctgctcccagcctgctgcctgcaacttggggatatcccaaggtgaagataaatcatgtaatgatggtaaagatgcgagtgcagctgctaactgtcaagatacagattgttttgcatcttctactgatgaaaatgtaactccagggcaccgcagggctccatctttgccactggatgttcctccagttgacgttgacaaagtaagatgcatcataagaaatattgtgagagactgggcccaggagggtcaaattgaacgtgatgagtgctataaaccaattcttgaggaacttaatcgtctttttcctgaccgaagcaggccaccttcatgtttagtccctggtgctgggcttgggagattggctctggagatctcttctctgggttttgtaagccagggaaatgagttctcatattacatgatgatctgttcaagtttcattctaaaccacacccaagaggccaatgaatggaccatttatccttggatacacaacaattgcaattctctttcagacaaagatcaacttcgggctgtttcatttcctgatattcatccctcaagtgctgggataactgaaggattttcgatgtgtgctggagattttgtagaggtctacaatgaggaaagccaagaatctgcatgggatgctgttgtaacttgcttcttcctcgatacggcacacaatattgttgaatatattgagataatatcaaaaattctcaaggatggtggagtctgggtaaacatgggtccgcttctttatcactttgctgatgcctawvcacmataaagtggaccagatgatgatatgtctatcgaactaagtttggaagacgtgaaaagggtagcttaccattatggatttgtgatggaggtggagaaaatgatagataccacttacacagcnnntatggtatcgatgatgcagaatcgataccgcgcggcattttggacgatgaggaagnnnncgtctcgatcgaaagctaaaaagcgccagtgaggtgaagatcctctgtctggtgtgaaattcgggtcgaagctgttagaaatttagaaagagtgatttgggccggacccattggtgatgtttatcctgggacaaacgaggatgatgtgttggtgccgccattgtcgcaccatgatatgctactgttgatactcgaacctcagagcgaaactgtgctgtgaatcctgtgc

SEQ ID NO: 64787 - protein, 408 aa, Triticum aestivum
  peptide (1)..(408): Ceres Seq. ID no. 15220189
  misc_feature (406)..(406): Xaa is any aa, unknown or other
  misc_feature (407)..(407): Xaa is any aa, unknown or other
  misc_feature (408)..(408): Xaa is any aa, unknown or other
MAARRYTEHEEALEIKSLRRIIAAYINYQDAAEKDVKRYERSFKKLSPAHKELLFHLGLKYQRLRWCISMNTSFIMNMLEAFEPPFDMSQCVDGDCHDCAEHMHGHSHADTINNSELLAQHCCPEEGANTRETENKKDEEVHMVGCSQPAACNLGISQGEDKSCNDGKDASAAANCQDTDCFASSTDENVTPGHRRAPSLPLDVPPVDVDKVRCIIRNIVRDWAQEGQIERDECYKPILEELNRLFPDRSRPPSCLVPGAGLGRLALEISSLGFVSQGNEFSYYMMICSSFILNHTQEANEWTIYPWIHNNCNSLSDKDQLRAVSFPDIHPSSAGITEGFSMCAGDFVEVYNEESQESAWDAVVTCFFLDTAHNIVEYIEIISKILKDGGVWVNMGPLLYHFADAXXX

SEQ ID NO: 64788 - protein, 339 aa, Triticum aestivum
  peptide (1)..(339): Ceres Seq. ID no. 15220190
  misc_feature (337)..(337): Xaa is any aa, unknown or other
  misc_feature (338)..(338): Xaa is any aa, unknown or other
  misc_feature (339)..(339): Xaa is any aa, unknown or other
MNTSFIMNMLEAFEPPFDMSQCVDGDCHDCAEHMHGHSHADTINNSELLAQHCCPEEGANTRETENKKDEEVHMVGCSQPAACNLGISQGEDKSCNDGKDASAAANCQDTDCFASSTDENVTPGHRRAPSLPLDVPPVDVDKVRCIIRNIVRDWAQEGQIERDECYKPILEELNRLFPDRSRPPSCLVPGAGLGRLALEISSLGFVSQGNEFSYYMMICSSFILNHTQEANEWTIYPWIHNNCNSLSDKDQLRAVSFPDIHPSSAGITEGFSMCAGDFVEVYNEESQESAWDAVVTCFFLDTAHNIVEYIEIISKILKDGGVWVNMGPLLYHFADAXXX

SEQ ID NO: 64789 - protein, 333 aa, Triticum aestivum
  peptide (1)..(333): Ceres Seq. ID no. 15220191
  misc_feature (331)..(331): Xaa is any aa, unknown or other
  misc_feature (332)..(332): Xaa is any aa, unknown or other
  misc_feature (333)..(333): Xaa is any aa, unknown or other
MNMLEAFEPPFDMSQCVDGDCHDCAEHMHGHSHADTINNSELLAQHCCPEEGANTRETENKKDEEVHMVGCSQPAACNLGISQGEDKSCNDGKDASAAANCQDTDCFASSTDENVTPGHRRAPSLPLDVPPVDVDKVRCIIRNIVRDWAQEGQIERDECYKPILEELNRLFPDRSRPPSCLVPGAGLGRLALEISSLGFVSQGNEFSYYMMICSSFILNHTQEANEWTIYPWIHNNCNSLSDKDQLRAVSFPDIHPSSAGITEGFSMCAGDFVEVYNEESQESAWDAVVTCFFLDTAHNIVEYIEIISKILKDGGVWVNMGPLLYHFADAXXX

SEQ ID NO: 64790 - DNA, 1628 bp, Triticum aestivum
  misc_feature (1)..(1628): Ceres Seq. ID no. 13662754
gaacaagcgtggcttcccttacactgccaagcaatactgttgtgatgtctcctcctgccgcgacaacagtctgatcaagtttgtcgagatggagttcaatgagccggaccgcaggaacagaggcggccaaggctgtagagccatcatgtgggatacgacggtgatttcagatggttggagccagcgcttcagagttgatgttgataacatttcggtggacagaagttattctggtctactgcctcagctgtggaatggcgagaccagagaactagaactgaagagactgattttgtatacccccacgctgagcgtgcacgacgacaatcttctttacgtgatggctaagatgaacagtgaagacgataaggcctgggtcatcaccgtcgacatgaaacgcgaggccgtggaagcaatcgccccgtattctaccagagggcgcaaactcacttcatggcatagtccatgcacctttccagagtacctcgacccggcgaccccaggggatcatgtggccatgcactctaggaggatttgtgcggcggactgtgttctgcaaatgctgttgactcgagactggttcagggaaattggtgaacgctttgaatttgagaggccaacccacgttgagtgcctgtcactaattcagtgttgcccagtatcatctgttctttcagatatccaagaagtggtaaaatatgctttctctactggtgaaggcgaagctgctcccaaagctgtggatttatgctcacgagcttttgaagacttcgatgtgctgctacgcgagttattgcatgatccagcgtcatctaccgaaggcatgagttgcaaaatcagtgttgcccttcgagctttagacagtatcttggacattgtgccaccaaccttgagggcgcttgcggatgcctgtcatcaaaaaggagggaaaacaatatttgatctgggtgaggagcctggtgatccaaaggacttgaaactacagtgctctcctaaagctaacaaccttacatggtgcaagcagccagtcgtctattcaaagaacagatctgacgagttgcagcagtggggatccaacctgattaaccgtttccagataggagggaggacggtatttgatcttgttgagcaggcaagagatacagaggactggaaagtggagagctcttgtgatgctaacaacctttctggcggcaaggacaagggcggatcttacgaggtgcagcaggggagatccaagcccattaaccgccggcaaaggaagcggaaccaggcacggggcagggaagctggccgtgatgaacgattggtggttccatattgccgccaactggagcagtatgtgttgattttcttgtgcctgctcttcattgcctacatctgtgcaccgatcactatgaagtggttaggccatggccctttagtatcctactagtgcatacattccgtctaatatgtgcacagtatcgtcatatctgcattatgtaagaacatacttgcattatgtaaaaacataagcttatatgaggggatgcctcctgtgcgtggagtagcatgggatggtactgttgtggacaaatttacaagcacgtatgtatcagcagtacaccaccaggtttccttgtttc

SEQ ID NO: 64791 - protein, 477 aa, Triticum aestivum
  peptide (1)..(477): Ceres Seq. ID no. 15220185
NKRGFPYTAKQYCCDVSSCRDNSLIKFVEMEFNEPDRRNRGGQGCRAIMWDTTVISDGWSQRFRVDVDNISVDRSYSGLLPQLWNGETRELELKRLILYTPTLSVHDDNLLYVMAKMNSEDDKAWVITVDMKREAVEAIAPYSTRGRKLTSWHSPCTFPEYLDPATPGDHVAMHSRRICAADCVLQMLLTRDWFREIGERFEFERPTHVECLSLIQCCPVSSVLSDIQEVVKYAFSTGEGEAAPKAVDLCSRAFEDFDVLLRELLHDPASSTEGMSCKISVALRALDSILDIVPPTLRALADACHQKGGKTIFDLGEEPGDPKDLKLQCSPKANNLTWCKQPVVYSKNRSDELQQWGSNLINRFQIGGRTVFDLVEQARDTEDWKVESSCDANNLSGGKDKGGSYEVQQGRSKPINRRQRKRNQARGREAGRDERLVVPYCRQLEQYVLIFLCLLFIAYICAPITMKWLGHGPLVSY

SEQ ID NO: 64792 - protein, 448 aa, Triticum aestivum
  peptide (1)..(448): Ceres Seq. ID no. 15220186
MEFNEPDRRNRGGQGCRAIMWDTTVISDGWSQRFRVDVDNISVDRSYSGLLPQLWNGETRELELKRLILYTPTLSVHDDNLLYVMAKMNSEDDKAWVITVDMKREAVEAIAPYSTRGRKLTSWHSPCTFPEYLDPATPGDHVAMHSRRICAADCVLQMLLTRDWFREIGERFEFERPTHVECLSLIQCCPVSSVLSDIQEVVKYAFSTGEGEAAPKAVDLCSRAFEDFDVLLRELLHDPASSTEGMSCKISVALRALDSILDIVPPTLRALADACHQKGGKTIFDLGEEPGDPKDLKLQCSPKANNLTWCKQPVVYSKNRSDELQQWGSNLINRFQIGGRTVFDLVEQARDTEDWKVESSCDANNLSGGKDKGGSYEVQQGRSKPINRRQRKRNQARGREAGRDERLVVPYCRQLEQYVLIFLCLLFIAYICAPITMKWLGHGPLVSY

SEQ ID NO: 64793 - protein, 429 aa, Triticum aestivum
  peptide (1)..(429): Ceres Seq. ID no. 15220187
MWDTTVISDGWSQRFRVDVDNISVDRSYSGLLPQLWNGETRELELKRLILYTPTLSVHDDNLLYVMAKMNSEDDKAWVITVDMKREAVEAIAPYSTRGRKLTSWHSPCTFPEYLDPATPGDHVAMHSRRICAADCVLQMLLTRDWFREIGERFEFERPTHVECLSLIQCCPVSSVLSDIQEVVKYAFSTGEGEAAPKAVDLCSRAFEDFDVLLRELLHDPASSTEGMSCKISVALRALDSILDIVPPTLRALADACHQKGGKTIFDLGEEPGDPKDLKLQCSPKANNLTWCKQPVVYSKNRSDELQQWGSNLINRFQIGGRTVFDLVEQARDTEDWKVESSCDANNLSGGKDKGGSYEVQQGRSKPINRRQRKRNQARGREAGRDERLVVPYCRQLEQYVLIFLCLLFIAYICAPITMKWLGHGPLVSY

SEQ ID NO: 64794 - DNA, 2111 bp, Triticum aestivum
  misc_feature (1)..(2111): Ceres Seq. ID no. 13662574
agaacatcctaatcgaaaaaaccaaaaattattagaggcgacgaagaagggtgcgaacccgccgccgttccgggttccgattagatagagctgtcgcgccgccgatcccgtcgccccgccgcgccgagcttacagtttgtgcgtcatggggacttcttcaggtgcgaatttccatcaacagcctccgccccaggggatgctgccgcctcgccatggtgcccgggcccctagcctgcagacttccctctcattggcctcgtcggaacaggttggctcgcctgaaatgcaggaacctgtgtccaattctgaccagggccatgactctgccaccgaaagtgcaagttcgagggagacctggcctgtagagccggaacatagcaatgctgctgctgctagtagtggcggtgctgtgaaaaaggtggagatggaaaaggatatcagaaatggtatccccaagttgcaggttattcgtggaagctcccgcatcgatagggtgtcactgagggagattgcgcgggagagagtggacctagttgttgagaaaatgaaggtaatgccagaggagcacctggaggagattaaaaatgagctcaggtcgattctggaggggacagggggctctcatcatattgaggagtttctgtatctgcagaagtttgtccagggcagaggtgatttgacaccaactatgctttcaatggcccatcatgtccaactggagatcctcgtggcaatcaagactggaatccaggcgtttttgcaccccagcgtcaccattccccaaagccacctggtggaggtcttcttgtataagaggtgccggaacattgcttgccagagtgctctcccggctgaggaatgcagatgcaatgtatgtgctaacagaaatgggttttgcaacctttgcatgtgcgtgatttgcaacaagtttgattttgaggtcaacacatgccgatgggttgggtgcgatttctgttcccattggacgcacaccgactgtgcgattcgtgttggccagattgggacagggcaatcaattaagagcggcaccggtcatgccgaaatgctttttaggtgccaggcttgccagaagacatcagaattattcggttgggttaaggatgtgtttcaacaatgtgctcctggttgggatagggatgccttagtacgagagcttgagtttgtttgtaagatatttcgtctaagcgaagacccaaaaggaagaaatttgttcaggaaatgtgcgaatctgattgaaagattgaggaatagttctcctgattctgtcaatcctaggatgatactgcatgcacttcgagagcttgagatggattcccctaagagctctgaaaatgaagaatcgggacgcttgatcactccccaggaggcatgtaatcgtattgcagaggtagtccaagaagctgtcagaaagatggagcttgttgctgaagagaaaatgggactgtacaaaaaggctcgcaccgctgtggaggcctgtgaccgtgagcttgatgagaaggccagacaagttcaggagttcaaggccgagaggctgcggaagaagcagcaggtggaggagctcgagagcattgttcggttgaaacaggccgaggctgagatgttccagctcaaggcaagtgaggctcgccaggaggctgagaggctccagagcatcgcgcttgccaaatctgagagggctgagcaggactacgctagcctctacctcaagcggcgcctggaggaagcggaggcagagaagcagtttctttttgagaaaataaagcttcaggacggccataggcccccgcaggcgagcagcagcgtgcctgctgattcctctcaggctccctctcaggcgttgatgctgtccaaaattcaggaccttctcaagaacgttcgtaccatgccgacaaagtcggaggcgcattcaaaataagagcagcaggtgcacttcagatttgggattacatgttgtgttattgtgctaatgtatggtgacttctgtgtgatgtgttaggagtatataatgggcggtgccccccttggaaaatcgaatattaatgttgttggcgatatcgtgatatgatatactcatgtaggctacatatttc

SEQ ID NO: 64795 - protein, 596 aa, Triticum aestivum
  peptide (1)..(596): Ceres Seq. ID no. 15220178
MGTSSGANFHQQPPPQGMLPPRHGARAPSLQTSLSLASSEQVGSPEMQEPVSNSDQGHDSATESASSRETWPVEPEHSNAAAASSGGAVKKVEMEKDIRNGIPKLQVIRGSSRIDRVSLREIARERVDLVVEKMKVMPEEHLEEIKNELRSILEGTGGSHHIEEFLYLQKFVQGRGDLTPTMLSMAHHVQLEILVAIKTGIQAFLHPSVTIPQSHLVEVFLYKRCRNIACQSALPAEECRCNVCANRNGFCNLCMCVICNKFDFEVNTCRWVGCDFCSHWTHTDCAIRVGQIGTGQSIKSGTGHAEMLFRCQACQKTSELFGWVKDVFQQCAPGWDRDALVRELEFVCKIFRLSEDPKGRNLFRKCANLIERLRNSSPDSVNPRMILHALRELEMDSPKSSENEESGRLITPQEACNRIAEVVQEAVRKMELVAEEKMGLYKKARTAVEACDRELDEKARQVQEFKAERLRKKQQVEELESIVRLKQAEAEMFQLKASEARQEAERLQSIALAKSERAEQDYASLYLKRRLEEAEAEKQFLFEKIKLQDGHRPPQASSSVPADSSQAPSQALMLSKIQDLLKNVRTMPTKSEAHSK

SEQ ID NO: 64796 - protein, 579 aa, Triticum aestivum
  peptide (1)..(579): Ceres Seq. ID no. 15220179
MLPPRHGARAPSLQTSLSLASSEQVGSPEMQEPVSNSDQGHDSATESASSRETWPVEPEHSNAAAASSGGAVKKVEMEKDIRNGIPKLQVIRGSSRIDRVSLREIARERVDLVVEKMKVMPEEHLEEIKNELRSILEGTGGSHHIEEFLYLQKFVQGRGDLTPTMLSMAHHVQLEILVAIKTGIQAFLHPSVTIPQSHLVEVFLYKRCRNIACQSALPAEECRCNVCANRNGFCNLCMCVICNKFDFEVNTCRWVGCDFCSHWTHTDCAIRVGQIGTGQSIKSGTGHAEMLFRCQACQKTSELFGWVKDVFQQCAPGWDRDALVRELEFVCKIFRLSEDPKGRNLFRKCANLIERLRNSSPDSVNPRMILHALRELEMDSPKSSENEESGRLITPQEACNRIAEVVQEAVRKMELVAEEKMGLYKKARTAVEACDRELDEKARQVQEFKAERLRKKQQVEELESIVRLKQAEAEMFQLKASEARQEAERLQSIALAKSERAEQDYASLYLKRRLEEAEAEKQFLFEKIKLQDGHRPPQASSSVPADSSQAPSQALMLSKIQDLLKNVRTMPTKSEAHSK

SEQ ID NO: 64797 - protein, 550 aa, Triticum aestivum
  peptide (1)..(550): Ceres Seq. ID no. 15220180
MQEPVSNSDQGHDSATESASSRETWPVEPEHSNAAAASSGGAVKKVEMEKDIRNGIPKLQVIRGSSRIDRVSLREIARERVDLVVEKMKVMPEEHLEEIKNELRSILEGTGGSHHIEEFLYLQKFVQGRGDLTPTMLSMAHHVQLEILVAIKTGIQAFLHPSVTIPQSHLVEVFLYKRCRNIACQSALPAEECRCNVCANRNGFCNLCMCVICNKFDFEVNTCRWVGCDFCSHWTHTDCAIRVGQIGTGQSIKSGTGHAEMLFRCQACQKTSELFGWVKDVFQQCAPGWDRDALVRELEFVCKIFRLSEDPKGRNLFRKCANLIERLRNSSPDSVNPRMILHALRELEMDSPKSSENEESGRLITPQEACNRIAEVVQEAVRKMELVAEEKMGLYKKARTAVEACDRELDEKARQVQEFKAERLRKKQQVEELESIVRLKQAEAEMFQLKASEARQEAERLQSIALAKSERAEQDYASLYLKRRLEEAEAEKQFLFEKIKLQDGHRPPQASSSVPADSSQAPSQALMLSKIQDLLKNVRTMPTKSEAHSK

SEQ ID NO: 64798 - DNA, 754 bp, Triticum aestivum
  misc_feature (1)..(754): Ceres Seq. ID no. 13656008
gtgatcgattccgattccgtgcccgcgcgtcgagcgatcggcccagagagctcgtcgacaaatctcgctcgtgtccatcagatcgccatcgccggcccacctgcccacctgcccaccagtcgatgatggccttcccctctttcacatggccgttccgccgccgagccgccgccggcgccagcggcggagccggcccaagcaaaccctccgccgctgaggggaaggaggaggacgcggaggagctcggcgtcacgccgcagctcctcgacttcctccggacgctctcccccgacgccttcaagtcctccgccctccagctccaccaaggggcctcggcggaggcggcgggagagctctcggactggcagcagcggcacgccgtcctcgtgctcgccagagccaaggaactcgctaaggtccgctatgatttgtgcccacgccacatgaaggacaagcagttctggacaatctacttcctgctcgccaggacctacatcttgccgtacgagttacgtgccatacaaaaagagaaggtaagaaggatggagacagagaacggaaagtcaaaagaagtgattgctgttgaggtggagatgcaggaatcgaaatgcagtagagaatctcaaacgttaccagatgattcagaacctcaggattcatagttgatgttgctgacggcatattaggtaagggctggaagcagctgtatcaaaattgatatttggcttaattcagaactcatttttcccgttgg

SEQ ID NO: 64799 - protein, 219 aa, Triticum aestivum
  peptide (1)..(219): Ceres Seq. ID no. 13656009
DRFRFRARASSDRPRELVDKSRSCPSDRHRRPTCPPAHQSMMAFPSFTWPFRRRAAAGASGGAGPSKPSAAEGKEEDAEELGVTPQLLDFLRTLSPDAFKSSALQLHQGASAEAAGELSDWQQRHAVLVLARAKELAKVRYDLCPRHMKDKQFWTIYFLLARTYILPYELRAIQKEKVRRMETENGKSKEVIAVEVEMQESKCSRESQTLPDDSEPQDS

SEQ ID NO: 64800 - protein, 179 aa, Triticum aestivum
  peptide (1)..(179): Ceres Seq. ID no. 13656010
MMAFPSFTWPFRRRAAAGASGGAGPSKPSAAEGKEEDAEELGVTPQLLDFLRTLSPDAFKSSALQLHQGASAEAAGELSDWQQRHAVLVLARAKELAKVRYDLCPRHMKDKQFWTIYFLLARTYILPYELRAIQKEKVRRMETENGKSKEVIAVEVEMQESKCSRESQTLPDDSEPQDS

SEQ ID NO: 64801 - protein, 178 aa, Triticum aestivum
  peptide (1)..(178): Ceres Seq. ID no. 13656011
MAFPSFTWPFRRRAAAGASGGAGPSKPSAAEGKEEDAEELGVTPQLLDFLRTLSPDAFKSSALQLHQGASAEAAGELSDWQQRHAVLVLARAKELAKVRYDLCPRHMKDKQFWTIYFLLARTYILPYELRAIQKEKVRRMETENGKSKEVIAVEVEMQESKCSRESQTLPDDSEPQDS

SEQ ID NO: 64802 - DNA, 1628 bp, Triticum aestivum
  misc_feature (1)..(1628): Ceres Seq. ID no. 13597528
cttgctcatctcatctcattccctcccttgtgccatctgctctgctctctcctatcatctatctagcaactcaattccatttgcatgcctacacacatcttacattcactacctcaacacttaccactccaccctagctaagctatcttcacctccatcacaaatcatcaattgcttcagtttgatcccatcaccatgggcgagcaagtagccaccaaggaggaggccaacaaggaagaatcacctgcacccgccgccgcacctgaagctgcaccggcaccggcaccggcagaggagaagaaggacgaggcagcagccgaccaagacccaaagaaggaggaaccaccagcagccgacccaccgtcccctccgccgccggtgccggtgatcctgggcgtcgaggtgcactgcacgggctgcgccaagcggatcaggcgctccctcctccgctgcaagggcgtcgaggccgtccacgtcgacatgtccgccaaccaggtcaccatcaagggcgccgtcgacccgcaggccctctgcgaccgcctccgcgccaagaccaagcgcgacgccaccctcatctcccctctgccacctcctccgccggccgagggcgaggagcctccgccgccccctcctccggcaccgccgctcgtcagcgaggcccgcacagtggagctgctcgtcaacatgcactgcgaggcctgcgcgcagcagctgcagaccaagatgatgaggatgaagggggtggtcagcgctcagacggacctcgccgccgggaggctcacgctcagtgccaccgtggaggacgagaagattgtggagtacatccaccgacggactgggaagatcgcctccgtcgtgccgccgccgcctccggagccgcccaaggaggaggaaccaccagctcctgctgctgatgctgagccaccaaaggatgaagcaccagccgacggcaagaaagaagaggccggcgacaacaaggcggctgaagacggcaaaggagctgcagaggccggggaggagaagaaggaaggtgccggcgaggaggaccagaagccggggaagcaagaaggtgtggcggtggacggcttcccgccggaggagatgatgaagcggatggtctactggccctacggcggcgcacccggcggcggcatccactacaagctgcatccggccgacgccgaggaggccatgatggccaggaggatggccatgcacgccatgccgccacctatgccgccgccgccgcaccaccaccaccacaacccctacgccatgatgcaccagcagtgggcgcctccaccgccgccgccacctccggggatgccgatgtacaacagctacaactacggcagcagctacatgatggagcggccgccgcagatgttcagcgacgagaaccccaacgcctgcgtcatctcctagtcctagctatctcggatcgatggatggatcaccacatgggccatggcatggatatgagctgagcatgtgagcttggccggattattggaccatcctccatatacatttctatactccgattatgtactgctgcgtaattataagcagtagttattgtactattagcgacgaaattaaaggacattggtcacgcttgtaagatc

SEQ ID NO: 64803 - protein, 409 aa, Triticum aestivum
  peptide (1)..(409): Ceres Seq. ID no. 13597529
MGEQVATKEEANKEESPAPAAAPEAAPAPAPAEEKKDEAAADQDPKKEEPPAADPPSPPPPVPVILGVEVHCTGCAKRIRRSLLRCKGVEAVHVDMSANQVTIKGAVDPQALCDRLRAKTKRDATLISPLPPPPPAEGEEPPPPPPPAPPLVSEARTVELLVNMHCEACAQQLQTKMMRMKGVVSAQTDLAAGRLTLSATVEDEKIVEYIHRRTGKIASVVPPPPPEPPKEEEPPAPAADAEPPKDEAPADGKKEEAGDNKAAEDGKGAAEAGEEKKEGAGEEDQKPGKQEGVAVDGFPPEEMMKRMVYWPYGGAPGGGIHYKLHPADAEEAMMARRMAMHAMPPPMPPPPHHHHHNPYAMMHQQWAPPPPPPPPGMPMYNSYNYGSSYMMERPPQMFSDENPNACVIS

SEQ ID NO: 64804 - protein, 314 aa, Triticum aestivum
  peptide (1)..(314): Ceres Seq. ID no. 13597530
MSANQVTIKGAVDPQALCDRLRAKTKRDATLISPLPPPPPAEGEEPPPPPPPAPPLVSEARTVELLVNMHCEACAQQLQTKMMRMKGVVSAQTDLAAGRLTLSATVEDEKIVEYIHRRTGKIASVVPPPPPEPPKEEEPPAPAADAEPPKDEAPADGKKEEAGDNKAAEDGKGAAEAGEEKKEGAGEEDQKPGKQEGVAVDGFPPEEMMKRMVYWPYGGAPGGGIHYKLHPADAEEAMMARRMAMHAMPPPMPPPPHHHHHNPYAMMHQQWAPPPPPPPPGMPMYNSYNYGSSYMMERPPQMFSDENPNACVIS

SEQ ID NO: 64805 - protein, 246 aa, Triticum aestivum
  peptide (1)..(246): Ceres Seq. ID no. 13597531
MHCEACAQQLQTKMMRMKGVVSAQTDLAAGRLTLSATVEDEKIVEYIHRRTGKIASVVPPPPPEPPKEEEPPAPAADAEPPKDEAPADGKKEEAGDNKAAEDGKGAAEAGEEKKEGAGEEDQKPGKQEGVAVDGFPPEEMMKRMVYWPYGGAPGGGIHYKLHPADAEEAMMARRMAMHAMPPPMPPPPHHHHHNPYAMMHQQWAPPPPPPPPGMPMYNSYNYGSSYMMERPPQMFSDENPNACVIS

SEQ ID NO: 64806 - DNA, 1106 bp, Triticum aestivum
  misc_feature (1)..(1106): Ceres Seq. ID no. 13597725
ctttcagccccacctcgcctccctccatccccctccattaaagcccgcgccctcctcctccgctccattcccctcgccaccgcccagatccagaccatgacggtgccgccgtcgccggagccgttccgcgtcttcgtcgggtacgacccgaaggagcacgaggcctacgaggtgtgtcgccgcagcctgatccgccacgccaccgtgccgctcgacgtgcgccccatccggcagccggacctccgcgcgtcggggctctactggcgcacgcggggtcacatggagagcactgagttctccttcacccgcttcctcacccccttcctcgccggctaccgcggctgggcgctcttcatcgactgcgacttcctctacctcgccgacgtcgccgagctcatcgcctccgccgtgccctcggacgctgccgccgccaagcgcctcgccgtcgtctgcgtcaagcacgagtacaagcccctcgaggccaccaagatggacggcgccatgcagaccgtgtacccgcgcaagaactggtcctccatggtgctctacaactgcgcccaccccaagaacgtcgccgcgctcaccccggacgccgtcagcaccaagaccggcgccttcctccaccgattctcctggctcgacgacgacgagatcggggaggtgcccttcgtctggaacttcctcgtcggccacaacagggtcgaccctgacgacccggccacgcagcccaaggccctgcactacacctgcgggggaccctggttcgacaggtacagggactgcgagttcgccgacctctggatcaaggaggccgaggagctcagggcggagaaggagaagcgcagagccgagaaggagaggctcgagctcgaggacgacgaggacgacgaggggaattgatggatgatggggccggccaacaagttcactgcattgcattggttcttttgcgccgtgggaattctttcgattcaatctgtttgttatgctggtttcttggtataggtggtaggggaggccagagtagaatagctcgagtatattggtttagtatgctcttgtgtagtagctgcaatcgatctatgaatgaaccagtcctcattgcc

SEQ ID NO: 64807 - protein, 299 aa, Triticum aestivum
  peptide (1)..(299): Ceres Seq. ID no. 13597726
LSAPPRLPPSPSIKARALLLRSIPLATAQIQTMTVPPSPEPFRVFVGYDPKEHEAYEVCRRSLIRHATVPLDVRPIRQPDLRASGLYWRTRGHMESTEFSFTRFLTPFLAGYRGWALFIDCDFLYLADVAELIASAVPSDAAAAKRLAVVCVKHEYKPLEATKMDGAMQTVYPRKNWSSMVLYNCAHPKNVAALTPDAVSTKTGAFLHRFSWLDDDEIGEVPFVWNFLVGHNRVDPDDPATQPKALHYTCGGPWFDRYRDCEFADLWIKEAEELRAEKEKRRAEKERLELEDDEDDEGN

SEQ ID NO: 64808 - protein, 267 aa, Triticum aestivum
  peptide (1)..(267): Ceres Seq. ID no. 13597727
MTVPPSPEPFRVFVGYDPKEHEAYEVCRRSLIRHATVPLDVRPIRQPDLRASGLYWRTRGHMESTEFSFTRFLTPFLAGYRGWALFIDCDFLYLADVAELIASAVPSDAAAAKRLAVVCVKHEYKPLEATKMDGAMQTVYPRKNWSSMVLYNCAHPKNVAALTPDAVSTKTGAFLHRFSWLDDDEIGEVPFVWNFLVGHNRVDPDDPATQPKALHYTCGGPWFDRYRDCEFADLWIKEAEELRAEKEKRRAEKERLELEDDEDDEGN

SEQ ID NO: 64809 - protein, 206 aa, Triticum aestivum
  peptide (1)..(206): Ceres Seq. ID no. 13597728
MESTEFSFTRFLTPFLAGYRGWALFIDCDFLYLADVAELIASAVPSDAAAAKRLAVVCVKHEYKPLEATKMDGAMQTVYPRKNWSSMVLYNCAHPKNVAALTPDAVSTKTGAFLHRFSWLDDDEIGEVPFVWNFLVGHNRVDPDDPATQPKALHYTCGGPWFDRYRDCEFADLWIKEAEELRAEKEKRRAEKERLELEDDEDDEGN

SEQ ID NO: 64810 - DNA, 1846 bp, Triticum aestivum
  misc_feature (1)..(1846): Ceres Seq. ID no. 13597732
cctacccgatacgaaccaaccccagattttccccgggcgccgcagccgcatttcgtcgagcacaggacgcgcatggcgatggccgcgccccacgtctcgcactcgcagccacccgcagggcgcgccgctttattcgctcaccccaccaccgcgcagaactcctcccctctccgcctccctctcggccgcgccgccgtccggcccgtccgcctctacgccgtctccaccgatgccgcccctgccaccgccgccgccgcgatggacgccgtggccgactgggggctcaccccgctcgcggaggccgacccggaggtgtacgacctcatcgagcgcgagaagcggcgccagcgcacgggcatcgagctaatcgcgtccgagaacttcacctcgctcgccgtcatggaggcgctcggctccccgctcaccaacaagtactccgagggcatgcccggggcgcgctactacggcgggaacgaggtcatcgacgaggtcgaggagctctgccgcgcccgcgccctcaaggcgttccacctcgaccccgcttcctggggcgtcaacgtgcagccctactccggctcccccgccaacttcgccgcctacactgggctgctccaaccccacgagcgcatcatggggctcgatttgccgtccggaggacacctcactcatgggtactacacggccgggggcaagaagatttcggccacctccatctacttttcgagcttgccctacaaggtgagctccgacaccgggtacgtcgactatgataggctggaggagaaggccatggatttccgccccaagctcattatctgtggcgggagcgcgtacccacgggactgggattatgccaggcttagggccatcgcggacaagtgcggggccatgttgctgtgtgacatggctcatatcagcggtctcgttgccgctcaggaggctacgaatccgtttgagtattctgatgtggttaccaccaccacccacaagagtctccgagggccaaggtctggtatgatattctacaggaagggcccgaagcctcccaaaaaaggccagcccgagggtgctctttacgattacgaggacaagatcaactttgcagtgtttccatcactccagggcggccctcacaaccaccagattgctgccctggcagttggcctgaagcaggcaatgtcacctggattcaaggcatatattcagcaggtcaaggccaatgctgttgcccttggaaaccatctgatgagtaagggctacaagatggttactgacggaacagagaaccaccttgttctctgggatcttcgccctcttggcttgtctggtaacaaagttgagaaagtatgtgatctgagcagcattacactcaacaaaaatgccgtctttggtgacagcagtgcactggcacctggtggtgtgcgaattggtacacctgccatgacctcgagaggtttggtcgagaaggactttgtgaagattgctgagtaccttcatcaggctgtagtcatctgcttgaatgtccagaagcagcgaggtaagcgttacaatgatttcatcgttgacttggagaagaacgaggacatcgcggagctcagggcagaggtcgagaagtttgccattgcatttgagatgcctggcttccgggtgtcagacatgaaatacaaggattaggctgtggtaccatgcagatcgttttcttgtagcagcaaattggtgcccttaaggggctgattgctgtgctctattcgtgatgtatgattatggttgagaatgatatgactcatgaataatcattgaaggcatgccataacatggagatggtatttcctagcctcagttttcc

SEQ ID NO: 64811 - protein, 557 aa, Triticum aestivum
  peptide (1)..(557): Ceres Seq. ID no. 13597733
PTRYEPTPDFPRAPQPHFVEHRTRMAMAAPHVSHSQPPAGRAALFAHPTTAQNSSPLRLPLGRAAVRPVRLYAVSTDAAPATAAAAMDAVADWGLTPLAEADPEVYDLIEREKRRQRTGIELIASENFTSLAVMEALGSPLTNKYSEGMPGARYYGGNEVIDEVEELCRARALKAFHLDPASWGVNVQPYSGSPANFAAYTGLLQPHERIMGLDLPSGGHLTHGYYTAGGKKISATSIYFSSLPYKVSSDTGYVDYDRLEEKAMDFRPKLIICGGSAYPRDWDYARLRAIADKCGAMLLCDMAHISGLVAAQEATNPFEYSDVVTTTTHKSLRGPRSGMIFYRKGPKPPKKGQPEGALYDYEDKINFAVFPSLQGGPHNHQIAALAVGLKQAMSPGFKAYIQQVKANAVALGNHLMSKGYKMVTDGTENHLVLWDLRPLGLSGNKVEKVCDLSSITLNKNAVFGDSSALAPGGVRIGTPAMTSRGLVEKDFVKIAEYLHQAVVICLNVQKQRGKRYNDFIVDLEKNEDIAELRAEVEKFAIAFEMPGFRVSDMKYKD

SEQ ID NO: 64812 - protein, 533 aa, Triticum aestivum
  peptide (1)..(533): Ceres Seq. ID no. 13597734
MAMAAPHVSHSQPPAGRAALFAHPTTAQNSSPLRLPLGRAAVRPVRLYAVSTDAAPATAAAAMDAVADWGLTPLAEADPEVYDLIEREKRRQRTGIELIASENFTSLAVMEALGSPLTNKYSEGMPGARYYGGNEVIDEVEELCRARALKAFHLDPASWGVNVQPYSGSPANFAAYTGLLQPHERIMGLDLPSGGHLTHGYYTAGGKKISATSIYFSSLPYKVSSDTGYVDYDRLEEKAMDFRPKLIICGGSAYPRDWDYARLRAIADKCGAMLLCDMAHISGLVAAQEATNPFEYSDVVTTTTHKSLRGPRSGMIFYRKGPKPPKKGQPEGALYDYEDKINFAVFPSLQGGPHNHQIAALAVGLKQAMSPGFKAYIQQVKANAVALGNHLMSKGYKMVTDGTENHLVLWDLRPLGLSGNKVEKVCDLSSITLNKNAVFGDSSALAPGGVRIGTPAMTSRGLVEKDFVKIAEYLHQAVVICLNVQKQRGKRYNDFIVDLEKNEDIAELRAEVEKFAIAFEMPGFRVSDMKYKD

SEQ ID NO: 64813 - protein, 531 aa, Triticum aestivum
  peptide (1)..(531): Ceres Seq. ID no. 13597735
MAAPHVSHSQPPAGRAALFAHPTTAQNSSPLRLPLGRAAVRPVRLYAVSTDAAPATAAAAMDAVADWGLTPLAEADPEVYDLIEREKRRQRTGIELIASENFTSLAVMEALGSPLTNKYSEGMPGARYYGGNEVIDEVEELCRARALKAFHLDPASWGVNVQPYSGSPANFAAYTGLLQPHERIMGLDLPSGGHLTHGYYTAGGKKISATSIYFSSLPYKVSSDTGYVDYDRLEEKAMDFRPKLIICGGSAYPRDWDYARLRAIADKCGAMLLCDMAHISGLVAAQEATNPFEYSDVVTTTTHKSLRGPRSGMIFYRKGPKPPKKGQPEGALYDYEDKINFAVFPSLQGGPHNHQIAALAVGLKQAMSPGFKAYIQQVKANAVALGNHLMSKGYKMVTDGTENHLVLWDLRPLGLSGNKVEKVCDLSSITLNKNAVFGDSSALAPGGVRIGTPAMTSRGLVEKDFVKIAEYLHQAVVICLNVQKQRGKRYNDFIVDLEKNEDIAELRAEVEKFAIAFEMPGFRVSDMKYKD

SEQ ID NO: 64814 - DNA, 1415 bp, Triticum aestivum
  misc_feature (1)..(1415): Ceres Seq. ID no. 14302852
atcacaccatcacgatcgagcactcgcaacagcttcactcaactcgcagtgaagatcacctagagaccgactagcagtgatcgatggcgtccgtccggcgcccgtgcgcggtggcgctgctcgcctgcgccgccgcattcctcgtgacggtcggtgcccagccgaaggacaaccccattttgtcggaccccaacgtggtccccatctacatgagccccggcgcgcagcccaccgtggtgagctgctacaaccagagcagcccgtcgcaggccccagagtgcatgattccggtgcgccggtgccccgccggctgccgcgacctctgctacgtgcactgccccagctgcaagctcgtctgcatgtgtgaactggccggcacggagtgctacgacccgcgcttcgtgggtggcgacggcaacaagttcctcttccacggccgcagggacgccgacttctgcctgctctccgacgccaacctgcacatcaacgcgcacttcatcggcaagcgcaacgtgaaggcggcgcgtgacttcacatgggtgcaggcgctcggcatccgcttcggtggccaccgcctctacctcggcgtcaagaggacggtcacctgggacaacgccgtcgaccgcctcgtcatcaccttcgacggcgtgcccgtcgagctggacgcggcgccggccgccagctggagcccggcctccgcgcccgcgctgtctgtcttccgcatcggcaaggccaacggcgtggtggtgcgcctcgacggccggttccgcatcgtcgccaacgcggtgccggtgaccgaggaggactcgagggtccacgactacggcctcaccgccgacgacagcctcgcgcacctcaacgtcgcgttcaagttcaactccatcagcgccgacgtgcacggcgtgctcggccagacctaccgcccggactacgtcagcgccggggttgacatgggcgccaagatcccggtgatggggggtgccgcaaagtaccaggtgtcggacatcttcgggacggactgcgaggtggcgcgcttcgccggagaggacgtcgtccgcgtcggggcggtcgacatgatcgacgagccggccgacaccatgtgcggcagcggcaagggcagcgccgggctggtctgcaagaagtgatgtggtatcgcgagctgattttgcttcgttaccctcgtaagtgtgcccatacacgtctacgtgctcgctgctgctacactacattatcggtagtacctccgcatttcagaataaataaccgctggtgatgtcgtgtcgttgtgtgttagtcaatcgatagtcgtgtagggcaacgttggaaatccaggcgttgctcggtgtaacaggctactttttttccctccatgttttttcaaatgtaatgattgaacaatcaagtttgtgatttac

SEQ ID NO: 64815 - protein, 353 aa, Triticum aestivum
  peptide (1)..(353): Ceres Seq. ID no. 14302853
MASVRRPCAVALLACAAAFLVTVGAQPKDNPILSDPNVVPIYMSPGAQPTVVSCYNQSSPSQAPECMIPVRRCPAGCRDLCYVHCPSCKLVCMCELAGTECYDPRFVGGDGNKFLFHGRRDADFCLLSDANLHINAHFIGKRNVKAARDFTWVQALGIRFGGHRLYLGVKRTVTWDNAVDRLVITFDGVPVELDAAPAASWSPASAPALSVFRIGKANGVVVRLDGRFRIVANAVPVTEEDSRVHDYGLTADDSLAHLNVAFKFNSISADVHGVLGQTYRPDYVSAGVDMGAKIPVMGGAAKYQVSDIFGTDCEVARFAGEDVVRVGAVDMIDEPADTMCGSGKGSAGLVCKK

SEQ ID NO: 64816 - protein, 311 aa, Triticum aestivum
  peptide (1)..(311): Ceres Seq. ID no. 14302854
MSPGAQPTVVSCYNQSSPSQAPECMIPVRRCPAGCRDLCYVHCPSCKLVCMCELAGTECYDPRFVGGDGNKFLFHGRRDADFCLLSDANLHINAHFIGKRNVKAARDFTWVQALGIRFGGHRLYLGVKRTVTWDNAVDRLVITFDGVPVELDAAPAASWSPASAPALSVFRIGKANGVVVRLDGRFRIVANAVPVTEEDSRVHDYGLTADDSLAHLNVAFKFNSISADVHGVLGQTYRPDYVSAGVDMGAKIPVMGGAAKYQVSDIFGTDCEVARFAGEDVVRVGAVDMIDEPADTMCGSGKGSAGLVCKK

SEQ ID NO: 64817 - protein, 287 aa, Triticum aestivum
  peptide (1)..(287): Ceres Seq. ID no. 14302855
MIPVRRCPAGCRDLCYVHCPSCKLVCMCELAGTECYDPRFVGGDGNKFLFHGRRDADFCLLSDANLHINAHFIGKRNVKAARDFTWVQALGIRFGGHRLYLGVKRTVTWDNAVDRLVITFDGVPVELDAAPAASWSPASAPALSVFRIGKANGVVVRLDGRFRIVANAVPVTEEDSRVHDYGLTADDSLAHLNVAFKFNSISADVHGVLGQTYRPDYVSAGVDMGAKIPVMGGAAKYQVSDIFGTDCEVARFAGEDVVRVGAVDMIDEPADTMCGSGKGSAGLVCKK

SEQ ID NO: 64818 - DNA, 1284 bp, Triticum aestivum
  misc_feature (1)..(1284): Ceres Seq. ID no. 15179788
acccacgacgcggacactactttgtacgcaggcagcgtctttccccttcctcttttgcctcccatctcccctctccgctcccactccacagtccacccagccgcggccggaagagcaggaggacgggatgagctccgggacggggaaggtggtgtgcgtcaccggcgcctcgggctacatcgcctcctggctcgtcaagttcctcctccagcgcggctacaccgtccgcgccaccgtcagggacaccgccgaccccaagaaaacattgcacctgcaggccctggatggagccaaggacaggctgcacttgtttaaagcaagcttgttggaagaaggcaccttcgatgatgctgttgccggctgcgattgtgtcttccacacggcatctcccttttatcacaatgtcaaggatcccaaggctgagttacttgatccagcagtcaatggaacgctcaatgttctccgttcctgcaagaaggcctctatcaagagagtgatcgtaacctcatccatggctgctgttgcctacaatgggaagccaaggactcctgatgtagtagttgacgagacatggttttcaagtgcagaggtctgcgaaaagaataagcaatggtatgtgctatccaagacccttgccgaggaggctgcatggaagtacgcaaatgataatggattagaaataattacaataaacccaacaatggtcatcggtcccctgttgcagcctacactgaatactagcacagaagcaatattgaagtttataaatggatcatcttctacatacgccaatttctgctttggatggataaacgttaaagatgttgccctggcacatatccttgcatatgaagttccttcagcaaacggaagatattgtatggttgaaagagtcattcaccactcggaccttgtcaagatcatacacgagatgtatcctgaatttccagtgccagacaagtgtgcagatgatgcgccgtttgccccaatctaccaggtatcaaaggacaggataagaagtctgggcatggagctgacccccctggagacgagcctcaaggagactatcgagagcttgagagagaaaggatttgtcacttctgagtcgagccatctgtgaaactttctttgctttggcatcactagtggcagacgctagatgcacacatgtttatgtgcacctgaaataaatcgaggcatagtgtattcttgagacatgtatttgtggatctgctgtgtttcaatggattcaagttcggagaatgtataaaaaaaaaaaaaaaa

SEQ ID NO: 64819 - protein, 372 aa, Triticum aestivum
  peptide (1)..(372): Ceres Seq. ID no. 15179789
PTTRTLLCTQAASFPFLFCLPSPLSAPTPQSTQPRPEEQEDGMSSGTGKVVCVTGASGYIASWLVKFLLQRGYTVRATVRDTADPKKTLHLQALDGAKDRLHLFKASLLEEGTFDDAVAGCDCVFHTASPFYHNVKDPKAELLDPAVNGTLNVLRSCKKASIKRVIVTSSMAAVAYNGKPRTPDVVVDETWFSSAEVCEKNKQWYVLSKTLAEEAAWKYANDNGLEIITINPTMVIGPLLQPTLNTSTEAILKFINGSSSTYANFCFGWINVKDVALAHILAYEVPSANGRYCMVERVIHHSDLVKIIHEMYPEFPVPDKCADDAPFAPIYQVSKDRIRSLGMELTPLETSLKETIESLREKGFVTSESSHL

SEQ ID NO: 64820 - protein, 330 aa, Triticum aestivum
  peptide (1)..(330): Ceres Seq. ID no. 15179790
MSSGTGKVVCVTGASGYIASWLVKFLLQRGYTVRATVRDTADPKKTLHLQALDGAKDRLHLFKASLLEEGTFDDAVAGCDCVFHTASPFYHNVKDPKAELLDPAVNGTLNVLRSCKKASIKRVIVTSSMAAVAYNGKPRTPDVVVDETWFSSAEVCEKNKQWYVLSKTLAEEAAWKYANDNGLEIITINPTMVIGPLLQPTLNTSTEAILKFINGSSSTYANFCFGWINVKDVALAHILAYEVPSANGRYCMVERVIHHSDLVKIIHEMYPEFPVPDKCADDAPFAPIYQVSKDRIRSLGMELTPLETSLKETIESLREKGFVTSESSHL

SEQ ID NO: 64821 - protein, 202 aa, Triticum aestivum
  peptide (1)..(202): Ceres Seq. ID no. 15179791
MAAVAYNGKPRTPDVVVDETWFSSAEVCEKNKQWYVLSKTLAEEAAWKYANDNGLEIITINPTMVIGPLLQPTLNTSTEAILKFINGSSSTYANFCFGWINVKDVALAHILAYEVPSANGRYCMVERVIHHSDLVKIIHEMYPEFPVPDKCADDAPFAPIYQVSKDRIRSLGMELTPLETSLKETIESLREKGFVTSESSHL

SEQ ID NO: 64822 - DNA, 1345 bp, Triticum aestivum
  misc_feature (1)..(1345): Ceres Seq. ID no. 13503553
ttttccggtaccaaacgtcaccttcttcccagcttcctcctccgtccacccacgccgccgacgcgcctccgccggtccggtctacatataccagcgccctcgccatcccccatttccttcctccccaacccgccattttccgtcctcaccgagacggttcccatccccgcgcatctgcctctgccgtctccgcccggtgccatcttcttcgctcactccgcgcaggccaactaatctttctgatcggccggccggtcgaaatgggccacgagggagccaagtacggcgacgacggccgccccacctgcgactgcctcctcttcgaccttgatgacacgctctacccggtgggatcaggcatcggcctcgacgtcatgaagaacatccaagaatacatggtcgagaagctcggcatcgacaagagcatcagccacgagctctgcatcctgctgtacaagcagtacggaaccaccatggccggtctgcgggctgtcgggtaccagttcgactacgatgatttccacggctttgttcatggaaggttggcctacgaaaagctcaagcctgaccctgtgctcaggaacatccttctgagcctaccaatccgcaaactcgtgttcacgaatggtgacaggctccatgcttcgagggccatgaagaggcttgggatcgaggactgctttgagggagttctgtgctttgagacattgaacccgccatcgcccactcctgcgccagccagcaaagttgagatctttgatataatgaagcacctggctcatccggagcctggggttgagctgccaaggtcaccaatcctgtgcaaaccgaatatagatgcaatgctgcatgccctcaagcttgccgacatcaatcctcagactactatattttttgatgacagcgtcaggaacatccaggccgggaagcaaatcggaatgcacactgtcctggttggaacttctgaaaagattaaaggtgctgaccatgccttggaaagcctccacaacatgaaggaagcgtttccagaactgtgggaggaggctgtgaaggatgaggacgtcaggaaatcgagcaaagttggaatcgagacatcggtgatcgcttaaaatccctcatgaactgactcatggttttgggcaaagggcacatgagacgaccagatccagtatctgtttgtctgacagtagacatgctgattagaccaagagaaaattgttgtaatcgttaagggaactgatgccactttcgttatgtttgtcccttgtaataagaaataaaatgttctgaacctcgctgtaactccgttcacggggcaatagacctgctatgctagtactatttg

SEQ ID NO: 64823 - protein, 368 aa, Triticum aestivum
  peptide (1)..(368): Ceres Seq. ID no. 13503554
FRYQTSPSSQLPPPSTHAADAPPPVRSTYTSALAIPHFLPPQPAIFRPHRDGSHPRASASAVSARCHLLRSLRAGQLIFLIGRPVEMGHEGAKYGDDGRPTCDCLLFDLDDTLYPVGSGIGLDVMKNIQEYMVEKLGIDKSISHELCILLYKQYGTTMAGLRAVGYQFDYDDFHGFVHGRLAYEKLKPDPVLRNILLSLPIRKLVFTNGDRLHASRAMKRLGIEDCFEGVLCFETLNPPSPTPAPASKVEIFDIMKHLAHPEPGVELPRSPILCKPNIDAMLHALKLADINPQTTIFFDDSVRNIQAGKQIGMHTVLVGTSEKIKGADHALESLHNMKEAFPELWEEAVKDEDVRKSSKVGIETSVIA

SEQ ID NO: 64824 - protein, 282 aa, Triticum aestivum
  peptide (1)..(282): Ceres Seq. ID no. 13503555
MGHEGAKYGDDGRPTCDCLLFDLDDTLYPVGSGIGLDVMKNIQEYMVEKLGIDKSISHELCILLYKQYGTTMAGLRAVGYQFDYDDFHGFVHGRLAYEKLKPDPVLRNILLSLPIRKLVFTNGDRLHASRAMKRLGIEDCFEGVLCFETLNPPSPTPAPASKVEIFDIMKHLAHPEPGVELPRSPILCKPNIDAMLHALKLADINPQTTIFFDDSVRNIQAGKQIGMHTVLVGTSEKIKGADHALESLHNMKEAFPELWEEAVKDEDVRKSSKVGIETSVIA

SEQ ID NO: 64825 - protein, 244 aa, Triticum aestivum
  peptide (1)..(244): Ceres Seq. ID no. 13503556
MKNIQEYMVEKLGIDKSISHELCILLYKQYGTTMAGLRAVGYQFDYDDFHGFVHGRLAYEKLKPDPVLRNILLSLPIRKLVFTNGDRLHASRAMKRLGIEDCFEGVLCFETLNPPSPTPAPASKVEIFDIMKHLAHPEPGVELPRSPILCKPNIDAMLHALKLADINPQTTIFFDDSVRNIQAGKQIGMHTVLVGTSEKIKGADHALESLHNMKEAFPELWEEAVKDEDVRKSSKVGIETSVIA

SEQ ID NO: 64826 - DNA, 1896 bp, Triticum aestivum
  misc_feature (1)..(1896): Ceres Seq. ID no. 15169643
atcgcgtcacatccgagggaggcaaaaccctaggcagatccctcccgaagcctaccgcgaccttccgcccccggaggagatgcagggcggcaaccacatgctcctcgaggagcccgtccgcctcgcctccgtcctcgcccccgccaagcccaaagttttcccatccctcactaagattgttgggacgcttgggcccaactcgcactcagtcgaagtgattgaagaatgtctcactgctgggatgtcagttgcgcggtttgatttctcttggaaggatgctacttatcatcaggagaccctcgacaatctgaggaaagcggcacagaatgtgaagaagttatgtcctataatgctggatacagtgggtccagaaattcaggttcacaattcaactggtggagcaatcgagttgataggggggaatcatgtcacaataacaccagatctttctaaagctccttcggctgatatcctaccaattaaatttggcgatcttgcaaaagttgtgaagaagggtgatactcttttcattggtcaatatcttttcacaggaagtgaaacaacatctctatggcttgaagttacggagacttctggtgcagaagtgatttgttacgtgaagaacacagctacactgtcagggcccattttcactctgcatgtttcacaagtacatatcagtatgcccactttgagtgaatatgataaacaggtcatatcaacgtgggggctgcaaaacagtgttgacattatatcgctttcccatacccgctcttctgaagatgtcagggagcttagagcctttttaaaatctcatgatcttcaagacacacagatatatgcgaaggttgaaaatgctgagggtttggagcattttgatgaaattctccaagaggcggatggtatcatcatatcgcgaggagacctgggaattgacctcccaccagagagggtgttcatgtcccaaaagactggtattcataaatgcaacatggccggcaaacctgtgatcattactagagttgtggacagcatgattgacaatctgcgccctactcgcgcagaagctactgatgttgcaaatgctgtcctagatggaactgatggcattttgctcggtgcggagacacttcgagggcagtatcctgttgacgctgtgcgtactgtgggcagaatatgtgcagaagctgagaccgtgtataaccagtcacttcacttcaagaaagtagtgaggcatgtaggtgaaccaatggtccatgaagaatctgtggcatcatcagcggttcgttctgcaatgaaggtaaaagctgctgcaattgttgtgttcaccttctcggggagagctgctaggttaattgctaaatacagggccccaatgccagttttagcagttgtgttcccgcgtgagggctctgatccatcgaagtggcgttcttatggcacgacacaggcgaggcaatgtttttctgtgagaggtgtctaccctttgatggggagtactgacgatgctgaaactggtgggctcaccaaggaagaatacgggataaaacttgcactgaactatggccggtcagtaggcataataaagccatacgacagggtgattatttttgaaaagatcggtgattcctctgttgtcaagatcatcgagtgcgacgattctgaaagatgaatgacccttctcaggcaacagtttcaactatacgcctgagattgcctcctctttttgttctccattcactttgaccagagataaaagagtagtatagcacgacaaggttgtcatgtttagcaccttggtattttagatttacatacttgttgccctaataaagtgaagagagctcattcactcaaacatccaagttttggacaaaattataggattgttgagat

SEQ ID NO: 64827 - protein, 556 aa, Triticum aestivum
  peptide (1)..(556): Ceres Seq. ID no. 15169644
SRHIRGRQNPRQIPPEAYRDLPPPEEMQGGNHMLLEEPVRLASVLAPAKPKVFPSLTKIVGTLGPNSHSVEVIEECLTAGMSVARFDFSWKDATYHQETLDNLRKAAQNVKKLCPIMLDTVGPEIQVHNSTGGAIELIGGNHVTITPDLSKAPSADILPIKFGDLAKVVKKGDTLFIGQYLFTGSETTSLWLEVTETSGAEVICYVKNTATLSGPIFTLHVSQVHISMPTLSEYDKQVISTWGLQNSVDIISLSHTRSSEDVRELRAFLKSHDLQDTQIYAKVENAEGLEHFDEILQEADGIIISRGDLGIDLPPERVFMSQKTGIHKCNMAGKPVIITRVVDSMIDNLRPTRAEATDVANAVLDGTDGILLGAETLRGQYPVDAVRTVGRICAEAETVYNQSLHFKKVVRHVGEPMVHEESVASSAVRSAMKVKAAAIVVFTFSGRAARLIAKYRAPMPVLAVVFPREGSDPSKWRSYGTTQARQCFSVRGVYPLMGSTDDAETGGLTKEEYGIKLALNYGRSVGIIKPYDRVIIFEKIGDSSVVKIIECDDSER

SEQ ID NO: 64828 - protein, 530 aa, Triticum aestivum
  peptide (1)..(530): Ceres Seq. ID no. 15169645
MQGGNHMLLEEPVRLASVLAPAKPKVFPSLTKIVGTLGPNSHSVEVIEECLTAGMSVARFDFSWKDATYHQETLDNLRKAAQNVKKLCPIMLDTVGPEIQVHNSTGGAIELIGGNHVTITPDLSKAPSADILPIKFGDLAKVVKKGDTLFIGQYLFTGSETTSLWLEVTETSGAEVICYVKNTATLSGPIFTLHVSQVHISMPTLSEYDKQVISTWGLQNSVDIISLSHTRSSEDVRELRAFLKSHDLQDTQIYAKVENAEGLEHFDEILQEADGIIISRGDLGIDLPPERVFMSQKTGIHKCNMAGKPVIITRVVDSMIDNLRPTRAEATDVANAVLDGTDGILLGAETLRGQYPVDAVRTVGRICAEAETVYNQSLHFKKVVRHVGEPMVHEESVASSAVRSAMKVKAAAIVVFTFSGRAARLIAKYRAPMPVLAVVFPREGSDPSKWRSYGTTQARQCFSVRGVYPLMGSTDDAETGGLTKEEYGIKLALNYGRSVGIIKPYDRVIIFEKIGDSSVVKIIECDDSER

SEQ ID NO: 64829 - protein, 524 aa, Triticum aestivum
  peptide (1)..(524): Ceres Seq. ID no. 15169646
MLLEEPVRLASVLAPAKPKVFPSLTKIVGTLGPNSHSVEVIEECLTAGMSVARFDFSWKDATYHQETLDNLRKAAQNVKKLCPIMLDTVGPEIQVHNSTGGAIELIGGNHVTITPDLSKAPSADILPIKFGDLAKVVKKGDTLFIGQYLFTGSETTSLWLEVTETSGAEVICYVKNTATLSGPIFTLHVSQVHISMPTLSEYDKQVISTWGLQNSVDIISLSHTRSSEDVRELRAFLKSHDLQDTQIYAKVENAEGLEHFDEILQEADGIIISRGDLGIDLPPERVFMSQKTGIHKCNMAGKPVIITRVVDSMIDNLRPTRAEATDVANAVLDGTDGILLGAETLRGQYPVDAVRTVGRICAEAETVYNQSLHFKKVVRHVGEPMVHEESVASSAVRSAMKVKAAAIVVFTFSGRAARLIAKYRAPMPVLAVVFPREGSDPSKWRSYGTTQARQCFSVRGVYPLMGSTDDAETGGLTKEEYGIKLALNYGRSVGIIKPYDRVIIFEKIGDSSVVKIIECDDSER

SEQ ID NO: 64830 - DNA, 900 bp, Triticum aestivum
  misc_feature (1)..(900): Ceres Seq. ID no. 13584899
ccctggcaagcttatcggcaatggcggaaccggtgaagctcatcggcgccttcggcagcccgttcgtccaccgcgccgaggtggccctgcgcctcaagggcgtcccattcgagctcatccttgaagacctcaacaacaagagtgagctgctgctgaagcacaaccccatccacaagacggtgccggtgctcctccatggtgaccggccggccgtcttagagtccctcctcatcgtcgagtatgtggatgaggctttcgacggcccgccgctcctccccgtcgacccctacgggagggccatggctcgcttctgggcccaattcatcgagcaaaagtgctcgaggccgttctggatggcggtgtggttggacgacggggaggcgcgggaggggttcgtgagggacaccaaggagaatctggcgctgctggatgcgcggctgcaggggaagcggttcttcgccggcgacgccgttgggtacctggacctggcggcctgcgggctggcgcacctgctgggcgtgatcgaggaggtggccggggcgagcattgttggcgcgggcgagttccccgcactgcgccggtgggcggaggactacacctccgacgcgaccgtcgccgcgtgcctaccgcggagggagcagctcgccgcacacttcgccgggaagaaggaccgaatcaagctcgccgtcagcgcgatggtggggcgggcgtagttgtcagtttggggcatcgatcaacacagcaggcgtcggcaaaatattcagattacgtactgtattatgatttgtgatttgtctgttatgtgtgtgttccctatggtgcgtatactaaaataaaattcatattagtatttgttgcaacgaaatttatgtcaaattatagtcaaaagtacggaattgc

SEQ ID NO: 64831 - protein, 236 aa, Triticum aestivum
  peptide (1)..(236): Ceres Seq. ID no. 13584900
LASLSAMAEPVKLIGAFGSPFVHRAEVALRLKGVPFELILEDLNNKSELLLKHNPIHKTVPVLLHGDRPAVLESLLIVEYVDEAFDGPPLLPVDPYGRAMARFWAQFIEQKCSRPFWMAVWLDDGEAREGFVRDTKENLALLDARLQGKRFFAGDAVGYLDLAACGLAHLLGVIEEVAGASIVGAGEFPALRRWAEDYTSDATVAACLPRREQLAAHFAGKKDRIKLAVSAMVGRA

SEQ ID NO: 64832 - protein, 230 aa, Triticum aestivum
  peptide (1)..(230): Ceres Seq. ID no. 13584901
MAEPVKLIGAFGSPFVHRAEVALRLKGVPFELILEDLNNKSELLLKHNPIHKTVPVLLHGDRPAVLESLLIVEYVDEAFDGPPLLPVDPYGRAMARFWAQFIEQKCSRPFWMAVWLDDGEAREGFVRDTKENLALLDARLQGKRFFAGDAVGYLDLAACGLAHLLGVIEEVAGASIVGAGEFPALRRWAEDYTSDATVAACLPRREQLAAHFAGKKDRIKLAVSAMVGRA

SEQ ID NO: 64833 - protein, 137 aa, Triticum aestivum
  peptide (1)..(137): Ceres Seq. ID no. 13584902
MARFWAQFIEQKCSRPFWMAVWLDDGEAREGFVRDTKENLALLDARLQGKRFFAGDAVGYLDLAACGLAHLLGVIEEVAGASIVGAGEFPALRRWAEDYTSDATVAACLPRREQLAAHFAGKKDRIKLAVSAMVGRA

SEQ ID NO: 64834 - DNA, 1890 bp, Triticum aestivum
  misc_feature (1)..(1890): Ceres Seq. ID no. 13503498
cctaatcgaaaaccacgagcggaggcacgtgagcgctgcgcgaagaggaggactcgcagccgcctccaccctcctctgctgatccaatcaggtcaacgcgtgcgccccctccctcctctgctgcggctgctgcggcttagatctccctcttcaatctggagagataggaggattctgagaagcaaaccgagtgggactcctcgaatcaagtccgtgccttcatcagcaaaagaatccccgagtgcccaatccaatacagttcttcgcgtattcgaatcagattatgaagtccggcggtacacctgagaataatcggactgtcgccgaagctccgtatcttcctcctccggcattgggtctttttaagtcgtccaagattgattttgcctatatggaggcctgtagcctagcctggacaatgagcttatggagtctagctatacacccagcatatctgtgctcgctagttctcagagctttgcctaggctgctacgcctcactccaagttcactgaagaaattctgcaagcatcctccactgatcaagactatggagggcgcatcgcctgagctgcctcaggacatcttgatgagcatcttggccaccctcgagatccctgacctcatccgtgccgggtcggtctgctcctcatggcgctccacgtacttgaggctgcgcagccttgggcactacacgcgcccccagacgccgtgcctcctctacacatctgaatctgctggcgagagcgttgcttgcctctacagcctcgcggagaagcggacgtacaagctgactcttccagggccgcctatcagaaataggcatctgattgggtcctcgcaaggcttgcttgttacagttgatgacagatctgagatgcaccttgtcaatcccatcactggtgaacagattgatctcccttcggtgatcaccatcgagcatgtgaaacccagctataatgactccggtgctcttcaccagtacgagtactcatgccacaccgcaaaaagggtttacggtccgccatcgatcttggctcttggagagctgaggaacaagctccactataaagcttttgtgttttctgatgcatgcaatggatacattgtggcgctcatacacaatccagccagtcagctctcggttgcaagggcaggggatgatagttggatatggctgccaccatacaccaactatgacgattgcatttacaagaacggcctgctgtacgcagtcacttcatatggacaaattcacgcttttgacctaagtagccctgttgtcacgatgaagatgattacacgggagccagagcctgatgaccggtttctgaatacttacattgtacaagctccatggggcaatcttcttcaggtgtggagattatatgagcactgtgatttagaacccgagcctggggcatctgtgttttggagcactggaaaattcaaaatatatgaagtcgatgcttcttcaggagagaaaattaagaaaaccagttgcttgcgcgaccatgtgttgtttcttgggcacaatcaatcactttgtcttgctgctcaagactatccggctctcaagggaaaccatgcctactttaccgatgacagtgtgctttggacaaggggattcaagaacagtccccgtgatatgggaattctcgacttgggtaataacagcagggaggaacttgtgtcttcccagctttgctccaactgcccagctccggtgtggattacacccaatcttagaaagatgaacttggcattcaatgaataggttttagcttcctttatctataattatatgtaataattatttagtttggtaggcggtggtcctgtgttgatgaaccctgtactcgtacacttgaaccactttttaagaagttc

SEQ ID NO: 64835 - protein, 497 aa, Triticum aestivum
  peptide (1)..(497): Ceres Seq. ID no. 15223233
MKSGGTPENNRTVAEAPYLPPPALGLFKSSKIDFAYMEACSLAWTMSLWSLAIHPAYLCSLVLRALPRLLRLTPSSLKKFCKHPPLIKTMEGASPELPQDILMSILATLEIPDLIRAGSVCSSWRSTYLRLRSLGHYTRPQTPCLLYTSESAGESVACLYSLAEKRTYKLTLPGPPIRNRHLIGSSQGLLVTVDDRSEMHLVNPITGEQIDLPSVITIEHVKPSYNDSGALHQYEYSCHTAKRVYGPPSILALGELRNKLHYKAFVFSDACNGYIVALIHNPASQLSVARAGDDSWIWLPPYTNYDDCIYKNGLLYAVTSYGQIHAFDLSSPVVTMKMITREPEPDDRFLNTYIVQAPWGNLLQVWRLYEHCDLEPEPGASVFWSTGKFKIYEVDASSGEKIKKTSCLRDHVLFLGHNQSLCLAAQDYPALKGNHAYFTDDSVLWTRGFKNSPRDMGILDLGNNSREELVSSQLCSNCPAPVWITPNLRKMNLAFNE

SEQ ID NO: 64836 - protein, 461 aa, Triticum aestivum
  peptide (1)..(461): Ceres Seq. ID no. 15223234
MEACSLAWTMSLWSLAIHPAYLCSLVLRALPRLLRLTPSSLKKFCKHPPLIKTMEGASPELPQDILMSILATLEIPDLIRAGSVCSSWRSTYLRLRSLGHYTRPQTPCLLYTSESAGESVACLYSLAEKRTYKLTLPGPPIRNRHLIGSSQGLLVTVDDRSEMHLVNPITGEQIDLPSVITIEHVKPSYNDSGALHQYEYSCHTAKRVYGPPSILALGELRNKLHYKAFVFSDACNGYIVALIHNPASQLSVARAGDDSWIWLPPYTNYDDCIYKNGLLYAVTSYGQIHAFDLSSPVVTMKMITREPEPDDRFLNTYIVQAPWGNLLQVWRLYEHCDLEPEPGASVFWSTGKFKIYEVDASSGEKIKKTSCLRDHVLFLGHNQSLCLAAQDYPALKGNHAYFTDDSVLWTRGFKNSPRDMGILDLGNNSREELVSSQLCSNCPAPVWITPNLRKMNLAFNE

SEQ ID NO: 64837 - protein, 452 aa, Triticum aestivum
  peptide (1)..(452): Ceres Seq. ID no. 15223235
MSLWSLAIHPAYLCSLVLRALPRLLRLTPSSLKKFCKHPPLIKTMEGASPELPQDILMSILATLEIPDLIRAGSVCSSWRSTYLRLRSLGHYTRPQTPCLLYTSESAGESVACLYSLAEKRTYKLTLPGPPIRNRHLIGSSQGLLVTVDDRSEMHLVNPITGEQIDLPSVITIEHVKPSYNDSGALHQYEYSCHTAKRVYGPPSILALGELRNKLHYKAFVFSDACNGYIVALIHNPASQLSVARAGDDSWIWLPPYTNYDDCIYKNGLLYAVTSYGQIHAFDLSSPVVTMKMITREPEPDDRFLNTYIVQAPWGNLLQVWRLYEHCDLEPEPGASVFWSTGKFKIYEVDASSGEKIKKTSCLRDHVLFLGHNQSLCLAAQDYPALKGNHAYFTDDSVLWTRGFKNSPRDMGILDLGNNSREELVSSQLCSNCPAPVWITPNLRKMNLAFNE

SEQ ID NO: 64838 - DNA, 1574 bp, Triticum aestivum
  misc_feature (1)..(1574): Ceres Seq. ID no. 12618349
ccctactccctactctctcctactccttccccttcctactccactgacggacgggactcggccttcttcttgccttcctctcccccctcccccctcccgccgccgccttcctccgccggggctggttcagctactaactgcggccgggggaaggagaaaggccgcgtctttcccggccacctttcggctcgcccccagcccacgcgggagccggattgggatggagtcggcggccggcggcgggctgggcagcatgcgcgcggtgctcgccatcctccagtggtggggcttcaacgtcaccgtcatcatcatcaacaaatggatcttccagaagctggatttcaagttccccctgacggtgtcctgcgtccacttcatatgctcttccatcggggcatacgtcgcgatccacgtgctcaaggcgaagccgctgattcaggtcgagcccgaggaccgctggaagaggatcttccccatgtccttcgtgttctgcatgaacatcgtgctcgggaacgtcagcctgcgctacatcccggtctccttcatgcagactatcaaatcgttcacccctgcaaccacagttattctgcagtggttggtttggagcaagcacttcgagtggcgcatatgggcttcgctggtcccgatagtcggggggatcctcctaacctcaatgacagagctcagcttcaacatttttggtttctgtgctgccatgattggctgcctcgccacgtctaccaagaccatcttggcagagtccctgctccatggatacaaatttgacagcattaacacagtgtactacatggcaccctttgccaccatgatactggctctaccagcaatgttgcttgaaggaggtggcgtaatcgactggttctacacgcacgactctgtcttttcttcgctgattatcatcctaggctcaggggtgcttgcgttttgcctcaacttctccatcttctacgtgatccattcaaccaccgctgtgaccttcaatgttgctggcaaccttaaagttgctgtcgccgtgttggtctcgtggttgatcttccggaacccaatctcccccatgaatgcaattggatgcgcaatcacgctcgtcggctgtactttctatgggtatgtgaggcatctcatctcccaacagcaggctgctgcgcccctagggagccaaggaacgaactcgccgagaagtcgggtggagatgctcccccttgtaggcgacaaggaagataaggtctagcaaggcaatactcccatattcaagagccgttcatttcagcggttgacggtacattacagtttggcacacagatgctgagttgagggaggccagtaaattggtaggggggcaacacttttttgtgaagctacattatgttgtactcgggcaaactgcgagggtttgttcagttactagttctcatagggttactagttatctacttaatcaaatccccccggacaattcgtgcgattaggatggtgcttctgttttcttgttttgctgccatatgtttagaccttaaactgctggtatgaaaattaatggcattatgatacgagcc

SEQ ID NO: 64839 - protein, 415 aa, Triticum aestivum
  peptide (1)..(415): Ceres Seq. ID no. 12618350
PTPYSLLLLPLPTPLTDGTRPSSCLPLPPPPSRRRLPPPGLVQLLTAAGGRRKAASFPATFRLAPSPRGSRIGMESAAGGGLGSMRAVLAILQWWGFNVTVIIINKWIFQKLDFKFPLTVSCVHFICSSIGAYVAIHVLKAKPLIQVEPEDRWKRIFPMSFVFCMNIVLGNVSLRYIPVSFMQTIKSFTPATTVILQWLVWSKHFEWRIWASLVPIVGGILLTSMTELSFNIFGFCAAMIGCLATSTKTILAESLLHGYKFDSINTVYYMAPFATMILALPAMLLEGGGVIDWFYTHDSVFSSLIIILGSGVLAFCLNFSIFYVIHSTTAVTFNVAGNLKVAVAVLVSWLIFRNPISPMNAIGCAITLVGCTFYGYVRHLISQQQAAAPLGSQGTNSPRSRVEMLPLVGDKEDKV

SEQ ID NO: 64840 - protein, 342 aa, Triticum aestivum
  peptide (1)..(342): Ceres Seq. ID no. 12618351
MESAAGGGLGSMRAVLAILQWWGFNVTVIIINKWIFQKLDFKFPLTVSCVHFICSSIGAYVAIHVLKAKPLIQVEPEDRWKRIFPMSFVFCMNIVLGNVSLRYIPVSFMQTIKSFTPATTVILQWLVWSKHFEWRIWASLVPIVGGILLTSMTELSFNIFGFCAAMIGCLATSTKTILAESLLHGYKFDSINTVYYMAPFATMILALPAMLLEGGGVIDWFYTHDSVFSSLIIILGSGVLAFCLNFSIFYVIHSTTAVTFNVAGNLKVAVAVLVSWLIFRNPISPMNAIGCAITLVGCTFYGYVRHLISQQQAAAPLGSQGTNSPRSRVEMLPLVGDKEDKV

SEQ ID NO: 64841 - protein, 331 aa, Triticum aestivum
  peptide (1)..(331): Ceres Seq. ID no. 12618352
MRAVLAILQWWGFNVTVIIINKWIFQKLDFKFPLTVSCVHFICSSIGAYVAIHVLKAKPLIQVEPEDRWKRIFPMSFVFCMNIVLGNVSLRYIPVSFMQTIKSFTPATTVILQWLVWSKHFEWRIWASLVPIVGGILLTSMTELSFNIFGFCAAMIGCLATSTKTILAESLLHGYKFDSINTVYYMAPFATMILALPAMLLEGGGVIDWFYTHDSVFSSLIIILGSGVLAFCLNFSIFYVIHSTTAVTFNVAGNLKVAVAVLVSWLIFRNPISPMNAIGCAITLVGCTFYGYVRHLISQQQAAAPLGSQGTNSPRSRVEMLPLVGDKEDKV

SEQ ID NO: 64842 - DNA, 1236 bp, Triticum aestivum
  misc_feature (1)..(1236): Ceres Seq. ID no. 13597324
gcttgttctatagcttggccgctcgggaggtcaagccgcccgccctcccgtaaaccctatcttctcctgttccccttcgtccccggccggcgacgacgccgcgcgcgcagcgaacccagcccctcctccggttgcagtaagcaaggaaggatgagtaggcgctggagccggaccatttacgttgggaacctcccaggggatatcagggagcgggaggtggaggatctgttctacaagtatggacggatagttgaaattgacttgaaggtccccccaaggccacctggctttgcttttgttgagtttgaagatccccgtgatgctgaagatgcgattcatggtcgagatggttacaactttgatgggaatcgtctgcgggttgaacttgcacatggcgggagggccaactcttcatcccttccgaacagctatggtggcggaggacgccgtggtggtgtctctaggcatacagagtatcgtgttctggttactggactaccttcttctgcatcatgtcaagatctaaaggatcatatgagaaaggctggtgatgtttgtttctctgaggtgtatcgtggagggtggtggtactattggrattgttgattatannaactatgatgatatgaagtatgctataaggaagcttgatgatactgaatttaaaaatgccttctctcgagcgcctataagggtaaaggagtatgctggaaaaagcagccgctcctattcacgcagccgtagcagaagccgaagtggcagctacagcaggagtccaagtccaaagaaaaaaccatcacgtcgttcagcgtcaagatctcggtcgagatcagtttcttcccattcaaggtcaccgtcaaaggaacgctctccatcaagatcaccagcaaaatcccaatcccctgtcgccgcatctcccgtcgtcaatggtgaagcagcaagccccaagagggacccaagcaagagcccatcacgttcccggtctcctgatgccaaatcagagtaaaactgatgcgaggttaggggcggtgagaggcggagccatgggcttcaaattcttcatattttgtcttcgccgacttctgcatccgctgttatagtactatctgtgttcggttattctaggttccttgatgtttctgtaaaacttgtttggatggatttttgagatttatgtactctcttcattgtcagcatttttacttggattattatctatgcatggtcgttggttcg

SEQ ID NO: 64843 - protein, 201 aa, Triticum aestivum
  peptide (1)..(201): Ceres Seq. ID no. 15222073
  misc_feature (200)..(200): Xaa is any aa, unknown or other
ACSIAWPLGRSSRPPSRKPYLLLFPFVPGRRRRRARSEPSPSSGCSKQGRMSRRWSRTIYVGNLPGDIREREVEDLFYKYGRIVEIDLKVPPRPPGFAFVEFEDPRDAEDAIHGRDGYNFDGNRLRVELAHGGRANSSSLPNSYGGGGRRGGVSRHTEYRVLVTGLPSSASCQDLKDHMRKAGDVCFSEVYRGGWWYYWXC

SEQ ID NO: 64844 - protein, 151 aa, Triticum aestivum
  peptide (1)..(151): Ceres Seq. ID no. 15222074
  misc_feature (16)..(16): Xaa is any aa, unknown or other
  misc_feature (21)..(21): Xaa is any aa, unknown or other
MFVSLRCIVEGGGTIXIVDYXNYDDMKYAIRKLDDTEFKNAFSRAPIRVKEYAGKSSRSYSRSRSRSRSGSYSRSPSPKKKPSRRSASRSRSRSVSSHSRSPSKERSPSRSPAKSQSPVAASPVVNGEAASPKRDPSKSPSRSRSPDAKSE

SEQ ID NO: 64845 - protein, 151 aa, Triticum aestivum
  peptide (1)..(151): Ceres Seq. ID no. 15222075
  misc_feature (150)..(150): Xaa is any aa, unknown or other
MSRRWSRTIYVGNLPGDIREREVEDLFYKYGRIVEIDLKVPPRPPGFAFVEFEDPRDAEDAIHGRDGYNFDGNRLRVELAHGGRANSSSLPNSYGGGGRRGGVSRHTEYRVLVTGLPSSASCQDLKDHMRKAGDVCFSEVYRGGWWYYWXC

SEQ ID NO: 64846 - DNA, 1103 bp, Triticum aestivum
  misc_feature (1)..(1103): Ceres Seq. ID no. 15173069
cagctatttctgctccttccaatgcagcattatctctggtgatcagagacaaaagtagtggagattctggttctgtgaaacagactcgttttaccgagatggtagctgtgcagatttacagagtagcctttcttattatgaaattcctctgcagtcaagccaaagaggcagtaaaaagggcaggagaattagaatttgtcgatcttgcacattttcctgaacttcccatgccagatattcttcatggtctgcaggatcaagtggtttctatcgttacggaagtactgggggcaaatggatcgagcgccctcagcggggagaccgatagggtatgccgtcttctgttggtgacccttgaggcatcgctctacatggaactgtgtgtgtcccagtcatgcagcatcaggccagtgctgggccggttcgaagatttctccaagggaattaaggcgatgcttcacgctttggagaaacattccagtttgaaaccattggttaggtcactcgctcagattacgacactgctgtatcctgggcttgctcaaagcaacttcctcaccatgtaatcagtgtgtagattgcatctctgcggctggttaagtcttttgctatggttcatacttcatagatggaaacaggttcagtaaaatcgacccgtttacagtggagccctgagtttaatctgctgctatggttatgagtgaatctacactttaaactatgtctatatacatccgtatgtagtccatatcgaaatctctaaaaagacttatactccctccgttctaaattactcgtcgcagaaatggatgtatctagaactaaaatacatctagatatattcatacctgcgacaagtaattcggaacggagggggtatttaggaatggagggagtagatgaaatcgtttagtcagctaacatgtcacataacgttcatgcatgtatttttctgtatgcttgcatgcatgtatgtacagtaggaaaactatcaagagtttccacccgttctgagcgacatgtcagtggtggaatggcaccctgctatacgtacggtgaatatggtgaatgcgtattattgtctgctagttatggtctgaatc

SEQ ID NO: 64847 - protein, 187 aa, Triticum aestivum
  peptide (1)..(187): Ceres Seq. ID no. 15173070
AISAPSNAALSLVIRDKSSGDSGSVKQTRFTEMVAVQIYRVAFLIMKFLCSQAKEAVKRAGELEFVDLAHFPELPMPDILHGLQDQVVSIVTEVLGANGSSALSGETDRVCRLLLVTLEASLYMELCVSQSCSIRPVLGRFEDFSKGIKAMLHALEKHSSLKPLVRSLAQITTLLYPGLAQSNFLTM

SEQ ID NO: 64848 - protein, 155 aa, Triticum aestivum
  peptide (1)..(155): Ceres Seq. ID no. 15173071
MVAVQIYRVAFLIMKFLCSQAKEAVKRAGELEFVDLAHFPELPMPDILHGLQDQVVSIVTEVLGANGSSALSGETDRVCRLLLVTLEASLYMELCVSQSCSIRPVLGRFEDFSKGIKAMLHALEKHSSLKPLVRSLAQITTLLYPGLAQSNFLTM

SEQ ID NO: 64849 - protein, 142 aa, Triticum aestivum
  peptide (1)..(142): Ceres Seq. ID no. 15173072
MKFLCSQAKEAVKRAGELEFVDLAHFPELPMPDILHGLQDQVVSIVTEVLGANGSSALSGETDRVCRLLLVTLEASLYMELCVSQSCSIRPVLGRFEDFSKGIKAMLHALEKHSSLKPLVRSLAQITTLLYPGLAQSNFLTM

SEQ ID NO: 64850 - DNA, 1748 bp, Triticum aestivum
  misc_feature (1)..(1748): Ceres Seq. ID no. 13597843
aatttcgtttcccattttgtacgcagctaataattctcgagcagcgttgcctgcacgcccagcctgtggtaaaaaacaagacccgccgtgtcacccgctcaaaagcttcctcgaccgcgggcataatccatccgagactcctagccgatcgtgcaccaaccagatgacgaccccgaccgtcgtgctgctgccggtctgggccgccggccacctcatgtccatgctcgacgccggcaagcggctgctcgcgcgcagcggcggcgcgctgtcgctcacggtgctcgtcatgccggcgccgggggagaaccacaggtgcgaggtcgccgcccacatacagagggaggaggcgtccggcctggacatccgcttccaccacctccccgccgtcgagcccccgacggactgcctgggcatcgaggagttcgtctcccggttcgtgcagctccacgcggcccacgtgaaggcggccgtctccggcctggcgtgccccgtggccgcgctcgtcctcgacttcttctgcacgaccatgctcgacgtgtcccgggagctcgccgtaccggcctacgtgtacatcaccgccgacgccgccttctgcgcgctcctcctgcgcctgccggcgctccacgaggaggtggccgtcgagttcgaggagatggagggcatggtgggcgtgcctggcctgccgccggtgccgccgtcgtccctcccggttccggtgatggacaagaagaaccccaactacacgtggttcatgtaccacggcaggcgtttcacggaggccaagggcgtcatcatcaacacggtcaccgagctggagcagagcgttcttgcagccatcggcgacggctggtgcgcgcccggatttcctgccccggcggtctatccagtaggccccgtgctctccgtgaccccgccagcggagcagccgcacgaatgcgtgcggtggctggacgcgcagcctccggcgtccgtggtgctcctctgcttcggcagcatggggttctccacggcggcacaggcgcacgagatagcccacgggctggagcgcagcgggcaccgcttcctgtgggctctgcgcggcccgccggctgccggcgcgggaccaggacagccctcggacgcggacctcggggagctgctcccggaggggttcctggagaggacgaaggagaagggcctggtgtggccgacgaaggccccgcagaaggagatcctggcgcacgccgccgtggggggcttcgtgacgcacggcgggtggaactcgaccctggagagcctgtggttcggcgtgccgatggtgccgtggccgctgtacgcggagcagcacctcaacgcgttcacgctggtggcctacatgggcgtggccgtggccatggaggtggaccggaagaggaacaactttgtcgccgcgtcggagctggagcgggccgtgaaggcgctcatggagcgcgactccgaggaggggaagagggcgagggagaaggccgcggagatgaaggccgcgtgccggaaggccgtcgaggagggcgggtcctcctactctgccctcgggaggctctctgaggcgataatcaaaggcgccagtaagtaattgacgaacatccggagacgaacttggagagtgtgggtgctctgtggttgcagttcttgttctgcctgccgatcattccgagttgtgtgccggcatcgcgagcaatccacctccggtagagagccttaataaaaccacatgctcctcgtttggtctc

SEQ ID NO: 64851 - protein, 529 aa, Triticum aestivum
  peptide (1)..(529): Ceres Seq. ID no. 13597844
ISFPILYAANNSRAALPARPACGKKQDPPCHPLKSFLDRGHNPSETPSRSCTNQMTTPTVVLLPVWAAGHLMSMLDAGKRLLARSGGALSLTVLVMPAPGENHRCEVAAHIQREEASGLDIRFHHLPAVEPPTDCLGIEEFVSRFVQLHAAHVKAAVSGLACPVAALVLDFFCTTMLDVSRELAVPAYVYITADAAFCALLLRLPALHEEVAVEFEEMEGMVGVPGLPPVPPSSLPVPVMDKKNPNYTWFMYHGRRFTEAKGVIINTVTELEQSVLAAIGDGWCAPGFPAPAVYPVGPVLSVTPPAEQPHECVRWLDAQPPASVVLLCFGSMGFSTAAQAHEIAHGLERSGHRFLWALRGPPAAGAGPGQPSDADLGELLPEGFLERTKEKGLVWPTKAPQKEILAHAAVGGFVTHGGWNSTLESLWFGVPMVPWPLYAEQHLNAFTLVAYMGVAVAMEVDRKRNNFVAASELERAVKALMERDSEEGKRAREKAAEMKAACRKAVEEGGSSYSALGRLSEAIIKGASK

SEQ ID NO: 64852 - protein, 475 aa, Triticum aestivum
  peptide (1)..(475): Ceres Seq. ID no. 13597845
MTTPTVVLLPVWAAGHLMSMLDAGKRLLARSGGALSLTVLVMPAPGENHRCEVAAHIQREEASGLDIRFHHLPAVEPPTDCLGIEEFVSRFVQLHAAHVKAAVSGLACPVAALVLDFFCTTMLDVSRELAVPAYVYITADAAFCALLLRLPALHEEVAVEFEEMEGMVGVPGLPPVPPSSLPVPVMDKKNPNYTWFMYHGRRFTEAKGVIINTVTELEQSVLAAIGDGWCAPGFPAPAVYPVGPVLSVTPPAEQPHECVRWLDAQPPASVVLLCFGSMGFSTAAQAHEIAHGLERSGHRFLWALRGPPAAGAGPGQPSDADLGELLPEGFLERTKEKGLVWPTKAPQKEILAHAAVGGFVTHGGWNSTLESLWFGVPMVPWPLYAEQHLNAFTLVAYMGVAVAMEVDRKRNNFVAASELERAVKALMERDSEEGKRAREKAAEMKAACRKAVEEGGSSYSALGRLSEAIIKGASK

SEQ ID NO: 64853 - protein, 458 aa, Triticum aestivum
  peptide (1)..(458): Ceres Seq. ID no. 13597846
MSMLDAGKRLLARSGGALSLTVLVMPAPGENHRCEVAAHIQREEASGLDIRFHHLPAVEPPTDCLGIEEFVSRFVQLHAAHVKAAVSGLACPVAALVLDFFCTTMLDVSRELAVPAYVYITADAAFCALLLRLPALHEEVAVEFEEMEGMVGVPGLPPVPPSSLPVPVMDKKNPNYTWFMYHGRRFTEAKGVIINTVTELEQSVLAAIGDGWCAPGFPAPAVYPVGPVLSVTPPAEQPHECVRWLDAQPPASVVLLCFGSMGFSTAAQAHEIAHGLERSGHRFLWALRGPPAAGAGPGQPSDADLGELLPEGFLERTKEKGLVWPTKAPQKEILAHAAVGGFVTHGGWNSTLESLWFGVPMVPWPLYAEQHLNAFTLVAYMGVAVAMEVDRKRNNFVAASELERAVKALMERDSEEGKRAREKAAEMKAACRKAVEEGGSSYSALGRLSEAIIKGASK

SEQ ID NO: 64854 - DNA, 1079 bp, Triticum aestivum
  misc_feature (1)..(1079): Ceres Seq. ID no. 12587737
aaggacgattctgctcgcgccgccggttccccgatggcggaggactcaggcgccatcctccgccacatctcctccctcaaggacatgcttgacaaggtcaatgaagaaattgaacagaatatacaaaggaccagggaaagagagtcagaaatagtgaagcattctgaaactgaaaaggactatctcgtgaaggaatctgagctaatgaaaggagtatcggttgctgagtttgaacttgatgggcttatgcaagtggaagctgctggaacagattcacttaaagcgatggagggcaatttggaattccggaaagctactctgaatgcaattacgaaactattctacgataaaatggaaaggttcatcgctgaatctaaagacttccaagttaacatgcttggaggttcaattgaggatttacctctcctactaaaggaaagagattcactagagaatgagagtgagaacttgaggatgaagatcaacgccatacaaagttcatcaaaggaatacattgctgagattcttgaggaggtaaatgtggaaaattcagttctggagtctgatgtacagtataggatttcggaatacatggaaattctcaaggatataaacaacctgaagattctatttagttcgagcaattcttaagaagggtcttcattgttgcaggctcatgacccatcaaagttgccacatgtttcttgtgtcttcagtatgccattttggtttggctgtcaagaatcttcagcaagctcaatggaagtaccttgtacatgtttcttctgtcgagaaggttacaccagatctagcacgaatttactgcactaccaaacatgtattggtcctggattgtatatacagttcagttaacctctgtactttagatttcaagctgagggatagtaggaaaaggcaaagtgcctaggaatgcagattggaaaaacagcagtgtcttttgtgggcaattgttgtttttcaaatctgatcgaggagatgtgagaacgtcagatattgcgagaaattgttagtaatggaatagttggttcatcttaagggaatgtaccagtgaagaaagg

SEQ ID NO: 64855 - protein, 216 aa, Triticum aestivum
  peptide (1)..(216): Ceres Seq. ID no. 12587738
KDDSARAAGSPMAEDSGAILRHISSLKDMLDKVNEEIEQNIQRTRERESEIVKHSETEKDYLVKESELMKGVSVAEFELDGLMQVEAAGTDSLKAMEGNLEFRKATLNAITKLFYDKMERFIAESKDFQVNMLGGSIEDLPLLLKERDSLENESENLRMKINAIQSSSKEYIAEILEEVNVENSVLESDVQYRISEYMEILKDINNLKILFSSSNS

SEQ ID NO: 64856 - protein, 205 aa, Triticum aestivum
  peptide (1)..(205): Ceres Seq. ID no. 12587739
MAEDSGAILRHISSLKDMLDKVNEEIEQNIQRTRERESEIVKHSETEKDYLVKESELMKGVSVAEFELDGLMQVEAAGTDSLKAMEGNLEFRKATLNAITKLFYDKMERFIAESKDFQVNMLGGSIEDLPLLLKERDSLENESENLRMKINAIQSSSKEYIAEILEEVNVENSVLESDVQYRISEYMEILKDINNLKILFSSSNS

SEQ ID NO: 64857 - protein, 188 aa, Triticum aestivum
  peptide (1)..(188): Ceres Seq. ID no. 12587740
MLDKVNEEIEQNIQRTRERESEIVKHSETEKDYLVKESELMKGVSVAEFELDGLMQVEAAGTDSLKAMEGNLEFRKATLNAITKLFYDKMERFIAESKDFQVNMLGGSIEDLPLLLKERDSLENESENLRMKINAIQSSSKEYIAEILEEVNVENSVLESDVQYRISEYMEILKDINNLKILFSSSNS

SEQ ID NO: 64858 - DNA, 1274 bp, Triticum aestivum
  misc_feature (1)..(1274): Ceres Seq. ID no. 13597847
accgttcccgacctcattttttacagagactccggcgactccagtccatcgctcgtggaaaatctcagggtcaaagcaggaggcacaccttgatggcgcccctggagtcaggctcctcacagctcttcttcgacagcagtgcgatcgacggcccgttcgatgtctacgagtgcggtaccttggcaggcaccagagtcgtgccagatccacctccacctggaacctcttatggcaagcagagaagttccaggaatgctaaaaaggctcgtcgtgttcatggctctgaggaggtcgaggactgctggaacaggctattcttggaaggatatcaagccgatgtccgcgtatcgacgggcgatggcagccagatcttatcgcattcgtgcattcttggcatcagatctccggttctgagaagtatgttggaagaagctagaattgaacatggtttcagaaacatcctgatttccggtgtcccatcagaagtagtccgtgtcttcatcagatttctgtattcttcacgctttgagcagggtgagatgaagaagtatgcccttcatttgctcgtactctctcatgttttctcggtacaatcgctgaagatcgtctgcaccgaccagctcgagaggttttttcttgctcctgataacgtggtggacgttctacaactggctagactctgtgacgcaccaaggctctcgctcatctgtacccgtatgatcgttggagatttcaagaccatctctctgtcagaagggtggaaagtgatgagacgggccaacccaagcctggagcaagagcttcttgagtttcttgttgaagtggacacaagaaggcaagaaagagctaaaaggatggaggaaaagaaggtttatcttcagttgtatgaagctatggaagctcttgttcatatatgccgagacggttgtaggacgattggcccctgggatcagaaactcaagggcagtcaggttgtttgcaagtttcctgcctgcaagggcatcgagttgctcgtgcgccatttctcggcatgcaaaaaacgtgtgcctcgcggctgcgccaactgcaagcgcatgtggcagcttcttgagctgcattctcgaatgtgttccacaccagacacctgcagggttcctctatgcaggtgaggtcttgtctttgttggtcaggatcatttcatttagacacacaagttttctaggttaatacaacagatgtttgctttcataaaaaaaaaaaaaaaaaagcttatcgataccgtcgacctcgagggg

SEQ ID NO: 64859 - protein, 381 aa, Triticum aestivum
  peptide (1)..(381): Ceres Seq. ID no. 13597848
RSRPHFLQRLRRLQSIARGKSQGQSRRHTLMAPLESGSSQLFFDSSAIDGPFDVYECGTLAGTRVVPDPPPPGTSYGKQRSSRNAKKARRVHGSEEVEDCWNRLFLEGYQADVRVSTGDGSQILSHSCILGIRSPVLRSMLEEARIEHGFRNILISGVPSEVVRVFIRFLYSSRFEQGEMKKYALHLLVLSHVFSVQSLKIVCTDQLERFFLAPDNVVDVLQLARLCDAPRLSLICTRMIVGDFKTISLSEGWKVMRRANPSLEQELLEFLVEVDTRRQERAKRMEEKKVYLQLYEAMEALVHICRDGCRTIGPWDQKLKGSQVVCKFPACKGIELLVRHFSACKKRVPRGCANCKRMWQLLELHSRMCSTPDTCRVPLCR

SEQ ID NO: 64860 - protein, 351 aa, Triticum aestivum
  peptide (1)..(351): Ceres Seq. ID no. 13597849
MAPLESGSSQLFFDSSAIDGPFDVYECGTLAGTRVVPDPPPPGTSYGKQRSSRNAKKARRVHGSEEVEDCWNRLFLEGYQADVRVSTGDGSQILSHSCILGIRSPVLRSMLEEARIEHGFRNILISGVPSEVVRVFIRFLYSSRFEQGEMKKYALHLLVLSHVFSVQSLKIVCTDQLERFFLAPDNVVDVLQLARLCDAPRLSLICTRMIVGDFKTISLSEGWKVMRRANPSLEQELLEFLVEVDTRRQERAKRMEEKKVYLQLYEAMEALVHICRDGCRTIGPWDQKLKGSQVVCKFPACKGIELLVRHFSACKKRVPRGCANCKRMWQLLELHSRMCSTPDTCRVPLCR

SEQ ID NO: 64861 - protein, 242 aa, Triticum aestivum
  peptide (1)..(242): Ceres Seq. ID no. 13597850
MLEEARIEHGFRNILISGVPSEVVRVFIRFLYSSRFEQGEMKKYALHLLVLSHVFSVQSLKIVCTDQLERFFLAPDNVVDVLQLARLCDAPRLSLICTRMIVGDFKTISLSEGWKVMRRANPSLEQELLEFLVEVDTRRQERAKRMEEKKVYLQLYEAMEALVHICRDGCRTIGPWDQKLKGSQVVCKFPACKGIELLVRHFSACKKRVPRGCANCKRMWQLLELHSRMCSTPDTCRVPLCR

SEQ ID NO: 64862 - DNA, 1580 bp, Triticum aestivum
  misc_feature (1)..(1580): Ceres Seq. ID no. 15224517
gactttcgtgcaaacatccattcttcctctcagccttaagcgaaaaaaccctagcactggacgacctccaaaaccctagagccgtccccaatggcgagccacgaaaccgacccgtcccctgccgccccctccaagaagaagaagaggcactccaagaagcgcaaggccatcgaagtcactgtagatgcctcctttcctggcgccgccgcccccgtcgtcggctactttccgacgggctacgacccccttgcggccgcagagcccccacgtgcgcggttgttccgccacgagaagcaccataaccgcgtcgagctagtggtccgcgcccctggtggaggccccgacttcgtcggccggagctacgccggcgaggccgctgcgccgcagctctgcggctacgccctcggcgtcctcgacaaggccaccagcactctgaagattgtccccatcgcctccaacaagattttgaggctagagccacactttgaagtgcagcaaccggctcattcacaacagtcagcagcagaagcaggttcttctgtagcagatactgaattgaacagacaagatcttacccaggcttatgggaccaagaaagataaggataaggataataagtggaagtcactaaaagaacaaaggaatgacccttctgcttatttggaccttgatcttggagagtccaagaccactgcagatgccactgatagtcaggcatcaatggaagttcgcaacattccaccttatgatcctgctgcagatacatctgaaaaggcatatctttttgatgagatcattccaaaaaatatacggccacaccttcttgatattgtgggacactttgaatcgggagaatttggtttgaaaggctatgggagttttgtctcgaatcgtgtgaataagttgcaggaacttcagggtgaagatcaggaaaggcttgcttggatactatcctatatcacacatctcctgtccttgttggcgcgcaacagctccatgtccaagcagaaaagaaaagaaaaagaccagaccatccgtggaccaatgatcccacaggcggtgcaccgcaagctgttgctgatgttcacggagccagggtcttcttccttgtcgacagagaaacacgagcttctgatcaattacattttagtactcacactttttgctgatgacttcagatctgaacctacggatatatgtgcggacttgaaaatgaaccgccagatgcttaaaccatattatgaccagctgggatgcaagtccgtgtcaacaggtgcttttaaaccagtttttatgacacttccagcacccctcaagttcccacaacaagtcacaaggagaaggcggcgaaaataaccatcttagttattggtttccatttgatatggttgtgataggaaaggtatgcattgccaccgtcgaacctatgtgccctcagctcagtttcaccaatgtagtggagaaaatgatgaaggtggttgttctgtttttgttttctattgtcacttgggaattgctacgagaggaaccatattactgatatataatttgcttgctaccgaaatttgttttttgatgct

SEQ ID NO: 64863 - protein, 421 aa, Triticum aestivum
  peptide (1)..(421): Ceres Seq. ID no. 15224518
MASHETDPSPAAPSKKKKRHSKKRKAIEVTVDASFPGAAAPVVGYFPTGYDPLAAAEPPRARLFRHEKHHNRVELVVRAPGGGPDFVGRSYAGEAAAPQLCGYALGVLDKATSTLKIVPIASNKILRLEPHFEVQQPAHSQQSAAEAGSSVADTELNRQDLTQAYGTKKDKDKDNKWKSLKEQRNDPSAYLDLDLGESKTTADATDSQASMEVRNIPPYDPAADTSEKAYLFDEIIPKNIRPHLLDIVGHFESGEFGLKGYGSFVSNRVNKLQELQGEDQERLAWILSYITHLLSLLARNSSMSKQKRKEKDQTIRGPMIPQAVHRKLLLMFTEPGSSSLSTEKHELLINYILVLTLFADDFRSEPTDICADLKMNRQMLKPYYDQLGCKSVSTGAFKPVFMTLPAPLKFPQQVTRRRRRK

SEQ ID NO: 64864 - protein, 211 aa, Triticum aestivum
  peptide (1)..(211): Ceres Seq. ID no. 15224519
MEVRNIPPYDPAADTSEKAYLFDEIIPKNIRPHLLDIVGHFESGEFGLKGYGSFVSNRVNKLQELQGEDQERLAWILSYITHLLSLLARNSSMSKQKRKEKDQTIRGPMIPQAVHRKLLLMFTEPGSSSLSTEKHELLINYILVLTLFADDFRSEPTDICADLKMNRQMLKPYYDQLGCKSVSTGAFKPVFMTLPAPLKFPQQVTRRRRRK

SEQ ID NO: 64865 - DNA, 1376 bp, Triticum aestivum
  misc_feature (1)..(1376): Ceres Seq. ID no. 13598635
aactcaacacgccaaggcaaagcaccagtagtcacacaagagaaaagcaagagcagcaagcagcacagagctagagaaaagaggagcgtctcatcgggaggaggagaaagaaaaagcgagcgaggatgtgtggcggagcgatcctcgccgagctcatcccgggcgcgccggcgcggcgcgccacgtccggccatggccacgtctggccgggcaagggcgccaagcagaccaaggccgccgcggccgacgacttcgaggccgcgttccgggagttcaacgaggactctgatgtggaggacgacgtcgtgatggtgatggagcggcgggaggaggtggccgagagcaagcccttcgtgttcgccgcttcgcccaagaagcagcagcaggaggaggaggaggcggcgcccgtccgccgcaggaagccggcgcagtaccggggcgtgcggcgccggccgtggggcaagtgggccgccgagatccgcgaccccgtcaagggcgtccgcgtctggctcggcaccttcccctccgccgaggccgccgcgctcgcctacgacgaagccgcgcgcgccatccgcgggcccagggccaagctcaacttctcctcctcctctgccgtcgccgccgcggccccgggagcgcgcaagcgcggccgcgccgcgccccccgctgccaagccagcgccggtcatcaccctcgtcgacgatgaggaggagcacgcgtcgtccttcgtcaagcacgaggccgaggcgagcgagggctccgagtccagcggcgccctccccgacttctcgtggcagggcatatcggcgttcgacgaggccccggcgtaccccgccccggagccggagaccgagcagctgacaaagcgggcgaggacgacggaggcggaagacaccgacgagggcatgtcggcccacccggcatcagactccgactccgacgcgctcttcgacgccctcctcttcgccgaccagttcgccttcttcaacggcggcgcctacgagtccctcgacagcctcttcagcgccgacgccgtgcagagcagcgccaccgccaccgccgtgaacgaggcggccctggggctctggaccttcgacgacgactgcctcgtcgacgagtgcagcctgtcgttctagatcttgttccgtgtgcgtccgttcatgtcatgagatgcggtggtgtaaatagagtagcttgccttgtgatgaaatccgttcgtccgtcgtcgcttcttggatcagcaagcgatgatggattctgtgtaagagtttggcatcgtcgtgaaagattttgcctacgccttcgatgcaaaagctcgacttccgtttctgaaatgttcaaaaaaaaaaaaaaaaaacggcacgagaagcttatcg

SEQ ID NO: 64866 - protein, 336 aa, Triticum aestivum
  peptide (1)..(336): Ceres Seq. ID no. 13598636
MCGGAILAELIPGAPARRATSGHGHVWPGKGAKQTKAAAADDFEAAFREFNEDSDVEDDVVMVMERREEVAESKPFVFAASPKKQQQEEEEAAPVRRRKPAQYRGVRRRPWGKWAAEIRDPVKGVRVWLGTFPSAEAAALAYDEAARAIRGPRAKLNFSSSSAVAAAAPGARKRGRAAPPAAKPAPVITLVDDEEEHASSFVKHEAEASEGSESSGALPDFSWQGISAFDEAPAYPAPEPETEQLTKRARTTEAEDTDEGMSAHPASDSDSDALFDALLFADQFAFFNGGAYESLDSLFSADAVQSSATATAVNEAALGLWTFDDDCLVDECSLSF

SEQ ID NO: 64867 - protein, 275 aa, Triticum aestivum
  peptide (1)..(275): Ceres Seq. ID no. 13598637
MVMERREEVAESKPFVFAASPKKQQQEEEEAAPVRRRKPAQYRGVRRRPWGKWAAEIRDPVKGVRVWLGTFPSAEAAALAYDEAARAIRGPRAKLNFSSSSAVAAAAPGARKRGRAAPPAAKPAPVITLVDDEEEHASSFVKHEAEASEGSESSGALPDFSWQGISAFDEAPAYPAPEPETEQLTKRARTTEAEDTDEGMSAHPASDSDSDALFDALLFADQFAFFNGGAYESLDSLFSADAVQSSATATAVNEAALGLWTFDDDCLVDECSLSF

SEQ ID NO: 64868 - protein, 273 aa, Triticum aestivum
  peptide (1)..(273): Ceres Seq. ID no. 13598638
MERREEVAESKPFVFAASPKKQQQEEEEAAPVRRRKPAQYRGVRRRPWGKWAAEIRDPVKGVRVWLGTFPSAEAAALAYDEAARAIRGPRAKLNFSSSSAVAAAAPGARKRGRAAPPAAKPAPVITLVDDEEEHASSFVKHEAEASEGSESSGALPDFSWQGISAFDEAPAYPAPEPETEQLTKRARTTEAEDTDEGMSAHPASDSDSDALFDALLFADQFAFFNGGAYESLDSLFSADAVQSSATATAVNEAALGLWTFDDDCLVDECSLSF

SEQ ID NO: 64869 - DNA, 1155 bp, Triticum aestivum
  misc_feature (1)..(1155): Ceres Seq. ID no. 13597851
accgatcatttccacccgacgcttccaccgcccgaatccagccagccagccagccaggcgaagctgcgaggatgtaccgagatcccaatcccttcgacgagggcgccgacgacagcgccttctccaatgggggaggacgcggtggtgccgctggtggtggtggcggcaagtcgcagttccagtttcgcccgacggagcccgtcggattcggcgccggtggcaacggggacgccgccgtcgacatcccccttgacaacatgaacggttcgaatggcaagcaaagtgagctctcgcagtggcaggcagatctcaagaggcgagaggcggacataaagaggagggaggaagctctcaagagtgctggggtgcccatggaggacaagaactggccgccattcttcccaatcatccaccacgacattgcccatgaaataccagccaacgcgcagcggttgcagtatcttgcttttgctagctggctcggcatcgtgctttgcctcgtttggaatttcattgctgtcacagtctgttggatcagagggggggactctaaactgtttttcctggctactatctacggtatgcttggagtacctttgtcctacttgatgtggtataggcctctgtaccgtgcaatgagaactgacagcgcattcagctttgggtggtttttcctttgttacatgctccacattggcttttgtataattgctgccattgctccgccgatcgtatttcgtgggaagtcattaacgggtatactggctgcaatcgataccttctctgatcatgcattagttgggatactttactttgttggatttgccttgttttcactggagacagttgtgagcatttgggttcttcagagagtatacatgtatttcagagggcacaagtgaagcgggcaacggaagaaaatacagaagtccaccggtgtcatcggagcgtgctgcggttctgtgcatacatatgagtacatgccattctttgtatgttatggtagttatgggaataatttgcctcagaaattcagaagtttgtttatttgttgcaagagagtagaagtgtaacaaacgttgtattagtgttatctcttgaactgtctgttgtttaaaaccttggatcttacctatataaactgcatgttgttgg

SEQ ID NO: 64870 - protein, 299 aa, Triticum aestivum
  peptide (1)..(299): Ceres Seq. ID no. 15222209
RSFPPDASTARIQPASQPGEAARMYRDPNPFDEGADDSAFSNGGGRGGAAGGGGGKSQFQFRPTEPVGFGAGGNGDAAVDIPLDNMNGSNGKQSELSQWQADLKRREADIKRREEALKSAGVPMEDKNWPPFFPIIHHDIAHEIPANAQRLQYLAFASWLGIVLCLVWNFIAVTVCWIRGGDSKLFFLATIYGMLGVPLSYLMWYRPLYRAMRTDSAFSFGWFFLCYMLHIGFCIIAAIAPPIVFRGKSLTGILAAIDTFSDHALVGILYFVGFALFSLETVVSIWVLQRVYMYFRGHK

SEQ ID NO: 64871 - protein, 276 aa, Triticum aestivum
  peptide (1)..(276): Ceres Seq. ID no. 15222210
MYRDPNPFDEGADDSAFSNGGGRGGAAGGGGGKSQFQFRPTEPVGFGAGGNGDAAVDIPLDNMNGSNGKQSELSQWQADLKRREADIKRREEALKSAGVPMEDKNWPPFFPIIHHDIAHEIPANAQRLQYLAFASWLGIVLCLVWNFIAVTVCWIRGGDSKLFFLATIYGMLGVPLSYLMWYRPLYRAMRTDSAFSFGWFFLCYMLHIGFCIIAAIAPPIVFRGKSLTGILAAIDTFSDHALVGILYFVGFALFSLETVVSIWVLQRVYMYFRGHK

SEQ ID NO: 64872 - protein, 214 aa, Triticum aestivum
  peptide (1)..(214): Ceres Seq. ID no. 15222211
MNGSNGKQSELSQWQADLKRREADIKRREEALKSAGVPMEDKNWPPFFPIIHHDIAHEIPANAQRLQYLAFASWLGIVLCLVWNFIAVTVCWIRGGDSKLFFLATIYGMLGVPLSYLMWYRPLYRAMRTDSAFSFGWFFLCYMLHIGFCIIAAIAPPIVFRGKSLTGILAAIDTFSDHALVGILYFVGFALFSLETVVSIWVLQRVYMYFRGHK

SEQ ID NO: 64873 - DNA, 1809 bp, Triticum aestivum
  misc_feature (1)..(1809): Ceres Seq. ID no. 13597532
attaaacccattcacccctttcctaagccctccccgctcccacccgaccgctcgaccatgtccaccaggaaggacgccggcccctcgccggcggcggcgcccgccaccgcgcctgccctaacgccttccccattcatgcccatgtgtcagatgcggcgggatgagtgcgcagacctcctcaagctgatctccggcgtctcgcgccctctcgaggacgtcgtggcggatttcctcgcccgcgtcccgcccgagcgccgcctccgcttcggttccgccatcaagtttctcctcgaggacaaggtgatgtttcaaccagctgagcgtttaattgcactcgcaattcttcatcaagggtattcctcacagctgacaaatccgtttgttccattcttaataaatgttgcctgtgatgaaatttctgagagaccagaacgtgtttttctccagcttttgctaacttcagctaatggggacaacaacaaggagatcttgaaacagtctgcagaagattacttgaaggagccttcttatgcatctcaggtgttgctgccaagagaccagcttgaaagccaatactcctgcaatgatgttcagctgcagacatacactagttgcgcagctgctacggttagaagtgctattcctgacccagatgtttcccaaagctgcggtgattcatcaggattatcaccgaccaaactaaatagagataatgtggtgacaaatttacttcaacaaacaccactgagaggattgtctcctccatggattaggccctctccccccagacttgaaatacttgaaggggagttgcagtggttgaacctggacaacaaccatgagctactatgggatggtagcatgtgtgctgacactagccgaggagcttcaatccgtgatttggtcggaagagcctgtaaaggaccacttgcacctgcccaacaagagcaagttgttttagatttagccagggactggaagctagtttatcattgcggaatgacaccagagaagcttcccgaccttgttgaacataatccactcattgctgttgatgttctttcaaagctgatcaattgtcctgacatggattcttatttcaatgttcttgtgcacatggaaatgagcctgcattcaatggaagttgtaaacaggcttactacagcagtagatctaccaccaggattcattcatgactacatctcaaattgtattcggtcatgccaaaatatcaaggataagtacatgcaaaacagacttgtgagactagtttgtgtttttctacaaagtctcattcggaacaagataataaatgttgaagatctattcattgaggtacaagccttctgcattgcgttttctcgaataagagaagcagctggtttgttcaggcttctcaaatctctagagtgaagaaggttgtatgagttaccggagttcagctctataaacaaattttttcatgctgtacattcatagtcttatattttcgtgttgatctgccaattcagggttgtacttcatagatcatagctcttgttgatgtatttattgtcattaagctgttgccctcacctaaagaaaggtcaaaagatatcagaactattacccaggctttgatagttccgctgaatcattttgatgtggacttaaaccacatgttctttaggtgagacaaattagcaattacctttagcctgttgaaagatagctgaacaatgggcgcctgcttctcagttgaggctcccgagtacaagtaatttgagagatttcttaatttaaattcagatgtaaagactagttgtactc

SEQ ID NO: 64874 - protein, 470 aa, Triticum aestivum
  peptide (1)..(470): Ceres Seq. ID no. 15222122
IKPIHPFPKPSPLPPDRSTMSTRKDAGPSPAAAPATAPALTPSPFMPMCQMRRDECADLLKLISGVSRPLEDVVADFLARVPPERRLRFGSAIKFLLEDKVMFQPAERLIALAILHQGYSSQLTNPFVPFLINVACDEISERPERVFLQLLLTSANGDNNKEILKQSAEDYLKEPSYASQVLLPRDQLESQYSCNDVQLQTYTSCAAATVRSAIPDPDVSQSCGDSSGLSPTKLNRDNVVTNLLQQTPLRGLSPPWIRPSPPRLEILEGELQWLNLDNNHELLWDGSMCADTSRGASIRDLVGRACKGPLAPAQQEQVVLDLARDWKLVYHCGMTPEKLPDLVEHNPLIAVDVLSKLINCPDMDSYFNVLVHMEMSLHSMEVVNRLTTAVDLPPGFIHDYISNCIRSCQNIKDKYMQNRLVRLVCVFLQSLIRNKIINVEDLFIEVQAFCIAFSRIREAAGLFRLLKSLE

SEQ ID NO: 64875 - protein, 451 aa, Triticum aestivum
  peptide (1)..(451): Ceres Seq. ID no. 15222123
MSTRKDAGPSPAAAPATAPALTPSPFMPMCQMRRDECADLLKLISGVSRPLEDVVADFLARVPPERRLRFGSAIKFLLEDKVMFQPAERLIALAILHQGYSSQLTNPFVPFLINVACDEISERPERVFLQLLLTSANGDNNKEILKQSAEDYLKEPSYASQVLLPRDQLESQYSCNDVQLQTYTSCAAATVRSAIPDPDVSQSCGDSSGLSPTKLNRDNVVTNLLQQTPLRGLSPPWIRPSPPRLEILEGELQWLNLDNNHELLWDGSMCADTSRGASIRDLVGRACKGPLAPAQQEQVVLDLARDWKLVYHCGMTPEKLPDLVEHNPLIAVDVLSKLINCPDMDSYFNVLVHMEMSLHSMEVVNRLTTAVDLPPGFIHDYISNCIRSCQNIKDKYMQNRLVRLVCVFLQSLIRNKIINVEDLFIEVQAFCIAFSRIREAAGLFRLLKSLE

SEQ ID NO: 64876 - protein, 425 aa, Triticum aestivum
  peptide (1)..(425): Ceres Seq. ID no. 15222124
MPMCQMRRDECADLLKLISGVSRPLEDVVADFLARVPPERRLRFGSAIKFLLEDKVMFQPAERLIALAILHQGYSSQLTNPFVPFLINVACDEISERPERVFLQLLLTSANGDNNKEILKQSAEDYLKEPSYASQVLLPRDQLESQYSCNDVQLQTYTSCAAATVRSAIPDPDVSQSCGDSSGLSPTKLNRDNVVTNLLQQTPLRGLSPPWIRPSPPRLEILEGELQWLNLDNNHELLWDGSMCADTSRGASIRDLVGRACKGPLAPAQQEQVVLDLARDWKLVYHCGMTPEKLPDLVEHNPLIAVDVLSKLINCPDMDSYFNVLVHMEMSLHSMEVVNRLTTAVDLPPGFIHDYISNCIRSCQNIKDKYMQNRLVRLVCVFLQSLIRNKIINVEDLFIEVQAFCIAFSRIREAAGLFRLLKSLE

SEQ ID NO: 64877 - DNA, 1277 bp, Triticum aestivum
  misc_feature (1)..(1277): Ceres Seq. ID no. 13590776
tacctttccaccccctccattccacccagacagcccgacccgctcctcagctcacctcacgccgtaacctaagccaggttttcctcctccacctccacctccaccggcatcacctcggacgcgcggcggcgtgcagccatggcgatggtggcacaggcgggcttcggcctcacccgcgtcgtcatgctcgtcggcgcgggcgtggccggctccgtcgtcctacgaaacggccgcctctcggagatcctcaccgagatacaggagtttctggagaagggggagatgggtaagggaggaggcggtggtgcggaccacggcatcaacgacgcgctcaacgaggtgcgccaacttgctatgcaggtacgcaatctaggttctccacgttcgataactgttctcagtggaggttctggacaaacaggagtatcaggactaatagtacctgcagcaactgttggagcactgggttatggttatatgtggtggaaaggcatctcctttggggacttaatgtatgtcaccaagcaaaacatggctaatgttgtttcaaatatgactaaacatctggagcaagttcagagctctcttgctgctgctaaaaagcatttgacacaacgcattgagaagttggatgacaaattggatcagcagaaggcgctttctgggcaaataaaagatgatgttactggcgcacgactgaagcttgagaatattggttcagagattaagaacatcaaagaattggtctggggactggatgagaagatggattcaatggaagccaaacagaatttttcatgcgctggtgtgatgtacctctgccaattcatagagcaaagtggtgggaaactccctgaacgcctggaaggcattgaaccatcagcgaagcgatttgaaacaattggcatacaggggttgcaactagccatagaaacagggaattttagtgatttcagcaatgctgattccactgacaagataagcaggtccaactcgttaaagtctgccaactaattttcttcggggttggcgagacatgtatccagattcgttacttagtggaacattgtaaagggagattcttgctggataaaatgtaaagagtcccagcctttttgttatttgcttgcaggaagtgctgtttgttaaatttgaaaacgtgtgcgaagtagtagctactatggaatctagaccagatgttattctggcatcacttatgccttgcatttttatgcaatacttgccgtaaataaatggacgacacttcagtttccttg

SEQ ID NO: 64878 - protein, 291 aa, Triticum aestivum
  peptide (1)..(291): Ceres Seq. ID no. 13590777
MAMVAQAGFGLTRVVMLVGAGVAGSVVLRNGRLSEILTEIQEFLEKGEMGKGGGGGADHGINDALNEVRQLAMQVRNLGSPRSITVLSGGSGQTGVSGLIVPAATVGALGYGYMWWKGISFGDLMYVTKQNMANVVSNMTKHLEQVQSSLAAAKKHLTQRIEKLDDKLDQQKALSGQIKDDVTGARLKLENIGSEIKNIKELVWGLDEKMDSMEAKQNFSCAGVMYLCQFIEQSGGKLPERLEGIEPSAKRFETIGIQGLQLAIETGNFSDFSNADSTDKISRSNSLKSAN

SEQ ID NO: 64879 - protein, 289 aa, Triticum aestivum
  peptide (1)..(289): Ceres Seq. ID no. 13590778
MVAQAGFGLTRVVMLVGAGVAGSVVLRNGRLSEILTEIQEFLEKGEMGKGGGGGADHGINDALNEVRQLAMQVRNLGSPRSITVLSGGSGQTGVSGLIVPAATVGALGYGYMWWKGISFGDLMYVTKQNMANVVSNMTKHLEQVQSSLAAAKKHLTQRIEKLDDKLDQQKALSGQIKDDVTGARLKLENIGSEIKNIKELVWGLDEKMDSMEAKQNFSCAGVMYLCQFIEQSGGKLPERLEGIEPSAKRFETIGIQGLQLAIETGNFSDFSNADSTDKISRSNSLKSAN

SEQ ID NO: 64880 - protein, 276 aa, Triticum aestivum
  peptide (1)..(276): Ceres Seq. ID no. 13590779
MLVGAGVAGSVVLRNGRLSEILTEIQEFLEKGEMGKGGGGGADHGINDALNEVRQLAMQVRNLGSPRSITVLSGGSGQTGVSGLIVPAATVGALGYGYMWWKGISFGDLMYVTKQNMANVVSNMTKHLEQVQSSLAAAKKHLTQRIEKLDDKLDQQKALSGQIKDDVTGARLKLENIGSEIKNIKELVWGLDEKMDSMEAKQNFSCAGVMYLCQFIEQSGGKLPERLEGIEPSAKRFETIGIQGLQLAIETGNFSDFSNADSTDKISRSNSLKSAN

SEQ ID NO: 64881 - DNA, 1096 bp, Triticum aestivum
  misc_feature (1)..(1096): Ceres Seq. ID no. 13655804
gcaaaccaacagctgctactccagcatccacccatccatccatctctcatcttcttcttcttgcaacgaaacgagagcatctagcttacagcgagctaaagattcgaacgatggccgttcttgtggcgaggcaggggcgcgagctgcagcggtacagcgcgagcacccgcgggcgcatcgtggtggggtgcatcccctaccgggtgcgcggcggcggcggcgagggcgagggcgagctggaggtgctggtgatcagctcgcagaaggggcacggcatgatgttccccaagggcgggtgggagctggacgagtccatggacgacgccgcccggcgcgaggccctggaggaggccggcgtccgcggggagatgggcaaggtgctcggctgctggcactaccagagccgccgctaccagaccacctacgagggcatcatgtacccgctccgcgtcaccgacgagctccagcagtggcccgagatggcctcccgcaagcgcacctgggccacggtgcagcaggtcatggagggatgccagcactgctggatgcgggaggcgctcgaggagctcgtcgcccggcacgccaagccgcagtccgccctgtgaacgatcaagcaagcgggcgggtggggtgactggagctcgagcgcgcgcgactctcgcgagaagaggcctggagcgagcaccaacgtccgtccgtccgtcgtcctcgtcgtctctctctcctttcctcggtgcagcggcaggcctgccggcgtgtccggcgtcgtacgacgaccggaccggagcatatatttggccgcccttgccggagagacggactggggacgatggcacgcgcgcgtcaaccctttctcgaggcgtagagtcgtcgtcgtcgtcgccgcggcaaataatagggacgaacttagaaatgtgtagatcgaaagcgaacggggcacgaaaacttgacaaaacaccgcccttcctggtggtacgagcaagctcacgattctttctttaggctcttggagtaaaagatcaatcaaattgtaaattaatttaagtagccgcttttctgtggcacgctcgatcaatcaaacgattactacaatctg

SEQ ID NO: 64882 - protein, 210 aa, Triticum aestivum
  peptide (1)..(210): Ceres Seq. ID no. 13655805
QTNSCYSSIHPSIHLSSSSSCNETRASSLQRAKDSNDGRSCGEAGARAAAVQREHPRAHRGGVHPLPGARRRRRGRGRAGGAGDQLAEGARHDVPQGRVGAGRVHGRRRPARGPGGGRRPRGDGQGARLLALPEPPLPDHLRGHHVPAPRHRRAPAVARDGLPQAHLGHGAAGHGGMPALLDAGGARGARRPARQAAVRPVNDQASGRVG

SEQ ID NO: 64883 - protein, 200 aa, Triticum aestivum
  peptide (1)..(200): Ceres Seq. ID no. 13655806
KPTAATPASTHPSISHLLLLATKREHLAYSELKIRTMAVLVARQGRELQRYSASTRGRIVVGCIPYRVRGGGGEGEGELEVLVISSQKGHGMMFPKGGWELDESMDDAARREALEEAGVRGEMGKVLGCWHYQSRRYQTTYEGIMYPLRVTDELQQWPEMASRKRTWATVQQVMEGCQHCWMREALEELVARHAKPQSAL

SEQ ID NO: 64884 - protein, 164 aa, Triticum aestivum
  peptide (1)..(164): Ceres Seq. ID no. 13655807
MAVLVARQGRELQRYSASTRGRIVVGCIPYRVRGGGGEGEGELEVLVISSQKGHGMMFPKGGWELDESMDDAARREALEEAGVRGEMGKVLGCWHYQSRRYQTTYEGIMYPLRVTDELQQWPEMASRKRTWATVQQVMEGCQHCWMREALEELVARHAKPQSAL

SEQ ID NO: 64885 - DNA, 1188 bp, Triticum aestivum
  misc_feature (1)..(1188): Ceres Seq. ID no. 15170682
aattcttaaccctagaaacagagcgcaggagggccagccgcaaccgggacaaaagcggaaacaagccaacccaagcctcgattcctcctccatcgccgcggcagaagctcgaggtccagaagggagcgcgagaagcttgcgtgaaggactcagccatggcgagcgcggatctgctgcggagggaggaggagttctacgagtccctgttcgattccgccaaaggcgatgccgctgccgccaagacgcgtgggcagatgattgagaggaagattgaagccttggaggacatggcaaccaaggttagtaaccggaggtctcgcagatggttgaatgatcgcttgctgattgagctcgtccctcgtcttcatgttgaagaaatcaaaggcctctttgcccctccgccatttggtgaggaagcaccactgtcagcattttgcaggacaagtgttggtgagtgggatgccttcaggagcattgacatggacgttgaggcaagatttatgcaacggatgaaacaatcctcagctaagcagaagaatcttgtgaatgaagatgagtcaattgtgctgaatgcttggcgccgtatagattgccaaacaagagaagctatgaagagaaacttcctacctgaactgcttgaaatatatgaggaacggatcagggccttcattgaagacactaccgataaagatgtgcttgtgttgaatgtccaggacccatttcagaggttgctattacatggtgtgtgcgagttctacaacgtaacgtctacgacaacgggtactgtgcaagatggaaagccgtggaagacgacaacaatcaagaagcgttcggggacgggtgttgcccccatgatcacattggttagtttcctgagaacaaagaagaatgggtcacacgttgcctcgtgaggactggaagccccatattctggccatgagcccatgatcatgctcctgggagaagcaaaagttgtttctttaggttttgcttaggatgtacacagatgtaaattaattaccaatttactatgcttcgtctaaagaggtgacaaggcatgcaagtgatgagtcacttcgcagccaagcaagtactgtacctgtttcgcgttaaaccttaccttactgccagcttactggtggtggtgccaaacaatggttttcaactgacttctgatttacatggttc

SEQ ID NO: 64886 - protein, 302 aa, Triticum aestivum
  peptide (1)..(302): Ceres Seq. ID no. 15170683
FLTLETERRRASRNRDKSGNKPTQASIPPPSPRQKLEVQKGAREACVKDSAMASADLLRREEEFYESLFDSAKGDAAAAKTRGQMIERKIEALEDMATKVSNRRSRRWLNDRLLIELVPRLHVEEIKGLFAPPPFGEEAPLSAFCRTSVGEWDAFRSIDMDVEARFMQRMKQSSAKQKNLVNEDESIVLNAWRRIDCQTREAMKRNFLPELLEIYEERIRAFIEDTTDKDVLVLNVQDPFQRLLLHGVCEFYNVTSTTTGTVQDGKPWKTTTIKKRSGTGVAPMITLVSFLRTKKNGSHVAS

SEQ ID NO: 64887 - protein, 251 aa, Triticum aestivum
  peptide (1)..(251): Ceres Seq. ID no. 15170684
MASADLLRREEEFYESLFDSAKGDAAAAKTRGQMIERKIEALEDMATKVSNRRSRRWLNDRLLIELVPRLHVEEIKGLFAPPPFGEEAPLSAFCRTSVGEWDAFRSIDMDVEARFMQRMKQSSAKQKNLVNEDESIVLNAWRRIDCQTREAMKRNFLPELLEIYEERIRAFIEDTTDKDVLVLNVQDPFQRLLLHGVCEFYNVTSTTTGTVQDGKPWKTTTIKKRSGTGVAPMITLVSFLRTKKNGSHVAS

SEQ ID NO: 64888 - protein, 218 aa, Triticum aestivum
  peptide (1)..(218): Ceres Seq. ID no. 15170685
MIERKIEALEDMATKVSNRRSRRWLNDRLLIELVPRLHVEEIKGLFAPPPFGEEAPLSAFCRTSVGEWDAFRSIDMDVEARFMQRMKQSSAKQKNLVNEDESIVLNAWRRIDCQTREAMKRNFLPELLEIYEERIRAFIEDTTDKDVLVLNVQDPFQRLLLHGVCEFYNVTSTTTGTVQDGKPWKTTTIKKRSGTGVAPMITLVSFLRTKKNGSHVAS

SEQ ID NO: 64889 - DNA, 1545 bp, Triticum aestivum
  misc_feature (1)..(1545): Ceres Seq. ID no. 14302768
acacgttgctcgctgctcggagagaggttcacacggctgcggttgtctcgtcgccgtcttggtctccccgtcccggtccgcgcgtcgcggttctcacatgaccaccgggccgcgctagttttcacggcgtggccatggccgtcgtcgtctgcgtcaccggcgccggcggcttcatcggctcctggatcgtcaagctcctcctcgcccgcggctacgccgtccgcggcacctcccgccgcgccgatgaccccaagaacgcgcacctgtgggcgctcgacggcgcggcggagcggctgacgatggtgcaggtcgacctgctcgaccgggccagcctccgcgccgccttccacggctgcgacggcgttatccacaccgcatcaccgatgcacgacacccccgaggagatcatcgagccggtgatcaccgggacgctcaacgtggtggagatggccgcggacgccggcgtccggcgcgtggtgctgtcctccaccatcggcaccatgtacatgaacccccaccgcgacccggacgcgccgctcgacgagtcgtgctggagcgacctcgactactgcaaacaaaccaagaactggtactgctacgccaagacgatcgcggagcggggcgcgtgggaggcggcgcgggcgctggggctggacctggcggtggtgatcccggtggtgacgctgggcgagctgctgcagccgagcatgaacaccagcaccaggcacatactcaagtacctcaccggcgaggccaaggcgtacgtcaacgagtcgcacgcctacgtgcatgtcaaggacgccgccgaggcgcacgtcagggtgctcgaggcgcccaacgccgggggacggcgctacgtctgcgccgagaggacgctgcaccgcggcgagctctgccggatcctcgccgggctcttcccggagtacccgattcccacaagatgtaaggacgaggtaaatccgccaaagaagggttacaagtacaccaaccagcctctgaaggaccttggcatgaagttcacccctgtgcaagaatacctctatgaagcggtgaaatccctgcaagagaagggattcattcagaaggcttctggcaacaaggggcttgctagtagagggagttcgccgcctcaaaattcaacggcgcccgtgtttatgtcgaaactttgatgggcttctgcacaaagtaacaatgcagttcgccgtcatgtgaattgtaattcatttgattaagtgatatgttgctggacagttcttgtatgtggcaaactgccaactttgtgtagtagcgccgtgttgcctggaacagtacaccgctacagagcaacttcagtgatgcatgccaaatattttccctggtcgatgttcttctaccaccacctagttgttcaccttgtctgactcagcgggtacaaaaacccgatcaagttggcacttggcagcagagcatacaagcgtgccctctttggagtctcgttcggagagtgatgctgttttggccaacttctgcttgttgttggtcgtgatcttgtttatgcgctttctc

SEQ ID NO: 64890 - protein, 344 aa, Triticum aestivum
  peptide (1)..(344): Ceres Seq. ID no. 14302769
MAVVVCVTGAGGFIGSWIVKLLLARGYAVRGTSRRADDPKNAHLWALDGAAERLTMVQVDLLDRASLRAAFHGCDGVIHTASPMHDTPEEIIEPVITGTLNVVEMAADAGVRRVVLSSTIGTMYMNPHRDPDAPLDESCWSDLDYCKQTKNWYCYAKTIAERGAWEAARALGLDLAVVIPVVTLGELLQPSMNTSTRHILKYLTGEAKAYVNESHAYVHVKDAAEAHVRVLEAPNAGGRRYVCAERTLHRGELCRILAGLFPEYPIPTRCKDEVNPPKKGYKYTNQPLKDLGMKFTPVQEYLYEAVKSLQEKGFIQKASGNKGLASRGSSPPQNSTAPVFMSKL

SEQ ID NO: 64891 - protein, 289 aa, Triticum aestivum
  peptide (1)..(289): Ceres Seq. ID no. 14302770
MVQVDLLDRASLRAAFHGCDGVIHTASPMHDTPEEIIEPVITGTLNVVEMAADAGVRRVVLSSTIGTMYMNPHRDPDAPLDESCWSDLDYCKQTKNWYCYAKTIAERGAWEAARALGLDLAVVIPVVTLGELLQPSMNTSTRHILKYLTGEAKAYVNESHAYVHVKDAAEAHVRVLEAPNAGGRRYVCAERTLHRGELCRILAGLFPEYPIPTRCKDEVNPPKKGYKYTNQPLKDLGMKFTPVQEYLYEAVKSLQEKGFIQKASGNKGLASRGSSPPQNSTAPVFMSKL

SEQ ID NO: 64892 - protein, 261 aa, Triticum aestivum
  peptide (1)..(261): Ceres Seq. ID no. 14302771
MHDTPEEIIEPVITGTLNVVEMAADAGVRRVVLSSTIGTMYMNPHRDPDAPLDESCWSDLDYCKQTKNWYCYAKTIAERGAWEAARALGLDLAVVIPVVTLGELLQPSMNTSTRHILKYLTGEAKAYVNESHAYVHVKDAAEAHVRVLEAPNAGGRRYVCAERTLHRGELCRILAGLFPEYPIPTRCKDEVNPPKKGYKYTNQPLKDLGMKFTPVQEYLYEAVKSLQEKGFIQKASGNKGLASRGSSPPQNSTAPVFMSKL

SEQ ID NO: 64893 - DNA, 1720 bp, Triticum aestivum
  misc_feature (1)..(1720): Ceres Seq. ID no. 14303546
acttgctatccagctcctgctaccctaacaatggcagtggctggtgccccacctgttctccagctcctgccccaacaatggcagctgattctagccatcctcctcgtcccactcggcttcctcctccttcggggaaggtcgggctccggcctgaagctcccaccgggccccatgaggctgcctttcgtgggcaacctgcaccagatcgggccactgccgcaccggagcctggctgcgctggcccggcggcatgggcctgtgatgatgctgcggctgggcatggtgccgacggtggtgctgacatcgccagaggcggcccgggaagccctcaagaccaaggatgatgactgcagcagccgtcccctgtcggcagggccagggctgctgtcttacggctacaaggacgtggccttctcgccgtggagcgactacgtccgcgagatgcgcaagttgttcatcatcgagctgctcagcaggcggcgcgtgcagtctgcctactacgcgagggatgcacagatcgacaagctgattgagaccctcaccgtggtggggccgaacccggtacccctggaggcccacatcttcgccaccatggaccggattgtgggcttgttcgcgttcggcgagagctacgcgggggagcagttcaaggggcagtttgtgcccttactcaacgcaaccatggacatgttgggtagcttctctgcccaagacttcttccccaacgccgttggccgcctcatcgaccgcatcaccggcgtcaaagcccaccgccagagggtctttcgtcagctcgaccgcttctttgagcatatcatcgagcagtgcgatgggagaaaggccaccggcggcggcggatcggacctggtgcaggagctgctggacatcatgaaaaggcccgccgcctccgctgcaggaaccttcaccagagatcatgtcaaggccattctcatgaacacattcattggtagcattgacaccaccacagtgaccataacctgggcaatggcagagctgatccggaaaccaagggttctgcaaagggcacaacttgagattaggactgccgctggaggaggcagcagagtgcaccaagctgacatgcccaaaatgagctacctgaggatggtgctgtccgagaccctacggctgcatcccccagcaacactactcgtaccgagagagacgctgcggccgatccaggtggctggctacgacatcccagccaagacccaggtcattgtcaatgcgtgggccatcagcagggacccttccgcgtggaaggaccccgaggagtttaacccggagcggttccaggacactgacgtggacttcaacggcagccacttcgagttcatccccttcggcgcgggccgccggatctgccccgggctggccatgggggtggcaaacgccgagtacatccttgccaacttgctctactgcttcaactgggcgctgcccaacggggtgagccgggagggtgtgaacatggaggaggaaggggtgctcacttaccggaagaagacctcactcatgctcgtgccaacaccttaccacccagcccaggagaaagaggaggagtattagtactcacttatttttctatatattctgttcctcgtgcattatcatttgttgttgttgttgttgttgttgttgttgtttattttaataaatcaatatgaataaaattctcaaattccgttccccgtacatc

SEQ ID NO: 64894 - protein, 529 aa, Triticum aestivum
  peptide (1)..(529): Ceres Seq. ID no. 14303547
TCYPAPATLTMAVAGAPPVLQLLPQQWQLILAILLVPLGFLLLRGRSGSGLKLPPGPMRLPFVGNLHQIGPLPHRSLAALARRHGPVMMLRLGMVPTVVLTSPEAAREALKTKDDDCSSRPLSAGPGLLSYGYKDVAFSPWSDYVREMRKLFIIELLSRRRVQSAYYARDAQIDKLIETLTVVGPNPVPLEAHIFATMDRIVGLFAFGESYAGEQFKGQFVPLLNATMDMLGSFSAQDFFPNAVGRLIDRITGVKAHRQRVFRQLDRFFEHIIEQCDGRKATGGGGSDLVQELLDIMKRPAASAAGTFTRDHVKAILMNTFIGSIDTTTVTITWAMAELIRKPRVLQRAQLEIRTAAGGGSRVHQADMPKMSYLRMVLSETLRLHPPATLLVPRETLRPIQVAGYDIPAKTQVIVNAWAISRDPSAWKDPEEFNPERFQDTDVDFNGSHFEFIPFGAGRRICPGLAMGVANAEYILANLLYCFNWALPNGVSREGVNMEEEGVLTYRKKTSLMLVPTPYHPAQEKEEEY

SEQ ID NO: 64895 - protein, 519 aa, Triticum aestivum
  peptide (1)..(519): Ceres Seq. ID no. 14303548
MAVAGAPPVLQLLPQQWQLILAILLVPLGFLLLRGRSGSGLKLPPGPMRLPFVGNLHQIGPLPHRSLAALARRHGPVMMLRLGMVPTVVLTSPEAAREALKTKDDDCSSRPLSAGPGLLSYGYKDVAFSPWSDYVREMRKLFIIELLSRRRVQSAYYARDAQIDKLIETLTVVGPNPVPLEAHIFATMDRIVGLFAFGESYAGEQFKGQFVPLLNATMDMLGSFSAQDFFPNAVGRLIDRITGVKAHRQRVFRQLDRFFEHIIEQCDGRKATGGGGSDLVQELLDIMKRPAASAAGTFTRDHVKAILMNTFIGSIDTTTVTITWAMAELIRKPRVLQRAQLEIRTAAGGGSRVHQADMPKMSYLRMVLSETLRLHPPATLLVPRETLRPIQVAGYDIPAKTQVIVNAWAISRDPSAWKDPEEFNPERFQDTDVDFNGSHFEFIPFGAGRRICPGLAMGVANAEYILANLLYCFNWALPNGVSREGVNMEEEGVLTYRKKTSLMLVPTPYHPAQEKEEEY

SEQ ID NO: 64896 - protein, 472 aa, Triticum aestivum
  peptide (1)..(472): Ceres Seq. ID no. 14303549
MRLPFVGNLHQIGPLPHRSLAALARRHGPVMMLRLGMVPTVVLTSPEAAREALKTKDDDCSSRPLSAGPGLLSYGYKDVAFSPWSDYVREMRKLFIIELLSRRRVQSAYYARDAQIDKLIETLTVVGPNPVPLEAHIFATMDRIVGLFAFGESYAGEQFKGQFVPLLNATMDMLGSFSAQDFFPNAVGRLIDRITGVKAHRQRVFRQLDRFFEHIIEQCDGRKATGGGGSDLVQELLDIMKRPAASAAGTFTRDHVKAILMNTFIGSIDTTTVTITWAMAELIRKPRVLQRAQLEIRTAAGGGSRVHQADMPKMSYLRMVLSETLRLHPPATLLVPRETLRPIQVAGYDIPAKTQVIVNAWAISRDPSAWKDPEEFNPERFQDTDVDFNGSHFEFIPFGAGRRICPGLAMGVANAEYILANLLYCFNWALPNGVSREGVNMEEEGVLTYRKKTSLMLVPTPYHPAQEKEEEY

SEQ ID NO: 64897 - DNA, 1233 bp, Triticum aestivum
  misc_feature (1)..(1233): Ceres Seq. ID no. 12617583
gcggctgcgggtgcgcgtgcagaggggacgacagagagagaagaggagccaacctccgccgccacggcttccgcgtgctaggaagacgaagcagagcggcagcaaagagagggaggccgcgatggaggtgggcttcctggggctgggcatcatgggcaaggcaatggcggccaacctcctccgccacggcttccgcgtcaccgtctggaaccggaccctctccaagtgcgacgagctcgtcgcgatgggtgccgccgtcggggacacgccggcgtccgtcgtcgccaagtgcaagtacaccatcgccatgctctccgatcccagcgccgcgctatctgttgttttcgacaaggatggcgtgctcgagcaaatcggagagggcaagggctacgtggacatgtccactgtcgatgctgcaacttcttgcaagataagcgaggcggttaaacaaaagggcggagcttttgttgaagctccagtttcagggagcaagaagccagctgaagatggccaattggtcattcttgctgcaggcgacaaggcactatatgatgatatggtccctgcatttgatgtacttgggaagaagtcgttctttctgggggagatgggaaatggagcaaagatgaaactggtggtcaacatgatcatgggaagtatgatgaatgctttttctgagggactctgtttggctgacaaaagtgggttgagcccccagacgcttcttgatgtcctggatctcggtgcaatcgcaaatccgatgttcaagatgaaagggccttcaatgctgcagggcagctacaatccagcatttcccctgaaacatcagcagaaggatatgaggctggctctgtcgttgggagatgaaaatgccgtgtccatgccagtggcagctgctgccaatgaggcattcaagaaagcaagaagcttgggacttggtgacctggattttcccgcggtgcacgaggttctgaaaggcactggtggttcaggctaaagcgtgattgggggctgaatgtttaaaaccacatgccatgggcatgcagatattcttgtagttcgtccaacccatgtggcttatcatcgtactattgatatgtacattcaacagttgatgctggattgtgctgtacgatgttttttttctagcaaggcttgtgcatgaacgaaccattgggatttgggacttgaatgccgccacgccagatggaaatataagtgcaagttctgtct

SEQ ID NO: 64898 - protein, 331 aa, Triticum aestivum
  peptide (1)..(331): Ceres Seq. ID no. 12617584
RLRVRVQRGRQREKRSQPPPPRLPRARKTKQSGSKEREAAMEVGFLGLGIMGKAMAANLLRHGFRVTVWNRTLSKCDELVAMGAAVGDTPASVVAKCKYTIAMLSDPSAALSVVFDKDGVLEQIGEGKGYVDMSTVDAATSCKISEAVKQKGGAFVEAPVSGSKKPAEDGQLVILAAGDKALYDDMVPAFDVLGKKSFFLGEMGNGAKMKLVVNMIMGSMMNAFSEGLCLADKSGLSPQTLLDVLDLGAIANPMFKMKGPSMLQGSYNPAFPLKHQQKDMRLALSLGDENAVSMPVAAAANEAFKKARSLGLGDLDFPAVHEVLKGTGGSG

SEQ ID NO: 64899 - protein, 291 aa, Triticum aestivum
  peptide (1)..(291): Ceres Seq. ID no. 12617585
MEVGFLGLGIMGKAMAANLLRHGFRVTVWNRTLSKCDELVAMGAAVGDTPASVVAKCKYTIAMLSDPSAALSVVFDKDGVLEQIGEGKGYVDMSTVDAATSCKISEAVKQKGGAFVEAPVSGSKKPAEDGQLVILAAGDKALYDDMVPAFDVLGKKSFFLGEMGNGAKMKLVVNMIMGSMMNAFSEGLCLADKSGLSPQTLLDVLDLGAIANPMFKMKGPSMLQGSYNPAFPLKHQQKDMRLALSLGDENAVSMPVAAAANEAFKKARSLGLGDLDFPAVHEVLKGTGGSG

SEQ ID NO: 64900 - protein, 281 aa, Triticum aestivum
  peptide (1)..(281): Ceres Seq. ID no. 12617586
MGKAMAANLLRHGFRVTVWNRTLSKCDELVAMGAAVGDTPASVVAKCKYTIAMLSDPSAALSVVFDKDGVLEQIGEGKGYVDMSTVDAATSCKISEAVKQKGGAFVEAPVSGSKKPAEDGQLVILAAGDKALYDDMVPAFDVLGKKSFFLGEMGNGAKMKLVVNMIMGSMMNAFSEGLCLADKSGLSPQTLLDVLDLGAIANPMFKMKGPSMLQGSYNPAFPLKHQQKDMRLALSLGDENAVSMPVAAAANEAFKKARSLGLGDLDFPAVHEVLKGTGGSG

SEQ ID NO: 64901 - DNA, 1237 bp, Triticum aestivum
  misc_feature (1)..(1237): Ceres Seq. ID no. 13655808
cctagaacatcctaatcgaaaagattacaataataaacacacatgacacatctcctctctcgctctccctcccaggcagcatccaaagaagcggctagctttgctgctgctgctccaaccgaaaaggcgaggggagacggaggaggggcggccgtggggaggagcgtgaggccgcgagctccagctccagctcaaccctgaagaagaaggcctctccccttcccccgagctcaagcccagagcaaagctcacttatgtctgcctatggagtcatctacaactgatgccggtgataagcatttggagagctacctgacattgggtttgacagtatcgcagtcaaagaaagggaataccaagtttccaaaggtcctgtcgcttcttgccacatatctgggcagatcagttcagaagaatgaagaattactaggttcaaatggaataaaggaggcagccaccatctttcatggccagaaggtgccagatctcagtatacagctctatgcagaacgcatcttcaagtatgctgagtgcagtccatcctgctttgtgttggcacttrtctacatggagagatatctacagcagccaaatgtgtacatgacgcccttcagcgttcatcgcttgctgattacaagtgtggtggttgctgccaaattcacagatgacgcgtttttcaacaatgcattctacgctagagtgggaggaatccgcacaatcgagatgaatcggcttgaactggatttgttatttaatctggacttcaggctgaaagtgaacctagagacgtttgggagctactgcttgcaactggagaaacatgcaccggtgtcaccagagagactgccggttcaggttcatcgtgtcaatggatctaaagatttgagctatagcaacagcagcgccgacgagttttgccagagcaagcttgtaagctacagcagccaggctctccaaggatgcagctgaccaatctatttatggcctaaagttttgcaaagcatgtgacctgattactgataattcttttagatctgacatttgtgcattcagattgcattaagttgttctgagggtgtttgattagtagggattcgattctgctttacttgtgtaacactgtaattcttgcaaaccactttgtttaaaatgttcacaatctagttgggaaacaccaggtctgaatattattcagtcctgtgattccaatgccgcggttttaccggatctgctgccc

SEQ ID NO: 64902 - protein, 234 aa, Triticum aestivum
  peptide (1)..(234): Ceres Seq. ID no. 15220555
  misc_feature (100)..(100): Xaa is any aa, unknown or other
MESSTTDAGDKHLESYLTLGLTVSQSKKGNTKFPKVLSLLATYLGRSVQKNEELLGSNGIKEAATIFHGQKVPDLSIQLYAERIFKYAECSPSCFVLALXYMERYLQQPNVYMTPFSVHRLLITSVVVAAKFTDDAFFNNAFYARVGGIRTIEMNRLELDLLFNLDFRLKVNLETFGSYCLQLEKHAPVSPERLPVQVHRVNGSKDLSYSNSSADEFCQSKLVSYSSQALQGCS

SEQ ID NO: 64903 - protein, 133 aa, Triticum aestivum
  peptide (1)..(133): Ceres Seq. ID no. 15220556
MERYLQQPNVYMTPFSVHRLLITSVVVAAKFTDDAFFNNAFYARVGGIRTIEMNRLELDLLFNLDFRLKVNLETFGSYCLQLEKHAPVSPERLPVQVHRVNGSKDLSYSNSSADEFCQSKLVSYSSQALQGCS

SEQ ID NO: 64904 - protein, 122 aa, Triticum aestivum
  peptide (1)..(122): Ceres Seq. ID no. 15220557
MTPFSVHRLLITSVVVAAKFTDDAFFNNAFYARVGGIRTIEMNRLELDLLFNLDFRLKVNLETFGSYCLQLEKHAPVSPERLPVQVHRVNGSKDLSYSNSSADEFCQSKLVSYSSQALQGCS

SEQ ID NO: 64905 - DNA, 1368 bp, Triticum aestivum
  misc_feature (1)..(1368): Ceres Seq. ID no. 13656160
ctagaacatcctaatcgaaaaaattgctctggttaatggatctgaatttgcaattatctctcttatagactcagagaatgacttcaggattccagaatcattgccatgccttcatgataaggtacttgcagcagcagctgaagcagctatgagcatctcgatagaccagaaaggaaagcagaatccagcagcaggagttattggtggcattattaaaggattaaaaggaaaagcggatgaaaatgcaaacctgagaaaaagtttcaattcccaaacccccagtgaactattggagtcaattttcttgaaaggaccatatgttgaaccatcactagcttatcctgatgatccaatagaagaactgtcaattgatgacatagaaattgatgatgaagtgcccctatcccctccgccagcatcatcctctgcttgtcacatgaataagaaagcaacagtagaggacgagagagcgaaactgtttgaagggtcaagtgatgctgacaaaccaagaatgagaagtacccaagaaattctcaccaaatataagtttggcggggatgcaacagcagcagctgcccatgcgaaggataagctcatgcagcggcaggagaaactcgagagaataagccagcggaccgcagagcttcaagacggggcggaaaatttcgcctcgctcgcccaggagctcgcgaaaacaatggagaacaagaagtggtggaaactgtaacctattcggggttttcacatcactgcatcctatcctacacaaagtacgtccagctctcggtacttgggaatgccttatttgccggttgttatttatcgtggcatggttccgcccattccgccccgcctttgtgctgtgtatatttatgttcatggacaactgcagcttgtcaaggtgattgtctaccttgccactaggttgactcactcactgacagacagacagacagcatggcttgtttggatgcattagcttaggtttatgttgtatatcaccatgtaatcatatgcaccatgggtggaaagcgtggggcggaacctacttgccgtacatgatttcttttgggtggtcattcagtcgttcgttctgtctgtaaaggtaaaaggagacaataaaccgaacggcttacattgagaaacttcaaagagcctgtgtggcattgttagttggtggtatctgatgtgacaccttctcactaatacttgaactgtggttatcaagttgcaatgtgtatgtttttgttttttgttttttgtttaaaaaaaaaaaaaaaaaaaaaaaaaaaaaaaaaaaaaaaaaataaaaaaaaaaaaaaaaaagygtttawacacratammgtyggamctsgagggggggcccgg

SEQ ID NO: 64906 - protein, 192 aa, Triticum aestivum
  peptide (1)..(192): Ceres Seq. ID no. 15219805
MSISIDQKGKQNPAAGVIGGIIKGLKGKADENANLRKSFNSQTPSELLESIFLKGPYVEPSLAYPDDPIEELSIDDIEIDDEVPLSPPPASSSACHMNKKATVEDERAKLFEGSSDADKPRMRSTQEILTKYKFGGDATAAAAHAKDKLMQRQEKLERISQRTAELQDGAENFASLAQELAKTMENKKWWKL

SEQ ID NO: 64907 - protein, 96 aa, Triticum aestivum
  peptide (1)..(96): Ceres Seq. ID no. 15219806
MNKKATVEDERAKLFEGSSDADKPRMRSTQEILTKYKFGGDATAAAAHAKDKLMQRQEKLERISQRTAELQDGAENFASLAQELAKTMENKKWWKL

SEQ ID NO: 64908 - DNA, 1654 bp, Triticum aestivum
  misc_feature (1)..(1654): Ceres Seq. ID no. 13656161
accgatctcgcctcgccaagcccaccaaccggctcacgccgcatcgcatcgcgatccagcgttcctctcgagccttccatccagagccctcccaaacccctccgccgaccccccgagcccccgcccgccgccgccgccgccgcgccggagatggtgtacatcggcgcgcacggcgtggagacgctgaagcgctacaggtacagcggccaggaccactcggtggtggccaagtacgtgctgcagcccttctggagccgctgcgtcaccctcttcccgctctggatgccaccaaacatgatcacactcatgggatttatgtttctacttacatcttcgctgcttagctatatttattcaccccaccttgacacagctccccctcggtgggtccatcttgcccatggaatacttctcttcttgtaccagacttttgatgccgttgatggtaaacaagcaaggcgcaccagctcatcaagtcctctaggagaactttttgatcatggatgtgatgcccttgcctgcgcttttgaagccttggcccttggaagcaccttgatgtgtggaaggttgacattctgttactgggtggttgctgctgtcccattttatctggcaacatgggaacactactttacaaatactcttattcttcctgtaataaatggaccaacggaaggcctgatgctgatctatgtctcccacctttttacctgttttactggtgctgaatggtgggcgcaagattttcggaaatccctccctcttattagtttggttccacttccatttgttccagaaatccccttatatgttatcgtgctgattctgatgatcacgtttgctgtaatcccaacagttggatccaatattggtaatgtccaaaaagttgttgatgcacggaaagggagcatggaattagcattggcaatgctccttccatttattgcgctgttggctggagttgctgtctggtgttatctctctccttcagatatcatgaggaaccagccacatctgcttgtgatcggaactggttctgcctttggatatttggttggaaggatgatacttgctcatttatgtgacgagcccaaaggtctaaaaacaggaatgtgcatggctctggtgtttcttccatttgctattgcaaatgctctcaccgccaagattaacaatgggacccctttggctgatgagcttttggttattcttctgtactgtgcaacctcagtgggtctttacatgcatcttgccatttcggtttgtcatgaaatcaaggatgctcttggaatctattgcttcaggatagccagaaaagaggcttgaatttgcctgaatccctacgtagcatttgaagcattctgccttccagacattgtccgtctgcattcacaagtcttaacattacaacaacgtatagccatggatgctcaacgaatcctgtcattggaactccatggccaccggttattcatcatgctaaatgcagatatgcagatagatatatcttgtgtggactgtaatgcagatttgtgttaagtagcatatgtacatgtggtgcggtcggtgtaatgtacgtcatgggtagggaagcggtagctttcttaacttaaactagatggtgggatgaccgatgtttctaagattgtgttcc

SEQ ID NO: 64909 - protein, 441 aa, Triticum aestivum
  peptide (1)..(441): Ceres Seq. ID no. 15219807
TDLASPSPPTGSRRIASRSSVPLEPSIQSPPKPLRRPPEPPPAAAAAAPEMVYIGAHGVETLKRYRYSGQDHSVVAKYVLQPFWSRCVTLFPLWMPPNMITLMGFMFLLTSSLLSYIYSPHLDTAPPRWVHLAHGILLFLYQTFDAVDGKQARRTSSSSPLGELFDHGCDALACAFEALALGSTLMCGRLTFCYWVVAAVPFYLATWEHYFTNTLILPVINGPTEGLMLIYVSHLFTCFTGAEWWAQDFRKSLPLISLVPLPFVPEIPLYVIVLILMITFAVIPTVGSNIGNVQKVVDARKGSMELALAMLLPFIALLAGVAVWCYLSPSDIMRNQPHLLVIGTGSAFGYLVGRMILAHLCDEPKGLKTGMCMALVFLPFAIANALTAKINNGTPLADELLVILLYCATSVGLYMHLAISVCHEIKDALGIYCFRIARKEA

SEQ ID NO: 64910 - protein, 391 aa, Triticum aestivum
  peptide (1)..(391): Ceres Seq. ID no. 15219808
MVYIGAHGVETLKRYRYSGQDHSVVAKYVLQPFWSRCVTLFPLWMPPNMITLMGFMFLLTSSLLSYIYSPHLDTAPPRWVHLAHGILLFLYQTFDAVDGKQARRTSSSSPLGELFDHGCDALACAFEALALGSTLMCGRLTFCYWVVAAVPFYLATWEHYFTNTLILPVINGPTEGLMLIYVSHLFTCFTGAEWWAQDFRKSLPLISLVPLPFVPEIPLYVIVLILMITFAVIPTVGSNIGNVQKVVDARKGSMELALAMLLPFIALLAGVAVWCYLSPSDIMRNQPHLLVIGTGSAFGYLVGRMILAHLCDEPKGLKTGMCMALVFLPFAIANALTAKINNGTPLADELLVILLYCATSVGLYMHLAISVCHEIKDALGIYCFRIARKEA

SEQ ID NO: 64911 - protein, 347 aa, Triticum aestivum
  peptide (1)..(347): Ceres Seq. ID no. 15219809
MPPNMITLMGFMFLLTSSLLSYIYSPHLDTAPPRWVHLAHGILLFLYQTFDAVDGKQARRTSSSSPLGELFDHGCDALACAFEALALGSTLMCGRLTFCYWVVAAVPFYLATWEHYFTNTLILPVINGPTEGLMLIYVSHLFTCFTGAEWWAQDFRKSLPLISLVPLPFVPEIPLYVIVLILMITFAVIPTVGSNIGNVQKVVDARKGSMELALAMLLPFIALLAGVAVWCYLSPSDIMRNQPHLLVIGTGSAFGYLVGRMILAHLCDEPKGLKTGMCMALVFLPFAIANALTAKINNGTPLADELLVILLYCATSVGLYMHLAISVCHEIKDALGIYCFRIARKEA

SEQ ID NO: 64912 - DNA, 1175 bp, Triticum aestivum
  misc_feature (1)..(1175): Ceres Seq. ID no. 13662758
attcggcctccagccctttaaaccccacaaaaccctagacttcgcagcgagcagccgtcgtccgatccccacagaaacaccaaagcccgagccatgtcgtcggcgtccctcgccgccaggctcctccgccgcgccgccthttcgtcgcgggcctccaccctatcccgacgctgcgcccactcctccgcgacgtcccgcgcgcccgtttcgcttgcccgtttccaccccgccgccgcctccccttcagggaccactgcccgccgcttcctgtcgtcgcagtccccggcgtcttcctccaagatctccccggacgagaacctgaggcgggtcatcgactccgagatcgagtgcgtcgtcgaatcggaggagggctccgcgcagcaaattgatccaccagaagacttcccctttgagataattgataaccctggtgatcagtccatcgttctcaaaagagagcttgcaggagagactattaaagctactgtctacacaaattttgatactgaggaagatttgaacaatgaggactctggtgctgagaatgatgatgactcatttaagccagcacttcagatggttgtcactgttgagaaaccaggaggctcaatcctggaatttgagtgcaactttaatgatgatgaactggcaattgaaaatatgaggttgctgaatcgcgatgccaagtttactgagaatgcatatgaggggccacaattctctgatctggacgagagcttgcagaagtcctttcacaggtatcttgaggtgagggggatcaagcactcgctgcatgactggctgcacgagtacatgatgagcaaggatgagaaggagtacgtggtttggttgaagaacatgagagagttcatcgagaaatgagtgccactgcccgtcattctcttttaatagaaagaacatgcctggtgctctatgtcaaacctgtctgatcataattgtgccttgctttctggcacaccaagtctcggtggacgctgagctggatttatattttgctggacctgtttagctgtagaaaagtttcggcatcttatctttcgatgtttaacctgtgatccgttcagatatgatcagttcatgtattttcagccgtgagtatattgctacgtacgttctagaagaaaaaaaaaaaaaaaaaagcttatcgataccgt

SEQ ID NO: 64913 - protein, 262 aa, Triticum aestivum
  peptide (1)..(262): Ceres Seq. ID no. 15220188
  misc_feature (16)..(16): Xaa is any aa, unknown or other
MSSASLAARLLRRAAXSSRASTLSRRCAHSSATSRAPVSLARFHPAAASPSGTTARRFLSSQSPASSSKISPDENLRRVIDSEIECVVESEEGSAQQIDPPEDFPFEIIDNPGDQSIVLKRELAGETIKATVYTNFDTEEDLNNEDSGAENDDDSFKPALQMVVTVEKPGGSILEFECNFNDDELAIENMRLLNRDAKFTENAYEGPQFSDLDESLQKSFHRYLEVRGIKHSLHDWLHEYMMSKDEKEYVVWLKNMREFIEK

SEQ ID NO: 64914 - DNA, 1379 bp, Triticum aestivum
  misc_feature (1)..(1379): Ceres Seq. ID no. 13598527
actcacctcacctcatctcacctgccatcgatatcgctcccttatcccgaaccccaaatccccctctccggtccggcgcctccgtctctctcgccgaacaccatgggctccgacttcaaggccatccctctgatcgatatcagcccgctcgtcgagaagatcgacgaccctgccatggccggcgacgagggtctcctcgacgtcgtccggatgctggacgacgcttgcagggaggccgggttcttctatgtgaaaggccatgggatttcggagtcgctaatgacggaagtcagggatgtcacacgcaagttctttcagctccctcgcgaggaaaaactgaagatcaaaatgacacctcagagtggatatagaggatatcagagagtgggagaaaatgttaccaagggtaaacctgatatgcatgaagcaattgattgctacacgcctatcgaaccaggcagatatggagatcttgctaaaccaatggaaggatctaatttgtggccagattatccatcaaattttgatgcgctgctggaaaactatataagccttctacgagatctttcaaggaagatcatgagaggcatagccttggcactgggtgcgccgttggattctttcgaaggcggagtggcgggagatgctttctgggttctcaggttaattggctatccagtctcagatgacatcccacaagaggaacgcactgatattggatgtggagctcatacagattatggtcttctgacattggtgaatcaggatgatgatatatgtgctcttgaggtcagaaaccagtccggtgagtggatatacgccaagccggtccctggaaccttcgtttgcaacatcggcgacatgctgaaggtttggtcgaatgggatataccagcccacgctccacagagtcgtcaataactcccctcgctaccgtgtatctgtcgccttcttctacgagtcgaacttcgacgctgcggtggaacctgtagagttctgccgggagaaaacgggcggcgttgccaagtatgagaaggtggtgtatggggagcacctagtgcagaaagtcctcaccaacttcgtcatgtaacagtttgggggaggggaggtgaaagcctgaaagggaacaaatttctgtagctgtactgaaaatgatccatcaataaaacccttcgacaaatcagcctcctttctggtcggacaaagtaactgtcccggtgtatcgtgaccaggcaaggcagcacatgaggatttcctctcatctggctttctcgctttgcttgcgttctgcggatcgaaccctcacaactggttcacaatccgttgtaatttcgtgacgacaatgtaaatgcaaccaccaatatgtcttgttgttacttc

SEQ ID NO: 64915 - protein, 362 aa, Triticum aestivum
  peptide (1)..(362): Ceres Seq. ID no. 15222359
THLTSSHLPSISLPYPEPQIPLSGPAPPSLSPNTMGSDFKAIPLIDISPLVEKIDDPAMAGDEGLLDVVRMLDDACREAGFFYVKGHGISESLMTEVRDVTRKFFQLPREEKLKIKMTPQSGYRGYQRVGENVTKGKPDMHEAIDCYTPIEPGRYGDLAKPMEGSNLWPDYPSNFDALLENYISLLRDLSRKIMRGIALALGAPLDSFEGGVAGDAFWVLRLIGYPVSDDIPQEERTDIGCGAHTDYGLLTLVNQDDDICALEVRNQSGEWIYAKPVPGTFVCNIGDMLKVWSNGIYQPTLHRVVNNSPRYRVSVAFFYESNFDAAVEPVEFCREKTGGVAKYEKVVYGEHLVQKVLTNFVM

SEQ ID NO: 64916 - protein, 328 aa, Triticum aestivum
  peptide (1)..(328): Ceres Seq. ID no. 15222360
MGSDFKAIPLIDISPLVEKIDDPAMAGDEGLLDVVRMLDDACREAGFFYVKGHGISESLMTEVRDVTRKFFQLPREEKLKIKMTPQSGYRGYQRVGENVTKGKPDMHEAIDCYTPIEPGRYGDLAKPMEGSNLWPDYPSNFDALLENYISLLRDLSRKIMRGIALALGAPLDSFEGGVAGDAFWVLRLIGYPVSDDIPQEERTDIGCGAHTDYGLLTLVNQDDDICALEVRNQSGEWIYAKPVPGTFVCNIGDMLKVWSNGIYQPTLHRVVNNSPRYRVSVAFFYESNFDAAVEPVEFCREKTGGVAKYEKVVYGEHLVQKVLTNFVM

SEQ ID NO: 64917 - protein, 304 aa, Triticum aestivum
  peptide (1)..(304): Ceres Seq. ID no. 15222361
MAGDEGLLDVVRMLDDACREAGFFYVKGHGISESLMTEVRDVTRKFFQLPREEKLKIKMTPQSGYRGYQRVGENVTKGKPDMHEAIDCYTPIEPGRYGDLAKPMEGSNLWPDYPSNFDALLENYISLLRDLSRKIMRGIALALGAPLDSFEGGVAGDAFWVLRLIGYPVSDDIPQEERTDIGCGAHTDYGLLTLVNQDDDICALEVRNQSGEWIYAKPVPGTFVCNIGDMLKVWSNGIYQPTLHRVVNNSPRYRVSVAFFYESNFDAAVEPVEFCREKTGGVAKYEKVVYGEHLVQKVLTNFVM

SEQ ID NO: 64918 - DNA, 506 bp, Triticum aestivum
  misc_feature (1)..(506): Ceres Seq. ID no. 13597861
cagagagttccgtttcttttctccccctcttcctcgcagaaggagcggcaagtaatccggtcgaattgataggggagacgaggagcagcgatggccgccgctcgagcccgatggcggttcctcgcgctgcccctcgcgctgctcctcgcgatcggctcgtcgcgcggcctcgacgcggcgcccaagccccccgtccccaaggccatctccgacctgagggaggcgatcgtcaaggggctggggctccagtcggaggagctcaaggtgtccgggttcgacgtgagggacgcgctggtggggcatgcggtggcgtacgagttcgacatggaggtcgggaggaaggccgtgccggtgcgactgctcgaggacgtcaaccggtgggacttcgtcgacctgcccatcttccggtcccaggccgacgccgacgacacggcgctcgccgagatcgggcgggggagcttcgaccccacgctgtgttaaacacaataaagttggaactggagggg

SEQ ID NO: 64919 - protein, 168 aa, Triticum aestivum
  peptide (1)..(168): Ceres Seq. ID no. 13597862
ESSVSFLPLFLAEGAASNPVELIGETRSSDGRRSSPMAVPRAAPRAAPRDRLVARPRRGAQAPRPQGHLRPEGGDRQGAGAPVGGAQGVRVRREGRAGGACGGVRVRHGGREEGRAGATARGRQPVGLRRPAHLPVPGRRRRHGARRDRAGELRPHAVLNTIKLELEG

SEQ ID NO: 64920 - protein, 132 aa, Triticum aestivum
  peptide (1)..(132): Ceres Seq. ID no. 13597863
MAVPRAAPRAAPRDRLVARPRRGAQAPRPQGHLRPEGGDRQGAGAPVGGAQGVRVRREGRAGGACGGVRVRHGGREEGRAGATARGRQPVGLRRPAHLPVPGRRRRHGARRDRAGELRPHAVLNTIKLELEG

SEQ ID NO: 64921 - protein, 129 aa, Triticum aestivum
  peptide (1)..(129): Ceres Seq. ID no. 13597864
MAAARARWRFLALPLALLLAIGSSRGLDAAPKPPVPKAISDLREAIVKGLGLQSEELKVSGFDVRDALVGHAVAYEFDMEVGRKAVPVRLLEDVNRWDFVDLPIFRSQADADDTALAEIGRGSFDPTLC

SEQ ID NO: 64922 - DNA, 1491 bp, Triticum aestivum
  misc_feature (1)..(1491): Ceres Seq. ID no. 15169655
actaccaccgccgccgccgccctccccagcccccagatctccacccctcccatctgcaatggcggccgcttcgtcgctccacgtcgccgccccggccgccaccccgcgggtgggatctgccggccccaaatccgcgtcagcggcgaggagcgtgcgcgtggccagatcgggcgcggcggtgcgccctggaggcaggctggtggcttgcgccgccgttgcaaccaaggctgatgcgccggcgagcgaggcggcgtccaagtctgaaggtcatgaggtattgctgtttgaggctcttcgtgagggtttgatggaagagatgcaagcggatccaacggtgtgtgtctttggtgaagatgtcggtcactatgggggttcttacaaggtgaccaagggtttggctgatatgtttggagaccttcgtgttcttgacacaccaattgctgagaactcgttcaccggcatgggagttggagcaggaatgaaggggctgaggcctgttgttgaaggcatgaacatgggcttccttctccttgcttacaaccaaatctcaaacaactgcggtatgcttcattacacctctggcggccagttcaagataccacttgtgatccgaggtcctggtggtgttggtcgtcagcttggtgcagagcattcgcagcgcctggagtcatacttccagtcaatccctggtctccagatggttgcttgctccactccttacaatgccaagggtttaatgaaggctgccataaggagcgagaaccctgtcgtgctatttgagcacgtccttctgtacaacctgaaggagaaaattccggatgaggagtacactctatgcctggaggaggctgagatggtacggcctggtgagcatgtgaccatcctcacatactcgcgtatgaggtaccatgtgatgcaggctgcaaagacgctggtgaacaaagggtacgatcctgaggtgattgacattaggtcgttgaagccattcgatctgcacacaataggcaactccatcaagaagacccaccgcgtgctgattgtggaggagtgcatgcgcactggcgggattggcgccagtctgagatcggccatcatcgacaacttctgggactaccttgacgcccccatcatgtgcctgtcatctcaggacgtgccgacaccctacgccgcaactttggaggatgcgaccgtcgtgcagcctgcccagattgttgcggccgttgagcaaatatgccaatagggcgtcgtctgtttcagcatcgttaatttgtatctgccctggcttggaagaacctttaatttgtcatttttgccttgtagcgaggtgttcattgtggtataggcttgtatccattttttattcctgcttgagttaacacttgagctacataactgtactgtattatgctgaatgctactagggtctgaactcgggtttattggaagaaatctttgaatatcctgggcaaggtataactatgtgttttggct

SEQ ID NO: 64923 - protein, 412 aa, Triticum aestivum
  peptide (1)..(412): Ceres Seq. ID no. 15169656
LPPPPPPSPAPRSPPLPSAMAAASSLHVAAPAATPRVGSAGPKSASAARSVRVARSGAAVRPGGRLVACAAVATKADAPASEAASKSEGHEVLLFEALREGLMEEMQADPTVCVFGEDVGHYGGSYKVTKGLADMFGDLRVLDTPIAENSFTGMGVGAGMKGLRPVVEGMNMGFLLLAYNQISNNCGMLHYTSGGQFKIPLVIRGPGGVGRQLGAEHSQRLESYFQSIPGLQMVACSTPYNAKGLMKAAIRSENPVVLFEHVLLYNLKEKIPDEEYTLCLEEAEMVRPGEHVTILTYSRMRYHVMQAAKTLVNKGYDPEVIDIRSLKPFDLHTIGNSIKKTHRVLIVEECMRTGGIGASLRSAIIDNFWDYLDAPIMCLSSQDVPTPYAATLEDATVVQPAQIVAAVEQICQ

SEQ ID NO: 64924 - protein, 393 aa, Triticum aestivum
  peptide (1)..(393): Ceres Seq. ID no. 15169657
MAAASSLHVAAPAATPRVGSAGPKSASAARSVRVARSGAAVRPGGRLVACAAVATKADAPASEAASKSEGHEVLLFEALREGLMEEMQADPTVCVFGEDVGHYGGSYKVTKGLADMFGDLRVLDTPIAENSFTGMGVGAGMKGLRPVVEGMNMGFLLLAYNQISNNCGMLHYTSGGQFKIPLVIRGPGGVGRQLGAEHSQRLESYFQSIPGLQMVACSTPYNAKGLMKAAIRSENPVVLFEHVLLYNLKEKIPDEEYTLCLEEAEMVRPGEHVTILTYSRMRYHVMQAAKTLVNKGYDPEVIDIRSLKPFDLHTIGNSIKKTHRVLIVEECMRTGGIGASLRSAIIDNFWDYLDAPIMCLSSQDVPTPYAATLEDATVVQPAQIVAAVEQICQ

SEQ ID NO: 64925 - protein, 310 aa, Triticum aestivum
  peptide (1)..(310): Ceres Seq. ID no. 15169658
MEEMQADPTVCVFGEDVGHYGGSYKVTKGLADMFGDLRVLDTPIAENSFTGMGVGAGMKGLRPVVEGMNMGFLLLAYNQISNNCGMLHYTSGGQFKIPLVIRGPGGVGRQLGAEHSQRLESYFQSIPGLQMVACSTPYNAKGLMKAAIRSENPVVLFEHVLLYNLKEKIPDEEYTLCLEEAEMVRPGEHVTILTYSRMRYHVMQAAKTLVNKGYDPEVIDIRSLKPFDLHTIGNSIKKTHRVLIVEECMRTGGIGASLRSAIIDNFWDYLDAPIMCLSSQDVPTPYAATLEDATVVQPAQIVAAVEQICQ

SEQ ID NO: 64926 - DNA, 1702 bp, Triticum aestivum
  misc_feature (1)..(1702): Ceres Seq. ID no. 14302832
attttcacatcaaaatttctcctctttctatccatggccacggacgcacagcaccagcgacacagccgcaacggcggcgtgcacaccggccaccacttcctcatcgtggcctacggcatccagagccacctcaacccgtgccgcgtcctcgcgcaccgcctcgcgcgcctccacggcgtcgacggctccggggccgtcctcgccacggtctccctcccggtgtccgctcaccgccgcatgttcccttcgtccggagacgtcgacaatgatgataaagccaccgacggcgtcgtctcttacgctccatactccgacggcctcgacgacggctccatggccagggacggcgaggcgagggcgcgcagccgccaggccacctttgagagcctgtcagccgtcgtcgccaccctcgccgcacgtggccggccggtgacgtgtgtcgtttgcagcatggttctccccgcggcgctggacgtcgcgcgtgagcacggcatcccgctggccgtgtactggatccaaccggccaccgtgctcgccgcgtactaccactacttccacggccacggcgacctcctcgcgtcccacgccgccgaccccgcgtacgaggtgtccctgcccgggctacaccgccctctccggatccgcgacttcccgtccttcctcgtcgacacgacgggcagcgagctggccaaggtcttcaacgaagcggcccgagaactgttcgagcacttgggcgatcacggctgcaccaaggttctcgtgaacactttcgacgagctggagccggcagcgctggcagccatgaaggagcacctagacgtgttcgccgtcgggccggtgatcgggtcctcctcggccgagccgcgcatccacctgttcaaccacgccggcgccgacgagaagaggtacatggagtggctgggtgcgcaggcggcgaggtcggtgctgtacgtttcatttgggagcatatggacgtacagcaagaagcaaatggaggagattgcgaacgggctgcggcggtgcgggcggccgtacctgctcgtcgtgcgcaatgacgggcggcaggaggacgtgagccggagcctagacgacctcgtgctagaggggcagggcatggtggtggagtggtgcgaccaacccaaggtcctgtcgcacgcgtccgtgggatgcttcgtcacgcactgcggctggaactcgacgctggaggccatggccctcggcgtgccggtcgtcgccgcgccaagcttgttcgaccagccgacgaacgccttcttgatagaggaggagtgggctgccggcgtcagaggggagcgcaacagcgagggcggcttcaccggggaggagctcgcaaggtgcgtcgagctgctcatgggtcatggcccgagggccattgagatcagggaaagagtggacgctctgaaagggatgacgcgagaggcggcggcttcgggcgggccggcggagcggagcctccgaagctttgtcatggcggccggttcaatcgtcggatgaagtttgcaggaatacaccaccaaatctgtccaaatcgattaagtggatgcatgctggagtggatcagctagctctctcgatcggtcggagttaaacaacatttaataaccgggattgctaaatctcagtcgacttcttggtcgatgatatattcgcaggatcttacgtgaagatcggtgcgaattttttt

SEQ ID NO: 64927 - protein, 503 aa, Triticum aestivum
  peptide (1)..(503): Ceres Seq. ID no. 14302833
IFTSKFLLFLSMATDAQHQRHSRNGGVHTGHHFLIVAYGIQSHLNPCRVLAHRLARLHGVDGSGAVLATVSLPVSAHRRMFPSSGDVDNDDKATDGVVSYAPYSDGLDDGSMARDGEARARSRQATFESLSAVVATLAARGRPVTCVVCSMVLPAALDVAREHGIPLAVYWIQPATVLAAYYHYFHGHGDLLASHAADPAYEVSLPGLHRPLRIRDFPSFLVDTTGSELAKVFNEAARELFEHLGDHGCTKVLVNTFDELEPAALAAMKEHLDVFAVGPVIGSSSAEPRIHLFNHAGADEKRYMEWLGAQAARSVLYVSFGSIWTYSKKQMEEIANGLRRCGRPYLLVVRNDGRQEDVSRSLDDLVLEGQGMVVEWCDQPKVLSHASVGCFVTHCGWNSTLEAMALGVPVVAAPSLFDQPTNAFLIEEEWAAGVRGERNSEGGFTGEELARCVELLMGHGPRAIEIRERVDALKGMTREAAASGGPAERSLRSFVMAAGSIVG

SEQ ID NO: 64928 - protein, 492 aa, Triticum aestivum
  peptide (1)..(492): Ceres Seq. ID no. 14302834
MATDAQHQRHSRNGGVHTGHHFLIVAYGIQSHLNPCRVLAHRLARLHGVDGSGAVLATVSLPVSAHRRMFPSSGDVDNDDKATDGVVSYAPYSDGLDDGSMARDGEARARSRQATFESLSAVVATLAARGRPVTCVVCSMVLPAALDVAREHGIPLAVYWIQPATVLAAYYHYFHGHGDLLASHAADPAYEVSLPGLHRPLRIRDFPSFLVDTTGSELAKVFNEAARELFEHLGDHGCTKVLVNTFDELEPAALAAMKEHLDVFAVGPVIGSSSAEPRIHLFNHAGADEKRYMEWLGAQAARSVLYVSFGSIWTYSKKQMEEIANGLRRCGRPYLLVVRNDGRQEDVSRSLDDLVLEGQGMVVEWCDQPKVLSHASVGCFVTHCGWNSTLEAMALGVPVVAAPSLFDQPTNAFLIEEEWAAGVRGERNSEGGFTGEELARCVELLMGHGPRAIEIRERVDALKGMTREAAASGGPAERSLRSFVMAAGSIVG

SEQ ID NO: 64929 - protein, 424 aa, Triticum aestivum
  peptide (1)..(424): Ceres Seq. ID no. 14302835
MFPSSGDVDNDDKATDGVVSYAPYSDGLDDGSMARDGEARARSRQATFESLSAVVATLAARGRPVTCVVCSMVLPAALDVAREHGIPLAVYWIQPATVLAAYYHYFHGHGDLLASHAADPAYEVSLPGLHRPLRIRDFPSFLVDTTGSELAKVFNEAARELFEHLGDHGCTKVLVNTFDELEPAALAAMKEHLDVFAVGPVIGSSSAEPRIHLFNHAGADEKRYMEWLGAQAARSVLYVSFGSIWTYSKKQMEEIANGLRRCGRPYLLVVRNDGRQEDVSRSLDDLVLEGQGMVVEWCDQPKVLSHASVGCFVTHCGWNSTLEAMALGVPVVAAPSLFDQPTNAFLIEEEWAAGVRGERNSEGGFTGEELARCVELLMGHGPRAIEIRERVDALKGMTREAAASGGPAERSLRSFVMAAGSIVG

SEQ ID NO: 64930 - DNA, 1958 bp, Triticum aestivum
  misc_feature (1)..(1958): Ceres Seq. ID no. 15169647
atcccgcatcgcatcgcactaggtctcggacattcctctttctctcccttgcttggggaagaagaagaagaagaagagagggctcccgacgccgtcgcccctcgccgccgatctgatctcaggagccagcgaagatgcattccaccaatctgctcctcgaggagcccatccggatggtctccatcctcgagccatccaagccgaacttcttcccggcgatgacgaagatcgtggggacgctgggtcccaagtcccggtccgttgaggccatctccgcctgtctaaaggccggcatgtctgtggcccgtttcgatttctcgtggggggatgccgcgtaccaccaggagacactcgagaacctcaagctcgccatcaaggccaccaagaagctatgtgctgttatgctcgacactgttggccctgagttgcaagtggtgaacaagagtgaagtcacaatctcgcttgaagagaacgagtctgttgttctcacccctcacaagggccaggaggcctcttccaagttgctccctatcaacttcgctggactcgccaaggctgtgaagcccggagccacaatattcgttgggcaatatttgttcacgggcagtgagactacatcagtttggctggaggtttctgaagttcaaggggatgacgtggtttgcgtgatcaagaactcagctaccctggctgggtcactcttcacattgcactgctcccagatccatatcgacatgcccacgctgtctgatgaggataaagatgttatgaaaaaatggggtgctccaaacaagattgacttcctctctctttcttatacaaggcacgcagaagatgtgcggcaagcacgggagttcctctctaagttaggtgatcttagccaaactctgatttttgccaaaattgagaatgtggagggcttgaaccattttgatgagatcctggaggaagcggatggtatcattctgtcaagagggaaccttggaattgatcttccacctgaaaaggtgttcttatttcagaagtctgctctgcacaagtgcaacatggctggaaagcctgctgttgttactcgtgttgtggacagtatgacggacaacctaaggcctactcgtgcggaggcaactgatgtggcaaatgcggtgctggatggtagtgatgccattctccttggtgccgagactctccgtgggttgtatccagttgagactatttcaacagtgggcagaatttgtgctgaggctgagaaggttttcaaccaagatttgtacttcaagcgaactgtgaaatatgtgggagaacccatgacccacttggagtctattgcttcctctgcagtgcgggctgctattaaagttaaggcttcggtcatcatttgcttcacctcatctggacgggctgcaaggctaattgccaagtacaggcccaccatgcctgtcctctctgttgtcattcctcgtctgaaaacaaatcaattgaagtggagcttcacaggtgcatttgaggcaagacaatcactcatagttagaggcctctttcccatgcttgccgatccacgtcatccggctgaatctactagcactacaaatgaatcagtgttgaaggttgctcttgaccacggcaaagcatccggtgtgatcaagtcgcatgaccgcgttgtcgtgtgccagaaagtgggagattcctctgtcgtgaagatcattgagctggacgactaggcaaaattagtctttgctcagggcttgccagatttttgactaggccaaaacgttgcttggtggctatgtataattctatctatagttttgcaaaacgagcagtttttcctatggtgtcatcataggatccgcggttaccattcgaaaacctacgctagttattatggatatgtcctcagattttactgcagtgtagcgagtaaatgatctgatggaataatgatatcaaaactttgtgac

SEQ ID NO: 64931 - protein, 527 aa, Triticum aestivum
  peptide (1)..(527): Ceres Seq. ID no. 15169648
MHSTNLLLEEPIRMVSILEPSKPNFFPAMTKIVGTLGPKSRSVEAISACLKAGMSVARFDFSWGDAAYHQETLENLKLAIKATKKLCAVMLDTVGPELQVVNKSEVTISLEENESVVLTPHKGQEASSKLLPINFAGLAKAVKPGATIFVGQYLFTGSETTSVWLEVSEVQGDDVVCVIKNSATLAGSLFTLHCSQIHIDMPTLSDEDKDVMKKWGAPNKIDFLSLSYTRHAEDVRQAREFLSKLGDLSQTLIFAKIENVEGLNHFDEILEEADGIILSRGNLGIDLPPEKVFLFQKSALHKCNMAGKPAVVTRVVDSMTDNLRPTRAEATDVANAVLDGSDAILLGAETLRGLYPVETISTVGRICAEAEKVFNQDLYFKRTVKYVGEPMTHLESIASSAVRAAIKVKASVIICFTSSGRAARLIAKYRPTMPVLSVVIPRLKTNQLKWSFTGAFEARQSLIVRGLFPMLADPRHPAESTSTTNESVLKVALDHGKASGVIKSHDRVVVCQKVGDSSVVKIIELDD

SEQ ID NO: 64932 - protein, 514 aa, Triticum aestivum
  peptide (1)..(514): Ceres Seq. ID no. 15169649
MVSILEPSKPNFFPAMTKIVGTLGPKSRSVEAISACLKAGMSVARFDFSWGDAAYHQETLENLKLAIKATKKLCAVMLDTVGPELQVVNKSEVTISLEENESVVLTPHKGQEASSKLLPINFAGLAKAVKPGATIFVGQYLFTGSETTSVWLEVSEVQGDDVVCVIKNSATLAGSLFTLHCSQIHIDMPTLSDEDKDVMKKWGAPNKIDFLSLSYTRHAEDVRQAREFLSKLGDLSQTLIFAKIENVEGLNHFDEILEEADGIILSRGNLGIDLPPEKVFLFQKSALHKCNMAGKPAVVTRVVDSMTDNLRPTRAEATDVANAVLDGSDAILLGAETLRGLYPVETISTVGRICAEAEKVFNQDLYFKRTVKYVGEPMTHLESIASSAVRAAIKVKASVIICFTSSGRAARLIAKYRPTMPVLSVVIPRLKTNQLKWSFTGAFEARQSLIVRGLFPMLADPRHPAESTSTTNESVLKVALDHGKASGVIKSHDRVVVCQKVGDSSVVKIIELDD

SEQ ID NO: 64933 - protein, 499 aa, Triticum aestivum
  peptide (1)..(499): Ceres Seq. ID no. 15169650
MTKIVGTLGPKSRSVEAISACLKAGMSVARFDFSWGDAAYHQETLENLKLAIKATKKLCAVMLDTVGPELQVVNKSEVTISLEENESVVLTPHKGQEASSKLLPINFAGLAKAVKPGATIFVGQYLFTGSETTSVWLEVSEVQGDDVVCVIKNSATLAGSLFTLHCSQIHIDMPTLSDEDKDVMKKWGAPNKIDFLSLSYTRHAEDVRQAREFLSKLGDLSQTLIFAKIENVEGLNHFDEILEEADGIILSRGNLGIDLPPEKVFLFQKSALHKCNMAGKPAVVTRVVDSMTDNLRPTRAEATDVANAVLDGSDAILLGAETLRGLYPVETISTVGRICAEAEKVFNQDLYFKRTVKYVGEPMTHLESIASSAVRAAIKVKASVIICFTSSGRAARLIAKYRPTMPVLSVVIPRLKTNQLKWSFTGAFEARQSLIVRGLFPMLADPRHPAESTSTTNESVLKVALDHGKASGVIKSHDRVVVCQKVGDSSVVKIIELDD

SEQ ID NO: 64934 - DNA, 1017 bp, Triticum aestivum
  misc_feature (1)..(1017): Ceres Seq. ID no. 15226273
cacagactcagagcgaagggacgacgagacgcacctgccaggtctacacgcgccgccgcctccaggaccctctgcccctcgccgccgcctccaggaccccctgcccctcgccgccgcaggcaccgcgccgcctccgtcctccactgcagcaggcagcagattgaagttatggccctggttaataagcttggtaatctgctcaagaaggccaccagctcgaacccgactctctatcaggcgataagatgcatgtcatcctcgaagctcttcgtaggagggctttcctttaacacagacgagggcagtctgagagatgctttttcccattatggggaaattattgatgctaagattatcgtagaccgcgacactggcaggtctagaggttttggctttataacttatgcagcagaagaacaggcttcatctgccatcatggccttggatggaaaggatctacatggacgcaacctacgggttagtgctgccactgagaggaccgctggcttccgtaatggtgctggttatggaggtggtggtggcggctttggaggaggaggatatggcggtggtggctatggaggaggtggttatggtagcaacagtggtggtggcggcgacaactttgctgccggcaactttggtggtgccagtggcttcggtggaaacccagctggaaaccatggtgctcctgcaggttccaccggtggtgatgagttctccctcggcacccctggttccacctttgaaagcaccaagaatgacgatgtcatggacgacctcttcaaggatgatgaacctgacaagtacgccagcaagaatgtctagggctccagtctgcatctccttctgcaagtccctagttatgtaccttggataagtgtgaggtgaatgatcctccagaccagagactactttcttgatgactgtctagagaccaaaataacttatgcgttgaggtgacaatgagaatgcacgttcagtttacctgatttagctttttttttctctcttcac

SEQ ID NO: 64935 - protein, 275 aa, Triticum aestivum
  peptide (1)..(275): Ceres Seq. ID no. 15226274
HRLRAKGRRDAPARSTRAAASRTLCPSPPPPGPPAPRRRRHRAASVLHCSRQQIEVMALVNKLGNLLKKATSSNPTLYQAIRCMSSSKLFVGGLSFNTDEGSLRDAFSHYGEIIDAKIIVDRDTGRSRGFGFITYAAEEQASSAIMALDGKDLHGRNLRVSAATERTAGFRNGAGYGGGGGGFGGGGYGGGGYGGGGYGSNSGGGGDNFAAGNFGGASGFGGNPAGNHGAPAGSTGGDEFSLGTPGSTFESTKNDDVMDDLFKDDEPDKYASKNV

SEQ ID NO: 64936 - protein, 219 aa, Triticum aestivum
  peptide (1)..(219): Ceres Seq. ID no. 15226275
MALVNKLGNLLKKATSSNPTLYQAIRCMSSSKLFVGGLSFNTDEGSLRDAFSHYGEIIDAKIIVDRDTGRSRGFGFITYAAEEQASSAIMALDGKDLHGRNLRVSAATERTAGFRNGAGYGGGGGGFGGGGYGGGGYGGGGYGSNSGGGGDNFAAGNFGGASGFGGNPAGNHGAPAGSTGGDEFSLGTPGSTFESTKNDDVMDDLFKDDEPDKYASKNV

SEQ ID NO: 64937 - protein, 192 aa, Triticum aestivum
  peptide (1)..(192): Ceres Seq. ID no. 15226276
MSSSKLFVGGLSFNTDEGSLRDAFSHYGEIIDAKIIVDRDTGRSRGFGFITYAAEEQASSAIMALDGKDLHGRNLRVSAATERTAGFRNGAGYGGGGGGFGGGGYGGGGYGGGGYGSNSGGGGDNFAAGNFGGASGFGGNPAGNHGAPAGSTGGDEFSLGTPGSTFESTKNDDVMDDLFKDDEPDKYASKNV

SEQ ID NO: 64938 - DNA, 1416 bp, Triticum aestivum
  misc_feature (1)..(1416): Ceres Seq. ID no. 13598528
atttttctccaaaaccctcccggctactccccttctcgtctttttcttgtagtaccacatcgcaaaacaagagaaaaatccggaccttgcggctttcccccttgctcggctgctaaccggattcgcgtctcaggctcgggatccgggcgttccgtgcgatgggcggcggcggcggcggcggcggcggcggcgcggaggaggagctgacggcgcaggagacggcgctctacgaccgccagatccgcgtctggggcgtcgatgcccagaagaggctaagtaaggcgcatgtgcttgtgtgcggcgtcaacggtactactattgagttctgcaagaacattgttctagcaggagttggcagtttatcattgatggacgatcacatggtcacagaggatgatctcaattcaaacttcctaattcctcatgatgagagtgtgtatggtggtaaatcacgggcagaggtttgctgcgagtccttaaaagatttcaatccaatggtccgagttgctgttgcaaaaggtaacccatcactaattgatggaacattcattgacatgttcgacattattgtagtcagctgcgcatctcttaaaacaaagttgtttattaatgacaactgccggaagagaagcaagcatattgccttctactctgtagagtgcaaggattcttgtggtgaaatatttgttgatctgcaggaccatagctatcttcagaagaagcctggaggagaacctgaacagcaggagttgaaatatcctagtctgcaggaagctatttctgtgccctggaaggatctgtccaaaagaacaactaaattgtactacgcaatgagagtcttggaaagttatgaatcatctgaagggcgcgaccctggtgagacatcactttctgatctgcctgcagttttggctcggaggaaggatatgtgtgatagaatgtctgtggacgagtctaaaattcctacgtctcttctggaacggcttctagcagctgggaaaaaggaacatcctcctgtatgtgcaatccttggtggcattcttggtcaggaggtgatcaaatcaatatcttgcaagggcgatccgatcaagaatttcttttacttcgacgatgctgatggtaaaggggccatggaggacatccccccaactcctgaagactaaatcacgtgatacctaactctcatccgacatggcttgctgataattgtacccaatcattagagtcgaacatgtgacaactctagttcagtggctgaggctggaaactcaactcagcactttagtgtttttattattgtacttagcgttcgttttagcgttggcatcatgctatggcacctgggtactgcgatgaacagaactgacattctcgtccaaagaatttcaaagctgaaggcaggcatgctattgaatg

SEQ ID NO: 64939 - protein, 334 aa, Triticum aestivum
  peptide (1)..(334): Ceres Seq. ID no. 13598529
MGGGGGGGGGGAEEELTAQETALYDRQIRVWGVDAQKRLSKAHVLVCGVNGTTIEFCKNIVLAGVGSLSLMDDHMVTEDDLNSNFLIPHDESVYGGKSRAEVCCESLKDFNPMVRVAVAKGNPSLIDGTFIDMFDIIVVSCASLKTKLFINDNCRKRSKHIAFYSVECKDSCGEIFVDLQDHSYLQKKPGGEPEQQELKYPSLQEAISVPWKDLSKRTTKLYYAMRVLESYESSEGRDPGETSLSDLPAVLARRKDMCDRMSVDESKIPTSLLERLLAAGKKEHPPVCAILGGILGQEVIKSISCKGDPIKNFFYFDDADGKGAMEDIPPTPED

SEQ ID NO: 64940 - protein, 264 aa, Triticum aestivum
  peptide (1)..(264): Ceres Seq. ID no. 13598530
MDDHMVTEDDLNSNFLIPHDESVYGGKSRAEVCCESLKDFNPMVRVAVAKGNPSLIDGTFIDMFDIIVVSCASLKTKLFINDNCRKRSKHIAFYSVECKDSCGEIFVDLQDHSYLQKKPGGEPEQQELKYPSLQEAISVPWKDLSKRTTKLYYAMRVLESYESSEGRDPGETSLSDLPAVLARRKDMCDRMSVDESKIPTSLLERLLAAGKKEHPPVCAILGGILGQEVIKSISCKGDPIKNFFYFDDADGKGAMEDIPPTPED

SEQ ID NO: 64941 - protein, 260 aa, Triticum aestivum
  peptide (1)..(260): Ceres Seq. ID no. 13598531
MVTEDDLNSNFLIPHDESVYGGKSRAEVCCESLKDFNPMVRVAVAKGNPSLIDGTFIDMFDIIVVSCASLKTKLFINDNCRKRSKHIAFYSVECKDSCGEIFVDLQDHSYLQKKPGGEPEQQELKYPSLQEAISVPWKDLSKRTTKLYYAMRVLESYESSEGRDPGETSLSDLPAVLARRKDMCDRMSVDESKIPTSLLERLLAAGKKEHPPVCAILGGILGQEVIKSISCKGDPIKNFFYFDDADGKGAMEDIPPTPED

SEQ ID NO: 64942 - DNA, 1292 bp, Triticum aestivum
  misc_feature (1)..(1292): Ceres Seq. ID no. 13597533
aaccaaacccaacggctccgcagtccgcaccaacccctccccctcgccccaaccgccgccctcctcgcctccaccggaagagctgctccccccgcaaccgggcggatcccgctaggcggaggcggagatccggcagccgccatggcggcgagcgacgtgcccatgagccccgagctcgagcaggtcgacggcgagatccaggacatcttccgcgccctacacaatgggttccagaagattgacaagatgaaggactccaacaggcagtccaagcagctggaagaactcactgggaagatgagggagtgcaagcgcttaatcaaggaatttgatcgtgtactcaaagatgaggagaaaagcaatacttctgaggtcaacaaacagctaaatgacaagaagcaatttatgatcaaggagttgaattcttatgtcaccatgaggaagacgtaccaaagtagccttggtaataagaggatcgaactattcgatgctggtaatgaccaggtagctgaagataacgttcaaatggcatcagaaatgtcaaatcaacaactgattgattctggaatgaaacaaatggaccaaacagaccaagctattgagcgttcgaaaatggttgttgcacaaactgttgatgttggagctcaaactgctacaactctaacacagcaaactgaccaaatgaagagaattggcaatgagctagattccgttcacttctcattgaagaaagctagtcaaatggtgaaagagattggtcgtcaggttgcaactgacaaatgcatcatggggtttctgtttttgatagtttgtggtgtgattgcgatcattgttgtcaagatcgtcaacccgcataacaagagcatcccagacatcccgggactggcgcctcctgcacctcctgcgcagaaccggaagctgctatccgtagatcctttcagaatgctctgagcattcgggaatggaagtctcgtgccatgcaggtctctcgctctgaagccaaaacacacgatgtcaactgttccattggtgcttgcttgtacattatacccgtatgtaattttctttgattggttcattctttccacactggttgctgttagcttcggattgttagtagcacttcggttgtgtggtgtttaaattgcctggctttcttggttgtgtacatgcgttagtggtgaccagtgagagttatgcgattaatgtttgctcgtataccttcctaaaaccagccgattctattcattatgagaatgtgaatgttggccatccattatcctggccttgtg

SEQ ID NO: 64943 - protein, 316 aa, Triticum aestivum
  peptide (1)..(316): Ceres Seq. ID no. 13597534
NQTQRLRSPHQPLPLAPTAALLASTGRAAPPATGRIPLGGGGDPAAAMAASDVPMSPELEQVDGEIQDIFRALHNGFQKIDKMKDSNRQSKQLEELTGKMRECKRLIKEFDRVLKDEEKSNTSEVNKQLNDKKQFMIKELNSYVTMRKTYQSSLGNKRIELFDAGNDQVAEDNVQMASEMSNQQLIDSGMKQMDQTDQAIERSKMVVAQTVDVGAQTATTLTQQTDQMKRIGNELDSVHFSLKKASQMVKEIGRQVATDKCIMGFLFLIVCGVIAIIVVKIVNPHNKSIPDIPGLAPPAPPAQNRKLLSVDPFRML

SEQ ID NO: 64944 - protein, 269 aa, Triticum aestivum
  peptide (1)..(269): Ceres Seq. ID no. 13597535
MAASDVPMSPELEQVDGEIQDIFRALHNGFQKIDKMKDSNRQSKQLEELTGKMRECKRLIKEFDRVLKDEEKSNTSEVNKQLNDKKQFMIKELNSYVTMRKTYQSSLGNKRIELFDAGNDQVAEDNVQMASEMSNQQLIDSGMKQMDQTDQAIERSKMVVAQTVDVGAQTATTLTQQTDQMKRIGNELDSVHFSLKKASQMVKEIGRQVATDKCIMGFLFLIVCGVIAIIVVKIVNPHNKSIPDIPGLAPPAPPAQNRKLLSVDPFRML

SEQ ID NO: 64945 - protein, 262 aa, Triticum aestivum
  peptide (1)..(262): Ceres Seq. ID no. 13597536
MSPELEQVDGEIQDIFRALHNGFQKIDKMKDSNRQSKQLEELTGKMRECKRLIKEFDRVLKDEEKSNTSEVNKQLNDKKQFMIKELNSYVTMRKTYQSSLGNKRIELFDAGNDQVAEDNVQMASEMSNQQLIDSGMKQMDQTDQAIERSKMVVAQTVDVGAQTATTLTQQTDQMKRIGNELDSVHFSLKKASQMVKEIGRQVATDKCIMGFLFLIVCGVIAIIVVKIVNPHNKSIPDIPGLAPPAPPAQNRKLLSVDPFRML

SEQ ID NO: 64946 - DNA, 1053 bp, Triticum aestivum
  misc_feature (1)..(1053): Ceres Seq. ID no. 12586495
atatcaaatcagtcatacactatcattgttctcctttccatttcctatataagcacgcacctcacacgcttcttctccacccatccgaaaccacacccactagctcccagctgcagcaagcaagccaaacttgtgcgtgtgagtgagtgagcgagagctcagggaaaccaccctacaaagctccggctgagccacccaaccggccggcgacgatgccgatgctcatccccgacgacgtgcgcgccaaggcggagatctacaccggcgacgcagcggggcaggagaagacgcggctgatgctggctgacacggagcttcccagcggtctcctgccgctcaaggacatcatcgagtgcgggtacgtggaggagaccggcttcgtgtggctcaagcagaagaagcgggtggaccactacttcgtcaaggccggccgccatgtctcctacgccaccgaggtctccgccatcgccgagaagggccgcctgaagaagatctccggcgtcaaggccaaggagatgctcatctgggtcaacctccacgagatctgcgtcgacgacccgcccaccggcaagctccactgcaaggccatcggcggcctctcccgcagcttccccgtggaggcattcgaggccaccgacgacctgcccgtgcccgtcaccggacgtctcaagaagaagacagagaaagagagcaccgacaagaaagacgagaagaaggaggcagcagagaagccgaaggaggaggcagcagagaagcccaagggggcctccgtcgcccccgcccccgccgccgtcgacgagatcggtcagaaaatgaaggagatgaacacggaagcggtggcagccaagaactgatcggtggcggcgatggcgacggcggcacgtcatgatcggttacctagtcataaatttgtttcagaataacgcattgcattagcatgtcatcaaccacccacacatatgtatcacctgatccatcgatgagagttcagttcgacaacgatgtaatttcctcctgccttttttctggttttaatgtgatgaaatttaatgc

SEQ ID NO: 64947 - protein, 213 aa, Triticum aestivum
  peptide (1)..(213): Ceres Seq. ID no. 12586496
MPMLIPDDVRAKAEIYTGDAAGQEKTRLMLADTELPSGLLPLKDIIECGYVEETGFVWLKQKKRVDHYFVKAGRHVSYATEVSAIAEKGRLKKISGVKAKEMLIWVNLHEICVDDPPTGKLHCKAIGGLSRSFPVEAFEATDDLPVPVTGRLKKKTEKESTDKKDEKKEAAEKPKEEAAEKPKGASVAPAPAAVDEIGQKMKEMNTEAVAAKN

SEQ ID NO: 64948 - protein, 211 aa, Triticum aestivum
  peptide (1)..(211): Ceres Seq. ID no. 12586497
MLIPDDVRAKAEIYTGDAAGQEKTRLMLADTELPSGLLPLKDIIECGYVEETGFVWLKQKKRVDHYFVKAGRHVSYATEVSAIAEKGRLKKISGVKAKEMLIWVNLHEICVDDPPTGKLHCKAIGGLSRSFPVEAFEATDDLPVPVTGRLKKKTEKESTDKKDEKKEAAEKPKEEAAEKPKGASVAPAPAAVDEIGQKMKEMNTEAVAAKN

SEQ ID NO: 64949 - protein, 185 aa, Triticum aestivum
  peptide (1)..(185): Ceres Seq. ID no. 12586498
MLADTELPSGLLPLKDIIECGYVEETGFVWLKQKKRVDHYFVKAGRHVSYATEVSAIAEKGRLKKISGVKAKEMLIWVNLHEICVDDPPTGKLHCKAIGGLSRSFPVEAFEATDDLPVPVTGRLKKKTEKESTDKKDEKKEAAEKPKEEAAEKPKGASVAPAPAAVDEIGQKMKEMNTEAVAAKN

SEQ ID NO: 64950 - DNA, 902 bp, Triticum aestivum
  misc_feature (1)..(902): Ceres Seq. ID no. 15227083
aaaaaaaaacacatgcgccgtaatggcccttaggtgcgcggccggcggcggcggcggcggcggcgcctacctgacgccgcggaggagcagatgctgcggcgtcggctctgcgcgaccctcagccacgaccagggggacacgagggctcagcctcctcctgaggatcccgtcctcacaatactccgaagctccatgggcgttgcgctgctcgcctgattcccctcctctggagggtgaccagcattcagatcgaactggggcgctgggggcgctgaaggccatggtgtgcgacatgttcaggcccctggcgcgcaacatctcggatatccgatcccttcgcactgtctttgacctcgaggattatcaagtcggcatgctgtttggtgcttttcttggctgcgtcgggtgctaccagctgtggaaggctgctccttccatctttgttgatgctgcccttgcctatgcattctataaactgagcgttatgtcctcggaggtgcgccggcagggcaaatgcaatgatttgctgactcgcttgaaatttggtattgtggttattatggctactaaggacttcaggaagaactatgaactcttggatattgtcaagatgcctgttttctttctttatctttcgacattcatctttgatgtggcacgcatgaagaaatatgcaaagcattatctgattctcacagttaatttattgagaatgaagggcggagctcaagaattgttcagaataatgttttatccgagctatacatctccatatgatgattgcttccgtaggaaataaaatgtagacccctgagattgtgtggatctgtttatgtgagatttttatataagaatttttagtataatgtgtaataacatttatgtaatgctagtttacttgc

SEQ ID NO: 64951 - protein, 265 aa, Triticum aestivum
  peptide (1)..(265): Ceres Seq. ID no. 15227084
KKNTCAVMALRCAAGGGGGGGAYLTPRRSRCCGVGSARPSATTRGTRGLSLLLRIPSSQYSEAPWALRCSPDSPPLEGDQHSDRTGALGALKAMVCDMFRPLARNISDIRSLRTVFDLEDYQVGMLFGAFLGCVGCYQLWKAAPSIFVDAALAYAFYKLSVMSSEVRRQGKCNDLLTRLKFGIVVIMATKDFRKNYELLDIVKMPVFFLYLSTFIFDVARMKKYAKHYLILTVNLLRMKGGAQELFRIMFYPSYTSPYDDCFRRK

SEQ ID NO: 64952 - protein, 258 aa, Triticum aestivum
  peptide (1)..(258): Ceres Seq. ID no. 15227085
MALRCAAGGGGGGGAYLTPRRSRCCGVGSARPSATTRGTRGLSLLLRIPSSQYSEAPWALRCSPDSPPLEGDQHSDRTGALGALKAMVCDMFRPLARNISDIRSLRTVFDLEDYQVGMLFGAFLGCVGCYQLWKAAPSIFVDAALAYAFYKLSVMSSEVRRQGKCNDLLTRLKFGIVVIMATKDFRKNYELLDIVKMPVFFLYLSTFIFDVARMKKYAKHYLILTVNLLRMKGGAQELFRIMFYPSYTSPYDDCFRRK

SEQ ID NO: 64953 - protein, 172 aa, Triticum aestivum
  peptide (1)..(172): Ceres Seq. ID no. 15227086
MVCDMFRPLARNISDIRSLRTVFDLEDYQVGMLFGAFLGCVGCYQLWKAAPSIFVDAALAYAFYKLSVMSSEVRRQGKCNDLLTRLKFGIVVIMATKDFRKNYELLDIVKMPVFFLYLSTFIFDVARMKKYAKHYLILTVNLLRMKGGAQELFRIMFYPSYTSPYDDCFRRK

SEQ ID NO: 64954 - DNA, 1888 bp, Triticum aestivum
  misc_feature (1)..(1888): Ceres Seq. ID no. 13597865
tttcgttctttgggtgaattgtacccaacagcctcccaccccagtccccaccccgagcccgtgaaaccctagcgcattcgtacgccggcggcgatgtcgggctaccctttttacccgtacggccgcggtggcgtaggcgacgatgcgtcggcgatgtcggactacccttttcacccatacggccgtggtggggtaggcgacaatgcggcggcgaggtactcttcctacgagatcgacctcatcgcggcgcgctacgctggcgacccgtcatcctacccctacccctccgcctccggcggattcgacccgcatgtcggcgcgaggcgacccgcagatgttctctatcatcaatctattatgggaagccatagtactattgggcagagtgatgcattttattctccgaacactatggtcaaacgccctaggcttgaaagcagccttcctatttatccacagcgacctggggaaaaggagtgtgcwttctatatgaggaccagaacatgtaagtacgaagaaacctgcaaatttgaccatccacaatgggttccagagggcgggattccaaattggaaagagggtacaaaggctggggaatcctatcccgaacgtccaggggaaccaaattgtccttttyttgtaaagactggtgagtgtaagtttgggtctaaatgcaagttcamccatccaaagaaaaaggatgmcggaacagtggctggwccaggcgataaagagtctctattttctgctaattctaccttaccggtgaagccttctgakccttgtccggagtctstaatttctggtaattctaccttaccggtgaagccttctaaaccttgtccgcwctatgcaaaaggcaaatgcaaattaggaacaaattgtaagttcattcatgcaaaggatatggagccaccttcmrgtggtggaaatgaatctgaaaatacagcamctgctgaagcagcagggcaccatggygcagtgcatgattcagtttcagcawagaagytagcaccagttgctctggagcataactcaaagggcatgcctataagaccaggtgaagttgattgctcattttatattmmsmcskscagytscadytgtatgtgtwtrrwagaacatgtcggttcaaccatcctgaacgacatattcaagcatctgttgtccctggcgagatgctaaatccagctgtgaaattcctgccgagctttgattttcgcgtgacacatgtgccgattgaacctgagccaatcacctaccctcagaggcctggagaaactgtttgtgatttctataagaagacaggattttgtaaattttctgaaaaatgcaagtttcaccatccagttgatcggtctgcacctgattccattgcaaagtgggagccgtctcagcaacctgtgacgcttactgttgctggctttccaaggagagaggatgctgaggcttgtgcctattacatgaagaccggcgcatgcaagtttggcgtccagtgcaagtttgaccacccgccccttggggaggccattgccaaggtttcgaagcatggagaaggaaaggaaggtggaaagaagaaggtggtaggactgagttatgtcctggaaaattagacccgctcaagttccccgtccccatttccattccgagcatgtttccgtcatcagacctgtggtatagtatagtggcagcagcactgcaggagataaagcagagcacgctctgcctgtgcgcggttggttaacgttgttactcgtcatggctttacttactagctgacctctgaatctggtgtaccgttggttcctcgcttgcgcgggatagtagcaatggatgtctggctggtgcagtcgccatgccgtggtagtaagggtccgtgatggctgcc

SEQ ID NO: 64955 - protein, 363 aa, Triticum aestivum
  peptide (1)..(363): Ceres Seq. ID no. 15222218
  misc_feature (130)..(130): Xaa is any aa, unknown or other
  misc_feature (182)..(182): Xaa is any aa, unknown or other
  misc_feature (197)..(197): Xaa is any aa, unknown or other
  misc_feature (204)..(204): Xaa is any aa, unknown or other
  misc_feature (209)..(209): Xaa is any aa, unknown or other
  misc_feature (229)..(229): Xaa is any aa, unknown or other
  misc_feature (235)..(235): Xaa is any aa, unknown or other
  misc_feature (252)..(252): Xaa is any aa, unknown or other
  misc_feature (276)..(276): Xaa is any aa, unknown or other
  misc_feature (277)..(277): Xaa is any aa, unknown or other
  misc_feature (287)..(287): Xaa is any aa, unknown or other
  misc_feature (295)..(295): Xaa is any aa, unknown or other
  misc_feature (304)..(304): Xaa is any aa, unknown or other
  misc_feature (306)..(306): Xaa is any aa, unknown or other
  misc_feature (332)..(332): Xaa is any aa, unknown or other
  misc_feature (333)..(333): Xaa is any aa, unknown or other
  misc_feature (334)..(334): Xaa is any aa, unknown or other
  misc_feature (335)..(335): Xaa is any aa, unknown or other
  misc_feature (336)..(336): Xaa is any aa, unknown or other
  misc_feature (337)..(337): Xaa is any aa, unknown or other
  misc_feature (341)..(341): Xaa is any aa, unknown or other
  misc_feature (342)..(342): Xaa is any aa, unknown or other
MSGYPFYPYGRGGVGDDASAMSDYPFHPYGRGGVGDNAAARYSSYEIDLIAARYAGDPSSYPYPSASGGFDPHVGARRPADVLYHQSIMGSHSTIGQSDAFYSPNTMVKRPRLESSLPIYPQRPGEKECXFYMRTRTCKYEETCKFDHPQWVPEGGIPNWKEGTKAGESYPERPGEPNCPFXVKTGECKFGSKCKFXHPKKKDXGTVAXPGDKESLFSANSTLPVKPSXPCPESXISGNSTLPVKPSKPCPXYAKGKCKLGTNCKFIHAKDMEPPXXGGNESENTAXAEAAGHHXAVHDSVSAXKXAPVALEHNSKGMPIRPGEVDCSFYIXXXXXXCMCXXEHVGSTILNDIFKHLLSLARC

SEQ ID NO: 64956 - protein, 343 aa, Triticum aestivum
  peptide (1)..(343): Ceres Seq. ID no. 15222219
  misc_feature (110)..(110): Xaa is any aa, unknown or other
  misc_feature (162)..(162): Xaa is any aa, unknown or other
  misc_feature (177)..(177): Xaa is any aa, unknown or other
  misc_feature (184)..(184): Xaa is any aa, unknown or other
  misc_feature (189)..(189): Xaa is any aa, unknown or other
  misc_feature (209)..(209): Xaa is any aa, unknown or other
  misc_feature (215)..(215): Xaa is any aa, unknown or other
  misc_feature (232)..(232): Xaa is any aa, unknown or other
  misc_feature (256)..(256): Xaa is any aa, unknown or other
  misc_feature (257)..(257): Xaa is any aa, unknown or other
  misc_feature (267)..(267): Xaa is any aa, unknown or other
  misc_feature (275)..(275): Xaa is any aa, unknown or other
  misc_feature (284)..(284): Xaa is any aa, unknown or other
  misc_feature (286)..(286): Xaa is any aa, unknown or other
  misc_feature (312)..(312): Xaa is any aa, unknown or other
  misc_feature (313)..(313): Xaa is any aa, unknown or other
  misc_feature (314)..(314): Xaa is any aa, unknown or other
  misc_feature (315)..(315): Xaa is any aa, unknown or other
  misc_feature (316)..(316): Xaa is any aa, unknown or other
  misc_feature (317)..(317): Xaa is any aa, unknown or other
  misc_feature (321)..(321): Xaa is any aa, unknown or other
  misc_feature (322)..(322): Xaa is any aa, unknown or other
MSDYPFHPYGRGGVGDNAAARYSSYEIDLIAARYAGDPSSYPYPSASGGFDPHVGARRPADVLYHQSIMGSHSTIGQSDAFYSPNTMVKRPRLESSLPIYPQRPGEKECXFYMRTRTCKYEETCKFDHPQWVPEGGIPNWKEGTKAGESYPERPGEPNCPFXVKTGECKFGSKCKFXHPKKKDXGTVAXPGDKESLFSANSTLPVKPSXPCPESXISGNSTLPVKPSKPCPXYAKGKCKLGTNCKFIHAKDMEPPXXGGNESENTAXAEAAGHHXAVHDSVSAXKXAPVALEHNSKGMPIRPGEVDCSFYIXXXXXXCMCXXEHVGSTILNDIFKHLLSLARC

SEQ ID NO: 64957 - protein, 275 aa, Triticum aestivum
  peptide (1)..(275): Ceres Seq. ID no. 15222220
  misc_feature (42)..(42): Xaa is any aa, unknown or other
  misc_feature (94)..(94): Xaa is any aa, unknown or other
  misc_feature (109)..(109): Xaa is any aa, unknown or other
  misc_feature (116)..(116): Xaa is any aa, unknown or other
  misc_feature (121)..(121): Xaa is any aa, unknown or other
  misc_feature (141)..(141): Xaa is any aa, unknown or other
  misc_feature (147)..(147): Xaa is any aa, unknown or other
  misc_feature (164)..(164): Xaa is any aa, unknown or other
  misc_feature (188)..(188): Xaa is any aa, unknown or other
  misc_feature (189)..(189): Xaa is any aa, unknown or other
  misc_feature (199)..(199): Xaa is any aa, unknown or other
  misc_feature (207)..(207): Xaa is any aa, unknown or other
  misc_feature (216)..(216): Xaa is any aa, unknown or other
  misc_feature (218)..(218): Xaa is any aa, unknown or other
  misc_feature (244)..(244): Xaa is any aa, unknown or other
  misc_feature (245)..(245): Xaa is any aa, unknown or other
  misc_feature (246)..(246): Xaa is any aa, unknown or other
  misc_feature (247)..(247): Xaa is any aa, unknown or other
  misc_feature (248)..(248): Xaa is any aa, unknown or other
  misc_feature (249)..(249): Xaa is any aa, unknown or other
  misc_feature (253)..(253): Xaa is any aa, unknown or other
  misc_feature (254)..(254): Xaa is any aa, unknown or other
MGSHSTIGQSDAFYSPNTMVKRPRLESSLPIYPQRPGEKECXFYMRTRTCKYEETCKFDHPQWVPEGGIPNWKEGTKAGESYPERPGEPNCPFXVKTGECKFGSKCKFXHPKKKDXGTVAXPGDKESLFSANSTLPVKPSXPCPESXISGNSTLPVKPSKPCPXYAKGKCKLGTNCKFIHAKDMEPPXXGGNESENTAXAEAAGHHXAVHDSVSAXKXAPVALEHNSKGMPIRPGEVDCSFYIXXXXXXCMCXXEHVGSTILNDIFKHLLSLARC

SEQ ID NO: 64958 - DNA, 1242 bp, Triticum aestivum
  misc_feature (1)..(1242): Ceres Seq. ID no. 12586696
cgttcgtcagctcgctcaggcgcagcgcggctaaggctgcagcttcctttcctgctggggccagggggctcgttttcagctttctaaactgcgtctgtcttcaaaggggttttgggtgagagagacacccttcgtgtgcttccggtggtggagaagaagagttggcgcgtgccatgtcgcggtcgcgcacggtgcgtatctactgggacgatcccgacgtgacggactcgtccagcgaggacgacgagggctgcgccgctcggagggtgggaaggatggtgcgggagcttccgccggccccggcgccgctggtgcaggcggcggcggcggctccttcaccggagcagtgcagcgcgggagacgacgacctgccaaggcgtgttggtggatgtacccgtgcgcggaagaggctggccaagggcggcggctccgctgcgcagagcaccaagttccgcggcgtcaggcggcggccgtggggcaagtacgcggcggagatccgcgacccgtggcgcggcgtgcgcgtctggctcggcactttcgacaccgccgaggaggccgcgcgcgtgtacgacaacgcggccattcagctccgcggcgccaccgcgacgaccaacttctccacctcctccacgaattcggagggcgcccaggaggacctgacggcggccgggtacgagtccggcgcggagtcctcgcaggcggtgtcgtccccgacgtccgtgctccgcaaggtgccgtcgatgtcgtccttggcggaggacaggggcgactcggaggcctgtcaaggcgacgccgctgccggcagcagcctcagcgttccggaggagctgggcgagttcgtgccgttcgaggacgcgccggtctactccagcagcagcttctgggacttcgagccgcagtcggggttcctctacgccgagccgtcctcagccgaggaggcctcgtgggacgcgtccgccggcggcgagccgtgggccgcgccggtgcaggagaacgactacttccaggatttgcgcgacctgttcccgctcaaccagcttcccgcgattttctagatgggagcggcggagcttgcttccctatcttttttggtgtatgtcgagactcgagagtattttgtcgtgtacgtgtggtgtgtccccgtgtatttgtaacatgtccgtgtgcgttgctgctgtctgtgttgagtcgacgagaagaggaatgtacgatccgggtagagttttcactgctgtgctgggt

SEQ ID NO: 64959 - protein, 293 aa, Triticum aestivum
  peptide (1)..(293): Ceres Seq. ID no. 12586697
MSRSRTVRIYWDDPDVTDSSSEDDEGCAARRVGRMVRELPPAPAPLVQAAAAAPSPEQCSAGDDDLPRRVGGCTRARKRLAKGGGSAAQSTKFRGVRRRPWGKYAAEIRDPWRGVRVWLGTFDTAEEAARVYDNAAIQLRGATATTNFSTSSTNSEGAQEDLTAAGYESGAESSQAVSSPTSVLRKVPSMSSLAEDRGDSEACQGDAAAGSSLSVPEELGEFVPFEDAPVYSSSSFWDFEPQSGFLYAEPSSAEEASWDASAGGEPWAAPVQENDYFQDLRDLFPLNQLPAIF

SEQ ID NO: 64960 - protein, 284 aa, Triticum aestivum
  peptide (1)..(284): Ceres Seq. ID no. 12586698
MYPCAEEAGQGRRLRCAEHQVPRRQAAAVGQVRGGDPRPVARRARLARHFRHRRGGRARVRQRGHSAPRRHRDDQLLHLLHEFGGRPGGPDGGRVRVRRGVLAGGVVPDVRAPQGAVDVVLGGGQGRLGGLSRRRRCRQQPQRSGGAGRVRAVRGRAGLLQQQLLGLRAAVGVPLRRAVLSRGGLVGRVRRRRAVGRAGAGERLLPGFARPVPAQPASRDFLDGSGGACFPIFFGVCRDSRVFCRVRVVCPRVFVTCPCALLLSVLSRREEECTIRVEFSLLCW

SEQ ID NO: 64961 - protein, 259 aa, Triticum aestivum
  peptide (1)..(259): Ceres Seq. ID no. 12586699
MVRELPPAPAPLVQAAAAAPSPEQCSAGDDDLPRRVGGCTRARKRLAKGGGSAAQSTKFRGVRRRPWGKYAAEIRDPWRGVRVWLGTFDTAEEAARVYDNAAIQLRGATATTNFSTSSTNSEGAQEDLTAAGYESGAESSQAVSSPTSVLRKVPSMSSLAEDRGDSEACQGDAAAGSSLSVPEELGEFVPFEDAPVYSSSSFWDFEPQSGFLYAEPSSAEEASWDASAGGEPWAAPVQENDYFQDLRDLFPLNQLPAIF

SEQ ID NO: 64962 - DNA, 1476 bp, Triticum aestivum
  misc_feature (1)..(1476): Ceres Seq. ID no. 13597537
atgtcgctaccaatcactagcgtctcccgagcccaccaggacccgacccagatcttgccgttggcagctcaactcccgtgtaggtgagccggctactcccctcccacccccaccacccgagagtacacggcgcctcttcttcaaaagccctccctttttgttttctcggcgctcctcgggggttttggtccgccgaggaggggtttggtgcgcccggtaccggagaatcttggcgagaagtgcctagtttccgctaggctggttggtgggaggcgggtgcctggtgccgcggcttcagccatggaggcagtcgcaatgtcgccgtcctccgtctcgtcccacaacctcgacgccgcctccaccagcgacgacatgccgtcctcgcaagagggcctcctcttctcggacagcctcaaggacttgaggaatctgcggtcgcagctatactcagcggcagaatattttgaagtattctacacaaacaactcgcacagatctacggtggtgacgagtttaaaagactacgcagttgaggcactcgttagcacggttgaccatcttggctttgtgtcgtacaaggtggataatctcgtcaatgaaaaggctgacgaggttaatgaaacagaatttcgagtatcgtcggttgaacagagggtaaagatttgccggcaggcaattgaccaggagggaagatctcaacagtctcttcttatcagggcgccgcagtaccacaggcgttacatattaccaggcgtagatatagtggaatccgctatccatccagtttcagagcccacacggtacagcaggcaacatacgggtcgcaaaatgcgcaagtctcagtctaccatgtccactccagttagtaggcagacaacgatgaggagtgtccgttcacggtctccagcagttcgtgaaacacatcatcgatcacgatccatgtcgccgtctcgaaaagcgcgagctaaatcaccatcaccccaagtcgtgaacttgaatccgaaagaaacaagagcaggttcgccaataccaactattcccattcccctggcgcgatctgctacagttgcaagaagaccacctctggatccaaagcattttagacaaacctcgatgcaggtgcagtccgactatgaacaccagaaagagcgggagaaaagatcaagcaaaggcaggggcttcctcaagtcgctgctcacaagacgccggtggaggaatgacgagtcgctctacaattacttggacgagtactgatcgctgaaatgtcttagaccttgttccttgttgaccaatctcgttccttcatacatatgatgttcgagatctcagaccaaatctcattccttcatacatatagcttgtgtgtcatttccatgtgtttatagatacaatgcagacagaaacaccaccagtggtgctcatggcgttgcgcaagcgcatgacggatgaagcaaccaaatacagagcagcttccgt

SEQ ID NO: 64963 - protein, 317 aa, Triticum aestivum
  peptide (1)..(317): Ceres Seq. ID no. 15222125
MEAVAMSPSSVSSHNLDAASTSDDMPSSQEGLLFSDSLKDLRNLRSQLYSAAEYFEVFYTNNSHRSTVVTSLKDYAVEALVSTVDHLGFVSYKVDNLVNEKADEVNETEFRVSSVEQRVKICRQAIDQEGRSQQSLLIRAPQYHRRYILPGVDIVESAIHPVSEPTRYSRQHTGRKMRKSQSTMSTPVSRQTTMRSVRSRSPAVRETHHRSRSMSPSRKARAKSPSPQVVNLNPKETRAGSPIPTIPIPLARSATVARRPPLDPKHFRQTSMQVQSDYEHQKEREKRSSKGRGFLKSLLTRRRWRNDESLYNYLDEY

SEQ ID NO: 64964 - protein, 312 aa, Triticum aestivum
  peptide (1)..(312): Ceres Seq. ID no. 15222126
MSPSSVSSHNLDAASTSDDMPSSQEGLLFSDSLKDLRNLRSQLYSAAEYFEVFYTNNSHRSTVVTSLKDYAVEALVSTVDHLGFVSYKVDNLVNEKADEVNETEFRVSSVEQRVKICRQAIDQEGRSQQSLLIRAPQYHRRYILPGVDIVESAIHPVSEPTRYSRQHTGRKMRKSQSTMSTPVSRQTTMRSVRSRSPAVRETHHRSRSMSPSRKARAKSPSPQVVNLNPKETRAGSPIPTIPIPLARSATVARRPPLDPKHFRQTSMQVQSDYEHQKEREKRSSKGRGFLKSLLTRRRWRNDESLYNYLDEY

SEQ ID NO: 64965 - protein, 293 aa, Triticum aestivum
  peptide (1)..(293): Ceres Seq. ID no. 15222127
MPSSQEGLLFSDSLKDLRNLRSQLYSAAEYFEVFYTNNSHRSTVVTSLKDYAVEALVSTVDHLGFVSYKVDNLVNEKADEVNETEFRVSSVEQRVKICRQAIDQEGRSQQSLLIRAPQYHRRYILPGVDIVESAIHPVSEPTRYSRQHTGRKMRKSQSTMSTPVSRQTTMRSVRSRSPAVRETHHRSRSMSPSRKARAKSPSPQVVNLNPKETRAGSPIPTIPIPLARSATVARRPPLDPKHFRQTSMQVQSDYEHQKEREKRSSKGRGFLKSLLTRRRWRNDESLYNYLDEY

SEQ ID NO: 64966 - DNA, 1383 bp, Triticum aestivum
  misc_feature (1)..(1383): Ceres Seq. ID no. 13597538
gaacatcctaatcgaaaacttctccggttgtgaggccccgtgctgcctcctcctctctgtctgtttctaccgacgccgccccagcccccgcgagagagaaaccctagcctagggttccacgcgccgccgccgccgccgccgacgtcgaccccgcctcgcccttcccccgagctcgccatggacgcgggccgcaagagggccgtgccggagggcgccaacggcggcgccgccgtcaagcgcgccagagaatcggagtcggttcaaacgggtgtaggaagcaaatcgaagccatgcaccaaatttttcagcactgctggttgtccctttggttcaagttgccattttctccataacttccctggaggtcaccaggctgtttcaaagatgaccaacttgggtggtccagctgtttcagctcctcaaggaagaatgcccatgggacctggtgttcctgatgggccacctacacccagcttgaagactcgcttgtgtaacaagtttaacacagcagaaggttgtaaatgggggaacaagtgtcattttgctcatggagagagggagctcggaaagcccatgctgttgaacaactcaatggcacctccaatgggaccaagacccaatggccacttccagcccccaccgatgcctggcccagacatggttcctccctcaacctttggcgcatcggccacagccaagatcagtgttgatgcatcccttgccggcgccattattgggaagggtggagtcaacacaaagcacatatccagaatgactggggccaagctggccatacgggataatgaggcagaccccaaccataaaaacattgagctcgaggggtcgtttgatcaggtcaaccatgccagtgcaatggtgaaagagctgattctccgcattggtggcaacgcccctcctcaagcaaagaacccagggagggggcctgcgggtggtggtgggggaagcaacttcaagaccaagctgtgcgacaacttcaacaaaggctcttgcacatttggagacagatgccacttcgcccatggtgagagtgaactgcgcaagtcggctgcggcttgagagatgcttttttttttatggcttttcatgattaatagtgattagcaaagcctgagctccaaatccgaggccattcacccatggtcatgttgagttgcataagcctgttgttgattgattgggagatactgtcatggcttcggtgtgatcagctcgctgtaactgatagatatccgagaatggatttgcttttgagatttattataggcttagtgtattgccgtcttttttctctctctgctccgcatccaatttttgtactgtttctaaggcattttaatatggcaaatttagcgattctattcc

SEQ ID NO: 64967 - protein, 299 aa, Triticum aestivum
  peptide (1)..(299): Ceres Seq. ID no. 13597539
MDAGRKRAVPEGANGGAAVKRARESESVQTGVGSKSKPCTKFFSTAGCPFGSSCHFLHNFPGGHQAVSKMTNLGGPAVSAPQGRMPMGPGVPDGPPTPSLKTRLCNKFNTAEGCKWGNKCHFAHGERELGKPMLLNNSMAPPMGPRPNGHFQPPPMPGPDMVPPSTFGASATAKISVDASLAGAIIGKGGVNTKHISRMTGAKLAIRDNEADPNHKNIELEGSFDQVNHASAMVKELILRIGGNAPPQAKNPGRGPAGGGGGSNFKTKLCDNFNKGSCTFGDRCHFAHGESELRKSAAA

SEQ ID NO: 64968 - protein, 230 aa, Triticum aestivum
  peptide (1)..(230): Ceres Seq. ID no. 13597540
MTNLGGPAVSAPQGRMPMGPGVPDGPPTPSLKTRLCNKFNTAEGCKWGNKCHFAHGERELGKPMLLNNSMAPPMGPRPNGHFQPPPMPGPDMVPPSTFGASATAKISVDASLAGAIIGKGGVNTKHISRMTGAKLAIRDNEADPNHKNIELEGSFDQVNHASAMVKELILRIGGNAPPQAKNPGRGPAGGGGGSNFKTKLCDNFNKGSCTFGDRCHFAHGESELRKSAAA

SEQ ID NO: 64969 - protein, 215 aa, Triticum aestivum
  peptide (1)..(215): Ceres Seq. ID no. 13597541
MPMGPGVPDGPPTPSLKTRLCNKFNTAEGCKWGNKCHFAHGERELGKPMLLNNSMAPPMGPRPNGHFQPPPMPGPDMVPPSTFGASATAKISVDASLAGAIIGKGGVNTKHISRMTGAKLAIRDNEADPNHKNIELEGSFDQVNHASAMVKELILRIGGNAPPQAKNPGRGPAGGGGGSNFKTKLCDNFNKGSCTFGDRCHFAHGESELRKSAAA

SEQ ID NO: 64970 - DNA, 1282 bp, Triticum aestivum
  misc_feature (1)..(1282): Ceres Seq. ID no. 13655896
aggaactcggagtattttggctctacaaagttcatcatcgagcacgcgatttccgtaaaagccacgtgttaagctttccaccaccagttcactcaccatagtccaacggaatctttcttccccctctactactagattgcctagagggtgctgactcgagtgcagtgtactgcgtttccttctcgtcgtcggtcttcttatctcatccccgactccgacgagcccaaccggcgacggatggcggcgacgaagctgagcagcgggcacgagatgccggccgtggggctcggcgtctggcggatggactccgccgccgtccgcggcctcatccactccgccctccgcgccggctaccgccacttcgactgcgccgctgactacaaaaacgaggctgaagttggcgatgcgctggcggaggcattccaaactgggcttgtcaagagggaggatcttttcatcactaccaagttgtggaactcagatcacggtcatgtggttgaagcctgcaaggatagcctgaagaagctgcgattggattatctagatctctaccttattcacttccctgtagctactaagcatactggagttggcacaactggcagtgctcttggtgatgatggtgtgcttgatatcgataccactatctcattggagacaacgtggcatgcaatggaagatcttgtttccatgggacttgttcgtagcataggaattagcaactacgacatattcctcaccagagactgcttggcgtacgccaagataaagcctgcggtcaaccaaatcgagacacacccttacttccagcgtgactctcttgtgaagttctgccagaagcacggaatctgcgtcaccgcacatacccccctgggtggctctaccgccaacaccgagtggttcggctcggtctcatgccttgacgaccctgtcatcaagtctctggctgagaaatacggcaagacgccggcgcagctggtcctccggtggggcctccagaggaacacagtggtcatccccaagacctccaaggtagagaggctggaggagaactttgcggtctccgacttcgacatctctggcgaggacatggagaagatcaaggcccttgaccgcaggtaccgcaccaaccagccggccaagttttggggcatcgacctctacgcttgattccactgcattatttgctacccggacaatagaatcaataatatgagagcttatcattaccttaaacgaacttgagttgtggatgatgtatttgcagcacgaccagtcacaa

SEQ ID NO: 64971 - protein, 310 aa, Triticum aestivum
  peptide (1)..(310): Ceres Seq. ID no. 13655897
MAATKLSSGHEMPAVGLGVWRMDSAAVRGLIHSALRAGYRHFDCAADYKNEAEVGDALAEAFQTGLVKREDLFITTKLWNSDHGHVVEACKDSLKKLRLDYLDLYLIHFPVATKHTGVGTTGSALGDDGVLDIDTTISLETTWHAMEDLVSMGLVRSIGISNYDIFLTRDCLAYAKIKPAVNQIETHPYFQRDSLVKFCQKHGICVTAHTPLGGSTANTEWFGSVSCLDDPVIKSLAEKYGKTPAQLVLRWGLQRNTVVIPKTSKVERLEENFAVSDFDISGEDMEKIKALDRRYRTNQPAKFWGIDLYA

SEQ ID NO: 64972 - protein, 299 aa, Triticum aestivum
  peptide (1)..(299): Ceres Seq. ID no. 13655898
MPAVGLGVWRMDSAAVRGLIHSALRAGYRHFDCAADYKNEAEVGDALAEAFQTGLVKREDLFITTKLWNSDHGHVVEACKDSLKKLRLDYLDLYLIHFPVATKHTGVGTTGSALGDDGVLDIDTTISLETTWHAMEDLVSMGLVRSIGISNYDIFLTRDCLAYAKIKPAVNQIETHPYFQRDSLVKFCQKHGICVTAHTPLGGSTANTEWFGSVSCLDDPVIKSLAEKYGKTPAQLVLRWGLQRNTVVIPKTSKVERLEENFAVSDFDISGEDMEKIKALDRRYRTNQPAKFWGIDLYA

SEQ ID NO: 64973 - protein, 289 aa, Triticum aestivum
  peptide (1)..(289): Ceres Seq. ID no. 13655899
MDSAAVRGLIHSALRAGYRHFDCAADYKNEAEVGDALAEAFQTGLVKREDLFITTKLWNSDHGHVVEACKDSLKKLRLDYLDLYLIHFPVATKHTGVGTTGSALGDDGVLDIDTTISLETTWHAMEDLVSMGLVRSIGISNYDIFLTRDCLAYAKIKPAVNQIETHPYFQRDSLVKFCQKHGICVTAHTPLGGSTANTEWFGSVSCLDDPVIKSLAEKYGKTPAQLVLRWGLQRNTVVIPKTSKVERLEENFAVSDFDISGEDMEKIKALDRRYRTNQPAKFWGIDLYA

SEQ ID NO: 64974 - DNA, 1407 bp, Triticum aestivum
  misc_feature (1)..(1407): Ceres Seq. ID no. 13597866
gcaagcaaccacccatggacacgcccgtgccgaaacggcctcgcctcgtgccagcaccggcaccggcgcctcggacaatcgccgacatggccccggagatcctcctccgcctccctccagacgaccccccgcgccttgtgcgcgcctcccttgtctgctggcgctggcgccgcctcctcaccgacccggcgtacctccgccgctaccgcgcattccatcgaacacctcccatgctcggcttcgtcctcaacctgaaacagcactaccaaggcatggcccagctcgtccccacctcctccttccgccccgctgcctccgaccgccccggcctgaatgtgctggacgcccgccacggccgcgtgctcctccacaccgctcagggccagcgcctcgtcgtctgggaccccgtcacgggtgaagagtgcaagatcccccgcgtgccgtcctacgcgctcggcttcaacgcggccgtgctctgcgccgcggtcggctgcgaccacctcgactgtcatggcggacccttccgtgtcgccttcgtgggatgcggcgaacgcggcatcacgttcgcctgcacctactcgtcggaggccggtgcctggagccagcgaattgagatcgagcagccggcgtttgttgacgggcgaccgagcgtccttgtggggaacacgctctacttcacctgcgacccgtacctcagtttcaaaatgttggggtacaacatcgtcacgcaggaactctcggtgatctggccgccgtcccagcatgagtactactcttgcactgtcctcgtgaaagcggatgatggcaagctggggttcgccggcgtgcagaatggcacgctctacctgtggtcgatgaaggacggcgccgacggatatgtggaatgggtgcagcgcagagttatccagcacaagacgatgctccgtactcgtggcctctcgacgccacctgaggtcgttggcttcgcggatggtcacggattcattttcgtgaggacaggcaacacggtgttctccatggatctcaagtcaggccatgtccgtaaagtatacacctgcaggtcaagaaactacgacgtcatcgttgttccctacatgagcttctgcactccagatcgtgctatgggcagactgccatcgccacgaggacccactgtcatcctgtaacaaggacttgctgctcttggcttgttgcatagatgacgctcaaagtattttgctttcaaggtggactgtttaagtagttaccatggtcaatgttggtatgtttagtttacagtgtggcagttgaaacaaggaaaaaagtaatatgtaatcacggtcagtttagtatgttctctttgcagttgtgaagcttaagcaagactgatggttaattagtagaaaaaaaaaaaaaaaaaagcttatc

SEQ ID NO: 64975 - protein, 387 aa, Triticum aestivum
  peptide (1)..(387): Ceres Seq. ID no. 13597867
KQPPMDTPVPKRPRLVPAPAPAPRTIADMAPEILLRLPPDDPPRLVRASLVCWRWRRLLTDPAYLRRYRAFHRTPPMLGFVLNLKQHYQGMAQLVPTSSFRPAASDRPGLNVLDARHGRVLLHTAQGQRLVVWDPVTGEECKIPRVPSYALGFNAAVLCAAVGCDHLDCHGGPFRVAFVGCGERGITFACTYSSEAGAWSQRIEIEQPAFVDGRPSVLVGNTLYFTCDPYLSFKMLGYNIVTQELSVIWPPSQHEYYSCTVLVKADDGKLGFAGVQNGTLYLWSMKDGADGYVEWVQRRVIQHKTMLRTRGLSTPPEVVGFADGHGFIFVRTGNTVFSMDLKSGHVRKVYTCRSRNYDVIVVPYMSFCTPDRAMGRLPSPRGPTVIL

SEQ ID NO: 64976 - protein, 383 aa, Triticum aestivum
  peptide (1)..(383): Ceres Seq. ID no. 13597868
MDTPVPKRPRLVPAPAPAPRTIADMAPEILLRLPPDDPPRLVRASLVCWRWRRLLTDPAYLRRYRAFHRTPPMLGFVLNLKQHYQGMAQLVPTSSFRPAASDRPGLNVLDARHGRVLLHTAQGQRLVVWDPVTGEECKIPRVPSYALGFNAAVLCAAVGCDHLDCHGGPFRVAFVGCGERGITFACTYSSEAGAWSQRIEIEQPAFVDGRPSVLVGNTLYFTCDPYLSFKMLGYNIVTQELSVIWPPSQHEYYSCTVLVKADDGKLGFAGVQNGTLYLWSMKDGADGYVEWVQRRVIQHKTMLRTRGLSTPPEVVGFADGHGFIFVRTGNTVFSMDLKSGHVRKVYTCRSRNYDVIVVPYMSFCTPDRAMGRLPSPRGPTVIL

SEQ ID NO: 64977 - protein, 359 aa, Triticum aestivum
  peptide (1)..(359): Ceres Seq. ID no. 13597869
MAPEILLRLPPDDPPRLVRASLVCWRWRRLLTDPAYLRRYRAFHRTPPMLGFVLNLKQHYQGMAQLVPTSSFRPAASDRPGLNVLDARHGRVLLHTAQGQRLVVWDPVTGEECKIPRVPSYALGFNAAVLCAAVGCDHLDCHGGPFRVAFVGCGERGITFACTYSSEAGAWSQRIEIEQPAFVDGRPSVLVGNTLYFTCDPYLSFKMLGYNIVTQELSVIWPPSQHEYYSCTVLVKADDGKLGFAGVQNGTLYLWSMKDGADGYVEWVQRRVIQHKTMLRTRGLSTPPEVVGFADGHGFIFVRTGNTVFSMDLKSGHVRKVYTCRSRNYDVIVVPYMSFCTPDRAMGRLPSPRGPTVIL

SEQ ID NO: 64978 - DNA, 1251 bp, Triticum aestivum
  misc_feature (1)..(1251): Ceres Seq. ID no. 13598593
aatcgaaaatccaaactcacggctagccacccactagccacacttactgaacacaggtcagctaagccagcttagctcaggaaggtagcaatggccagggctttccccatgggagtggtggccgccgcggccgtgctggtggtgctgtgtgccgtcatttcttctgccgccgcgcagcctcgtccccctctgccaaagaactcccacatgatcaccccggggcggttcgggaagagggcccaggtgctctcctgcgacgacaccaaggacgggaacagcccctgcagcgccacctgcgacaagcgctgccccaacgagtgcgtcgtcatgtgcccaggctgcaagacatactgcttgtgtgacttttaccccggggtgtcatgtggcgacccgcgtttcacaggagccgacggcaacaacttctacttccacggcaagaaggaccaggacttctgtgtcatctccgatgctgacctccatatcaacgctcacttcatcggcaagcgcaacccagctatgagccgtgacttcacctggatccaagcgctgggcatccgcttcgctgatcaccgcatgtacatgggcgcccagaagaccaccaagtggaagaacgacgtcgaccgccttgagttgaacctcgatggagaatcattcaacatcgctacagacatcggggcaaagtggcagtccactgttgtgcctggcctgaccgtcacgaggaccaccgtgaccaatggcgtgagggtccagcttaagggtgtgtttgacatcatggctaaggtggtgcccatcacgcaggaggactcccgcgtccacaactacggtgtaactgacgatgacagcctcgcgcatctggacatcgggttcaagttctatgacctcaccgacgacgttcatggtgtccttggccagacctaccgccctgactacgtcaacaagctcagcgtgagcgctagcatgcctgtgatgggtggtgtagccagctacatctcctctgacattttctccaccgactgcaaggtcgctaggttcggacttagcaccggcatctccatggtcaccaccaccgcaaactaagcaattcctcaagacaacgtcacactgatgtaaccggcctatactgatgatgaacataggcctagaaataaaataatatgtgagaaatgtaatgtgtaacattgttttgtgccagrraaaaaaaaaaaaaaaaaaaaaatgtttaaacacaataaagttggaacgggagggggg

SEQ ID NO: 64979 - protein, 328 aa, Triticum aestivum
  peptide (1)..(328): Ceres Seq. ID no. 15222378
MARAFPMGVVAAAAVLVVLCAVISSAAAQPRPPLPKNSHMITPGRFGKRAQVLSCDDTKDGNSPCSATCDKRCPNECVVMCPGCKTYCLCDFYPGVSCGDPRFTGADGNNFYFHGKKDQDFCVISDADLHINAHFIGKRNPAMSRDFTWIQALGIRFADHRMYMGAQKTTKWKNDVDRLELNLDGESFNIATDIGAKWQSTVVPGLTVTRTTVTNGVRVQLKGVFDIMAKVVPITQEDSRVHNYGVTDDDSLAHLDIGFKFYDLTDDVHGVLGQTYRPDYVNKLSVSASMPVMGGVASYISSDIFSTDCKVARFGLSTGISMVTTTAN

SEQ ID NO: 64980 - protein, 322 aa, Triticum aestivum
  peptide (1)..(322): Ceres Seq. ID no. 15222379
MGVVAAAAVLVVLCAVISSAAAQPRPPLPKNSHMITPGRFGKRAQVLSCDDTKDGNSPCSATCDKRCPNECVVMCPGCKTYCLCDFYPGVSCGDPRFTGADGNNFYFHGKKDQDFCVISDADLHINAHFIGKRNPAMSRDFTWIQALGIRFADHRMYMGAQKTTKWKNDVDRLELNLDGESFNIATDIGAKWQSTVVPGLTVTRTTVTNGVRVQLKGVFDIMAKVVPITQEDSRVHNYGVTDDDSLAHLDIGFKFYDLTDDVHGVLGQTYRPDYVNKLSVSASMPVMGGVASYISSDIFSTDCKVARFGLSTGISMVTTTAN

SEQ ID NO: 64981 - protein, 289 aa, Triticum aestivum
  peptide (1)..(289): Ceres Seq. ID no. 15222380
MITPGRFGKRAQVLSCDDTKDGNSPCSATCDKRCPNECVVMCPGCKTYCLCDFYPGVSCGDPRFTGADGNNFYFHGKKDQDFCVISDADLHINAHFIGKRNPAMSRDFTWIQALGIRFADHRMYMGAQKTTKWKNDVDRLELNLDGESFNIATDIGAKWQSTVVPGLTVTRTTVTNGVRVQLKGVFDIMAKVVPITQEDSRVHNYGVTDDDSLAHLDIGFKFYDLTDDVHGVLGQTYRPDYVNKLSVSASMPVMGGVASYISSDIFSTDCKVARFGLSTGISMVTTTAN

SEQ ID NO: 64982 - DNA, 1228 bp, Triticum aestivum
  misc_feature (1)..(1228): Ceres Seq. ID no. 13597870
tcatttccaaatccagccacctccacctctctctctctctctctctctctctctctctctctctccatgggcacgcttctccgccgcgtcctcctctccctcgcgctcctcgccgccgccgcgacccccggcgcggcggcggcggcggccaggctgtcgacgtcgtactacagccgcagctgcccccgcgtggagcagatcgtctcggacgtggtcgccgccaagcagcaggccaacccgtccacggcggcgggcacgctgcgcctcttcttccacgactgcttcgtctccggctgcgacgcctccgtcctcgtctccccgctctcctccgaccggaccccggagcgggccgcggagatcaacctctccctcccgggggacgccttcgacgccgtggcccgcgccaaggccgcgctggaggccgcctgcccgggcaccgtctcctgcgccgacatcctcgcgctggcggcgcgcgacctggtggggatcctgggcgggccgcggttccccgtcttcctcggccgccgcgacgcgcgccgctccgacgcgcgcgacgtggagggcaacctcccgcgcaccaacatgtcggcgcgcgccatgacggtcctgttcgcgcgcaagggcatcacgccgcaggagatggtggcgctggcgggcgcccacaccgtgggcttctcccactgctccgagttcgcgcaccgggtgtacaactacaagggcaagggcggcggcgccagcgggcacgacccgtcgctgaacccggagttcgcgcgggcgctgcagagctcctgcgccggctacgagagcaacccggacatctccatcttcaacgacatcgtgacgccgcgggacttcgacgagctctacttcaagaacctaccccgtggcctcgggctgctcgcctccgacgccgcgctgtgggagtacccgcccaccaaggtgttcgtccagcagtacgccgacaaccggaccgccttcttccaggacttcgccagggcgatgcagaagctgggcaccgtcggcgtcaagacggggcggcagggcgtcgtcaggcggcagtgcgacatcctcgactaagtccggcgaccgggcgcgttgctacaactttgcccgacgttgtaccgtcgctagtccggtgaaaattggcgatattaggattggattttggtgtgtctgctctctgatttctgaatgaactcgtgaattgtgatgttaaaaamaaaaaaaa

SEQ ID NO: 64983 - protein, 378 aa, Triticum aestivum
  peptide (1)..(378): Ceres Seq. ID no. 15222221
ISKSSHLHLSLSLSLSLSLSLHGHASPPRPPLPRAPRRRRDPRRGGGGGQAVDVVLQPQLPPRGADRLGRGRRQAAGQPVHGGGHAAPLLPRLLRLRLRRLRPRLPALLRPDPGAGRGDQPLPPGGRLRRRGPRQGRAGGRLPGHRLLRRHPRAGGARPGGDPGRAAVPRLPRPPRRAPLRRARRGGQPPAHQHVGARHDGPVRAQGHHAAGDGGAGGRPHRGLLPLLRVRAPGVQLQGQGRRRQRARPVAEPGVRAGAAELLRRLREQPGHLHLQRHRDAAGLRRALLQEPTPWPRAARLRRRAVGVPAHQGVRPAVRRQPDRLLPGLRQGDAEAGHRRRQDGAAGRRQAAVRHPRLSPATGRVATTLPDVVPSLVR

SEQ ID NO: 64984 - protein, 358 aa, Triticum aestivum
  peptide (1)..(358): Ceres Seq. ID no. 15222222
SFPNPATSTSLSLSLSLSLSLSMGTLLRRVLLSLALLAAAATPGAAAAAARLSTSYYSRSCPRVEQIVSDVVAAKQQANPSTAAGTLRLFFHDCFVSGCDASVLVSPLSSDRTPERAAEINLSLPGDAFDAVARAKAALEAACPGTVSCADILALAARDLVGILGGPRFPVFLGRRDARRSDARDVEGNLPRTNMSARAMTVLFARKGITPQEMVALAGAHTVGFSHCSEFAHRVYNYKGKGGGASGHDPSLNPEFARALQSSCAGYESNPDISIFNDIVTPRDFDELYFKNLPRGLGLLASDAALWEYPPTKVFVQQYADNRTAFFQDFARAMQKLGTVGVKTGRQGVVRRQCDILD

SEQ ID NO: 64985 - protein, 336 aa, Triticum aestivum
  peptide (1)..(336): Ceres Seq. ID no. 15222223
MGTLLRRVLLSLALLAAAATPGAAAAAARLSTSYYSRSCPRVEQIVSDVVAAKQQANPSTAAGTLRLFFHDCFVSGCDASVLVSPLSSDRTPERAAEINLSLPGDAFDAVARAKAALEAACPGTVSCADILALAARDLVGILGGPRFPVFLGRRDARRSDARDVEGNLPRTNMSARAMTVLFARKGITPQEMVALAGAHTVGFSHCSEFAHRVYNYKGKGGGASGHDPSLNPEFARALQSSCAGYESNPDISIFNDIVTPRDFDELYFKNLPRGLGLLASDAALWEYPPTKVFVQQYADNRTAFFQDFARAMQKLGTVGVKTGRQGVVRRQCDILD

SEQ ID NO: 64986 - DNA, 1061 bp, Triticum aestivum
  misc_feature (1)..(1061): Ceres Seq. ID no. 13597542
accagtgcggtatacaccccggttgactagcgctgatttgctccctctccagctccggctcccagatcgagacggcggcggcggcggcgatgggcgcccacccttacgtgccggcgagcctggacctcccgggctacgtgccgctgcgcctcacccagctcgagatcctcggggcctacctcggcacctccctcttcgtcctcgtcgccgtctggctcctctccgggagatgccgcaggttgtccggcaccgaccgcctgctcatgtgctggtgggcgttcaccggcctcacccacatactcatcgagggccccttcgtcttcacccccgatttcttcaccaagaccaaccccaacttcttcgacgaagtctggaaggagtacagcaagggtgactccaggtacgtcgccagggacaccgccaccgtcaccgtcgaaggaatcacggccgtgctgaaaggccctgcctcgctgctcgcagtctatgccattgcatcacgcaagtcctacagccacatcctccagttcgccgtgtgcctcggtcagctctacggatgcatcgtctacttcaccaccgcctacttggacggcttcaacttctgggccagtccgttctacttctgggcatatttcatcggcgcaaacagttcatgggttgtgataccgttgctgatcgccacaaggagctggaagaggatctgcgcagcgattcatcaaagtgagaagatcaagactaagtaattcctgcagcagacaggatttggttgcaaccaggacacactgaacttcttattttacggctagaaatttgttggcttatattgtaccctttgcaaactacattgcctgaaacaagtatgttgtactactggattgtgttgtaacatcaaggagggcggctgtttattgctgcaaatgaaaattatatgccacccttgcatgggcaatcaccattgcacatactatcaggcaactagtagtaagaggccgggtgttgctcattatactttgtatccgattgagactatattttgagttaataaaagcaccttttatttgggt

SEQ ID NO: 64987 - protein, 216 aa, Triticum aestivum
  peptide (1)..(216): Ceres Seq. ID no. 13597543
MGAHPYVPASLDLPGYVPLRLTQLEILGAYLGTSLFVLVAVWLLSGRCRRLSGTDRLLMCWWAFTGLTHILIEGPFVFTPDFFTKTNPNFFDEVWKEYSKGDSRYVARDTATVTVEGITAVLKGPASLLAVYAIASRKSYSHILQFAVCLGQLYGCIVYFTTAYLDGFNFWASPFYFWAYFIGANSSWVVIPLLIATRSWKRICAAIHQSEKIKTK

SEQ ID NO: 64988 - protein, 158 aa, Triticum aestivum
  peptide (1)..(158): Ceres Seq. ID no. 13597544
MCWWAFTGLTHILIEGPFVFTPDFFTKTNPNFFDEVWKEYSKGDSRYVARDTATVTVEGITAVLKGPASLLAVYAIASRKSYSHILQFAVCLGQLYGCIVYFTTAYLDGFNFWASPFYFWAYFIGANSSWVVIPLLIATRSWKRICAAIHQSEKIKTK

SEQ ID NO: 64989 - protein, 130 aa, Triticum aestivum
  peptide (1)..(130): Ceres Seq. ID no. 13597545
PVRYTPRLTSADLLPLQLRLPDRDGGGGGDGRPPLRAGEPGPPGLRAAAPHPARDPRGLPRHLPLRPRRRLAPLREMPQVVRHRPPAHVLVGVHRPHPHTHRGPLRLHPRFLHQDQPQLLRRSLEGVQQG

SEQ ID NO: 64990 - DNA, 1944 bp, Triticum aestivum
  misc_feature (1)..(1944): Ceres Seq. ID no. 15224727
cttaaacaaatggacacttgagacctcactgtcccaatgacacttctatatatccagaatcctgaccaaaaacatcaccaatccagtcctacatcacctttcttctcacccaccgctagcttctctaaggagtgaggagcagagtaatggatcttgaactgttgtggagtggtccacctgcactctcggtactgccatggatctgcggcggcctcgtggcctcggtgctgctctggcaagccgcccggctgctcgaccagctgtggtggcggccgaggcggctggagcgggcgctccgctcccagggcctccgcggcacgcggtaccgcttcctcctcggcgacgtcaacgactacgcccggcagaccaaggaggcgtcgtcggggccgccgatgccgctgcgctgccacgacgtcggcccccgcgccatgccgttcctctacagcaccatcaaggagcacggcacgccgtgcatctcctggttcgggccggtccccaaggtgagcatcaccgaccctgccctggtccgggaggtgatgtccagcaagctcgcccgcgacgtcgagaagttcaagttcccggcgctcaccaggctgctcgccgacggggtggggaactacgagggcgacaggtgggccaagcaccggaggatcctcaaccccgccttccatgccgagaagctcaagctcatgttcccggcgtttaccgcgtgctgtgaggagctcgttggccgatgggaacagtcccttgggcctgacggctcctgggaggtggatgtctgcccggagctccagagcctcaccggagatgtcatctcgcagacggcgttcggcagcagttacctggaagggagaaggatttttcagctgcagactgagcaaattgcgcgattcatggcagcggtcagcaagatcatgattcctggttacatgtcctttcctaccaaaaataaccgaaggatgcatcaaattaacaacgagattgagtccatcttgcggggcataattgcaaaaaggatgcatgctattcacgaaggagaaagcacaaaagatgacttactcggcttattactggagtcaaacatgtcagacacggatgaaaatggccaatccaccctaggaatgtcagcagatgaagtcatggaggagtgcaagctgttttattttgctggaatggagacaacatcaatattgcttacatggacaatgattgtgcttagcatgcacccagagtggcaggaccgtgcaagggaggaggttcttggcctatttggaaaacacaaactcgagtatgagggtgttaatcgactcaaaattgtgacaatgattctatatgaagttctccggttgtacccgccggctactgtattcacccggaaaacatacaagaagattgagattggaggcatcatgtacccagctggtgtgatgtttgagatgccagtgttgtacatccaccacgacacggacatttggggagaagatgtgcacgaattcaacccggataggtttgccgaggggatctccaaggcatccaaggacccgggtgcatttttcccatttggttgggggccacggatctgtatcggccagaacttcgcgttgcttgaggccaagatggcattgtgcatgatccttcagcgctttgagtttgagctcgcaccatcatacacccatacaccgcatagcgtgatgatgttgcgtcccatgcatggtgctcagattaggcttcacactatctcttcgtagtatcatgttcaaattaggctttacactatctctttctagtatcatactcatggcattcgcctcctatgtgatatgtatgtagtcttatccgcgacaggttttagtcaccatccgttttcttttcctacagataaaagtccaacagttttggactcatgagaactcaatttacttacaactatatatgattacaggc

SEQ ID NO: 64991 - protein, 533 aa, Triticum aestivum
  peptide (1)..(533): Ceres Seq. ID no. 15224728
MDLELLWSGPPALSVLPWICGGLVASVLLWQAARLLDQLWWRPRRLERALRSQGLRGTRYRFLLGDVNDYARQTKEASSGPPMPLRCHDVGPRAMPFLYSTIKEHGTPCISWFGPVPKVSITDPALVREVMSSKLARDVEKFKFPALTRLLADGVGNYEGDRWAKHRRILNPAFHAEKLKLMFPAFTACCEELVGRWEQSLGPDGSWEVDVCPELQSLTGDVISQTAFGSSYLEGRRIFQLQTEQIARFMAAVSKIMIPGYMSFPTKNNRRMHQINNEIESILRGIIAKRMHAIHEGESTKDDLLGLLLESNMSDTDENGQSTLGMSADEVMEECKLFYFAGMETTSILLTWTMIVLSMHPEWQDRAREEVLGLFGKHKLEYEGVNRLKIVTMILYEVLRLYPPATVFTRKTYKKIEIGGIMYPAGVMFEMPVLYIHHDTDIWGEDVHEFNPDRFAEGISKASKDPGAFFPFGWGPRICIGQNFALLEAKMALCMILQRFEFELAPSYTHTPHSVMMLRPMHGAQIRLHTISS

SEQ ID NO: 64992 - protein, 451 aa, Triticum aestivum
  peptide (1)..(451): Ceres Seq. ID no. 15224729
MPLRCHDVGPRAMPFLYSTIKEHGTPCISWFGPVPKVSITDPALVREVMSSKLARDVEKFKFPALTRLLADGVGNYEGDRWAKHRRILNPAFHAEKLKLMFPAFTACCEELVGRWEQSLGPDGSWEVDVCPELQSLTGDVISQTAFGSSYLEGRRIFQLQTEQIARFMAAVSKIMIPGYMSFPTKNNRRMHQINNEIESILRGIIAKRMHAIHEGESTKDDLLGLLLESNMSDTDENGQSTLGMSADEVMEECKLFYFAGMETTSILLTWTMIVLSMHPEWQDRAREEVLGLFGKHKLEYEGVNRLKIVTMILYEVLRLYPPATVFTRKTYKKIEIGGIMYPAGVMFEMPVLYIHHDTDIWGEDVHEFNPDRFAEGISKASKDPGAFFPFGWGPRICIGQNFALLEAKMALCMILQRFEFELAPSYTHTPHSVMMLRPMHGAQIRLHTISS

SEQ ID NO: 64993 - protein, 439 aa, Triticum aestivum
  peptide (1)..(439): Ceres Seq. ID no. 15224730
MPFLYSTIKEHGTPCISWFGPVPKVSITDPALVREVMSSKLARDVEKFKFPALTRLLADGVGNYEGDRWAKHRRILNPAFHAEKLKLMFPAFTACCEELVGRWEQSLGPDGSWEVDVCPELQSLTGDVISQTAFGSSYLEGRRIFQLQTEQIARFMAAVSKIMIPGYMSFPTKNNRRMHQINNEIESILRGIIAKRMHAIHEGESTKDDLLGLLLESNMSDTDENGQSTLGMSADEVMEECKLFYFAGMETTSILLTWTMIVLSMHPEWQDRAREEVLGLFGKHKLEYEGVNRLKIVTMILYEVLRLYPPATVFTRKTYKKIEIGGIMYPAGVMFEMPVLYIHHDTDIWGEDVHEFNPDRFAEGISKASKDPGAFFPFGWGPRICIGQNFALLEAKMALCMILQRFEFELAPSYTHTPHSVMMLRPMHGAQIRLHTISS

SEQ ID NO: 64994 - DNA, 596 bp, Triticum aestivum
  misc_feature (1)..(596): Ceres Seq. ID no. 12618407
atcagaaactaaaacatgagtaacatgacttccttaagctccttagtgctgctccttgcagctctaattctattccctcaagttcttgctgactatgagaagcccccggtgtacaagcctcccattgagaagccaccactttacaagcccccaattgagaaacctcctgtttataaacctccagttgagaaaccccccatttataagcccccagtagagaagccaccagtgtacaagcctcctgtagagaaacccccagtttacaagcccccagttgaaaaaccaccagtgtacaagccaccagttgagaaccctccaatttacaaacccccagttgaaaaaccaccagtatacaagcccccaattgagaaacctccagtttataagccaccagtagagaagccaccggttgcgaagcctccagtctacaagccaccatatggaaagccaccatacccaaagtaccctccaattgatgacacccatttctgaaggatgtcaaggggtgtattaagtatatgctaaataagaggtgctaagaatgtagtttatagtttgcaaattattgcaaggattgctcttagcttcttcatttc

SEQ ID NO: 64995 - protein, 158 aa, Triticum aestivum
  peptide (1)..(158): Ceres Seq. ID no. 12618408
MSNMTSLSSLVLLLAALILFPQVLADYEKPPVYKPPIEKPPLYKPPIEKPPVYKPPVEKPPIYKPPVEKPPVYKPPVEKPPVYKPPVEKPPVYKPPVENPPIYKPPVEKPPVYKPPIEKPPVYKPPVEKPPVAKPPVYKPPYGKPPYPKYPPIDDTHF

SEQ ID NO: 64996 - protein, 155 aa, Triticum aestivum
  peptide (1)..(155): Ceres Seq. ID no. 12618409
MTSLSSLVLLLAALILFPQVLADYEKPPVYKPPIEKPPLYKPPIEKPPVYKPPVEKPPIYKPPVEKPPVYKPPVEKPPVYKPPVEKPPVYKPPVENPPIYKPPVEKPPVYKPPIEKPPVYKPPVEKPPVAKPPVYKPPYGKPPYPKYPPIDDTHF

SEQ ID NO: 64997 - DNA, 2490 bp, Triticum aestivum
  misc_feature (1)..(2490): Ceres Seq. ID no. 13656177
aacwttacctwgwrywtcctaatcgaaagccggagctctcctcgctctgcacaaccatttttggttcgatcccggagaagctccggggctccttgaagcgatggatcagcgggcgaggcaccctcccggcatcggcaacggccgcggcgggaatcctaactaccacggccgtggcccgccgccgacgcagcagcatcaccagcagccgtcgccgccttcgccgcagcaggcgcaggggcacccgcagcagtacatgcagcggcagtcgcagcactcgcagcactcgcagcaccacagccagcagcttcagcatcagcagtggcttcggcggaatcagaccgctggcgaggccgcctcgggcgccgccagagccagcgagcaccacgcgccggctgccgccgatgacgccgatttgagttcgcaagactggaaggcccaattgaagcttccacctccagatacacgctaccagaccgaggatgtcactgcaactaagggaaacgaatttgaagactattttctgaagcgtgaacttcttatgggcatatatgagaaaggatttgaaagaccgtctcctatccaagaagaaagcattcctattgcattaaccggcagcgacattcttgcaagagcaaaaaatggaaccggcaagactgctgcattttgtatacctgcgctagagaagattgatcaagacaaaaatgctattcaagttgttatattggtccccacgagggaattggctttacaaacatcacaagtctgcaaggaacttgggaaacacttgaagattcaagtcatggtcactactggaggaacaagcctaaaggatgatattgtccgtctttatcaacctgtgcatttacttgtggggacgcctggtcgtgttttggaccttacgaagaaaggcatttgcattctgaatgactgttcaatgcttattatggatgaggcagacaagcttctttctcctgagttccaaccttccgtggagcagttaattcgataccttccatcgagtcgacagattctgatgttctctgcaacattccctgtgactgtcaaggctttcaaggacaaatatctgcctaaaccctatgttattaatcttatggacgaacttacactgaagggaattacccagttctacgcctttgttgaagaaaggcagaaagtccattgtctgaacactcttttttccaagctgcaaattaatcaatctataatattctgtaactccgtaaatcgtgttgaactactggcgaagaagatcacagagcttggttactcttgcttctacatccatgctaaaatgctgcaggatcatcgtaatagagtattccatgatttccgtaatggcgcatgcaggaaccttgtgtgtacagatctttttacaaggggaatagatatccaagctgttaatgttgttatcaattttgatttccccaagaccgctgaaacctatctccacagggttggtagatctgggagatttggccaccttggcctggctgtgaatctgatcacctacgaggatcgttttaacttgtatcggattgagcaggagcttggaactgagataaaacccatacctcctcagatagaccggacgatatactgccaatagttatctggaagattaatcttatatgccccaccctggaagttataagacaacttatgtaaatagcagctcatcaggtttcatttacgtgatctttatggtgtatcttaagttgttttggggtgctatgggacaggtgaaagtgtagctagctcgtctaatttccatcggaccacgtgggcggatgtatcatggctaagctaaaacttgccatcactgacaatagttaatgttgctaaccaggtgcctgttccgagactgttttccctaaaactgaaagatctctttttcttttgacaaatgtattggctggctagctttttgtacagggcatttttacactggtaaaaaaaaaaaaaaaaaaaaaaaaaaaaaaaaaaaaaaaaaaaaaaaaaaaaaaaaaaaaaaaaaaaaaaaaaattaaaaaaaaaaaaaaaaaggtttawtcrawmccgccaaccycraggggggccccgraaccaaattccccaaaaaggaagtcaaataacccgcgttaattggccgttttttaaaaacgtcggaatggaaaaaaccttgggttaaccaaattaaatccctttgaaaaaaatccccttttcccaatttgggaaaaaaaaaaaaaggcccaaacaaatcccctttccaaaaatttgcaaaccctaaatggaaaaggaaaattgaaagcttaaaaattttttaaaaattcccgtaaaatttttgtaaaaaaacttaattttttaaacaaaaaggcaaaaatcggaaaaatccttaaaaaataaaaaaaaaaaaccaaaatgggtttaagggtttttcaattttaaaaaaaaatcccataataaaaaaacgggaactcaaacgtaaaaggg

SEQ ID NO: 64998 - protein, 508 aa, Triticum aestivum
  peptide (1)..(508): Ceres Seq. ID no. 15219810
MDQRARHPPGIGNGRGGNPNYHGRGPPPTQQHHQQPSPPSPQQAQGHPQQYMQRQSQHSQHSQHHSQQLQHQQWLRRNQTAGEAASGAARASEHHAPAAADDADLSSQDWKAQLKLPPPDTRYQTEDVTATKGNEFEDYFLKRELLMGIYEKGFERPSPIQEESIPIALTGSDILARAKNGTGKTAAFCIPALEKIDQDKNAIQVVILVPTRELALQTSQVCKELGKHLKIQVMVTTGGTSLKDDIVRLYQPVHLLVGTPGRVLDLTKKGICILNDCSMLIMDEADKLLSPEFQPSVEQLIRYLPSSRQILMFSATFPVTVKAFKDKYLPKPYVINLMDELTLKGITQFYAFVEERQKVHCLNTLFSKLQINQSIIFCNSVNRVELLAKKITELGYSCFYIHAKMLQDHRNRVFHDFRNGACRNLVCTDLFTRGIDIQAVNVVINFDFPKTAETYLHRVGRSGRFGHLGLAVNLITYEDRFNLYRIEQELGTEIKPIPPQIDRTIYCQ

SEQ ID NO: 64999 - protein, 457 aa, Triticum aestivum
  peptide (1)..(457): Ceres Seq. ID no. 15219811
MQRQSQHSQHSQHHSQQLQHQQWLRRNQTAGEAASGAARASEHHAPAAADDADLSSQDWKAQLKLPPPDTRYQTEDVTATKGNEFEDYFLKRELLMGIYEKGFERPSPIQEESIPIALTGSDILARAKNGTGKTAAFCIPALEKIDQDKNAIQVVILVPTRELALQTSQVCKELGKHLKIQVMVTTGGTSLKDDIVRLYQPVHLLVGTPGRVLDLTKKGICILNDCSMLIMDEADKLLSPEFQPSVEQLIRYLPSSRQILMFSATFPVTVKAFKDKYLPKPYVINLMDELTLKGITQFYAFVEERQKVHCLNTLFSKLQINQSIIFCNSVNRVELLAKKITELGYSCFYIHAKMLQDHRNRVFHDFRNGACRNLVCTDLFTRGIDIQAVNVVINFDFPKTAETYLHRVGRSGRFGHLGLAVNLITYEDRFNLYRIEQELGTEIKPIPPQIDRTIYCQ

SEQ ID NO: 65000 - protein, 362 aa, Triticum aestivum
  peptide (1)..(362): Ceres Seq. ID no. 15219812
MGIYEKGFERPSPIQEESIPIALTGSDILARAKNGTGKTAAFCIPALEKIDQDKNAIQVVILVPTRELALQTSQVCKELGKHLKIQVMVTTGGTSLKDDIVRLYQPVHLLVGTPGRVLDLTKKGICILNDCSMLIMDEADKLLSPEFQPSVEQLIRYLPSSRQILMFSATFPVTVKAFKDKYLPKPYVINLMDELTLKGITQFYAFVEERQKVHCLNTLFSKLQINQSIIFCNSVNRVELLAKKITELGYSCFYIHAKMLQDHRNRVFHDFRNGACRNLVCTDLFTRGIDIQAVNVVINFDFPKTAETYLHRVGRSGRFGHLGLAVNLITYEDRFNLYRIEQELGTEIKPIPPQIDRTIYCQ

SEQ ID NO: 65001 - DNA, 1142 bp, Triticum aestivum
  misc_feature (1)..(1142): Ceres Seq. ID no. 15226202
gagacagtaggaggacaagagagcgagggcgaccaataaattcctaatttttcccacttttccaccccgggattccccgcctcttgttccaatcgattggtgggcgtcctcgttcttggcttcccgattgaatccgtgggaagccagagataattctctctccgctgcgaatttttttttggtggtttgagttcttgatttgtttgcgaggaagccatcatgagcgccggaagcgccagtttcctcgagatccagccctcggagctggcatttccctttgaattgatgaagcagagctcgtgctccatgcaactcgcaaataagaccgaccgttatgtagcattcaaggtcaaaactaccaacccaaagcagtactgtgtgcgccctaatatcggcgttgtacttcctgggtcgacttgtgatgttacagttacaatgcaagcgcagagggaagcacctgctgatctgcagtgtaaggacaagttcctagttcaaagtgttgcagctgagaatggcgcagcaactcaagatattagtgcagcaatgttcaacaaagagccagggaaggttgttgatgaatgcaagctgcgtgtaatttatgtgccaacatcttcacctagcccgttctctgaagattcagaacaagggagttctgctcgttcattggaaaacgggacccctaattctacattgccacaatctgtatttagatcatctggtgaagcatcaaaggataagtcctcggaggcgacgtccatgatttccaagctaactgaggagaaaatgtctgctgttcagcaaaaccagaagttgagacaagagctggatgtcctacgcaaagagagcagcaaaagcaacggcggtttctcaatcaccttcttgattgtggtgggtattctgggcatcatcgctggtttcatcctcaagaagacataggagaagagtagtccccaacaaagttacattcccaggaaaggacggataccagcaacatcccttgtgtttttactcctaaaaggagcgcctgttctattctaacttgtaacggcttagaagctttggtttgtgtacattacatggtggttttcatgattttaatcacatcgagtagacttgttttaattataaaaaaaaaaaaaaaa

SEQ ID NO: 65002 - protein, 238 aa, Triticum aestivum; identical to SEQ ID NO: 56102
  peptide (1)..(238): Ceres Seq. ID no. 15226203

SEQ ID NO: 65003 - protein, 216 aa, Triticum aestivum; identical to SEQ ID NO: 56103
  peptide (1)..(216): Ceres Seq. ID no. 15226204

SEQ ID NO: 65004 - protein, 209 aa, Triticum aestivum; identical to SEQ ID NO: 56104
  peptide (1)..(209): Ceres Seq. ID no. 15226205

SEQ ID NO: 65005 - DNA, 1392 bp, Triticum aestivum
  misc_feature (1)..(1392): Ceres Seq. ID no. 13503606
cctaataacccccggtcgcctttccacggcgaaaggcatcccggcggcgatggcggcggctgcggcaaggtccggatcccggcgcttgttctccatatccgccctggtgccaccgaagccgccgacccctcccccgaaggcagaccccttcgccagcctcttcgcccccgggttaagcaagcgaacaacaactgatggacttagggaagcttttgcaaagtctggtgaagttgtgcatgcatcatctgtaaaaaattcaaggtggtatatgatcaatgcaaaccgttcaagtcctttgacagtgcgtaaagaataccgcaaagtgcttccttctttcataaggccatctgcatcttactccacagaagcctcagaaaaaagaccaaaacaggagagaacagacttgacgactgttgaagatccctttaatgcccctacctacaatatacctgagaagccagtgacatttgtcgagggcgcctcttacagtgttgtaatacttgctgggcttggagttgctgcattggctggatatgctgttttcaaagagcttatatttgaaccaaaagagtacaagatttttgggaaagctctagtaagagttcagagtgatagtcaggttacagccaaaattggttaccctataactggttatggtacggaatccagaaaccgcgcagctcggcagcgcatccaaaacagggtttggacagatgaggatggtgttgaacatgtggaggtaggctttcacatccgagggccgcatggagctggaaaggtctttgcggagatgttcaaagatagctccgacaggacatggaagttcacgtttcttctcgtcgagattacgtcaccgcgacctgcacaaatcatgttagaatcttacctaccagcatagggatgcaagagaccagatcagccagcagtggcacatccatgcgacacttcattttacatcccatctccaatggcctgcatctgatgttaaatacccgtcctcggattaaagaagttgtgaattttgaacttccccgaaagcataagtaggaggaagatgaaccatcagagctgctgaccagagtatcttagacatggtgtaccgtgcaaggaccttgatgttgttgctttgtttagctgaaaggcgtgcaggcacatgtgtacaacccttctttcccggtgctcctcaaacatgggagggagcaagtgatccttcatctatcgagttttggtcccatttcaggcagttttaatgatgcacatggatttcgtgcaagcctccaatgatgtccaaatagcaataatatctggttacattacgactttcaagcctgggtttccaggcatgtatgaagtgatcttcaatacaagggtgcatgtttctttagcattgcc

SEQ ID NO: 65006 - protein, 298 aa, Triticum aestivum
  peptide (1)..(298): Ceres Seq. ID no. 13503607
LITPGRLSTAKGIPAAMAAAAARSGSRRLFSISALVPPKPPTPPPKADPFASLFAPGLSKRTTTDGLREAFAKSGEVVHASSVKNSRWYMINANRSSPLTVRKEYRKVLPSFIRPSASYSTEASEKRPKQERTDLTTVEDPFNAPTYNIPEKPVTFVEGASYSVVILAGLGVAALAGYAVFKELIFEPKEYKIFGKALVRVQSDSQVTAKIGYPITGYGTESRNRAARQRIQNRVWTDEDGVEHVEVGFHIRGPHGAGKVFAEMFKDSSDRTWKFTFLLVEITSPRPAQIMLESYLPA

SEQ ID NO: 65007 - protein, 282 aa, Triticum aestivum
  peptide (1)..(282): Ceres Seq. ID no. 13503608
MAAAAARSGSRRLFSISALVPPKPPTPPPKADPFASLFAPGLSKRTTTDGLREAFAKSGEVVHASSVKNSRWYMINANRSSPLTVRKEYRKVLPSFIRPSASYSTEASEKRPKQERTDLTTVEDPFNAPTYNIPEKPVTFVEGASYSVVILAGLGVAALAGYAVFKELIFEPKEYKIFGKALVRVQSDSQVTAKIGYPITGYGTESRNRAARQRIQNRVWTDEDGVEHVEVGFHIRGPHGAGKVFAEMFKDSSDRTWKFTFLLVEITSPRPAQIMLESYLPA

SEQ ID NO: 65008 - protein, 209 aa, Triticum aestivum
  peptide (1)..(209): Ceres Seq. ID no. 13503609
MINANRSSPLTVRKEYRKVLPSFIRPSASYSTEASEKRPKQERTDLTTVEDPFNAPTYNIPEKPVTFVEGASYSVVILAGLGVAALAGYAVFKELIFEPKEYKIFGKALVRVQSDSQVTAKIGYPITGYGTESRNRAARQRIQNRVWTDEDGVEHVEVGFHIRGPHGAGKVFAEMFKDSSDRTWKFTFLLVEITSPRPAQIMLESYLPA

SEQ ID NO: 65009 - DNA, 1395 bp, Triticum aestivum
  misc_feature (1)..(1395): Ceres Seq. ID no. 13584933
atctgaatgctagaaggaggtggttggacgatgaggcatcccaacacggtagaaggagttccgcctatcgaagttgagagggccaatttgaaaaaaagaaaaagttgagagggacagagagggaaacatctgggcattctcgttgcagaaagtagagcgctgtacaaacgggccttcacgaaccaagagacatccatcaaatttcatggcgtcctctccacaatcctcctcctctgcacccaaagccgacgacaaggcagcgtcccacaaagaaatctacgaccagctactagaggtcgtgtccacctacccgacggcgcctagcggcatcggccgcccgtacacccaccacccagacggctggtacgcgttcacgccggccgtcgtgaacgccatggtcatcaagcggcacctcaaggcgtgcgacaccgacgtcttcctctccacctttcccaagtccggcaccacctggctcaaggcgctcctgtttgcgaccctccgccgcaccgcggacgggccagcgatcgcggcgctcgcagcccacagcccccaccagctcatccctttcctcgaggtccaggttttcagcaacggccggatcccagacctgagctccctccctgcgccgcggctcctgatgacgcacatcccgtcccggtcgctgccggagtccgtggccgcctccggctgcaaggtggtgtacctgtgccgggaccccaaggactgcttcgtgtcgctctggcacttctggaaccggttcgcgccgtcgccgtgggacctcggtgaggcgctccagcagttctgcgacggcgtctccctgttcgggcctttctgggagcacgtgctgggctactggcgctggcatgtggagaggccggagcaggttctattcctgacctacgaggagctcgccgccgacaccctcggccagctgaagcggctcgctgcgtttctcgggcgcccgttcacgtcagaggagcgggaagccagggtagacagggagatcgtggaggcatgcgccatggagagcctggcgggactggaggtgaaccgctccgggaagacggacatgaccgagtcttcagtggcgaacaacatattcttccggcgcggcgtcgttggcgactggaagaaccacctgacgccggagatggctagaaggatcgatgagatcaccgatagcaagttcagaggatcggggttggcgttgacgccggcaaccgcagatcagaactagtgggttcatgatggcagatgctatataaataaggacgacttgcgcaacatttttataaaatattgtactattaatgtcaggcatgataacttgatcagcaaacatgcgaagggaaataacagaagtgttaccatacagtaatatacatgaatatcgtt

SEQ ID NO: 65010 - protein, 343 aa, Triticum aestivum
  peptide (1)..(343): Ceres Seq. ID no. 13584934
MASSPQSSSSAPKADDKAASHKEIYDQLLEVVSTYPTAPSGIGRPYTHHPDGWYAFTPAVVNAMVIKRHLKACDTDVFLSTFPKSGTTWLKALLFATLRRTADGPAIAALAAHSPHQLIPFLEVQVFSNGRIPDLSSLPAPRLLMTHIPSRSLPESVAASGCKVVYLCRDPKDCFVSLWHFWNRFAPSPWDLGEALQQFCDGVSLFGPFWEHVLGYWRWHVERPEQVLFLTYEELAADTLGQLKRLAAFLGRPFTSEEREARVDREIVEACAMESLAGLEVNRSGKTDMTESSVANNIFFRRGVVGDWKNHLTPEMARRIDEITDSKFRGSGLALTPATADQN

SEQ ID NO: 65011 - protein, 280 aa, Triticum aestivum
  peptide (1)..(280): Ceres Seq. ID no. 13584935
MVIKRHLKACDTDVFLSTFPKSGTTWLKALLFATLRRTADGPAIAALAAHSPHQLIPFLEVQVFSNGRIPDLSSLPAPRLLMTHIPSRSLPESVAASGCKVVYLCRDPKDCFVSLWHFWNRFAPSPWDLGEALQQFCDGVSLFGPFWEHVLGYWRWHVERPEQVLFLTYEELAADTLGQLKRLAAFLGRPFTSEEREARVDREIVEACAMESLAGLEVNRSGKTDMTESSVANNIFFRRGVVGDWKNHLTPEMARRIDEITDSKFRGSGLALTPATADQN

SEQ ID NO: 65012 - protein, 199 aa, Triticum aestivum
  peptide (1)..(199): Ceres Seq. ID no. 13584936
MTHIPSRSLPESVAASGCKVVYLCRDPKDCFVSLWHFWNRFAPSPWDLGEALQQFCDGVSLFGPFWEHVLGYWRWHVERPEQVLFLTYEELAADTLGQLKRLAAFLGRPFTSEEREARVDREIVEACAMESLAGLEVNRSGKTDMTESSVANNIFFRRGVVGDWKNHLTPEMARRIDEITDSKFRGSGLALTPATADQN

SEQ ID NO: 65013 - DNA, 1426 bp, Triticum aestivum
  misc_feature (1)..(1426): Ceres Seq. ID no. 14302836
ccattccattccatcccccttcatcttcttgtagccaccgagccagccagcgaccgagcggcggcgatttccatttcatctcagaattcagacggtgttcttgtctagagcaagaggggtttcttggcgttgatgtcgatggcgcaggtgtgctgtgactcggcctcgtcggcggtggtggtcggtgcggaggcggaggccagggccagggcgcgcgccgggaggcgccgcagagcgggcgacgcggcagccaggtggaaggtcaccgcggaggcgccgcagggcgccgaggaggccgcggccacgaggaagcgccgcgcggctgggggcgagggggtgcccgcgaaacgccacgggttcacgtcggttgccggacggaggagggagatggaggatgccgtctccatacgggaggccttcaccgtcccggccgaggaggggaagcccaggcgcgacttctacggcgttttcgacggacacggctgctcgcacgtggcggacgcgtgcagagaccggatgcacgagctcgttgccgaggagctcgccggcgcggcccagcccgagtcctggaccggcgcaatggagcgcagtttcgcgaggatggacgccgaggtgaccgccagcgggggcggcgacagcgccagctgccgctgcgaggccaacaagtgcgaccacgtggggtccacggccgtggtggccgtcgtgggggagcagcgcgtcctggtggccaactgcggcgactcccgcgccgtcctctgccgcgacggcgcgcccgtcgtcctctcctccgaccacaagcccgacaggccggacgagctggagaggatcgaggcggccggcggccgcgtcatattctgggagggcgcgagggtgctgggcgttctggccatgtcgcgcgccatcggcgacggctacctgaagccgttcgtgacggcggtcccggaggtgacggtgaccgacagggcggccggcgacgagtgcctgatccttgccagcgacggcctgtgggacgtggtcaacaacgagacagcgtgcgaggtggcgcgggcctgcctccggaggggcagagacaggtggtgcgccgaggcggcggccatgctcaccaagctggctctgaccaagaacagctcggacaacatctccgttgtcgtcgtcgatctccggccaaggaatcatttgtaggagggcgaccagctgccgtgatcttccattgcaacaatagcagtatagtagtagtaacagtaggatcaaatccaaaactagctctatagtgattctactgattatttctcttcttcaaaattcatttttttttttttttttttttttttttgcaatatttctccctggatcaagttcagtggagcacatagattatggtggggttgtggaaagaaataacaactggtgtaaccaagttcgatcc

SEQ ID NO: 65014 - protein, 349 aa, Triticum aestivum
  peptide (1)..(349): Ceres Seq. ID no. 14302837
MSMAQVCCDSASSAVVVGAEAEARARARAGRRRRAGDAAARWKVTAEAPQGAEEAAATRKRRAAGGEGVPAKRHGFTSVAGRRREMEDAVSIREAFTVPAEEGKPRRDFYGVFDGHGCSHVADACRDRMHELVAEELAGAAQPESWTGAMERSFARMDAEVTASGGGDSASCRCEANKCDHVGSTAVVAVVGEQRVLVANCGDSRAVLCRDGAPVVLSSDHKPDRPDELERIEAAGGRVIFWEGARVLGVLAMSRAIGDGYLKPFVTAVPEVTVTDRAAGDECLILASDGLWDVVNNETACEVARACLRRGRDRWCAEAAAMLTKLALTKNSSDNISVVVVDLRPRNHL

SEQ ID NO: 65015 - protein, 347 aa, Triticum aestivum
  peptide (1)..(347): Ceres Seq. ID no. 14302838
MAQVCCDSASSAVVVGAEAEARARARAGRRRRAGDAAARWKVTAEAPQGAEEAAATRKRRAAGGEGVPAKRHGFTSVAGRRREMEDAVSIREAFTVPAEEGKPRRDFYGVFDGHGCSHVADACRDRMHELVAEELAGAAQPESWTGAMERSFARMDAEVTASGGGDSASCRCEANKCDHVGSTAVVAVVGEQRVLVANCGDSRAVLCRDGAPVVLSSDHKPDRPDELERIEAAGGRVIFWEGARVLGVLAMSRAIGDGYLKPFVTAVPEVTVTDRAAGDECLILASDGLWDVVNNETACEVARACLRRGRDRWCAEAAAMLTKLALTKNSSDNISVVVVDLRPRNHL

SEQ ID NO: 65016 - protein, 264 aa, Triticum aestivum
  peptide (1)..(264): Ceres Seq. ID no. 14302839
MEDAVSIREAFTVPAEEGKPRRDFYGVFDGHGCSHVADACRDRMHELVAEELAGAAQPESWTGAMERSFARMDAEVTASGGGDSASCRCEANKCDHVGSTAVVAVVGEQRVLVANCGDSRAVLCRDGAPVVLSSDHKPDRPDELERIEAAGGRVIFWEGARVLGVLAMSRAIGDGYLKPFVTAVPEVTVTDRAAGDECLILASDGLWDVVNNETACEVARACLRRGRDRWCAEAAAMLTKLALTKNSSDNISVVVVDLRPRNHL

SEQ ID NO: 65017 - DNA, 1891 bp, Triticum aestivum
  misc_feature (1)..(1891): Ceres Seq. ID no. 13597546
aaaacaaacccacacacaacccctctgtctcctcctccttggctttgctagcttcctgctcccttcgcttcccacatgcagccatatcttgagctagcttctctccgcatcaccgccaccatcccgctgtccccaagaatatatagcaccatcttcctcgaggccatggctgccatggcctatatagccctccggggcgcggcattggccgccatcgtcgccctcatccattgggtgtacaggtggcgccaccccaaatgcgccggcacgctcccgccgggatccatgggcatccccatcatcggcgagacgctgcagttcttcgcccccaacccgacctgcggcctctcccccttcgtccgggacagggtgaagaggtacgggagcatgttcaagacgagcatcgtggggcggccggtggtggtgtcggcggacccggacgtgaaccactacgtgttccagaacgaggggaagctgttcgagagctggtacccggacaccttcaccgagatcttcggccgcgacaacgtcggctccctgcacggcttcatctacaagtacctcaagaccctcgtgctccgcctctacggccaggagaacctcaaggcggtgctcctcgccgagaccgacgccgcctgccgcggcagcctcgccgcgtgggcggcgcagccctgtgtcgacatcaaagacgggctctccactatgatatttgatcttactgccaagaagctgatcggctacgagccgaccaagtcctcggagagcctgcgggagaatttcacggcgttcattcgcggcctgatctcgttccccctcaacattcccggcacggcctatcacgaatgcatggaggggaggaagaaagcgatgaaggtgctcaagggcatgatgcaggagaggatggcggatccggagaggaagtgcgaggacttcttcgaccacgtgatccaggaactgaggagggagaagccgcttctgacggagaccatcgcgctggacctcatgttcgtgctcctcttcgccagcttcgagaccacggcgctcgccctcaccctcggcgtcaagctgctcaccgagaaccccagagtcgtcgacgcgctaacggaggaacacgaagcgatcgtgaggaacagggaggacccagatgccgcgatcacgtgggccgagtacaagtcgatgaccttcacagctcatgtcatcatggagatcgtcagactcgccaacatcgtgccggggattttccggaaggccttgcaagacgttgagatcaaaggctacacggttccagcgggatggggtatcatggtgtgtccgccggcggtgcacctaaaccctgacatatacgaagatccgctggcgttcaacccatggaggtggcaggacaaacctgaaatcaccggcggaacgaagcatttcatggcgttcggaggcgggcttcggttctgcgtcggaaccgatctcaccaaggtcttgatggcaacattcattcacaatcttgttacgaaatacagatggaagacagtaaaaggagggaacatagtccggacgccgggcctcggcttcccggatggctttgacatccagctcttccctaagaactgacccttttttgatgatatctcgacagtttagtggttgcagttaaacacaagattgttcctgcaaaagatcacattttaggatggaaaaccatatacttagtctagtggtaggatacacattcctagttataactacagtcatattgccgggtaccacctctcatggatccagaatgggttttttgtacttttggctgttcgttttccatgtggttagtcatctatccatgtgttgtgtgtaaatcaatcccatacatctcaaatgagaaagagagcatattaactgtgtg

SEQ ID NO: 65018 - protein, 508 aa, Triticum aestivum
  peptide (1)..(508): Ceres Seq. ID no. 13597547
MQPYLELASLRITATIPLSPRIYSTIFLEAMAAMAYIALRGAALAAIVALIHWVYRWRHPKCAGTLPPGSMGIPIIGETLQFFAPNPTCGLSPFVRDRVKRYGSMFKTSIVGRPVVVSADPDVNHYVFQNEGKLFESWYPDTFTEIFGRDNVGSLHGFIYKYLKTLVLRLYGQENLKAVLLAETDAACRGSLAAWAAQPCVDIKDGLSTMIFDLTAKKLIGYEPTKSSESLRENFTAFIRGLISFPLNIPGTAYHECMEGRKKAMKVLKGMMQERMADPERKCEDFFDHVIQELRREKPLLTETIALDLMFVLLFASFETTALALTLGVKLLTENPRVVDALTEEHEAIVRNREDPDAAITWAEYKSMTFTAHVIMEIVRLANIVPGIFRKALQDVEIKGYTVPAGWGIMVCPPAVHLNPDIYEDPLAFNPWRWQDKPEITGGTKHFMAFGGGLRFCVGTDLTKVLMATFIHNLVTKYRWKTVKGGNIVRTPGLGFPDGFDIQLFPKN

SEQ ID NO: 65019 - protein, 478 aa, Triticum aestivum
  peptide (1)..(478): Ceres Seq. ID no. 13597548
MAAMAYIALRGAALAAIVALIHWVYRWRHPKCAGTLPPGSMGIPIIGETLQFFAPNPTCGLSPFVRDRVKRYGSMFKTSIVGRPVVVSADPDVNHYVFQNEGKLFESWYPDTFTEIFGRDNVGSLHGFIYKYLKTLVLRLYGQENLKAVLLAETDAACRGSLAAWAAQPCVDIKDGLSTMIFDLTAKKLIGYEPTKSSESLRENFTAFIRGLISFPLNIPGTAYHECMEGRKKAMKVLKGMMQERMADPERKCEDFFDHVIQELRREKPLLTETIALDLMFVLLFASFETTALALTLGVKLLTENPRVVDALTEEHEAIVRNREDPDAAITWAEYKSMTFTAHVIMEIVRLANIVPGIFRKALQDVEIKGYTVPAGWGIMVCPPAVHLNPDIYEDPLAFNPWRWQDKPEITGGTKHFMAFGGGLRFCVGTDLTKVLMATFIHNLVTKYRWKTVKGGNIVRTPGLGFPDGFDIQLFPKN

SEQ ID NO: 65020 - protein, 475 aa, Triticum aestivum
  peptide (1)..(475): Ceres Seq. ID no. 13597549
MAYIALRGAALAAIVALIHWVYRWRHPKCAGTLPPGSMGIPIIGETLQFFAPNPTCGLSPFVRDRVKRYGSMFKTSIVGRPVVVSADPDVNHYVFQNEGKLFESWYPDTFTEIFGRDNVGSLHGFIYKYLKTLVLRLYGQENLKAVLLAETDAACRGSLAAWAAQPCVDIKDGLSTMIFDLTAKKLIGYEPTKSSESLRENFTAFIRGLISFPLNIPGTAYHECMEGRKKAMKVLKGMMQERMADPERKCEDFFDHVIQELRREKPLLTETIALDLMFVLLFASFETTALALTLGVKLLTENPRVVDALTEEHEAIVRNREDPDAAITWAEYKSMTFTAHVIMEIVRLANIVPGIFRKALQDVEIKGYTVPAGWGIMVCPPAVHLNPDIYEDPLAFNPWRWQDKPEITGGTKHFMAFGGGLRFCVGTDLTKVLMATFIHNLVTKYRWKTVKGGNIVRTPGLGFPDGFDIQLFPKN

SEQ ID NO: 65021 - DNA, 1645 bp, Triticum aestivum
  misc_feature (1)..(1645): Ceres Seq. ID no. 14302255
atagctctcattcatctcgtgagaaacacagtgtgatatggcgacgtcatggctcctcaggcatccttgtccactggctaggccatggaccagaacaaggaatgatataggtctccatgtgaccagcatcgcctactgctactggagatgcactaggaccagtggaggaggaagaatcatggcggatatgagtatgaacaccaccaactgcacggcagaacccgcccttctaccccaagctgatgctgccgaactagcagggggagccgaccatcctcctagacttagtaagagaagcgcgcgcactggccggggcgccgccgttgcggctaggcacgaggaggagggcactgacgacgaatggctcatgtacctggagccggcgaagctacaggtgttcgaccatctggagccttgggcggaggcgaatgtggtgccgctccttaagcccgccgaggtagcgtggcagccgacggacttgctgccggatctggcgtcgctgggcaccgacggcttccacgcggcgtgctccgacatcacagcgcgcgcggccggcctgcccgacgcgcacctcgtatgcctcgtggggaacatggtcacggaggaggcgctgccaacttaccagagcatacccaaccgcttcgaggccgtgcgcgacctcaccggctccagcggcactgcctgggcgcgctggatccgcggctggtctgccgaggagaaccggcacggcgacgtgcttaacaggtacctcttcctctccggccgcgtcgacatgcggcaggtcgagaggaccatccacaacctcatccagtccggcatggtcatgaacgctgcgcggagcccctaccacggcttcatctacgtcgccttccaggagcgtgccacctccatctctcacggcaacacagcccgtcgcgccaaggagtatggcgacgtggcgctcgcgcgcatatgcggtgccatcgcggctgacgagaagcggcacgagctggcctacacgcggatcgtggggaagctgttcgagatcgacccggacggcgccgtgcgcgcgctggcgtacatgatgcgccgccggatcgtcatgccggcgtccctcatgacagacggccgcgacggtgacctcttcgcgcactacgcggccgtggcgcagcaggccggcatttacaccgcctcggactaccgtagcattttggagcacctgataaagcagtggggggtgaaagagctggcagcggccgaactctccgacgacgggaggcgtgcgcgggactacgtgtgcgcgttgccccaaaagatccgcaggttggaggaaaaggctcacgagcgcagcggccagaaaacccagcctgcaacatcggccccgtttagctggatctttgataagcctgtcaacaacaccatggggtaatcaaattattgttgttatataccctaaatatcctttaaatcattatttctcgatcctatctttgagatgaagtattcttcatctctactttgctagtgtcggcgccagtaaaagtactttttttttctgatcgggttgaagctatgaggatggtattgtactactgtatttttgtaagttgttttatcacattctaaaaataaatacagggagagtgaaagttgtattcaaaaaaat

SEQ ID NO: 65022 - protein, 456 aa, Triticum aestivum
  peptide (1)..(456): Ceres Seq. ID no. 14302256
MATSWLLRHPCPLARPWTRTRNDIGLHVTSIAYCYWRCTRTSGGGRIMADMSMNTTNCTAEPALLPQADAAELAGGADHPPRLSKRSARTGRGAAVAARHEEEGTDDEWLMYLEPAKLQVFDHLEPWAEANVVPLLKPAEVAWQPTDLLPDLASLGTDGFHAACSDITARAAGLPDAHLVCLVGNMVTEEALPTYQSIPNRFEAVRDLTGSSGTAWARWIRGWSAEENRHGDVLNRYLFLSGRVDMRQVERTIHNLIQSGMVMNAARSPYHGFIYVAFQERATSISHGNTARRAKEYGDVALARICGAIAADEKRHELAYTRIVGKLFEIDPDGAVRALAYMMRRRIVMPASLMTDGRDGDLFAHYAAVAQQAGIYTASDYRSILEHLIKQWGVKELAAAELSDDGRRARDYVCALPQKIRRLEEKAHERSGQKTQPATSAPFSWIFDKPVNNTMG

SEQ ID NO: 65023 - protein, 409 aa, Triticum aestivum
  peptide (1)..(409): Ceres Seq. ID no. 14302257
MADMSMNTTNCTAEPALLPQADAAELAGGADHPPRLSKRSARTGRGAAVAARHEEEGTDDEWLMYLEPAKLQVFDHLEPWAEANVVPLLKPAEVAWQPTDLLPDLASLGTDGFHAACSDITARAAGLPDAHLVCLVGNMVTEEALPTYQSIPNRFEAVRDLTGSSGTAWARWIRGWSAEENRHGDVLNRYLFLSGRVDMRQVERTIHNLIQSGMVMNAARSPYHGFIYVAFQERATSISHGNTARRAKEYGDVALARICGAIAADEKRHELAYTRIVGKLFEIDPDGAVRALAYMMRRRIVMPASLMTDGRDGDLFAHYAAVAQQAGIYTASDYRSILEHLIKQWGVKELAAAELSDDGRRARDYVCALPQKIRRLEEKAHERSGQKTQPATSAPFSWIFDKPVNNTMG

SEQ ID NO: 65024 - protein, 406 aa, Triticum aestivum
  peptide (1)..(406): Ceres Seq. ID no. 14302258
MSMNTTNCTAEPALLPQADAAELAGGADHPPRLSKRSARTGRGAAVAARHEEEGTDDEWLMYLEPAKLQVFDHLEPWAEANVVPLLKPAEVAWQPTDLLPDLASLGTDGFHAACSDITARAAGLPDAHLVCLVGNMVTEEALPTYQSIPNRFEAVRDLTGSSGTAWARWIRGWSAEENRHGDVLNRYLFLSGRVDMRQVERTIHNLIQSGMVMNAARSPYHGFIYVAFQERATSISHGNTARRAKEYGDVALARICGAIAADEKRHELAYTRIVGKLFEIDPDGAVRALAYMMRRRIVMPASLMTDGRDGDLFAHYAAVAQQAGIYTASDYRSILEHLIKQWGVKELAAAELSDDGRRARDYVCALPQKIRRLEEKAHERSGQKTQPATSAPFSWIFDKPVNNTMG

SEQ ID NO: 65025 - DNA, 1397 bp, Triticum aestivum
  misc_feature (1)..(1397): Ceres Seq. ID no. 12618563
ccaaacggccgaacccccaacggagcagctaaaaactctgctgccggcgctaggaacactccagcaactcctctctggacgagacgaatcgaagccgatccgagtttccaaatgccgcaggcgcaggctatgtcggtcctgccggtggtgctcctcggctgcggcggcgtcggccgccacctcctccgccacatcgtctcctgcaggcctctccacgccaaccagggcgtctccatccgggtggtgggcgttgccgacagctcctcgctgctcgtcgcagacgacgtccgcgccagcggcctcgatgacgcgctcctcaacgacctctgctccgccaagtccgccggctcgcctctgtcctcgctgctcgctcgcgggcactgtcaggtgttcaacaagccggaggcaatggggaaagtcatcgatgcagctaccatgcttggaagaacaaccggtctggtgatagttgattgttctgcaacttatgacactgttggtgtgctgaaggatgccgtgaatcatggatgctgcgttgttttggcaaacaaaaaacctcttacatgtgcttatgaggattttaaaaagttgacatcccacttccgtcagataagatttgaatctaccgttggagcaggtttgcctgtaatagcttctgtaacccgcattattgcatctggagatccagtttcccgaatcgttggcagtctgagtggtacacttggctatgtgatgagtgagctggaggatggaaaaaaaattagtgaagttgtgaaaactgccaaggctcttggttatacagaaccagatccacgtgatgatctaagtgggatggatgtggctagaaaggcgttgatcctagctaggcttctcgggcagcagatcagcatggagaatatcaatgttgagagtttatatccgagtgagttaggacctgaggttatgtccacaacggatttccttgagagtgggttggcaaaacttgatgagacgattgaagaaagggtcaaggcagcatctttgaggggaaatgttctgcgctatgtttgtgtcattggaagcacagggtgtcaagtgggccttcaagaggtcccaaaagattctgcactggggagattgaggggaagtgacaatgtggtggagatatacagcagatgctacgagagctccccgctggtgatccagggtgcaggagccgggaacgacaccactgccgcaggagttctcgctgatataatcgatctccaagatcttttccagacaagagcgtgattgtcttgtttagcaccaaggagtttgatgcgttgtatgatcgaccataatgtccattgaactgaaattggttctggcgtttgaggttgtatgaacattttcggttgtgtttggctgctgttgatttg

SEQ ID NO: 65026 - protein, 422 aa, Triticum aestivum
  peptide (1)..(422): Ceres Seq. ID no. 12618564
PNGRTPNGAAKNSAAGARNTPATPLWTRRIEADPSFQMPQAQAMSVLPVVLLGCGGVGRHLLRHIVSCRPLHANQGVSIRVVGVADSSSLLVADDVRASGLDDALLNDLCSAKSAGSPLSSLLARGHCQVFNKPEAMGKVIDAATMLGRTTGLVIVDCSATYDTVGVLKDAVNHGCCVVLANKKPLTCAYEDFKKLTSHFRQIRFESTVGAGLPVIASVTRIIASGDPVSRIVGSLSGTLGYVMSELEDGKKISEVVKTAKALGYTEPDPRDDLSGMDVARKALILARLLGQQISMENINVESLYPSELGPEVMSTTDFLESGLAKLDETIEERVKAASLRGNVLRYVCVIGSTGCQVGLQEVPKDSALGRLRGSDNVVEIYSRCYESSPLVIQGAGAGNDTTAAGVLADIIDLQDLFQTRA

SEQ ID NO: 65027 - protein, 385 aa, Triticum aestivum
  peptide (1)..(385): Ceres Seq. ID no. 12618565
MPQAQAMSVLPVVLLGCGGVGRHLLRHIVSCRPLHANQGVSIRVVGVADSSSLLVADDVRASGLDDALLNDLCSAKSAGSPLSSLLARGHCQVFNKPEAMGKVIDAATMLGRTTGLVIVDCSATYDTVGVLKDAVNHGCCVVLANKKPLTCAYEDFKKLTSHFRQIRFESTVGAGLPVIASVTRIIASGDPVSRIVGSLSGTLGYVMSELEDGKKISEVVKTAKALGYTEPDPRDDLSGMDVARKALILARLLGQQISMENINVESLYPSELGPEVMSTTDFLESGLAKLDETIEERVKAASLRGNVLRYVCVIGSTGCQVGLQEVPKDSALGRLRGSDNVVEIYSRCYESSPLVIQGAGAGNDTTAAGVLADIIDLQDLFQTRA

SEQ ID NO: 65028 - protein, 379 aa, Triticum aestivum
  peptide (1)..(379): Ceres Seq. ID no. 12618566
MSVLPVVLLGCGGVGRHLLRHIVSCRPLHANQGVSIRVVGVADSSSLLVADDVRASGLDDALLNDLCSAKSAGSPLSSLLARGHCQVFNKPEAMGKVIDAATMLGRTTGLVIVDCSATYDTVGVLKDAVNHGCCVVLANKKPLTCAYEDFKKLTSHFRQIRFESTVGAGLPVIASVTRIIASGDPVSRIVGSLSGTLGYVMSELEDGKKISEVVKTAKALGYTEPDPRDDLSGMDVARKALILARLLGQQISMENINVESLYPSELGPEVMSTTDFLESGLAKLDETIEERVKAASLRGNVLRYVCVIGSTGCQVGLQEVPKDSALGRLRGSDNVVEIYSRCYESSPLVIQGAGAGNDTTAAGVLADIIDLQDLFQTRA

SEQ ID NO: 65029 - DNA, 1856 bp, Triticum aestivum
  misc_feature (1)..(1856): Ceres Seq. ID no. 14313514
ctagaacatcctaatcgagaaaattaaaacgacatgaaccccctcaagaactcgcgctccgccctctcccgtctcctccgccacaaccccgccgccggccggccgcagcccccggcccctcccccgccggtgccgcgggaaacggccgctcggcactaccacgccgccccgcgccgcccagggttcattcagtccttcagccgagggcccctccgccacgagcccgccgccctcttccggcagccgccggcgcgggcgcaggcgccgcctccccggcactacttcacctcctcgcgccgcccggaggtcatccacttcgcgcgccgccgcggcggggcgcggtggtaccacgacaggcggaaggtcgccgcggtggtcctcctcgccggcggcgggacaatcgtcgtctacttcggcaacctcgagaccgtgccctacaccaaccgcacccacttcgtcctcgtctcgccccagctcgagcgccagctcggcgagtcccagttcgctgatctcaagaaggagctcgcccccaagatcctgcccccgctccaccccgacagtgtgggggtgcgcctcatcgcctccgagatcgtccgcgcgctccaccgcggcctcgccgaccgccgcagcgacgacttcgatgacgcctcctacggcgacatctccaccgacatcgccgtcaaggcccgggacatggatgccgacgacgtgatgcatcgggtctcgcctggcaagaccgcgggcacggccgctagggctcagcgagacgacgagcttctcgatgacaggtgggtcgccgagagccggagacgggggaaggcacgcggagcgcagccacagacgaagcacctcaatgagctcaattgggaggtcatcgtcgtcagagataagctcatcaatgcaatgtgcttgcctggtggtaaaattgtagtcttcactggattgctcgaccatttcaagacagatgctgagattgcgacagtgctttcgcatgagattgggcacgctatcgcgaggcacttgccagagatgatcaccaagggcatgtggtttactatcctgcagcttatcgtcctacagtttatttacatgccagacctaattaatgcaatgtcgacattactcctcagattgcccttctcacgaaggatggaggtagaggcggatcacatcgggctcatgcttcaagcttctgctggtttcgacccacgcacagctcccaaggtctacgagaagctaggacaaatcgcgggcaatcagtcagtgctgaaaagctacctctccacccatccttcgagtaagaagcgatcggagctcttgtctcgagccaaggtaatggaggaggcgatgcaactatacagggaagcttgcgccggccacgggaccgaaggcttcctgtaggttgcagctttgaactctcctgcctgtggctgcgtggtaagtcgctcggtggcggtgcctggcacggaaacatgtcctttgttacctgcacggtgacgtccagtaagaagagtgcattctgtgtctgaagatgttcgttctgtgcgttgttactgtctgttcttgtcaggctgaatcagccgcactttggtagcaggatgtgatcgagctgcatcatttgtgattaggagagaacagggaataggagaagagtttctgttaataattgtcttccaagagcagcttttatagtcccatcttccttgggtttaccggcgttgatgatcgtcacgttggttagtttttgtcatctacgccagctagtagtcagctggtgacggaatattcatataatatcgatgtttgaagtagtcagtcacaactcacaaggtatataatatactccatcggtttcc

SEQ ID NO: 65030 - protein, 455 aa, Triticum aestivum
  peptide (1)..(455): Ceres Seq. ID no. 14313515
MNPLKNSRSALSRLLRHNPAAGRPQPPAPPPPVPRETAARHYHAAPRRPGFIQSFSRGPLRHEPAALFRQPPARAQAPPPRHYFTSSRRPEVIHFARRRGGARWYHDRRKVAAVVLLAGGGTIVVYFGNLETVPYTNRTHFVLVSPQLERQLGESQFADLKKELAPKILPPLHPDSVGVRLIASEIVRALHRGLADRRSDDFDDASYGDISTDIAVKARDMDADDVMHRVSPGKTAGTAARAQRDDELLDDRWVAESRRRGKARGAQPQTKHLNELNWEVIVVRDKLINAMCLPGGKIVVFTGLLDHFKTDAEIATVLSHEIGHAIARHLPEMITKGMWFTILQLIVLQFIYMPDLINAMSTLLLRLPFSRRMEVEADHIGLMLQASAGFDPRTAPKVYEKLGQIAGNQSVLKSYLSTHPSSKKRSELLSRAKVMEEAMQLYREACAGHGTEGFL

SEQ ID NO: 65031 - protein, 235 aa, Triticum aestivum
  peptide (1)..(235): Ceres Seq. ID no. 14313516
MDADDVMHRVSPGKTAGTAARAQRDDELLDDRWVAESRRRGKARGAQPQTKHLNELNWEVIVVRDKLINAMCLPGGKIVVFTGLLDHFKTDAEIATVLSHEIGHAIARHLPEMITKGMWFTILQLIVLQFIYMPDLINAMSTLLLRLPFSRRMEVEADHIGLMLQASAGFDPRTAPKVYEKLGQIAGNQSVLKSYLSTHPSSKKRSELLSRAKVMEEAMQLYREACAGHGTEGFL

SEQ ID NO: 65032 - protein, 229 aa, Triticum aestivum
  peptide (1)..(229): Ceres Seq. ID no. 14313517
MHRVSPGKTAGTAARAQRDDELLDDRWVAESRRRGKARGAQPQTKHLNELNWEVIVVRDKLINAMCLPGGKIVVFTGLLDHFKTDAEIATVLSHEIGHAIARHLPEMITKGMWFTILQLIVLQFIYMPDLINAMSTLLLRLPFSRRMEVEADHIGLMLQASAGFDPRTAPKVYEKLGQIAGNQSVLKSYLSTHPSSKKRSELLSRAKVMEEAMQLYREACAGHGTEGFL

SEQ ID NO: 65033 - DNA, 1770 bp, Triticum aestivum
  misc_feature (1)..(1770): Ceres Seq. ID no. 13662762
attctaaaattgcctcgactaacaccagcgcagcagctagcttacctccatcgtgtgtgtccgtctgtccatggcgccgtcggagacgatgctggagtcggcggcgtacaggcggatgaaggcggagaacccgtccgagttcgtgccgcgcagcgtcttcttcgcgcgcgacggcggcagcggcatcgaccgccgcaacagcctctgggtcaaggcggcgctcgtctacgagtccgtcaccggcagccacgtcgacgacggcgtcaagcccctcgccaccagcctcttcctccaggtcgcccgcgaatgccgctcccgcatccccgacgacccaccgcagaccaaggccacggtggtgacggacgccctcaaaaaagtaccggctgccgtggctacgcctattgccggcgcgggcggcggcgaagatgactcagaggagaaaccgaacaagacggcggagctgcacgacgaagaaaaggagtcggacgacaagcaggtgatcgacgccgtcttcctcgtcgtcggcttcctcacgaggctggtcaagaccgccgcgggcgtcaggcgcgacgccgtcgacgaggggttcaagtccacgcacatgcaggacatcgtcacggacatgatcaagctggagaaccagctccccctcaagctcatcctcgacgtcgtcgagcacgtccaggacgcggcacgcgccgtcgccgccgaagccaggttcgaggggctccggaaatgcctcgaggggtacaagctcggcttcaaccccgccaccttcttcgacgacgtcgtcaggcccttctgctggtactactcgcccttcttcaacaagcagctgccggccgtggaccgcggcatgttcgacggcaaccacgagatcacgctcctggacttcctgcgcgccagcgtggtgccggcgccgccgggcgcggagaagggggcggccgccggcggcaggacgtcccgcatgccgacggccagggagctgagccgctctggcgtgcggatcgcgccgggggaggacggacgcgcgacggtggagttcgacgaggcgtccgccaggctgcagctgccggcgctggtgtacgacttcaagctggccacggtggcccggaacctgctggcgcgggagtacgaggagcagaacaagccggtgacgcgctacttccagatgatgaacgagctcgtcgacgaggcggccgacgccaagatcctccgccgcgccggcgccgtgcgcggtggcggggcgtccggcgccgaggtgcacgagctggtcaagcgcatcgacggctacgcgacgtacccgtcggtgtacatggccatggacgtgcagatcgcgaaggtgaggcggttccacgacatgaggatgcagaacttcctcgtccgctaccgccccggcgtcatctgggcgtcgtcggtggccgccgtctccttggtcgccattgtcgccgccaggagacgggggtgaggaagccaacggcggctaaccaaggcccgcgcatgaagattgtacaacttgaagtgtaatgttgtgtcttgtggttgtgtaccggtgtacaatgtgtaagtccaagcaaagatgattggatgcggggatttgtgggggctcgccatcctattgctaataatgattaattgcatgatagtccatgcaatttggtgcagattatgccaatccatgtaactgtaatcatagcttcactcatcaccaagatagggggtgagatttggagatgcaaaatggagtacaaatgaggacgtgagatactt

SEQ ID NO: 65034 - protein, 465 aa, Triticum aestivum
  peptide (1)..(465): Ceres Seq. ID no. 13662763
MAPSETMLESAAYRRMKAENPSEFVPRSVFFARDGGSGIDRRNSLWVKAALVYESVTGSHVDDGVKPLATSLFLQVARECRSRIPDDPPQTKATVVTDALKKVPAAVATPIAGAGGGEDDSEEKPNKTAELHDEEKESDDKQVIDAVFLVVGFLTRLVKTAAGVRRDAVDEGFKSTHMQDIVTDMIKLENQLPLKLILDVVEHVQDAARAVAAEARFEGLRKCLEGYKLGFNPATFFDDVVRPFCWYYSPFFNKQLPAVDRGMFDGNHEITLLDFLRASVVPAPPGAEKGAAAGGRTSRMPTARELSRSGVRIAPGEDGRATVEFDEASARLQLPALVYDFKLATVARNLLAREYEEQNKPVTRYFQMMNELVDEAADAKILRRAGAVRGGGASGAEVHELVKRIDGYATYPSVYMAMDVQIAKVRRFHDMRMQNFLVRYRPGVIWASSVAAVSLVAIVAARRRG

SEQ ID NO: 65035 - protein, 459 aa, Triticum aestivum
  peptide (1)..(459): Ceres Seq. ID no. 13662764
MLESAAYRRMKAENPSEFVPRSVFFARDGGSGIDRRNSLWVKAALVYESVTGSHVDDGVKPLATSLFLQVARECRSRIPDDPPQTKATVVTDALKKVPAAVATPIAGAGGGEDDSEEKPNKTAELHDEEKESDDKQVIDAVFLVVGFLTRLVKTAAGVRRDAVDEGFKSTHMQDIVTDMIKLENQLPLKLILDVVEHVQDAARAVAAEARFEGLRKCLEGYKLGFNPATFFDDVVRPFCWYYSPFFNKQLPAVDRGMFDGNHEITLLDFLRASVVPAPPGAEKGAAAGGRTSRMPTARELSRSGVRIAPGEDGRATVEFDEASARLQLPALVYDFKLATVARNLLAREYEEQNKPVTRYFQMMNELVDEAADAKILRRAGAVRGGGASGAEVHELVKRIDGYATYPSVYMAMDVQIAKVRRFHDMRMQNFLVRYRPGVIWASSVAAVSLVAIVAARRRG

SEQ ID NO: 65036 - protein, 450 aa, Triticum aestivum
  peptide (1)..(450): Ceres Seq. ID no. 13662765
MKAENPSEFVPRSVFFARDGGSGIDRRNSLWVKAALVYESVTGSHVDDGVKPLATSLFLQVARECRSRIPDDPPQTKATVVTDALKKVPAAVATPIAGAGGGEDDSEEKPNKTAELHDEEKESDDKQVIDAVFLVVGFLTRLVKTAAGVRRDAVDEGFKSTHMQDIVTDMIKLENQLPLKLILDVVEHVQDAARAVAAEARFEGLRKCLEGYKLGFNPATFFDDVVRPFCWYYSPFFNKQLPAVDRGMFDGNHEITLLDFLRASVVPAPPGAEKGAAAGGRTSRMPTARELSRSGVRIAPGEDGRATVEFDEASARLQLPALVYDFKLATVARNLLAREYEEQNKPVTRYFQMMNELVDEAADAKILRRAGAVRGGGASGAEVHELVKRIDGYATYPSVYMAMDVQIAKVRRFHDMRMQNFLVRYRPGVIWASSVAAVSLVAIVAARRRG

SEQ ID NO: 65037 - DNA, 1228 bp, Triticum aestivum
  misc_feature (1)..(1228): Ceres Seq. ID no. 13597550
acacagccacaagatcgacacaatatagtacgtcgtctgcagttacacgcacgaaaggaacgtacgtcgtagatcggtcgaagaggcttgttgagatggagatgccgagggtctctgaggaaactgtggccgccgtcgtgcccatcgccgtgtactgggcatacgccggcgtgcacacggcgctggggcagtcgcggctcatggacaagtacaggctcaacaccaaggacgaggaggaccgcaagaacatggtgtccaagcgcgccgtcatcctcaacgtcctcatgcagcacctcatgcagctcgccgccctcgccgtgctcgccatggttacaggaggaagaggggcgacggcgaaggccgctggcggctcaccggcggcggtgtacctgacggcggccgcccggatcgcggtggccgtgctggtgttcgacgcgtaccggtacgcgtggcaccgcctggcgcacatcaaccggttcatttaccggcacctccactcgtggcaccaccgcatcgtggtgccctacgcgttcggcgccatctacggccacccgatcgaggtcctcatcgccgacacggccggggcctcgctcgccgtcctcgtcaccggcctgtcgccgtcgtcgccgcgcgccacggccgtgttcctcaccctctgcaccgtgaaggccatcgacaaccactgcggcgtgtgcctgctgccgcgccgcctgcagtcggtctggaacggcgccgcgtaccacggcgtgcaccacatgccgcgcggcgtccggtacaacttctccgacctcttcttcgtgacgtgggaccatgtgttcgggacccacatgccctacgccgtcgaggagaggccgggcggcgatggcctcgtgctcaagcccctgccgcctcccaaggcaactaattagttaacggcatgctcgatcaggcatgcagttactacgtaccactcctagtgctaatgagtatagttatatgtagattagtcaataagcaagcaagttgcatgtgtatgtacgtgtggcttgcatgcacgcatgcagctacaaaactagaagcagccagtgagatgtgcgtgttgaagtcagcgggtagacgtgagccagtcaaactatttgctcgctgcgccgagtgccgaccatagcacgcatgtgctcagtttttttgttttgttttgagtcactctatgtattgtatattccattcaataaagtgtagaagtctgttc

SEQ ID NO: 65038 - protein, 301 aa, Triticum aestivum
  peptide (1)..(301): Ceres Seq. ID no. 15222128
TATRSTQYSTSSAVTRTKGTYVVDRSKRLVEMEMPRVSEETVAAVVPIAVYWAYAGVHTALGQSRLMDKYRLNTKDEEDRKNMVSKRAVILNVLMQHLMQLAALAVLAMVTGGRGATAKAAGGSPAAVYLTAAARIAVAVLVFDAYRYAWHRLAHINRFIYRHLHSWHHRIVVPYAFGAIYGHPIEVLIADTAGASLAVLVTGLSPSSPRATAVFLTLCTVKAIDNHCGVCLLPRRLQSVWNGAAYHGVHHMPRGVRYNFSDLFFVTWDHVFGTHMPYAVEERPGGDGLVLKPLPPPKATN

SEQ ID NO: 65039 - protein, 270 aa, Triticum aestivum
  peptide (1)..(270): Ceres Seq. ID no. 15222129
MEMPRVSEETVAAVVPIAVYWAYAGVHTALGQSRLMDKYRLNTKDEEDRKNMVSKRAVILNVLMQHLMQLAALAVLAMVTGGRGATAKAAGGSPAAVYLTAAARIAVAVLVFDAYRYAWHRLAHINRFIYRHLHSWHHRIVVPYAFGAIYGHPIEVLIADTAGASLAVLVTGLSPSSPRATAVFLTLCTVKAIDNHCGVCLLPRRLQSVWNGAAYHGVHHMPRGVRYNFSDLFFVTWDHVFGTHMPYAVEERPGGDGLVLKPLPPPKATN

SEQ ID NO: 65040 - protein, 268 aa, Triticum aestivum
  peptide (1)..(268): Ceres Seq. ID no. 15222130
MPRVSEETVAAVVPIAVYWAYAGVHTALGQSRLMDKYRLNTKDEEDRKNMVSKRAVILNVLMQHLMQLAALAVLAMVTGGRGATAKAAGGSPAAVYLTAAARIAVAVLVFDAYRYAWHRLAHINRFIYRHLHSWHHRIVVPYAFGAIYGHPIEVLIADTAGASLAVLVTGLSPSSPRATAVFLTLCTVKAIDNHCGVCLLPRRLQSVWNGAAYHGVHHMPRGVRYNFSDLFFVTWDHVFGTHMPYAVEERPGGDGLVLKPLPPPKATN

SEQ ID NO: 65041 - DNA, 1152 bp, Triticum aestivum
  misc_feature (1)..(1152): Ceres Seq. ID no. 13598539
aacgccaatatttttggtggggcgcctgcttgctgccatccaaacagcccccaaatccgcgcgcctctcacatcccagaccgctgctgagcctggccgacatggccaccgcctcgatcgccgtccgctcggccttcggtgtcgccctggccgccttgatcgcggcgcgtgccgtccggcggcgctcgctggatgcctggggcggagctgccgggttcgccgtgatggcgctccaccttgcctgcggctataggtacggtgcgctgctgctggctttcttcttcacctcgtccaaggtgaccaagatcggcgaggaccgcaagcggcgcgttgaggaggatttcaaggagggtggccagcgcaactggatccaagttcttgcgaatagtgcaatagcaactgtattggttatcctattggcgataatgactgggggtcaggatcaatgcttggactcaaatggttcaaaggttataactggtataataggtgctattattggccattattgctgctgcaatggagacacttggtcatctgaaatcggtgtgcttagtgatgaacaaccaaggcttgtcactaccctgaaggtggtcagtaaacggggacctactgtcaccaagatttctggaatgactatcctggataatgatgctgttaatgcagtgtctgtgctgctaacatcggtgattacagcttatgcctgcattgtcttcttctagaagcaagggtttggttggctttttcacctgtccctaatgcgcagtgatgtgtaatgtgaatattccaaggacagaatgactgatgtttacttcaagcaagatgaacaatgaagtgttggaaatctttggctatttgctgggcacaattgacgagcctgatgacgtttgctccaggcagctagtttggtaatagtgcaagttgggaaattctaaattgttttaagcaagaaaaggccgtggtataatgcggaattgacaattatggtttttcgaaacctatctgtgtcgaagaaagtatctagttcgctgttttagaccacaatccaacaattatccccttgccaaattatagttaagttttgtctgaagtcaaattttgtgaactctgaccaattttatattatagagaaaaatatgaacatttacaatat

SEQ ID NO: 65042 - protein, 239 aa, Triticum aestivum
  peptide (1)..(239): Ceres Seq. ID no. 13598540
TPIFLVGRLLAAIQTAPKSARLSHPRPLLSLADMATASIAVRSAFGVALAALIAARAVRRRSLDAWGGAAGFAVMALHLACGYRYGALLLAFFFTSSKVTKIGEDRKRRVEEDFKEGGQRNWIQVLANSAIATVLVILLAIMTGGQDQCLDSNGSKVITGIIGAIIGHYCCCNGDTWSSEIGVLSDEQPRLVTTLKVVSKRGPTVTKISGMTILDNDAVNAVSVLLTSVITAYACIVFF

SEQ ID NO: 65043 - protein, 206 aa, Triticum aestivum
  peptide (1)..(206): Ceres Seq. ID no. 13598541
MATASIAVRSAFGVALAALIAARAVRRRSLDAWGGAAGFAVMALHLACGYRYGALLLAFFFTSSKVTKIGEDRKRRVEEDFKEGGQRNWIQVLANSAIATVLVILLAIMTGGQDQCLDSNGSKVITGIIGAIIGHYCCCNGDTWSSEIGVLSDEQPRLVTTLKVVSKRGPTVTKISGMTILDNDAVNAVSVLLTSVITAYACIVFF

SEQ ID NO: 65044 - protein, 165 aa, Triticum aestivum
  peptide (1)..(165): Ceres Seq. ID no. 13598542
MALHLACGYRYGALLLAFFFTSSKVTKIGEDRKRRVEEDFKEGGQRNWIQVLANSAIATVLVILLAIMTGGQDQCLDSNGSKVITGIIGAIIGHYCCCNGDTWSSEIGVLSDEQPRLVTTLKVVSKRGPTVTKISGMTILDNDAVNAVSVLLTSVITAYACIVFF

SEQ ID NO: 65045 - DNA, 1949 bp, Triticum aestivum
  misc_feature (1)..(1949): Ceres Seq. ID no. 13595871
acacatgcacatcagccattcacccccggcacaacaagaggccgcacaaaaccctcctctctgatcctccaaagcggcggcgcggtgggcatggatggtgccggtatggcgacactgccggaggccaacacgtcgcccgcgcccaacggcggcggctgcggcgggatcagggttgagaattgctacgtcttcaagagcaggctgcaggagtacgcgcagaaagccggcctcatgacgccagagtaccaaaccctcaaggaggggccttcccatgagccaatcttcaagtcctccgtcgtgataaacaacaccaagtatgattctttgcctgggttcttcagccggaaggctgcagagcagtcggctgccgaagtcgcgctcatggaaatcggcaagtctgtggtgttaccaaccaatgcaaccatccccgcagtccaagaaactggtctgtgcaagaatcttcttcaggagtatgctcagaagatgaattatgctattccatcttatatttgcaacaaacaaggtccatacatatgcaccgtagagattggtggaatacaatacattggtgctacagcacggacaaagaaagaggcagagataaaagctgcccgaactgctcttcttgcaatccaagttgcaggccaatcagagggttgtgcaaatggtaccacaaaatatattgttgtgcctggcaaaaggcaaggtaaggagatcgagaaaaagcctgttgaaactccaaaatcacttaagaccaagaaaggtggtttcaagaagcaacggaacaagaataaattcatcaagaagaatggccaagaagttaacgaggaaaaggatgagactggagtgcctggagatgctcatcattcagatgtccctatgaagccagctgtaacaacagaagatccagtgaccaacactgtaatgatccagcctgatgaagcttggccattcgaacatgaaccaaccggtgacactgcaatgctgcaacctattgaagacgcttggccatccaaacatgaaccgaccggtgagactgcaatgctgcaacctgatggcgaagctacaaaagtggaacaggagcaactcagtgacacagcaatgctgcaacctgatgatgaaggtggaagagtagaacatgagccactcagcaacgctccaatggtgctacgtaatgaggaagctagaaatgtaaagcaggaagcactcatcagcactgcaatgccacaacctcacatggaagatagaagagtgggagcagagccacctagagatgctgcaatggtgcaacctaatgatgaagctagatgcataaagcaggagctactaattgacgctgcaatgcctctccccaatgaggaggccggagcagctgcaaatcctgtgccattgagtgactccataacagcgcaacctaatgcagtgactacaaatataaatgaggagtcactgaggaatgcagcatcagtgcaacataatgaagaagctaggaccgtaaaccaggagccacccagcagtgcttcactacagcagccaaaggaacccagagtcgagaacggtgaatttgtttctgaaaacaaggaccaaactctgggagatgcatctcgtgaggcaaataggtccaacgaagatgtgccagaaaagtgctcagataattcatctgcttttacaagtgtggaatgatatgtgctgtttgaatcaaatgcaatggccttccagttttacatcttgattttgcaaactagtaaaacctgaatagctggtttctcattttagaaatataattgcataacagatggatgtacgtggaccgaccgaggtccggttggtggtccatgttggccattagttattaggaagcttgcatgcctgatggtatgatcttggatccatggatgatgtatctcaagttgcttatctgatcaatgaactattagtgaactattatt

SEQ ID NO: 65046 - protein, 560 aa, Triticum aestivum
  peptide (1)..(560): Ceres Seq. ID no. 15221678
THAHQPFTPGTTRGRTKPSSLILQSGGAVGMDGAGMATLPEANTSPAPNGGGCGGIRVENCYVFKSRLQEYAQKAGLMTPEYQTLKEGPSHEPIFKSSVVINNTKYDSLPGFFSRKAAEQSAAEVALMEIGKSVVLPTNATIPAVQETGLCKNLLQEYAQKMNYAIPSYICNKQGPYICTVEIGGIQYIGATARTKKEAEIKAARTALLAIQVAGQSEGCANGTTKYIVVPGKRQGKEIEKKPVETPKSLKTKKGGFKKQRNKNKFIKKNGQEVNEEKDETGVPGDAHHSDVPMKPAVTTEDPVTNTVMIQPDEAWPFEHEPTGDTAMLQPIEDAWPSKHEPTGETAMLQPDGEATKVEQEQLSDTAMLQPDDEGGRVEHEPLSNAPMVLRNEEARNVKQEALISTAMPQPHMEDRRVGAEPPRDAAMVQPNDEARCIKQELLIDAAMPLPNEEAGAAANPVPLSDSITAQPNAVTTNINEESLRNAASVQHNEEARTVNQEPPSSASLQQPKEPRVENGEFVSENKDQTLGDASREANRSNEDVPEKCSDNSSAFTSVE

SEQ ID NO: 65047 - protein, 530 aa, Triticum aestivum
  peptide (1)..(530): Ceres Seq. ID no. 15221679
MDGAGMATLPEANTSPAPNGGGCGGIRVENCYVFKSRLQEYAQKAGLMTPEYQTLKEGPSHEPIFKSSVVINNTKYDSLPGFFSRKAAEQSAAEVALMEIGKSVVLPTNATIPAVQETGLCKNLLQEYAQKMNYAIPSYICNKQGPYICTVEIGGIQYIGATARTKKEAEIKAARTALLAIQVAGQSEGCANGTTKYIVVPGKRQGKEIEKKPVETPKSLKTKKGGFKKQRNKNKFIKKNGQEVNEEKDETGVPGDAHHSDVPMKPAVTTEDPVTNTVMIQPDEAWPFEHEPTGDTAMLQPIEDAWPSKHEPTGETAMLQPDGEATKVEQEQLSDTAMLQPDDEGGRVEHEPLSNAPMVLRNEEARNVKQEALISTAMPQPHMEDRRVGAEPPRDAAMVQPNDEARCIKQELLIDAAMPLPNEEAGAAANPVPLSDSITAQPNAVTTNINEESLRNAASVQHNEEARTVNQEPPSSASLQQPKEPRVENGEFVSENKDQTLGDASREANRSNEDVPEKCSDNSSAFTSVE

SEQ ID NO: 65048 - protein, 525 aa, Triticum aestivum
  peptide (1)..(525): Ceres Seq. ID no. 15221680
MATLPEANTSPAPNGGGCGGIRVENCYVFKSRLQEYAQKAGLMTPEYQTLKEGPSHEPIFKSSVVINNTKYDSLPGFFSRKAAEQSAAEVALMEIGKSVVLPTNATIPAVQETGLCKNLLQEYAQKMNYAIPSYICNKQGPYICTVEIGGIQYIGATARTKKEAEIKAARTALLAIQVAGQSEGCANGTTKYIVVPGKRQGKEIEKKPVETPKSLKTKKGGFKKQRNKNKFIKKNGQEVNEEKDETGVPGDAHHSDVPMKPAVTTEDPVTNTVMIQPDEAWPFEHEPTGDTAMLQPIEDAWPSKHEPTGETAMLQPDGEATKVEQEQLSDTAMLQPDDEGGRVEHEPLSNAPMVLRNEEARNVKQEALISTAMPQPHMEDRRVGAEPPRDAAMVQPNDEARCIKQELLIDAAMPLPNEEAGAAANPVPLSDSITAQPNAVTTNINEESLRNAASVQHNEEARTVNQEPPSSASLQQPKEPRVENGEFVSENKDQTLGDASREANRSNEDVPEKCSDNSSAFTSVE

SEQ ID NO: 65049 - DNA, 1464 bp, Triticum aestivum
  misc_feature (1)..(1464): Ceres Seq. ID no. 13598653
atagtttccttcctcttctgacttatctcacatgctctgacctcagctccaatctgagaccctagtccctcgagccgtcgccgtgccgtagctgatagcatcaccgtccgacgccccccacccgctcccaaccctcccgcctctcacgcgcgccgcccccatcgccgtccccgccgtatccactccgtccgcagtcgacgggttttgaggtggacatgcattttgcaaatgtcaggctctaatcagatggcttcggatggtaaatttggaaaaggtcctcgggagctcactggggctgttgatttaattagccgctacaggctgctgaaccatcacagtttcttttgtaagaaaccattgccactggctatctcagatacacattatcttcagaatgttgtgggtgatactgaaatccgtaaaggagaagggatggagatagatcaactcattcagaatccagatctgagggagaagaagactgcttatattcagccttttgacatggaaacactaggacacgcatttcagttgcgagaaacagcgccagtagatctgccttcggctgaaaaaggcactccaactatatcgggaaaatcaaaggttaagtccagggacaaagtgaagaagcataaaaagcacaaggagaaagacaaggacaaggaacacaagaagcacaaacatcgccataaggatcggagtaaagataaagacaaagacaaagagaaagagaaagagaaagaaaaagagaaggagaaggagaaagacaaagacaaagacaaagaaaagaaaaaagagaagagcgtgcatcatgatttgggaggtgataattccaaaaaacatcatgagaagaagaggaaacatgatggaatggaaaatttggcggctgtacgtaaccacaaaaaaacacaaaagcgcaaaattcaatgaaatgggcagtggactttgtttggcgtaagatgtgacaaattcgtttccgtgttagttctcgtaatatgactccatgttttatgctgttaatgggcgactctgaaggttttcttgtcaataccacttccgatggagttactgatggaatttcctttatcaagatgatccggttacaagggacgcgcccaatcagatcatgatacaccgtaaatcaattctgggaaaacttgaacttgtcatttggagttatttgattttttttgtgtgtgtgtgtgttagttctgtgcccattagcaattcttgagtgttgccctcctatatgccctgtcctgtaactcagacagaagaaaagggtttactgtcaaagccgcatgatgtgaccgtgtacaacaggagacgtcacgtgtagaagagaaaaattagccgtacacattccatgatccagcaaattcaatggtggtgatgaaccttaaggaactcgagcagtatgttctgtgtaccaatcatgttttcttaatcaaacaatcccagttt

SEQ ID NO: 65050 - protein, 233 aa, Triticum aestivum
  peptide (1)..(233): Ceres Seq. ID no. 13598654
MSGSNQMASDGKFGKGPRELTGAVDLISRYRLLNHHSFFCKKPLPLAISDTHYLQNVVGDTEIRKGEGMEIDQLIQNPDLREKKTAYIQPFDMETLGHAFQLRETAPVDLPSAEKGTPTISGKSKVKSRDKVKKHKKHKEKDKDKEHKKHKHRHKDRSKDKDKDKEKEKEKEKEKEKEKDKDKDKEKKKEKSVHHDLGGDNSKKHHEKKRKHDGMENLAAVRNHKKTQKRKIQ

SEQ ID NO: 65051 - protein, 227 aa, Triticum aestivum
  peptide (1)..(227): Ceres Seq. ID no. 13598655
MASDGKFGKGPRELTGAVDLISRYRLLNHHSFFCKKPLPLAISDTHYLQNVVGDTEIRKGEGMEIDQLIQNPDLREKKTAYIQPFDMETLGHAFQLRETAPVDLPSAEKGTPTISGKSKVKSRDKVKKHKKHKEKDKDKEHKKHKHRHKDRSKDKDKDKEKEKEKEKEKEKEKDKDKDKEKKKEKSVHHDLGGDNSKKHHEKKRKHDGMENLAAVRNHKKTQKRKIQ

SEQ ID NO: 65052 - protein, 165 aa, Triticum aestivum
  peptide (1)..(165): Ceres Seq. ID no. 13598656
MEIDQLIQNPDLREKKTAYIQPFDMETLGHAFQLRETAPVDLPSAEKGTPTISGKSKVKSRDKVKKHKKHKEKDKDKEHKKHKHRHKDRSKDKDKDKEKEKEKEKEKEKEKDKDKDKEKKKEKSVHHDLGGDNSKKHHEKKRKHDGMENLAAVRNHKKTQKRKIQ

SEQ ID NO: 65053 - DNA, 1055 bp, Triticum aestivum
  misc_feature (1)..(1055): Ceres Seq. ID no. 15168860
aaaataccaatcgctcccacgaacaaaagccaccaatgggctccacaaagctcatcgcagcgactcttctccccgctttcctcgccctccatctacacgccccagcagcaatggccaccgcggcaggaagctccaactccaacctcttccgcgactacatcggcgccctctacaacggcgtcaggttcgccgacgtgccggtcgacccgcgcgcccgcttcgacttcatcctcgcgttcgtcatcgactacaccaccgcgacggagcccccgtccccgaccaacggccggttcaacgtcttctggcaggacacggtgctcacccctgacgcggtcgccgaggtcaagcggcggaaccccaaagtgcgcgtggccgtcagtctcggcggcgccacggtcaacggcaggcccgtgttcttcaacgtcacctccggcgtcgactcctgggtccgcaacgccgtcgactccctcaccggcatcatccggcggtacggcctggatggcatcgacatcgactacgagcagttccaggtggacccggccaccttcgccgagtgcgccggccgtctcgtggcggcgctcaagagcaacggcgtcatcagcttcgcgtccatcgcgccgtacggcaacgccgacgtgcaacgctactaccggacgctgtgggcggcgcacggggccgcaatagactacgtcaacttccagttctacgcctacggtgctagcaccaccgcggcgcagtacgtcagcctcttcgacgagcagatcgccaactaccctggagccaacatcctggccagcttcaccacggcggcgacgaacacctcggtgccggtcgacaccgcgcttagtgcttgccggactctgcaggggcagggtaagctctacggcatatttgtctgggctgcagaccattccaggaaccaaggattcaagtatgagacacagtcgcaggccctgttgactgatgccaccacgtactagttacccacagcttcttggtttgcgtatatctatcttttagtgaaatcatatggaataaaacgagcatccgatttt

SEQ ID NO: 65054 - protein, 325 aa, Triticum aestivum
  peptide (1)..(325): Ceres Seq. ID no. 15168861
NTNRSHEQKPPMGSTKLIAATLLPAFLALHLHAPAAMATAAGSSNSNLFRDYIGALYNGVRFADVPVDPRARFDFILAFVIDYTTATEPPSPTNGRFNVFWQDTVLTPDAVAEVKRRNPKVRVAVSLGGATVNGRPVFFNVTSGVDSWVRNAVDSLTGIIRRYGLDGIDIDYEQFQVDPATFAECAGRLVAALKSNGVISFASIAPYGNADVQRYYRTLWAAHGAAIDYVNFQFYAYGASTTAAQYVSLFDEQIANYPGANILASFTTAATNTSVPVDTALSACRTLQGQGKLYGIFVWAADHSRNQGFKYETQSQALLTDATTY

SEQ ID NO: 65055 - protein, 314 aa, Triticum aestivum
  peptide (1)..(314): Ceres Seq. ID no. 15168862
MGSTKLIAATLLPAFLALHLHAPAAMATAAGSSNSNLFRDYIGALYNGVRFADVPVDPRARFDFILAFVIDYTTATEPPSPTNGRFNVFWQDTVLTPDAVAEVKRRNPKVRVAVSLGGATVNGRPVFFNVTSGVDSWVRNAVDSLTGIIRRYGLDGIDIDYEQFQVDPATFAECAGRLVAALKSNGVISFASIAPYGNADVQRYYRTLWAAHGAAIDYVNFQFYAYGASTTAAQYVSLFDEQIANYPGANILASFTTAATNTSVPVDTALSACRTLQGQGKLYGIFVWAADHSRNQGFKYETQSQALLTDATTY

SEQ ID NO: 65056 - protein, 289 aa, Triticum aestivum
  peptide (1)..(289): Ceres Seq. ID no. 15168863
MATAAGSSNSNLFRDYIGALYNGVRFADVPVDPRARFDFILAFVIDYTTATEPPSPTNGRFNVFWQDTVLTPDAVAEVKRRNPKVRVAVSLGGATVNGRPVFFNVTSGVDSWVRNAVDSLTGIIRRYGLDGIDIDYEQFQVDPATFAECAGRLVAALKSNGVISFASIAPYGNADVQRYYRTLWAAHGAAIDYVNFQFYAYGASTTAAQYVSLFDEQIANYPGANILASFTTAATNTSVPVDTALSACRTLQGQGKLYGIFVWAADHSRNQGFKYETQSQALLTDATTY

SEQ ID NO: 65057 - DNA, 1266 bp, Triticum aestivum
  misc_feature (1)..(1266): Ceres Seq. ID no. 13503463
aaattcgtctgtgccgaaacccctctccaatctgagatctcctcacgagcgcgacccggagccgaaaccctagagtagagcaggggcggcggccatggccatcatctcggacatccaggaggaggaggcgccgccgcagcagccgcaagcggccccggccccggcggcggtcgacgtggacctggaggtcctcgaggcggtgctcgagcgcaagggcggcgcgctcccgttcctccacgcggccatcgacgtcgcgcaccggcgctccgacctcttccgcgacccctccgcggtcggcaagatcaccgcgatggcctcggcgtgcagggcgcaggtggaggcggaggagaggaaggccagggatgccaagaggaaggcggcggagctggagaaggcagcggcggccgagaaggagagggtggtcaaggccgcggccgagaaggagaagcgggagagctcggtggtgacggaggagcggggtgcagggagctcggcggagaaggatggcagcacggaggtggagaagaaggagagcaaggcgaacaaaccaaatgctggcaatggtcttgatatggagaagtattcctggactcagcagttaccagaggttaatgtcaatgttcctgttcctgaaggaacaaagtcaaggtttgttgtctgtgagatcaagaaggatcatctgaaggttgggttgaagggccagcctcctatcattgatggtgagcttcacaagccagttaaagtggatgactgcttctggagcatagaggatgggaaagcactgtctatactgctgacaaagcacaatcaaatggagtggtggaaatctgtgatcaaaggtgaccctgaagtcgacacccagaaggcggaaccagagactagcaagctttctgatctggatcctgagactaggcaaactgtggagaagatgatgtttgaccagcgccagaagcagatgggcctgccaacaagtgatgaaatgcagaagcaagacatgctcaagaagttcatgtctcagcacccggagatggacttctcaagggcgaagatagcttgagattggttggatccaaggggatgagaagtttttgatggataaatcgcatctatcctagttcttttcagtttcgggtgccttgtggttaagtgtctgattaaggtcgcgaaggacatggttttcgtgatgctttggaaatataagtgaactatgttttctgttgttggaactgatcgattgcctaattttctgtagtttgtgtttcgtcc

SEQ ID NO: 65058 - protein, 320 aa, Triticum aestivum
  peptide (1)..(320): Ceres Seq. ID no. 15223227
MAIISDIQEEEAPPQQPQAAPAPAAVDVDLEVLEAVLERKGGALPFLHAAIDVAHRRSDLFRDPSAVGKITAMASACRAQVEAEERKARDAKRKAAELEKAAAAEKERVVKAAAEKEKRESSVVTEERGAGSSAEKDGSTEVEKKESKANKPNAGNGLDMEKYSWTQQLPEVNVNVPVPEGTKSRFVVCEIKKDHLKVGLKGQPPIIDGELHKPVKVDDCFWSIEDGKALSILLTKHNQMEWWKSVIKGDPEVDTQKAEPETSKLSDLDPETRQTVEKMMFDQRQKQMGLPTSDEMQKQDMLKKFMSQHPEMDFSRAKIA

SEQ ID NO: 65059 - protein, 248 aa, Triticum aestivum
  peptide (1)..(248): Ceres Seq. ID no. 15223228
MASACRAQVEAEERKARDAKRKAAELEKAAAAEKERVVKAAAEKEKRESSVVTEERGAGSSAEKDGSTEVEKKESKANKPNAGNGLDMEKYSWTQQLPEVNVNVPVPEGTKSRFVVCEIKKDHLKVGLKGQPPIIDGELHKPVKVDDCFWSIEDGKALSILLTKHNQMEWWKSVIKGDPEVDTQKAEPETSKLSDLDPETRQTVEKMMFDQRQKQMGLPTSDEMQKQDMLKKFMSQHPEMDFSRAKIA

SEQ ID NO: 65060 - protein, 161 aa, Triticum aestivum
  peptide (1)..(161): Ceres Seq. ID no. 15223229
MEKYSWTQQLPEVNVNVPVPEGTKSRFVVCEIKKDHLKVGLKGQPPIIDGELHKPVKVDDCFWSIEDGKALSILLTKHNQMEWWKSVIKGDPEVDTQKAEPETSKLSDLDPETRQTVEKMMFDQRQKQMGLPTSDEMQKQDMLKKFMSQHPEMDFSRAKIA

SEQ ID NO: 65061 - DNA, 1675 bp, Triticum aestivum
  misc_feature (1)..(1675): Ceres Seq. ID no. 14302228
accacatattttcgtggacgccttgagtgcatggttaccagcgttaccagtacggcgccagaagcccataacgctcgtctttcttcgacgacatggccgtctcgcctcttgcactcgtgctcctcctcctcgccttcgccgtgtctctcttgtacatcctccgtaggcccgcccctctgcgcagcggcagcgatggaggacggaggcatcttccgccgtcaccgcgcggcctcccgctgctcggccacctacatctcctcggctcgttgccgcaccgggccctgcggtccctggccgccgcacacggcccggtcctgctgctccggctcggccgcgtgcccgccgtggtcgtgtcctcgccggccgccgcggaggaggtgatgagggcccgcgacctggccttcgcgagccggccccggagcgccatggccgaccggctcctctacgggcgcgacgtagcgttcgcgccctacggcgagtactggcgccaggcgcgccgcgtgtgcgtggtccacctcctcagcccgctccgcatcctctccttccgcggcgtccggggaggaggaggccgccgcgctggtcgagcgcgtccgcggagcggcggcgggcggcgccgctgtggacctgtgtgagctcctcgtcgctacgccaacacggtggtctcgcgcgccgcgttcggggacgacagcgcgcgcggcctgtatgaggaaggcaacaaggaacgcgagctgaggaaggtgttcaacgacttccaggagctgctcggcacggcgcctctgggggagctcctgccgtggctggggtggttggacgccgtgagggggatggaggggaagatcagacggacgttcaaggcgctcgacggtgtgctcgagaaggtgatcggcgaccaccgccgccggcgtcaagccggccagcagacgggagatgacggcggcgatcacagggatttcgtggacgtgttgttggacgtgagcgatactgatgacgaagctggcatgcgtctcagcacgaccgaaatcaaggccatcattttggacatgttcgcggcgggcacggacacgacgagcacggcaatggagtgggccatggcggaggtcatcacgcacccagacagcatgcgtaagctccaggacgagctcagggcggccgtcggtggctccgggcacgtcatcaccgaggaccacatcgacaagctgcactacctcaaggcggtggtcaaggagacgctacgcctgcacccaccgatcccgctcctcgtgccccgagagccacaagacgacgccgagatactcggccaccacgtcccggcgggcacgcgggtggtcatcaacgcgtgggccgtcggccgggacccggcggcgtgggagcgcgccgaggagttcgtaccggagaggtttctcgacggcgcggtggactacaaggggcaggacttccagctgataccgttcggtgctgggcggcgggggtgccccggggtcggattcgccgcggcgaccgttgagatggcgctggcgagtttgatgtaccatttcgactgggagccggccggggcgtcgctggacatgcgcgaggtgaacgggctcgccgtgcatctcaagtccggcctgccgcttgtcgctaaactgcggtttcgttagataaacttgttgctatgcaagaagaacaataatcc

SEQ ID NO: 65062 - protein, 271 aa, Triticum aestivum
  peptide (1)..(271): Ceres Seq. ID no. 14302229
MEGKIRRTFKALDGVLEKVIGDHRRRRQAGQQTGDDGGDHRDFVDVLLDVSDTDDEAGMRLSTTEIKAIILDMFAAGTDTTSTAMEWAMAEVITHPDSMRKLQDELRAAVGGSGHVITEDHIDKLHYLKAVVKETLRLHPPIPLLVPREPQDDAEILGHHVPAGTRVVINAWAVGRDPAAWERAEEFVPERFLDGAVDYKGQDFQLIPFGAGRRGCPGVGFAAATVEMALASLMYHFDWEPAGASLDMREVNGLAVHLKSGLPLVAKLRFR

SEQ ID NO: 65063 - protein, 213 aa, Triticum aestivum
  peptide (1)..(213): Ceres Seq. ID no. 14302230
MRLSTTEIKAIILDMFAAGTDTTSTAMEWAMAEVITHPDSMRKLQDELRAAVGGSGHVITEDHIDKLHYLKAVVKETLRLHPPIPLLVPREPQDDAEILGHHVPAGTRVVINAWAVGRDPAAWERAEEFVPERFLDGAVDYKGQDFQLIPFGAGRRGCPGVGFAAATVEMALASLMYHFDWEPAGASLDMREVNGLAVHLKSGLPLVAKLRFR

SEQ ID NO: 65064 - protein, 199 aa, Triticum aestivum
  peptide (1)..(199): Ceres Seq. ID no. 14302231
MFAAGTDTTSTAMEWAMAEVITHPDSMRKLQDELRAAVGGSGHVITEDHIDKLHYLKAVVKETLRLHPPIPLLVPREPQDDAEILGHHVPAGTRVVINAWAVGRDPAAWERAEEFVPERFLDGAVDYKGQDFQLIPFGAGRRGCPGVGFAAATVEMALASLMYHFDWEPAGASLDMREVNGLAVHLKSGLPLVAKLRFR

SEQ ID NO: 65065 - DNA, 1469 bp, Triticum aestivum
  misc_feature (1)..(1469): Ceres Seq. ID no. 13598543
aaaacccccgaaacccccaaacgcacggcaggccatggagctgtcgatgagcggcggcgcgctgcggaccttctcccgcttcgtcacctgcctcgcccgcatcggctccgacctcgtcttccaggcctaccccgacaagctggagctgcacacgctcaacagctcgcggtcggcgttcgcgtccgtctccctcacgcgcgacttcttcgaccacttccacctccccgccgccgccgcgccgtcgtccacgccgctccagtgcagcgtcctcctcaagtccgtcctcgctgtgctccgcacgcccacctccgcggtcgaccgcctcaacgcttctctcccaaacccccaagcgtccaagctcgagttcgtcatccactgcatcagcgggcgtaagaagacgcaccggatctcgtgcagcgccgagtccgacgtgcagactctggcgctcgaccgcaacggcttccccagccgcctcgccatacggccacgggatctcacgcgcctgctttccaatttccagtcctcgctgcaggagctcacctttattgccacccagcctgctgcacggttgcctggcgtcgatgatgccactggggggaaggcagtcgagctcctaagctacatcgacccgaccaaagatgactacgacagtaggctgcacacacaactgtggatcgatccagcagaggagttcttggagtatgagcatgctggtgatcccgtagatgtcacatttggggtgaaagaattgaaggcatttttaacattttgtgaaggatgtgaggttgatattctcctattctatcagaaggctggcgaacctgtcctgttggctccaagatttggaatcgatgatggttcaagttctaatttcgatgtaactctagttctagccactatgcttgtatcacaactaaatgatggcagtgtgcctcagcagccacctacgtcagcacatcatgcagaagaaccaagggctgccgctgctgcaccatcaccagttcccgaaaatgtctcaaaccatacaagaatatggtcagagctttcaggtgttactcccaaaagctttgaagctaacgcagaaaatcgtgcccagatggagagaaatggaagagctaacgtgctgaatgacacatcagtgcttcccaataccaatgctccctgcaagctaccagtgacagataacgcaaactatatagagcagcctgtgcaaatggatcacttggaagagcctcctgaagttgtggttgataaccctcgttcgcagcatcacccaagcaactgggtaggtgccgacgaagacgatgatgatgaagaagatgaggagctttttgtccaaacaacacctcactacatggactaaggaccgatgctgattctgaatattgcaggtgtacagatcatgtgagtgtttctactgggcatcacggagttcctggcaggggtagggtggcgagaacaattattgt

SEQ ID NO: 65066 - protein, 453 aa, Triticum aestivum
  peptide (1)..(453): Ceres Seq. ID no. 13598544
KPPKPPNARQAMELSMSGGALRTFSRFVTCLARIGSDLVFQAYPDKLELHTLNSSRSAFASVSLTRDFFDHFHLPAAAAPSSTPLQCSVLLKSVLAVLRTPTSAVDRLNASLPNPQASKLEFVIHCISGRKKTHRISCSAESDVQTLALDRNGFPSRLAIRPRDLTRLLSNFQSSLQELTFIATQPAARLPGVDDATGGKAVELLSYIDPTKDDYDSRLHTQLWIDPAEEFLEYEHAGDPVDVTFGVKELKAFLTFCEGCEVDILLFYQKAGEPVLLAPRFGIDDGSSSNFDVTLVLATMLVSQLNDGSVPQQPPTSAHHAEEPRAAAAAPSPVPENVSNHTRIWSELSGVTPKSFEANAENRAQMERNGRANVLNDTSVLPNTNAPCKLPVTDNANYIEQPVQMDHLEEPPEVVVDNPRSQHHPSNWVGADEDDDDEEDEELFVQTTPHYMD

SEQ ID NO: 65067 - protein, 442 aa, Triticum aestivum
  peptide (1)..(442): Ceres Seq. ID no. 13598545
MELSMSGGALRTFSRFVTCLARIGSDLVFQAYPDKLELHTLNSSRSAFASVSLTRDFFDHFHLPAAAAPSSTPLQCSVLLKSVLAVLRTPTSAVDRLNASLPNPQASKLEFVIHCISGRKKTHRISCSAESDVQTLALDRNGFPSRLAIRPRDLTRLLSNFQSSLQELTFIATQPAARLPGVDDATGGKAVELLSYIDPTKDDYDSRLHTQLWIDPAEEFLEYEHAGDPVDVTFGVKELKAFLTFCEGCEVDILLFYQKAGEPVLLAPRFGIDDGSSSNFDVTLVLATMLVSQLNDGSVPQQPPTSAHHAEEPRAAAAAPSPVPENVSNHTRIWSELSGVTPKSFEANAENRAQMERNGRANVLNDTSVLPNTNAPCKLPVTDNANYIEQPVQMDHLEEPPEVVVDNPRSQHHPSNWVGADEDDDDEEDEELFVQTTPHYMD

SEQ ID NO: 65068 - protein, 438 aa, Triticum aestivum
  peptide (1)..(438): Ceres Seq. ID no. 13598546
MSGGALRTFSRFVTCLARIGSDLVFQAYPDKLELHTLNSSRSAFASVSLTRDFFDHFHLPAAAAPSSTPLQCSVLLKSVLAVLRTPTSAVDRLNASLPNPQASKLEFVIHCISGRKKTHRISCSAESDVQTLALDRNGFPSRLAIRPRDLTRLLSNFQSSLQELTFIATQPAARLPGVDDATGGKAVELLSYIDPTKDDYDSRLHTQLWIDPAEEFLEYEHAGDPVDVTFGVKELKAFLTFCEGCEVDILLFYQKAGEPVLLAPRFGIDDGSSSNFDVTLVLATMLVSQLNDGSVPQQPPTSAHHAEEPRAAAAAPSPVPENVSNHTRIWSELSGVTPKSFEANAENRAQMERNGRANVLNDTSVLPNTNAPCKLPVTDNANYIEQPVQMDHLEEPPEVVVDNPRSQHHPSNWVGADEDDDDEEDEELFVQTTPHYMD

SEQ ID NO: 65069 - DNA, 1321 bp, Triticum aestivum
  misc_feature (1)..(1321): Ceres Seq. ID no. 13597462
aattggttgggcaaactctgtttcgacacagcctcgccatttcgtcgaacacgtggtagtgcgtcgcaccggcccttccgcaatggcctccttcctcgtcgcccgccgcctcctctgccctgcctccgcccggcgcctcctcccatgcacttccccgccaccttctgcccccgctgctctctgctggctgtccaccgacgcctcgccctcaccgcctcttcccgtcccccctctggagcccacagtcgaccctcccaagaaggatggagcctccttctccgccggttccggcgctggaggggcctaccggactggacagggagctgcatcggggggtcgccgatctggtggcgcggggtacgaggaggagcagcagaaggtcctccgcgcgtcgcttctccacgtgccgaggatgggatggagcgagtcggccatgatcgcgggtgcgagggacgtggccatgtcgccggccatcgttggtgccttcccaaggaaggaggctgcgctagttgagtttttcatggatgactgccttcaacaactcatggatcgcattgatgctggtgagggagagcttttgaaaaacttgatgctcactgagagactatctaggcttgttcggatgaggcttgagatgcagacaccttacatatcaaagtggcctcaagcgctgagcattcagtcccaaccagcaaatgtctcaacaagcttaaagcagagagcagtccttgttgatgagatttggcatgctgctggagatgctggatcagatattgattggtatgtgaaacgtactgtgcttggtggcatctactcagcctcagaggtgtacatgttaacagataattctccagagtttcacgacacatggacatttgtgaatcgccgcatcaaagatgctcttgatttgcagaaatcttataaggaggtcgcttatctaaccgaaaccctgggagcagggatcggtggctccatacagggcgtcctgaacaaggttttccagaaatgaaaaaacttgcctttgcaggctgccttctcggcatttccgccaccactttcttatgtcacgttaagattctatgacattgtatatagtactctcttttacaaacaaacgctgttagggtagccaagaagctatttagtcggtggtcagaggtcagaggtcagttgagttgttgattagtcgtcattgcgcaattctgctacaggttggcgaaaaatgtgtgaactctacagactctagtccatgtgtcatgtgcgagttgctgcaaacagaacaagacactcgtggctttgcatggacacgacttggcattcg

SEQ ID NO: 65070 - protein, 335 aa, Triticum aestivum
  peptide (1)..(335): Ceres Seq. ID no. 13597463
IGWANSVSTQPRHFVEHVVVRRTGPSAMASFLVARRLLCPASARRLLPCTSPPPSAPAALCWLSTDASPSPPLPVPPLEPTVDPPKKDGASFSAGSGAGGAYRTGQGAASGGRRSGGAGYEEEQQKVLRASLLHVPRMGWSESAMIAGARDVAMSPAIVGAFPRKEAALVEFFMDDCLQQLMDRIDAGEGELLKNLMLTERLSRLVRMRLEMQTPYISKWPQALSIQSQPANVSTSLKQRAVLVDEIWHAAGDAGSDIDWYVKRTVLGGIYSASEVYMLTDNSPEFHDTWTFVNRRIKDALDLQKSYKEVAYLTETLGAGIGGSIQGVLNKVFQK

SEQ ID NO: 65071 - protein, 308 aa, Triticum aestivum
  peptide (1)..(308): Ceres Seq. ID no. 13597464
MASFLVARRLLCPASARRLLPCTSPPPSAPAALCWLSTDASPSPPLPVPPLEPTVDPPKKDGASFSAGSGAGGAYRTGQGAASGGRRSGGAGYEEEQQKVLRASLLHVPRMGWSESAMIAGARDVAMSPAIVGAFPRKEAALVEFFMDDCLQQLMDRIDAGEGELLKNLMLTERLSRLVRMRLEMQTPYISKWPQALSIQSQPANVSTSLKQRAVLVDEIWHAAGDAGSDIDWYVKRTVLGGIYSASEVYMLTDNSPEFHDTWTFVNRRIKDALDLQKSYKEVAYLTETLGAGIGGSIQGVLNKVFQK

SEQ ID NO: 65072 - protein, 198 aa, Triticum aestivum
  peptide (1)..(198): Ceres Seq. ID no. 13597465
MGWSESAMIAGARDVAMSPAIVGAFPRKEAALVEFFMDDCLQQLMDRIDAGEGELLKNLMLTERLSRLVRMRLEMQTPYISKWPQALSIQSQPANVSTSLKQRAVLVDEIWHAAGDAGSDIDWYVKRTVLGGIYSASEVYMLTDNSPEFHDTWTFVNRRIKDALDLQKSYKEVAYLTETLGAGIGGSIQGVLNKVFQK

SEQ ID NO: 65073 - DNA, 1039 bp, Triticum aestivum
  misc_feature (1)..(1039): Ceres Seq. ID no. 13597679
acacacacacacacagagagagagagagagagagagagagagagagagagagagagagagatggcagccgctggagttagcagggagcagaggtggagcctcgccggcgcaaccgcgctggtcaccggaggcagcagaggaattggacatgcaattgtggaggagcttgtcgggctcggggcgcgggtgcacacgtgctccgagaacgcggtggagctggaggggtgccgtcggcggtgggaggagatgaagcttccggtcaccgtctccgtctgcgacgtctccgtgcgagccgagagggagaagctcatggagtcggcgaagcaaaccttcgacggcaagctcgacatactagtaaacaacgtgggacggaatgtggccaaggcgaccgtggagtgcacggcggaggagtactcgcatctcatgtcgactaacttagagtcggcgttccacctaagccagctcgcacacccctttctccgagacgcctccatcgccggaggaggcagcgtcgttaacatctcctcagttgcaagctcacttggctactccaccctcgcactgtactgcatatctaaaggaggagttaaccagcttacaaggagccttgctgccgagtgggctcaagataagatccgtgtcaactccgtcgctccgggtgggatcaataccgagctgcaaaacagtgtggatccaaaggtcatagaaaatacgttgttgagaactccgatgcatcggctcggtgagccagtggaggtggcgtcgatggtgtcgttcctttgcatgccagcagcttcgttcgtcaccggccaggttatgtacgtcgatggaggccgaaccattagtggctaatcaattattccaacctactttagtaaccattaagctcctctcccggttgatcggtgcgaacaaaattaggtttttggttgtgatatgtattctaaaaaggtggttgtgagttgtgagcggtaagaaagttattataaactttcagctatggaaaatttgaaagttgtttggttgagggacaaccgtg

SEQ ID NO: 65074 - protein, 283 aa, Triticum aestivum
  peptide (1)..(283): Ceres Seq. ID no. 13597680
THTHTEREREREREREREREMAAAGVSREQRWSLAGATALVTGGSRGIGHAIVEELVGLGARVHTCSENAVELEGCRRRWEEMKLPVTVSVCDVSVRAEREKLMESAKQTFDGKLDILVNNVGRNVAKATVECTAEEYSHLMSTNLESAFHLSQLAHPFLRDASIAGGGSVVNISSVASSLGYSTLALYCISKGGVNQLTRSLAAEWAQDKIRVNSVAPGGINTELQNSVDPKVIENTLLRTPMHRLGEPVEVASMVSFLCMPAASFVTGQVMYVDGGRTISG

SEQ ID NO: 65075 - protein, 263 aa, Triticum aestivum
  peptide (1)..(263): Ceres Seq. ID no. 13597681
MAAAGVSREQRWSLAGATALVTGGSRGIGHAIVEELVGLGARVHTCSENAVELEGCRRRWEEMKLPVTVSVCDVSVRAEREKLMESAKQTFDGKLDILVNNVGRNVAKATVECTAEEYSHLMSTNLESAFHLSQLAHPFLRDASIAGGGSVVNISSVASSLGYSTLALYCISKGGVNQLTRSLAAEWAQDKIRVNSVAPGGINTELQNSVDPKVIENTLLRTPMHRLGEPVEVASMVSFLCMPAASFVTGQVMYVDGGRTISG

SEQ ID NO: 65076 - protein, 201 aa, Triticum aestivum
  peptide (1)..(201): Ceres Seq. ID no. 13597682
MKLPVTVSVCDVSVRAEREKLMESAKQTFDGKLDILVNNVGRNVAKATVECTAEEYSHLMSTNLESAFHLSQLAHPFLRDASIAGGGSVVNISSVASSLGYSTLALYCISKGGVNQLTRSLAAEWAQDKIRVNSVAPGGINTELQNSVDPKVIENTLLRTPMHRLGEPVEVASMVSFLCMPAASFVTGQVMYVDGGRTISG

SEQ ID NO: 65077 - DNA, 1066 bp, Triticum aestivum
  misc_feature (1)..(1066): Ceres Seq. ID no. 13597466
agtctttttacagcttactcctaccttgtaaagaaaaggttgtcttcttcttcgccgcttccatccatccatcctcaggagtcaggggcctgagctaacctcttggagcttttactccccgagctgccctcccccgttccaagagcaaatcagacgccgaggggagcggccgcagagcgagtcaaccgggcatggcgatggcgagctcgacgaggaggcttgcgtttgtgctactcgtgctggccttttcggccgcgctcgcagagagcagagatgcatatatgaggagcgcaaatcgatatgcctgcatactgacccaggaaagcttccctcttgcaagcagaggggcaggattaacttcggcaaacggaaagctgtgtgtactatgtgagcagtactcaaccgaagctctggtctacctgcgacaaaacgaaacccagaccgagattctcagtgccctccaccacacgtgtgcaagtcttggtcctctaagacagcagtgcatcacgctggttgactactacattcccgctttcttcttggaggtttctgtggttaaacctgaagagctctgtgagtcagcgcacctctgcccaaagggggcggcgactcggtcgtccacgcgaggggaggcctgtggtctatgccatcatgttcttgttgaagttcttaccatgcttaaggatcccaacaccaagctggagatagtcgggcttcttttcaaaacatgcagcaaggcaaagaactatgaaccgcagtgcaagaggcttgtccttgactacatcccactgattctggtgaagacccagaacttccttgagacgacggatgtctgctttgcgacacatgcctgtaaaacaggcatgcaagcaaccattcctctatccgccgctttgtgaagaacaaatgtgtaggaatcatacgcggcaaagaagcctgtaaatgttcttcctatgtttagctcaagcactaccaagctatgaaacttcgggtcgtgtgatgctttgtctgtacaatttgagctctgccctctgaagtttatgcagcaagcctgcagctgtactac

SEQ ID NO: 65078 - protein, 235 aa, Triticum aestivum
  peptide (1)..(235): Ceres Seq. ID no. 15222102
MAMASSTRRLAFVLLVLAFSAALAESRDAYMRSANRYACILTQESFPLASRGAGLTSANGKLCVLCEQYSTEALVYLRQNETQTEILSALHHTCASLGPLRQQCITLVDYYIPAFFLEVSVVKPEELCESAHLCPKGAATRSSTRGEACGLCHHVLVEVLTMLKDPNTKLEIVGLLFKTCSKAKNYEPQCKRLVLDYIPLILVKTQNFLETTDVCFATHACKTGMQATIPLSAAL

SEQ ID NO: 65079 - protein, 233 aa, Triticum aestivum
  peptide (1)..(233): Ceres Seq. ID no. 15222103
MASSTRRLAFVLLVLAFSAALAESRDAYMRSANRYACILTQESFPLASRGAGLTSANGKLCVLCEQYSTEALVYLRQNETQTEILSALHHTCASLGPLRQQCITLVDYYIPAFFLEVSVVKPEELCESAHLCPKGAATRSSTRGEACGLCHHVLVEVLTMLKDPNTKLEIVGLLFKTCSKAKNYEPQCKRLVLDYIPLILVKTQNFLETTDVCFATHACKTGMQATIPLSAAL

SEQ ID NO: 65080 - protein, 205 aa, Triticum aestivum
  peptide (1)..(205): Ceres Seq. ID no. 15222104
MRSANRYACILTQESFPLASRGAGLTSANGKLCVLCEQYSTEALVYLRQNETQTEILSALHHTCASLGPLRQQCITLVDYYIPAFFLEVSVVKPEELCESAHLCPKGAATRSSTRGEACGLCHHVLVEVLTMLKDPNTKLEIVGLLFKTCSKAKNYEPQCKRLVLDYIPLILVKTQNFLETTDVCFATHACKTGMQATIPLSAAL

SEQ ID NO: 65081 - DNA, 1307 bp, Triticum aestivum
  misc_feature (1)..(1307): Ceres Seq. ID no. 13597467
acctagaacatcctaatcaaaaaaaaatttcaaacgcagccgtcgccagcgccccttgccccaaacctaccacgcccaacagcgccgcagccaatccccgaaacccgccgccgccgccgccatgggaaggctgggcgacaagtccgactatgagagcatccgcgaggcccgcatctcggagaacatggcccggatggagatgctcggcctgcgccgctgcgccggggagctgagcgccatctcctccgccccctccccccgcgccgggagcgtcaccccgaggaagaccccgaagccgccgcgggtcctcaccccgctccgccgctcgggccgcctgattgccgccgcgacgccgcccggctccggctctcgccgctccgcgcggctcaacggggactccgtgcagcacaaggcgctgccctacagaggagcggacgccgaggaagaggagcaggaggagaagtgtcccatgtacatcgacaaggagaggctgcgggtgctgcaggagacgcggtgcgacagcaaggcgagggggtccgtgtacgaccccgttctcgggatctgctgccatttctgcaggcagaagaaactctgcggcgaggagggctgcaagcgctgtggggaaggagactttgagcagcaatgcatagggaagacggagtgctcctcttgccattcctcctatgggatcctctgccgtgcttgccttaaagttaggtacggtgaagagatggaagaggtcaggaagaacaagaagtggatgtgccctcactgtgttgaggagaagggtaccaagaaattctggatatgcaacagctccatctgcttgaagaagaggaagatagcaccaaccgggatcgccatattccaagcgcgtgagcaaggatatgcgtcggtcgcacaccttctcatggaccagctgaagagccgcggatcattctgacaacgacgtacgcctgcctggagttccccgcttgctcacttcttcagtgattttagggatgattgatggttgctctggatcttttgtttcgttgacggtttagatggtagacagcttagagtctgttgctgaagaatgtggagctaccaaaaccttctcccagatgttcccagagtgaccttcgctgaagatcgaagcaaggattctgcgtctctcacatgtagcggatggatgagctttgagcttatccttgtatgttctctgttgtttgtaaaacgtcagttgtgtgcacttgtgctgtagaatctatgcttttggaatcattggtgcttcttcagtcaagaaaataaaagtgaatgtcgtc

SEQ ID NO: 65082 - protein, 273 aa, Triticum aestivum
  peptide (1)..(273): Ceres Seq. ID no. 13597468
MGRLGDKSDYESIREARISENMARMEMLGLRRCAGELSAISSAPSPRAGSVTPRKTPKPPRVLTPLRRSGRLIAAATPPGSGSRRSARLNGDSVQHKALPYRGADAEEEEQEEKCPMYIDKERLRVLQETRCDSKARGSVYDPVLGICCHFCRQKKLCGEEGCKRCGEGDFEQQCIGKTECSSCHSSYGILCRACLKVRYGEEMEEVRKNKKWMCPHCVEEKGTKKFWICNSSICLKKRKIAPTGIAIFQAREQGYASVAHLLMDQLKSRGSF

SEQ ID NO: 65083 - protein, 252 aa, Triticum aestivum
  peptide (1)..(252): Ceres Seq. ID no. 13597469
MARMEMLGLRRCAGELSAISSAPSPRAGSVTPRKTPKPPRVLTPLRRSGRLIAAATPPGSGSRRSARLNGDSVQHKALPYRGADAEEEEQEEKCPMYIDKERLRVLQETRCDSKARGSVYDPVLGICCHFCRQKKLCGEEGCKRCGEGDFEQQCIGKTECSSCHSSYGILCRACLKVRYGEEMEEVRKNKKWMCPHCVEEKGTKKFWICNSSICLKKRKIAPTGIAIFQAREQGYASVAHLLMDQLKSRGSF

SEQ ID NO: 65084 - protein, 249 aa, Triticum aestivum
  peptide (1)..(249): Ceres Seq. ID no. 13597470
MEMLGLRRCAGELSAISSAPSPRAGSVTPRKTPKPPRVLTPLRRSGRLIAAATPPGSGSRRSARLNGDSVQHKALPYRGADAEEEEQEEKCPMYIDKERLRVLQETRCDSKARGSVYDPVLGICCHFCRQKKLCGEEGCKRCGEGDFEQQCIGKTECSSCHSSYGILCRACLKVRYGEEMEEVRKNKKWMCPHCVEEKGTKKFWICNSSICLKKRKIAPTGIAIFQAREQGYASVAHLLMDQLKSRGSF

SEQ ID NO: 65085 - DNA, 1241 bp, Triticum aestivum
  misc_feature (1)..(1241): Ceres Seq. ID no. 13590699
gaccgcaaaacgaaagcaagccgccggccctagttcgtttcagtgcctccgcagtctccaccacacggacttgccaccatgacggcggctcctcttttatcgttgacggatgcggcgacggcgacggcgacggcggcgctggcccccggccgagcgcccgccagagcccgcattcaggccgccccccgccaccccgccaccgtctcgctgagatgccaccgcgctcggcccctaaccgcggccgccgccacgggcgactcgccgtcgtccgccgcgttccacggcgagtgcttcgtcgtcggggacaacatcgacaccgaccagatcatcccggccgagcacctgaccctggtgccgtccaagcccgacgagtaccgcaagctcggctccttcgccttcgtgggcctccccgccgcggcctacccgattccgttcgtggcccctggcgaggagtcgtcccgctacgccgtcatcatcggcggcgccaacttcgggtgcggctcctcccgcgagcacgcgcccgtcgcgctcggagccgccggcgcgcgcgccgttgtggccgagggctacgcccgcatcttcttccgcaattccgtggccaccggggaggtgtaccccctggagctcgcggacagtggtgccagcaaggagtgcaagacaggggatgtggtcacagtggacctcgataactcggtcttgattaaccacacatccggaaagcagtacaagctgaagcctattggtgatgcaggcccggttattgaggccggggggatcttcgcttatgctcggaagactgggatgatcgcgtccaaatctgcttgaacaaaaagtaagctttatctgctgtcagattggttgaggccttgcgggtggcaagtaagactggtttatgaataagagtcgctgcacctctcccttcggtggtgaggtgtgattgtccagcagttttgctactactttggcattggcttgcaccagtaattgtgcgcaaaaactcggtttgagagtgctgaactttgttgtattgaaatgttacacccatgtaatacagtagttttgtttgcacctgtcatctttgatgtcaagtgtactcatgcactagcttatgtttattgattgcagtggtggattgtatcagttacttctgatgttcctattcagtgacaaaaatcaaattcacctgcttttgtatttacgaaagcgattggcgaaacaataagttaatttcgtcttccctg

SEQ ID NO: 65086 - protein, 248 aa, Triticum aestivum
  peptide (1)..(248): Ceres Seq. ID no. 13590700
MTAAPLLSLTDAATATATAALAPGRAPARARIQAAPRHPATVSLRCHRARPLTAAAATGDSPSSAAFHGECFVVGDNIDTDQIIPAEHLTLVPSKPDEYRKLGSFAFVGLPAAAYPIPFVAPGEESSRYAVIIGGANFGCGSSREHAPVALGAAGARAVVAEGYARIFFRNSVATGEVYPLELADSGASKECKTGDVVTVDLDNSVLINHTSGKQYKLKPIGDAGPVIEAGGIFAYARKTGMIASKSA

SEQ ID NO: 65087 - protein, 228 aa, Triticum aestivum
  peptide (1)..(228): Ceres Seq. ID no. 13590701
PQNESKPPALVRFSASAVSTTRTCHHDGGSSFIVDGCGDGDGDGGAGPRPSARQSPHSGRPPPPRHRLAEMPPRSAPNRGRRHGRLAVVRRVPRRVLRRRGQHRHRPDHPGRAPDPGAVQARRVPQARLLRLRGPPRRGLPDSVRGPWRGVVPLRRHHRRRQLRVRLLPRARARRARSRRRARRCGRGLRPHLLPQFRGHRGGVPPGARGQWCQQGVQDRGCGHSGPR

SEQ ID NO: 65088 - protein, 158 aa, Triticum aestivum
  peptide (1)..(158): Ceres Seq. ID no. 13590702
MPPRSAPNRGRRHGRLAVVRRVPRRVLRRRGQHRHRPDHPGRAPDPGAVQARRVPQARLLRLRGPPRRGLPDSVRGPWRGVVPLRRHHRRRQLRVRLLPRARARRARSRRRARRCGRGLRPHLLPQFRGHRGGVPPGARGQWCQQGVQDRGCGHSGPR

SEQ ID NO: 65089 - DNA, 1580 bp, Triticum aestivum
  misc_feature (1)..(1580): Ceres Seq. ID no. 12617417
acatcagacatcaaacagcacgaagaagaatttcagccagctgtactgaaccagtagatcctcctaggccccactcactcaccgacccacccaccgatcgccatggcgcaggcggagagcgagcgcatgcgcgtggtcatgttcccgtggctggcgcacggccacatcaacccgtacctcgagctggccaagcgcctcgtcgccgccagccccgacgaccaccacctcgacgtcgtcgtgcacctcgtctccaccccggccaacctggcgcccctcgcgcaccaccagacggacagggtcaggctcgtcgagctccatctcccggcgctccccggcctcccgcccgcgctgcacaccaccaagggccttcccgcgcacctcatgccggccctcaagcgcgcctgcgacctcgccgcgccgcgcttcggagcgctcctcgacgagctcagcccggacattgtcgtctacgacttcctccagccgtgggcgccgctcgaggccgcggcgcgcggcgtgcctgccgtccacttcagcaccttcagcgccgtcgccaaggcattcgtcgtccactgcctcaagaatgaacggacccccagcgccttcccgttcgagaccatcagcctcggcgccgccgaggaggacgccaaatacgcggcgcagctcgtctcccgcgatgacggcacagccgagatccccgagcgcgaccgcctgccgctcagcctggagcgctcctccgggttcgtggccatcaagacgtgcgccgacatcgagcgcaagtacgtcgactacctgtcccagctcgtgggcaaggaggtcgtgcccaccggcccgttgctcgtggactccggtggctccgaggggaagcgcgacggcggccgcatcatgaggtggctcgacggcaaggagccgtgttccgtggtgctcgtctccttcggcagcgagtactacatgtcagaccggcagatggcgcagatggcgcgcgggctggagctcagcagggtgccctacctgtgggtggtgcggttcccgaacgcggaggacgacgcccgcggcgccgcgaggtccatgccgcgggggttcaagccggcgcgcgggctggtgctggaagggtgggcgccgcagtggcgcatcctgtcgcaccagtcctgcggcgcgttcctgacccactgcgggtggagctcggtgctggagtccatggcagcgggggtgccgatggtggcgctgccgctgcacatcgaccagccgctcaacgccaacctcgcggtggagctgggcgcggcggccacgcgcgtgaagcaggagcgcttcggggagttcaaggcggaggatgtggcgcgggcggtgcgctcggctgtcaacgggagagaacggatggcggcgaggcgccgtgcgagggagctgcgggagctggtggcgcggaacaacggcgacgaccggcagatcgcgacgctgctacagaggatggcgcggctatgcggcaagggccaggccgtgccaaattagtgggatttttttatgaacgtattttcaactgttgttttagtcgaataaataagacagtcgggcccagtggctgtcac

SEQ ID NO: 65090 - protein, 466 aa, Triticum aestivum
  peptide (1)..(466): Ceres Seq. ID no. 12617418
MAQAESERMRVVMFPWLAHGHINPYLELAKRLVAASPDDHHLDVVVHLVSTPANLAPLAHHQTDRVRLVELHLPALPGLPPALHTTKGLPAHLMPALKRACDLAAPRFGALLDELSPDIVVYDFLQPWAPLEAAARGVPAVHFSTFSAVAKAFVVHCLKNERTPSAFPFETISLGAAEEDAKYAAQLVSRDDGTAEIPERDRLPLSLERSSGFVAIKTCADIERKYVDYLSQLVGKEVVPTGPLLVDSGGSEGKRDGGRIMRWLDGKEPCSVVLVSFGSEYYMSDRQMAQMARGLELSRVPYLWVVRFPNAEDDARGAARSMPRGFKPARGLVLEGWAPQWRILSHQSCGAFLTHCGWSSVLESMAAGVPMVALPLHIDQPLNANLAVELGAAATRVKQERFGEFKAEDVARAVRSAVNGRERMAARRRARELRELVARNNGDDRQIATLLQRMARLCGKGQAVPN

SEQ ID NO: 65091 - protein, 458 aa, Triticum aestivum
  peptide (1)..(458): Ceres Seq. ID no. 12617419
MRVVMFPWLAHGHINPYLELAKRLVAASPDDHHLDVVVHLVSTPANLAPLAHHQTDRVRLVELHLPALPGLPPALHTTKGLPAHLMPALKRACDLAAPRFGALLDELSPDIVVYDFLQPWAPLEAAARGVPAVHFSTFSAVAKAFVVHCLKNERTPSAFPFETISLGAAEEDAKYAAQLVSRDDGTAEIPERDRLPLSLERSSGFVAIKTCADIERKYVDYLSQLVGKEVVPTGPLLVDSGGSEGKRDGGRIMRWLDGKEPCSVVLVSFGSEYYMSDRQMAQMARGLELSRVPYLWVVRFPNAEDDARGAARSMPRGFKPARGLVLEGWAPQWRILSHQSCGAFLTHCGWSSVLESMAAGVPMVALPLHIDQPLNANLAVELGAAATRVKQERFGEFKAEDVARAVRSAVNGRERMAARRRARELRELVARNNGDDRQIATLLQRMARLCGKGQAVPN

SEQ ID NO: 65092 - protein, 454 aa, Triticum aestivum
  peptide (1)..(454): Ceres Seq. ID no. 12617420
MFPWLAHGHINPYLELAKRLVAASPDDHHLDVVVHLVSTPANLAPLAHHQTDRVRLVELHLPALPGLPPALHTTKGLPAHLMPALKRACDLAAPRFGALLDELSPDIVVYDFLQPWAPLEAAARGVPAVHFSTFSAVAKAFVVHCLKNERTPSAFPFETISLGAAEEDAKYAAQLVSRDDGTAEIPERDRLPLSLERSSGFVAIKTCADIERKYVDYLSQLVGKEVVPTGPLLVDSGGSEGKRDGGRIMRWLDGKEPCSVVLVSFGSEYYMSDRQMAQMARGLELSRVPYLWVVRFPNAEDDARGAARSMPRGFKPARGLVLEGWAPQWRILSHQSCGAFLTHCGWSSVLESMAAGVPMVALPLHIDQPLNANLAVELGAAATRVKQERFGEFKAEDVARAVRSAVNGRERMAARRRARELRELVARNNGDDRQIATLLQRMARLCGKGQAVPN

SEQ ID NO: 65093 - DNA, 1166 bp, Triticum aestivum
  misc_feature (1)..(1166): Ceres Seq. ID no. 13598553
aagttttcaaccaagtgagcggtaggtgggcggcggctgcacgcggccgctctgttgttccttccttcctcatcctcttttccccgccttgtcgcccgtccacgccgtggagagaccgcagaccagagccgttcgcaccgccattgcagcttgcccaggcaggtgctcgtgcgctcctgctcgcccgcggcccctgcccctccccctccccagcgatggcgacggcgttctcaaccaagcagcccctgcgggtcgctacgcctgcaagcaaatggcgtccaaggttgccactggttaaagtgcaatattcgtccaacaaacaagctagtgcttccatttcattgacgtccagtgcggaggatgcggagagaaacgagcccatagtcaaaatgtgcggcatcacatctgccagagatgcagaattcgccgcaaaggctggagctaaacttatcgggatgattctttggcctaagtccaaacgatctgtccaactgtcagaagcgaaggaaatatccagagtagcaaagtcatatggggctgaagctgttggtgtgtttgtcgatgatgatgaagagaccatcttaagagtgtctgattcatgcgaccttgaacttatccagcttcatggagatagttctcgagcactagttcctgctcttgccaagaacaaccggattgtatatgttcttaatgctgacgcggatggaaaacttatcaattctcctcctagtgaagaatatgacgttgactggtttttggtggacagtgcagagggtggaagtggcaaaggattcaactgggagaatttccgaatgccatcggtgaaaagcaagaacggctggctgttagcaggaggacttcatgcagacaatgtttgtcaagccgctaccgctctaaaaccaaatggtgtggatgttagcagcggaatatgctctcctgacggtataagcaaggacccgaagagaatatcatccttcatgagaagcgtacagtccttaagttcccgatgaggtctctatttagactccccaggcttattatagcttcttgcttcagtttgtgaagacatttgcaaataagctgtcctgaatgatagcagtaaataaacaactttgaagctgagttccaactatgcttgtctaatggtagcattagaccagtttctg

SEQ ID NO: 65094 - protein, 335 aa, Triticum aestivum
  peptide (1)..(335): Ceres Seq. ID no. 13598554
VFNQVSGRWAAAARGRSVVPSFLILFSPPCRPSTPWRDRRPEPFAPPLQLAQAGARALLLARGPCPSPSPAMATAFSTKQPLRVATPASKWRPRLPLVKVQYSSNKQASASISLTSSAEDAERNEPIVKMCGITSARDAEFAAKAGAKLIGMILWPKSKRSVQLSEAKEISRVAKSYGAEAVGVFVDDDEETILRVSDSCDLELIQLHGDSSRALVPALAKNNRIVYVLNADADGKLINSPPSEEYDVDWFLVDSAEGGSGKGFNWENFRMPSVKSKNGWLLAGGLHADNVCQAATALKPNGVDVSSGICSPDGISKDPKRISSFMRSVQSLSSR

SEQ ID NO: 65095 - protein, 264 aa, Triticum aestivum
  peptide (1)..(264): Ceres Seq. ID no. 13598555
MATAFSTKQPLRVATPASKWRPRLPLVKVQYSSNKQASASISLTSSAEDAERNEPIVKMCGITSARDAEFAAKAGAKLIGMILWPKSKRSVQLSEAKEISRVAKSYGAEAVGVFVDDDEETILRVSDSCDLELIQLHGDSSRALVPALAKNNRIVYVLNADADGKLINSPPSEEYDVDWFLVDSAEGGSGKGFNWENFRMPSVKSKNGWLLAGGLHADNVCQAATALKPNGVDVSSGICSPDGISKDPKRISSFMRSVQSLSSR

SEQ ID NO: 65096 - protein, 206 aa, Triticum aestivum
  peptide (1)..(206): Ceres Seq. ID no. 13598556
MCGITSARDAEFAAKAGAKLIGMILWPKSKRSVQLSEAKEISRVAKSYGAEAVGVFVDDDEETILRVSDSCDLELIQLHGDSSRALVPALAKNNRIVYVLNADADGKLINSPPSEEYDVDWFLVDSAEGGSGKGFNWENFRMPSVKSKNGWLLAGGLHADNVCQAATALKPNGVDVSSGICSPDGISKDPKRISSFMRSVQSLSSR

SEQ ID NO: 65097 - DNA, 1610 bp, Triticum aestivum
  misc_feature (1)..(1610): Ceres Seq. ID no. 13502943
atttcgcttctcgacttccccaatcggccaccccccacctccgccttccttcctggccagcgcggcggcttatggcctccatgaccacacctcggctccccttcctccccgcccgaacccgctccgccgtcgccgccacctcctcttcgtccccctcctccccgctaccacgccgctccatcaaatgcagcagctccaccaacgctaactcggcccccctcccttccacatcgcggcagccccgggcgcccgtggcggacggcgtagggtccgccgacctcaacggcctccgggccccgcctatacctgtcgcggactcccctctacccgcgtaccgcgatccgcacgggctgcctcggcctctcactagtgcggatctgatggagtcgagcggggaggggctcaaggttgcctaccagggcttccctggagcgtacagcgaggctgcagcaaagaaggcctatccaaattgccagacagtgccctgtgagcactttgatactgcatttcaggctgttcaaaactggatagttgatagggcggtactgccacttgagaatactctgggtggtagtatacatcggaactatgaccttttacttcggcatgagctgcacatagttggagaggttcgccttgcagttcggcattgcttggtagccaatcgtggagtgaagatcggaaacctaagaaatgtcatcagtcatccccaggctcttgcgcaatgtgagcatacgctgacagagttaggaattgaacatagacaggctgttgatgacactgctggtgcagcaaagttagtcgcagaacaaatgctccaagatactggtgctgttgccagttcattagctgctgaactttatggactcgatattcttgctgaaaatattcaggacgaaaaagtcaatgtcacccgttttatgatgcttgcttgggaacctattatacctcgggttgataaaccattcaagactagtattgtgttttcacttgaagaaggacctggacagctcttcaaggcacttgcagtttttgcactgagggaaatcaacctcaccaagatagaaagccgtccacacaagaaaaggccttttcgtgtagctgatgatgctttctccacgcgagtcaagtacttcgactacctgttttatgtcgaccttgaggcgtctatggctgatccaaaaactcagaatgctctcagaaatttggaggagtttgcaacttttttaagagtcctggggagctatcctacagacgtgagcgaagcttgaatagcaagtgcttgctgcagatcacatgttagtgattaatcaattgtgtgcctttctcttaatcggataaacatccgcctttgatagctgctgtttggtgtaatgaaataaacatagttctccattatagagtcagaaacatgtagctctcagagcatatttcctagtacttggattgggacttgagcagtcttattactcataaaatgtacgtgggtagtccncagcagaatagtggatatactcccggggattgttcaggttgagtacaatgtagaatcagaatactgaactatgcgttgtgggggtcaacaaagtggatataaagtgattgggggg

SEQ ID NO: 65098 - protein, 422 aa, Triticum aestivum
  peptide (1)..(422): Ceres Seq. ID no. 13502944
FASRLPQSATPHLRLPSWPARRLMASMTTPRLPFLPARTRSAVAATSSSSPSSPLPRRSIKCSSSTNANSAPLPSTSRQPRAPVADGVGSADLNGLRAPPIPVADSPLPAYRDPHGLPRPLTSADLMESSGEGLKVAYQGFPGAYSEAAAKKAYPNCQTVPCEHFDTAFQAVQNWIVDRAVLPLENTLGGSIHRNYDLLLRHELHIVGEVRLAVRHCLVANRGVKIGNLRNVISHPQALAQCEHTLTELGIEHRQAVDDTAGAAKLVAEQMLQDTGAVASSLAAELYGLDILAENIQDEKVNVTRFMMLAWEPIIPRVDKPFKTSIVFSLEEGPGQLFKALAVFALREINLTKIESRPHKKRPFRVADDAFSTRVKYFDYLFYVDLEASMADPKTQNALRNLEEFATFLRVLGSYPTDVSEA

SEQ ID NO: 65099 - protein, 399 aa, Triticum aestivum
  peptide (1)..(399): Ceres Seq. ID no. 13502945
MASMTTPRLPFLPARTRSAVAATSSSSPSSPLPRRSIKCSSSTNANSAPLPSTSRQPRAPVADGVGSADLNGLRAPPIPVADSPLPAYRDPHGLPRPLTSADLMESSGEGLKVAYQGFPGAYSEAAAKKAYPNCQTVPCEHFDTAFQAVQNWIVDRAVLPLENTLGGSIHRNYDLLLRHELHIVGEVRLAVRHCLVANRGVKIGNLRNVISHPQALAQCEHTLTELGIEHRQAVDDTAGAAKLVAEQMLQDTGAVASSLAAELYGLDILAENIQDEKVNVTRFMMLAWEPIIPRVDKPFKTSIVFSLEEGPGQLFKALAVFALREINLTKIESRPHKKRPFRVADDAFSTRVKYFDYLFYVDLEASMADPKTQNALRNLEEFATFLRVLGSYPTDVSEA

SEQ ID NO: 65100 - protein, 396 aa, Triticum aestivum
  peptide (1)..(396): Ceres Seq. ID no. 13502946
MTTPRLPFLPARTRSAVAATSSSSPSSPLPRRSIKCSSSTNANSAPLPSTSRQPRAPVADGVGSADLNGLRAPPIPVADSPLPAYRDPHGLPRPLTSADLMESSGEGLKVAYQGFPGAYSEAAAKKAYPNCQTVPCEHFDTAFQAVQNWIVDRAVLPLENTLGGSIHRNYDLLLRHELHIVGEVRLAVRHCLVANRGVKIGNLRNVISHPQALAQCEHTLTELGIEHRQAVDDTAGAAKLVAEQMLQDTGAVASSLAAELYGLDILAENIQDEKVNVTRFMMLAWEPIIPRVDKPFKTSIVFSLEEGPGQLFKALAVFALREINLTKIESRPHKKRPFRVADDAFSTRVKYFDYLFYVDLEASMADPKTQNALRNLEEFATFLRVLGSYPTDVSEA

SEQ ID NO: 65101 - DNA, 1293 bp, Triticum aestivum
  misc_feature (1)..(1293): Ceres Seq. ID no. 13597471
aaaaccggagacagcacaggcagctccccccataattgcctgtgccactggtggttggactggaagccgcctccctctcccccctgtcctccccttgcccgtcctcgacctcgccgccggccagcgatggagcggcgatccaccacccgcttctcgccttccgagattgcaaggatggagaagttggtttcatcagacagaaaagagcaagtcttggttgatagtttctgccagaagcttgtagaagaatttaatcgttctccagctcgagtcggaagcagagctctacaggctacacaggttcgaggatggttccttgataagctccctgcatcaactcctaaacctgcttccttgcctactacttctgaagaaaagcctttagcctcagaaccagatgcgttaatttctgagataaagacttcagcttctgatgaagaaaaagttttagctcttgatacaagtatttcaaacaatgaggatgcactttctgcggatttacccaaagagactacagataaggttcctgaatttgaagacttgcagtttgaggctaagtcatcaaaggattctgcatggtacgacgtcgccctcttcttggcacacaggaagacaagtttgggagaagttgaagtccgggtgaggtttatcggatatggggctgaagaagatgagtgggtgaatgtcaggaaggctgtccgccagcaatccattccgctggagtcctcagaatgccgaagcattgtcaaaggagatcttgtcctgtgtttcaaggagagcaatgatgaagcactgcatttcgatgcgcacgttgtggatgtccagcggaaacagcatgatataaggggatgcagatgcctcttccatgttgaatatgatcatgatcaaagccaggagatggtgaacctcaagagaatctccaggcggccaagatacctttgatggcttctgctaacatggatctgcttcctgctgctatccgagcttgtgtcgtactaacgggagccctcgaatcttggttgagaccgctgcactctgattgtttgttcttattgatgtactgtgtctagtagtaaaacacccgggagagtagttaagccccctctttggcacatagctgctgtaacggctatgagtaggctccgtgatagccaatttttgcacacacacgagaaagttggtgccaaagcgggcggagagccggattttaactggtgtgttggcagcagattaccatgtcactatgtcagtgtttgccgttctgaacctcttggggcgatttgcctctgcttc

SEQ ID NO: 65102 - protein, 313 aa, Triticum aestivum
  peptide (1)..(313): Ceres Seq. ID no. 13597472
KTGDSTGSSPHNCLCHWWLDWKPPPSPPCPPLARPRPRRRPAMERRSTTRFSPSEIARMEKLVSSDRKEQVLVDSFCQKLVEEFNRSPARVGSRALQATQVRGWFLDKLPASTPKPASLPTTSEEKPLASEPDALISEIKTSASDEEKVLALDTSISNNEDALSADLPKETTDKVPEFEDLQFEAKSSKDSAWYDVALFLAHRKTSLGEVEVRVRFIGYGAEEDEWVNVRKAVRQQSIPLESSECRSIVKGDLVLCFKESNDEALHFDAHVVDVQRKQHDIRGCRCLFHVEYDHDQSQEMVNLKRISRRPRYL

SEQ ID NO: 65103 - protein, 271 aa, Triticum aestivum
  peptide (1)..(271): Ceres Seq. ID no. 13597473
MERRSTTRFSPSEIARMEKLVSSDRKEQVLVDSFCQKLVEEFNRSPARVGSRALQATQVRGWFLDKLPASTPKPASLPTTSEEKPLASEPDALISEIKTSASDEEKVLALDTSISNNEDALSADLPKETTDKVPEFEDLQFEAKSSKDSAWYDVALFLAHRKTSLGEVEVRVRFIGYGAEEDEWVNVRKAVRQQSIPLESSECRSIVKGDLVLCFKESNDEALHFDAHVVDVQRKQHDIRGCRCLFHVEYDHDQSQEMVNLKRISRRPRYL

SEQ ID NO: 65104 - protein, 255 aa, Triticum aestivum
  peptide (1)..(255): Ceres Seq. ID no. 13597474
MEKLVSSDRKEQVLVDSFCQKLVEEFNRSPARVGSRALQATQVRGWFLDKLPASTPKPASLPTTSEEKPLASEPDALISEIKTSASDEEKVLALDTSISNNEDALSADLPKETTDKVPEFEDLQFEAKSSKDSAWYDVALFLAHRKTSLGEVEVRVRFIGYGAEEDEWVNVRKAVRQQSIPLESSECRSIVKGDLVLCFKESNDEALHFDAHVVDVQRKQHDIRGCRCLFHVEYDHDQSQEMVNLKRISRRPRYL

SEQ ID NO: 65105 - DNA, 1228 bp, Triticum aestivum
  misc_feature (1)..(1228): Ceres Seq. ID no. 13597475
actcgtcattgctgattacggagggagtagttgactacctccccacgattatcagcagccggcgccgccgttgctgttatcctgccgccgccgccgccgccgccgcctggttcggagaaatgggcaaaagagccatccgatacgccgtggtggatgccttcgcggctgagcccttcaagggcaaccccgccgcagtatgcctcctcgaagaggagggcgcctccgcggccatggacgaccggtggatgcagtccgtcgccgccgagttcaacctctcggagaccgccttcctcgcccgggactcctccgggggagccggcgcagccccgcggttccacctccgatggttcactcccgtcacggaggttgacctctgcgggcacgcgacgttggcctctgcgcacttcctcttcacgactgttcttccggagcatggcaagctggagttcatgaccaggtccgggatcctaactgccaagaaagtccctgcaccagggagcactggcgtcccaggtgaggagcaggggaagctgtttattgagctggatttccccatgattggttttctggactgcaaccaaatgccgtcgattccagagaccctaaacggtgcgcccattgtcagcgttcacaaatcggctaccgacggcgacctcattgtggaactttcttcaggaaaagaagttgttaatatccttcctagcatcgatgaaattaaaaacttggcctgcaggggtcttattgttacaggaccggcgccggctggatctggttatgacttctttacacgtttcttctgcccaaaatttgggatagatgaggaccctgttacgggcagtatacattgtgttttggcaccctattggggcagaaagctggggaagcaaaaattgacggcatttcaagcgtctccaaggggtggaacactatacctgcaactggatgacgcaaatcagagagtgcaaatccagggagaagctcttactgtgatggatgggacgctcctagcctagccagccattggcaatttggcatccatctactcgtatatgctttgaagggactaccattcatccatctactcgtatatttacggagttataatatgactttggatgtttgtgattatatttgctgttatatgcttgttgaacagttaactgtttatggatataaaaaatgccccctccattccctaaaaaaaaaaaaaaaaaagcttatcgatacc

SEQ ID NO: 65106 - protein, 336 aa, Triticum aestivum
  peptide (1)..(336): Ceres Seq. ID no. 15222105
SSLLITEGVVDYLPTIISSRRRRCCYPAAAAAAAAWFGEMGKRAIRYAVVDAFAAEPFKGNPAAVCLLEEEGASAAMDDRWMQSVAAEFNLSETAFLARDSSGGAGAAPRFHLRWFTPVTEVDLCGHATLASAHFLFTTVLPEHGKLEFMTRSGILTAKKVPAPGSTGVPGEEQGKLFIELDFPMIGFLDCNQMPSIPETLNGAPIVSVHKSATDGDLIVELSSGKEVVNILPSIDEIKNLACRGLIVTGPAPAGSGYDFFTRFFCPKFGIDEDPVTGSIHCVLAPYWGRKLGKQKLTAFQASPRGGTLYLQLDDANQRVQIQGEALTVMDGTLLA

SEQ ID NO: 65107 - protein, 297 aa, Triticum aestivum
  peptide (1)..(297): Ceres Seq. ID no. 15222106
MGKRAIRYAVVDAFAAEPFKGNPAAVCLLEEEGASAAMDDRWMQSVAAEFNLSETAFLARDSSGGAGAAPRFHLRWFTPVTEVDLCGHATLASAHFLFTTVLPEHGKLEFMTRSGILTAKKVPAPGSTGVPGEEQGKLFIELDFPMIGFLDCNQMPSIPETLNGAPIVSVHKSATDGDLIVELSSGKEVVNILPSIDEIKNLACRGLIVTGPAPAGSGYDFFTRFFCPKFGIDEDPVTGSIHCVLAPYWGRKLGKQKLTAFQASPRGGTLYLQLDDANQRVQIQGEALTVMDGTLLA

SEQ ID NO: 65108 - protein, 260 aa, Triticum aestivum
  peptide (1)..(260): Ceres Seq. ID no. 15222107
MDDRWMQSVAAEFNLSETAFLARDSSGGAGAAPRFHLRWFTPVTEVDLCGHATLASAHFLFTTVLPEHGKLEFMTRSGILTAKKVPAPGSTGVPGEEQGKLFIELDFPMIGFLDCNQMPSIPETLNGAPIVSVHKSATDGDLIVELSSGKEVVNILPSIDEIKNLACRGLIVTGPAPAGSGYDFFTRFFCPKFGIDEDPVTGSIHCVLAPYWGRKLGKQKLTAFQASPRGGTLYLQLDDANQRVQIQGEALTVMDGTLLA

SEQ ID NO: 65109 - DNA, 1440 bp, Triticum aestivum
  misc_feature (1)..(1440): Ceres Seq. ID no. 13502858
ccgaaacagatccacctcctcagcgtcgcgtggtgggaagacgagaacctcccaaaggccaaagcccataacccctaacctagggtttcgccgccatgggatccgccgcctccgccgcctccgacgcagcgccgccaccgccttctccagcgcaaccacacggggccgcgccgccgtatggggttgggctcgccggcatcctccctcagaagccggatggggatgataagaaggaggagaaggtggactacctcaacctcccttgccccgtgccgtacgaggagatccagcgcgaggccctcatgtctctgaagcctgaactttttgaaggtttgaggtttgacttcacaaagatgttaacccagaagttcgctcttagccatagtgtccttatgggctccctggaagttccgtctcagtcagctgatgttataaaagtcccaacatcacagtatgaatttggtgccaattttttagatccaaagttaatgcttatcggaaggttgatgactgatggaaggctgaatgctcgtgtgaaatgtgatctgacagagaatctcgcgctgaaaataaatgcacagcttactagtgagcctcattactctcaagggatgttcaactttgactacaagggcacagactatcgagcacagtttcaaattggaaacaatgcgttctatggggcaaattatatccagagtgttacgccaaatttgtcgatgggaacagagatattctggcttggtcagcaaaggaagtcaggaattggatttaattctcgctacaatacagataagatggtgggtactctacaggttgctagcactggtattgttgcgttaagttatgtccagaaagtttctgaaaaggtatctcttgctactgactttatgtataaccacatgtccagagatgtgacttccagcgttggttacgattatatccttaggcagtgccgtctaaggggcaaagttgactcaaatggtgtcgttgctgcatacttggaggagagattgaacatgggtgtcaactttcttctgtctgcagagattgaccatccaaagaagaactacaagtttggttttggaatgactgtaggagagtagatatgctcacagcaattactgtgagaggactacagatgtctcctcagttcgttataagtgcaggtttaccatatggtctcggttcaagtgttcgggacctacagattcgctcctcaagcgttgcaggctttttcggtgtacttgcggttgtctcatttcagctgctttagatagcatgggcatttgggcgtccatgattctttgtttatctaaaacaagctgaaacgttgttgtaataatgttcacttggttgttggagatttttgacccttaggttcccagcaataggcttctgtgaaatgaccgtactccacaagctacagattatacattg

SEQ ID NO: 65110 - protein, 336 aa, Triticum aestivum
  peptide (1)..(336): Ceres Seq. ID no. 13502859
MGSAASAASDAAPPPPSPAQPHGAAPPYGVGLAGILPQKPDGDDKKEEKVDYLNLPCPVPYEEIQREALMSLKPELFEGLRFDFTKMLTQKFALSHSVLMGSLEVPSQSADVIKVPTSQYEFGANFLDPKLMLIGRLMTDGRLNARVKCDLTENLALKINAQLTSEPHYSQGMFNFDYKGTDYRAQFQIGNNAFYGANYIQSVTPNLSMGTEIFWLGQQRKSGIGFNSRYNTDKMVGTLQVASTGIVALSYVQKVSEKVSLATDFMYNHMSRDVTSSVGYDYILRQCRLRGKVDSNGVVAAYLEERLNMGVNFLLSAEIDHPKKNYKFGFGMTVGE

SEQ ID NO: 65111 - protein, 267 aa, Triticum aestivum
  peptide (1)..(267): Ceres Seq. ID no. 13502860
MSLKPELFEGLRFDFTKMLTQKFALSHSVLMGSLEVPSQSADVIKVPTSQYEFGANFLDPKLMLIGRLMTDGRLNARVKCDLTENLALKINAQLTSEPHYSQGMFNFDYKGTDYRAQFQIGNNAFYGANYIQSVTPNLSMGTEIFWLGQQRKSGIGFNSRYNTDKMVGTLQVASTGIVALSYVQKVSEKVSLATDFMYNHMSRDVTSSVGYDYILRQCRLRGKVDSNGVVAAYLEERLNMGVNFLLSAEIDHPKKNYKFGFGMTVGE

SEQ ID NO: 65112 - protein, 250 aa, Triticum aestivum
  peptide (1)..(250): Ceres Seq. ID no. 13502861
MLTQKFALSHSVLMGSLEVPSQSADVIKVPTSQYEFGANFLDPKLMLIGRLMTDGRLNARVKCDLTENLALKINAQLTSEPHYSQGMFNFDYKGTDYRAQFQIGNNAFYGANYIQSVTPNLSMGTEIFWLGQQRKSGIGFNSRYNTDKMVGTLQVASTGIVALSYVQKVSEKVSLATDFMYNHMSRDVTSSVGYDYILRQCRLRGKVDSNGVVAAYLEERLNMGVNFLLSAEIDHPKKNYKFGFGMTVGE

SEQ ID NO: 65113 - DNA, 1490 bp, Triticum aestivum
  misc_feature (1)..(1490): Ceres Seq. ID no. 13584608
attaagctcgctcctcgttgtgcttctccactcgcacggcgaagaacagggcacctctgaccgaacatagcagcatagcatctccccacgctctcacgcatcaccacagctacagcatcaagatcactagtagtagatcaactagccaggtatagctatggcgtccgagcagagtcgccgcgaggagcgcgcgcaggccgcggcgcagaaggcgaccgacgagctcgccgcggccaggcgggacatgcgcgagcccagcagcccaggacggcggaccggcatcttcggcaccgtgcaggagagcgcgcgctccctgatgggcgccgtccgcgacaccttctccggcggcgtccgggacacaaccacggcacacgacagccactccacaggcgccatggggaccgcgggggggaaactcaatgagtacgggagctacgcatcccagaaggccgatgaagggaaggagagcgcgagtgagatggcggaagccgccgcggggaagaccaaggagaccaaggatgcggccgcggagaagacgagggagatggcggacgccgccgcggggaagaccaaggagaccaaggacgcggcggtggagaagacgagggagatggcggacaccgccgcgacgaaggccgtggagaccaaggacgcggccgcagagaaggcgcgcggcgcgggggagatggtgacggagaaggcgaggagtgccaaggacacggcggctgacaaggcgagtggagcggcggagaaggcgaagggcgccaaggacgcagccttcgatacagcggagggtgccaaggagtacatggtggacaagaaggaggacgcccggcgagcgctcgccggctcggccaaggatagcaagggcgagacgaacgagtcggcgtggcaacagggccaggacgtgcggcggcgggcggcggagaaggccgaggaggttcgtcagcgcacgcaccaaccgccggaggaggggaggtcgaagtcggcaacggagaacatcttcgggtcggcgcaggggttgacggaggcgttcaaggagaagatgacgatgccgacggacgtgatcgagcggaagctcgctgagaggaaggggacgccgacggacgcgagcaggggcgaggcactgaacacggacgacgtgatgatgcgcgtgaaggaggcggaccagatgaccgggacagggtttaacgacgtcggcaagatgggcgaggagggcacgggcatgaaggcggcactgagggtcgacgatgaggaggacgtgatgctgcgggtgaaggcggcggaccagatgacagggcaggcgttcaacgacgtcggcccgatgggcgaggagggcacgggatggggtccggcgttgagggcgcggaaggacgcctgagagcgttgacacgtgcatgcactcctgttgcgtgtgagcgttttgtgtgacactttgtagtacaagctactcctgtagcaaatcaataaattatgcccggcaacttttt

SEQ ID NO: 65114 - protein, 407 aa, Triticum aestivum
  peptide (1)..(407): Ceres Seq. ID no. 13584609
MASEQSRREERAQAAAQKATDELAAARRDMREPSSPGRRTGIFGTVQESARSLMGAVRDTFSGGVRDTTTAHDSHSTGAMGTAGGKLNEYGSYASQKADEGKESASEMAEAAAGKTKETKDAAAEKTREMADAAAGKTKETKDAAVEKTREMADTAATKAVETKDAAAEKARGAGEMVTEKARSAKDTAADKASGAAEKAKGAKDAAFDTAEGAKEYMVDKKEDARRALAGSAKDSKGETNESAWQQGQDVRRRAAEKAEEVRQRTHQPPEEGRSKSATENIFGSAQGLTEAFKEKMTMPTDVIERKLAERKGTPTDASRGEALNTDDVMMRVKEADQMTGTGFNDVGKMGEEGTGMKAALRVDDEEDVMLRVKAADQMTGQAFNDVGPMGEEGTGWGPALRARKDA

SEQ ID NO: 65115 - protein, 378 aa, Triticum aestivum
  peptide (1)..(378): Ceres Seq. ID no. 13584610
MREPSSPGRRTGIFGTVQESARSLMGAVRDTFSGGVRDTTTAHDSHSTGAMGTAGGKLNEYGSYASQKADEGKESASEMAEAAAGKTKETKDAAAEKTREMADAAAGKTKETKDAAVEKTREMADTAATKAVETKDAAAEKARGAGEMVTEKARSAKDTAADKASGAAEKAKGAKDAAFDTAEGAKEYMVDKKEDARRALAGSAKDSKGETNESAWQQGQDVRRRAAEKAEEVRQRTHQPPEEGRSKSATENIFGSAQGLTEAFKEKMTMPTDVIERKLAERKGTPTDASRGEALNTDDVMMRVKEADQMTGTGFNDVGKMGEEGTGMKAALRVDDEEDVMLRVKAADQMTGQAFNDVGPMGEEGTGWGPALRARKDA

SEQ ID NO: 65116 - protein, 354 aa, Triticum aestivum
  peptide (1)..(354): Ceres Seq. ID no. 13584611
MGAVRDTFSGGVRDTTTAHDSHSTGAMGTAGGKLNEYGSYASQKADEGKESASEMAEAAAGKTKETKDAAAEKTREMADAAAGKTKETKDAAVEKTREMADTAATKAVETKDAAAEKARGAGEMVTEKARSAKDTAADKASGAAEKAKGAKDAAFDTAEGAKEYMVDKKEDARRALAGSAKDSKGETNESAWQQGQDVRRRAAEKAEEVRQRTHQPPEEGRSKSATENIFGSAQGLTEAFKEKMTMPTDVIERKLAERKGTPTDASRGEALNTDDVMMRVKEADQMTGTGFNDVGKMGEEGTGMKAALRVDDEEDVMLRVKAADQMTGQAFNDVGPMGEEGTGWGPALRARKDA

SEQ ID NO: 65117 - DNA, 2306 bp, Triticum aestivum
  misc_feature (1)..(2306): Ceres Seq. ID no. 13655755
atccctctcccaactccaaaccatctccgccgccgccgccgaacaccacctccaccgcccacgaaatcttctccccgaagacgcgcgaaccccgccggagacgagaggcatggacgccaagtcggtgacgccgggcgccgtggctctcatcctcgccaaccccacgccggagtcgcccgacgacgtgccggagatcgtcgtgcaggtcctcgacctcaagcccatcggctcccgcttcactttcatggccagcgacggggaggcgaaggtcaaggcgatcctctccacccacttcgcgtcggaggtccactccggcaagctccagaacctcggcctcgtccgcatcctcaactacacgtgcaacgacatcccacaaaagacggacaagatggtgatcatcaccaagtgcgaggtcgtgtcccaggcgctcgacgccgagatcaagagcgaggtcaggatagaagagccagcggctctcatgaagcccaaggaggaggctgcggtcctctccaagcccattggcggggccccggctgcgattatgctgaagccgaggcatgacgtgaagtccgcgtcccagattgttagcgagcagcgcggaaatgctgctcccgctgctcgcttggccatgacgagacgggtgcatcctctgatctccctgaacccctaccaggggaactgggtcatcaaagtgcgggtcacaagcaagggcaacctcaggtcatacaggaatgcccgtggagaaggccatgtcttcaacgtagagctcactgatgaggatggcacccagatccaggccaccatgttcaacgagcctgcaaagaagttctatcccgtgtttgagcttgggaaggtctactacatctccaaggggtcgctcagaattgcgaacaagcagttcaagacagtccagaatgactatgagatgaccctgaatgagaatgctgttgttgaagaagctgagggtgaatctttcattccaccagtgcaatacaactttgtcaagattgatatgctggggccatatgttggtggcagggagttagtagatatcattggtgttgttcagagtgtatcacctactttgagtatcagaagaaagatcgacaatgagtcaatcccaaagcgtgacattgttgttgcagatgactcgaacaaaactgtcaccatttctctttggaatgatcttgccaccactgtcggtgaggaactcttggacatggttgactctgcacctatcattgcagtcaagagcctgaaggtgtctgactttcaaggtgtgtctgtttctacagtaggcaaaagcacacttgtgattaacccagagttgcctgagactgagaagcttagagcttggtatgaatctgaaggcaagggtactgccttggcatcagttggtgctggaatgggtgcatccaacgctggtggcttgagatcaatgtactctgacagagtttttctgtctcacatcacaagtgaccctaacttgggccaggataagcctgttttcttcagcctgtatgccaacataagcaacatcaagcctgaccagaccatgtggtaccgcgcttgcaccacctgtaacaagaaggtgactgaggcacttggatcaggattctggtgtgaagggtgccagaagaactatgagcagtgctcattgaggtacatcatggtgatcaaggtctctgatcccactggtgaggcctggctgtctcttttcaatgaccaagcagagagaatcgtcggctgcagcgcagatgagcttgatcggatcaggaaagaggagggcgatgacatgttccagctcaagctgaaggaagccacctggattcctcacctgttccgtgtcagcgtcgtgcagaacgagtacatgggcgagaagaggcagcgaatcaccgtgaggagcgagtcaccggtcgactacgccgctgaagccaggtaccagctcgaggagatcgccaagctcacctccagctagaagaagatgcaagaggagtatgcctgctcccctcgaggagattcccaagctcaccgctgcctgctgggagaagatgctccccttgaggagatagatatccaggctcatcgcactagacggagccatgttttggccccaagtttcctgaagtgtagtgctgcttcagccgtgtctttctgccgtgtcgctcctcaaatgtagtggtaacttaaaacgtgttatatatgtagatgtttgattcggaggacatcggggtattcttctgttctactatctgtttgatctgcaaccttctgcatatgacaaggatgtatgcagatccactgcc

SEQ ID NO: 65118 - protein, 658 aa, Triticum aestivum
  peptide (1)..(658): Ceres Seq. ID no. 13655756
SLSQLQTISAAAAEHHLHRPRNLLPEDARTPPETRGMDAKSVTPGAVALILANPTPESPDDVPEIVVQVLDLKPIGSRFTFMASDGEAKVKAILSTHFASEVHSGKLQNLGLVRILNYTCNDIPQKTDKMVIITKCEVVSQALDAEIKSEVRIEEPAALMKPKEEAAVLSKPIGGAPAAIMLKPRHDVKSASQIVSEQRGNAAPAARLAMTRRVHPLISLNPYQGNWVIKVRVTSKGNLRSYRNARGEGHVFNVELTDEDGTQIQATMFNEPAKKFYPVFELGKVYYISKGSLRIANKQFKTVQNDYEMTLNENAVVEEAEGESFIPPVQYNFVKIDMLGPYVGGRELVDIIGVVQSVSPTLSIRRKIDNESIPKRDIVVADDSNKTVTISLWNDLATTVGEELLDMVDSAPIIAVKSLKVSDFQGVSVSTVGKSTLVINPELPETEKLRAWYESEGKGTALASVGAGMGASNAGGLRSMYSDRVFLSHITSDPNLGQDKPVFFSLYANISNIKPDQTMWYRACTTCNKKVTEALGSGFWCEGCQKNYEQCSLRYIMVIKVSDPTGEAWLSLFNDQAERIVGCSADELDRIRKEEGDDMFQLKLKEATWIPHLFRVSVVQNEYMGEKRQRITVRSESPVDYAAEARYQLEEIAKLTSS

SEQ ID NO: 65119 - protein, 622 aa, Triticum aestivum
  peptide (1)..(622): Ceres Seq. ID no. 13655757
MDAKSVTPGAVALILANPTPESPDDVPEIVVQVLDLKPIGSRFTFMASDGEAKVKAILSTHFASEVHSGKLQNLGLVRILNYTCNDIPQKTDKMVIITKCEVVSQALDAEIKSEVRIEEPAALMKPKEEAAVLSKPIGGAPAAIMLKPRHDVKSASQIVSEQRGNAAPAARLAMTRRVHPLISLNPYQGNWVIKVRVTSKGNLRSYRNARGEGHVFNVELTDEDGTQIQATMFNEPAKKFYPVFELGKVYYISKGSLRIANKQFKTVQNDYEMTLNENAVVEEAEGESFIPPVQYNFVKIDMLGPYVGGRELVDIIGVVQSVSPTLSIRRKIDNESIPKRDIVVADDSNKTVTISLWNDLATTVGEELLDMVDSAPIIAVKSLKVSDFQGVSVSTVGKSTLVINPELPETEKLRAWYESEGKGTALASVGAGMGASNAGGLRSMYSDRVFLSHITSDPNLGQDKPVFFSLYANISNIKPDQTMWYRACTTCNKKVTEALGSGFWCEGCQKNYEQCSLRYIMVIKVSDPTGEAWLSLFNDQAERIVGCSADELDRIRKEEGDDMFQLKLKEATWIPHLFRVSVVQNEYMGEKRQRITVRSESPVDYAAEARYQLEEIAKLTSS

SEQ ID NO: 65120 - protein, 577 aa, Triticum aestivum
  peptide (1)..(577): Ceres Seq. ID no. 13655758
MASDGEAKVKAILSTHFASEVHSGKLQNLGLVRILNYTCNDIPQKTDKMVIITKCEVVSQALDAEIKSEVRIEEPAALMKPKEEAAVLSKPIGGAPAAIMLKPRHDVKSASQIVSEQRGNAAPAARLAMTRRVHPLISLNPYQGNWVIKVRVTSKGNLRSYRNARGEGHVFNVELTDEDGTQIQATMFNEPAKKFYPVFELGKVYYISKGSLRIANKQFKTVQNDYEMTLNENAVVEEAEGESFIPPVQYNFVKIDMLGPYVGGRELVDIIGVVQSVSPTLSIRRKIDNESIPKRDIVVADDSNKTVTISLWNDLATTVGEELLDMVDSAPIIAVKSLKVSDFQGVSVSTVGKSTLVINPELPETEKLRAWYESEGKGTALASVGAGMGASNAGGLRSMYSDRVFLSHITSDPNLGQDKPVFFSLYANISNIKPDQTMWYRACTTCNKKVTEALGSGFWCEGCQKNYEQCSLRYIMVIKVSDPTGEAWLSLFNDQAERIVGCSADELDRIRKEEGDDMFQLKLKEATWIPHLFRVSVVQNEYMGEKRQRITVRSESPVDYAAEARYQLEEIAKLTSS

SEQ ID NO: 65121 - DNA, 1399 bp, Triticum aestivum
  misc_feature (1)..(1399): Ceres Seq. ID no. 13503512
acttcgcttccttcatcttcccgggcggtgcggtgcgtacggcgcaaccagatctcacggcgaggccgagctaaccgcctccggatccgcacaaacccccaacagccgtacgcaccgcagcagcggcggcggaggagcatggagagctcgtcgccttcggtgccgttcccgctgctgcaggcgccagtggagagcacgtaccgtgcctgcaccataccctaccgcttcccctccgacaacccccacaaggccacccccgtcgagatccagtggatcgacctcttcctgaaatccgtgccatccttcaggcagcgggcggagaatgaccccacggtgccggatgcccccgccaaggccgagaagtttgctcagaggtacactgatatgcttgaggagttgaagaagaacccagagagccatggaggacctcctgattgcatacttctttgtaggcttcgtgagctaatccttagagaattggggtttcatgacatcttcaagaaggtcaaggatgaggagaacgctaaggctatgtcactgtttgagggagttgttcagcggaatgatgaaatagaagatggtgagaaacgagcagagaacttgatccgtggaatcttagcaggaaacatatttgacttagggtctgcacagcttgcagaagtttttgctaaagatggcatgtccttcttggcgagttgccagaatcttttatctcgaccttgggttattgatgacctagatgcatttaaaagcaaatggaccaagaaatcttgggaaaaggcagttatttttgttgataattctggtgctgatatcatattgggcatattaccatttgcgagggagttgctccgacgtggcactaaggtgatacttgccgccaatgacatgccttccatcaacgatatcacttacctagagttagttgagattgtaaacaagctcaaggacgaaaatggaaagcttgctggtgtggatgtatctgacctcattgttgccaactccgggaacgatctgccagtaatagatttgtctagcgtcgcaccggaactagcctatatggcaagtgatgctgacttggtcatcctagaaggcatgggaagaggaatcgaaaccaacctatacgcacaaatgagatgtgactcgatcaagattggaatggtcaagcatcctgaagtggcgcagtttttgggtggaaggctttatgattgtgtcttcaagttcaacgaggcctgaaaaacactgaagcccctgcatggcaccagccatattgcattcattttaatcattgattactgatgcaatcgtacactgaatgtatgcgtccacgatgatagcaagtggaagaaattacaattcgcttgttgtactgtgaggaaggacaatttttattgcaaat

SEQ ID NO: 65122 - protein, 411 aa, Triticum aestivum
  peptide (1)..(411): Ceres Seq. ID no. 13503513
TSLPSSSRAVRCVRRNQISRRGRANRLRIRTNPQQPYAPQQRRRRSMESSSPSVPFPLLQAPVESTYRACTIPYRFPSDNPHKATPVEIQWIDLFLKSVPSFRQRAENDPTVPDAPAKAEKFAQRYTDMLEELKKNPESHGGPPDCILLCRLRELILRELGFHDIFKKVKDEENAKAMSLFEGVVQRNDEIEDGEKRAENLIRGILAGNIFDLGSAQLAEVFAKDGMSFLASCQNLLSRPWVIDDLDAFKSKWTKKSWEKAVIFVDNSGADIILGILPFARELLRRGTKVILAANDMPSINDITYLELVEIVNKLKDENGKLAGVDVSDLIVANSGNDLPVIDLSSVAPELAYMASDADLVILEGMGRGIETNLYAQMRCDSIKIGMVKHPEVAQFLGGRLYDCVFKFNEA

SEQ ID NO: 65123 - protein, 365 aa, Triticum aestivum
  peptide (1)..(365): Ceres Seq. ID no. 13503514
MESSSPSVPFPLLQAPVESTYRACTIPYRFPSDNPHKATPVEIQWIDLFLKSVPSFRQRAENDPTVPDAPAKAEKFAQRYTDMLEELKKNPESHGGPPDCILLCRLRELILRELGFHDIFKKVKDEENAKAMSLFEGVVQRNDEIEDGEKRAENLIRGILAGNIFDLGSAQLAEVFAKDGMSFLASCQNLLSRPWVIDDLDAFKSKWTKKSWEKAVIFVDNSGADIILGILPFARELLRRGTKVILAANDMPSINDITYLELVEIVNKLKDENGKLAGVDVSDLIVANSGNDLPVIDLSSVAPELAYMASDADLVILEGMGRGIETNLYAQMRCDSIKIGMVKHPEVAQFLGGRLYDCVFKFNEA

SEQ ID NO: 65124 - protein, 283 aa, Triticum aestivum
  peptide (1)..(283): Ceres Seq. ID no. 13503515
MLEELKKNPESHGGPPDCILLCRLRELILRELGFHDIFKKVKDEENAKAMSLFEGVVQRNDEIEDGEKRAENLIRGILAGNIFDLGSAQLAEVFAKDGMSFLASCQNLLSRPWVIDDLDAFKSKWTKKSWEKAVIFVDNSGADIILGILPFARELLRRGTKVILAANDMPSINDITYLELVEIVNKLKDENGKLAGVDVSDLIVANSGNDLPVIDLSSVAPELAYMASDADLVILEGMGRGIETNLYAQMRCDSIKIGMVKHPEVAQFLGGRLYDCVFKFNEA

SEQ ID NO: 65125 - DNA, 1914 bp, Triticum aestivum
  misc_feature (1)..(1914): Ceres Seq. ID no. 15225845
tcccctcttcctccctccctcctcgccaccgctccgctccactccacacccctgttcccagacgcaaccaccgccgccgacgaccgacgatgcttcgcgccgtcctcctccgctcagcctccggcctccgccggtcgccgatggccgccccgctatccaccgccgccgcctcgtggctcgccgaggggacctcgtcgccgcccagggtgcgcctactcatcggcggcgacttcgtcgagtcgaaggccaccgagcacgtcgacgtcaccaaccccgcgacgcaggaggtggtgtcccggatcccgctcaccaccgccgacgagttcagggccgcggtggacgctgccaggaccgccttccctggctggcggaacactccggtcacggcgcggcagcgcatcatgttcaaataccaggagctcatccgggccaacatggataagctggcagagaacattacaaccgagcagggaaagacactgaaagatgcttggggtgatgtattccgtggtctagaggtggtggagcatgcttgtggaatggggtcacttcaaatgggcgaatacgtatctaatgtttctcatgggattgacacctttagtattagggagccactcggcgtatgtgctgggatttgcccattcaatttccctgccatgattcccctatggatgttccccatagctgttacttgtgggaatacttttgttctaaagccatcagaaaaggatccaggggctgctatgatgcttgcggagctagcgatggaggctggtttaccaaagggtgtgttgaacattgttcatggtacccatgatgttgtcaacaatatttgtgatgacgaggctattaaggcagtatcatttgttggttccaatacagcaggtatgcatatatattctagagcatctgcgagtgggaagcgtgttcagtgtaacatgggtgcaaagaatcatgccattatccttcctgatgctgatcgagatgccacattgaatgcccttattgctgccggttttggtgcagctgggcaaaggtgcatggcattgagcactgctgtttttgttggaggttcagaaccatgggaggatgaactagtcaaacgtgcaagcaaccttgtagttaattccggaacagctaatgatgctgaccttggtccagtgatcagtacacaggccaaggaccgcatctgcaagttagtccaaagtggcgctgacagtggtgctcgacttgtgctggatggaagggagattgtggttcctcaatttgaggatggcaactttattggtccaactgtgttggctgatgttaaaagtgatatggagtgttaccaggaggaaatttttggtccagttcttctcttgatgaaggcagagagcctagatgatgccatacaaattgtaaacagaaacaagtatggcaatggggcttccatctttaccacatctggtgtctcagcaaggaaatttcagacggacattgaagctggccaggtgggtatcaacgtgccgatcccggtacccctgccgttcttctccttcacgggtagcaaagcttccttcgccggagacttgaatttctacggcaaggcgggcgtgcagttcttcacccagatcaagaccatcacgcagcagtggaaggagtcgtctccccagcgcgtttctctctccatgcccacctcgcagaagtgaagtcacccgagctgactcatgtatgtcgaaataaacccaggcattgatgtggaatttaagcttcacaggagttgcctttcattaagggtaactcttgtgatgtctttcattgtgctgccggtaataagaaaatcccagattagacgaccgaatcacacgcacagcagagcatgtatttgtacagggaccaaattaatgtgtacatgcaatggctcgatatcac

SEQ ID NO: 65126 - protein, 562 aa, Triticum aestivum
  peptide (1)..(562): Ceres Seq. ID no. 15225846
PSSSLPPRHRSAPLHTPVPRRNHRRRRPTMLRAVLLRSASGLRRSPMAAPLSTAAASWLAEGTSSPPRVRLLIGGDFVESKATEHVDVTNPATQEVVSRIPLTTADEFRAAVDAARTAFPGWRNTPVTARQRIMFKYQELIRANMDKLAENITTEQGKTLKDAWGDVFRGLEVVEHACGMGSLQMGEYVSNVSHGIDTFSIREPLGVCAGICPFNFPAMIPLWMFPIAVTCGNTFVLKPSEKDPGAAMMLAELAMEAGLPKGVLNIVHGTHDVVNNICDDEAIKAVSFVGSNTAGMHIYSRASASGKRVQCNMGAKNHAIILPDADRDATLNALIAAGFGAAGQRCMALSTAVFVGGSEPWEDELVKRASNLVVNSGTANDADLGPVISTQAKDRICKLVQSGADSGARLVLDGREIVVPQFEDGNFIGPTVLADVKSDMECYQEEIFGPVLLLMKAESLDDAIQIVNRNKYGNGASIFTTSGVSARKFQTDIEAGQVGINVPIPVPLPFFSFTGSKASFAGDLNFYGKAGVQFFTQIKTITQQWKESSPQRVSLSMPTSQK

SEQ ID NO: 65127 - protein, 533 aa, Triticum aestivum
  peptide (1)..(533): Ceres Seq. ID no. 15225847
MLRAVLLRSASGLRRSPMAAPLSTAAASWLAEGTSSPPRVRLLIGGDFVESKATEHVDVTNPATQEVVSRIPLTTADEFRAAVDAARTAFPGWRNTPVTARQRIMFKYQELIRANMDKLAENITTEQGKTLKDAWGDVFRGLEVVEHACGMGSLQMGEYVSNVSHGIDTFSIREPLGVCAGICPFNFPAMIPLWMFPIAVTCGNTFVLKPSEKDPGAAMMLAELAMEAGLPKGVLNIVHGTHDVVNNICDDEAIKAVSFVGSNTAGMHIYSRASASGKRVQCNMGAKNHAIILPDADRDATLNALIAAGFGAAGQRCMALSTAVFVGGSEPWEDELVKRASNLVVNSGTANDADLGPVISTQAKDRICKLVQSGADSGARLVLDGREIVVPQFEDGNFIGPTVLADVKSDMECYQEEIFGPVLLLMKAESLDDAIQIVNRNKYGNGASIFTTSGVSARKFQTDIEAGQVGINVPIPVPLPFFSFTGSKASFAGDLNFYGKAGVQFFTQIKTITQQWKESSPQRVSLSMPTSQK

SEQ ID NO: 65128 - protein, 516 aa, Triticum aestivum
  peptide (1)..(516): Ceres Seq. ID no. 15225848
MAAPLSTAAASWLAEGTSSPPRVRLLIGGDFVESKATEHVDVTNPATQEVVSRIPLTTADEFRAAVDAARTAFPGWRNTPVTARQRIMFKYQELIRANMDKLAENITTEQGKTLKDAWGDVFRGLEVVEHACGMGSLQMGEYVSNVSHGIDTFSIREPLGVCAGICPFNFPAMIPLWMFPIAVTCGNTFVLKPSEKDPGAAMMLAELAMEAGLPKGVLNIVHGTHDVVNNICDDEAIKAVSFVGSNTAGMHIYSRASASGKRVQCNMGAKNHAIILPDADRDATLNALIAAGFGAAGQRCMALSTAVFVGGSEPWEDELVKRASNLVVNSGTANDADLGPVISTQAKDRICKLVQSGADSGARLVLDGREIVVPQFEDGNFIGPTVLADVKSDMECYQEEIFGPVLLLMKAESLDDAIQIVNRNKYGNGASIFTTSGVSARKFQTDIEAGQVGINVPIPVPLPFFSFTGSKASFAGDLNFYGKAGVQFFTQIKTITQQWKESSPQRVSLSMPTSQK

SEQ ID NO: 65129 - DNA, 1319 bp, Triticum aestivum
  misc_feature (1)..(1319): Ceres Seq. ID no. 13597701
ccaccactcctggcatagatctccacctcccggtgagtgaccatggcggaggccgcaggagcgactcctctcctcgctggcctcccggacgagatcaccgtctcggagatcctcgctcgcctgccccccaaacccctcctccgctgccgcgccgtcagccccgcgtggcgccgcgccacctccacccgcgatttcctcctgtcccaccacgcccgccagcccgccctgcccctcctctgcagccacagcgacgtagccgacggcggccagtccctggacgtcacgctcttcgaccaccgtgcaggagtcgccgccgccgaccagttccagcgcgtcgcgcgactgaaaacaccccccttggaaggggggattgacgggagtgaaagtttcactcccctcttctatccggtggcctcctgcgacggcctcctcctcctctccatcgagtgtgacctctgcatctgcaacccggcgactcggcagtatgctcccctcgagcagctcgatggcttcatgaccgtggggttgtaccctcaccctcttaccggcgagtaccggctgttgctgtaccatgaaacagatcaacgtgccatctatgttttctcaattggctccaaccagccgccgaggcgcatcgggcgccctgatccgttggctggtgacgggcttctgttccgtggtagcctgcattggcacactggcaaccggataatggtattcgacaccgccactgagtcgttccggcagatccgtgccccggttgcccatgaggactatggacgactgtttgagatggatgacatgcttggcatcttctttcttaatgatgaaaagacgaccgttgatatttgggtgatgcaggactaccaaggcgaggtctgggctttcaagtgtcgggttgaattgccggttgccgagatcagggaccggtgtcaaaattctagccatattgaggaagtgatggttgttaatggtgatggtgagttgctcgtgttggtcggttttgaggactggctgtttcaggttgatattgatggcaagttgattgccagtttccatgccagaggcctcccttcctataatattgtgcacaagcaaactcttgttcaacataccttctttccgacactcgagggttatgttatgaatgattcgcctttcatttgaccagatgattatgttgtcaacgcttaggaatattgagtgttgtggtgtttcttattggcctagctctgcatgtccacatgagctgttgtatgtatcaactagatccattattaagcttctttgttcttggttgatgaatataaaaaagtatg

SEQ ID NO: 65130 - protein, 374 aa, Triticum aestivum
  peptide (1)..(374): Ceres Seq. ID no. 13597702
MAEAAGATPLLAGLPDEITVSEILARLPPKPLLRCRAVSPAWRRATSTRDFLLSHHARQPALPLLCSHSDVADGGQSLDVTLFDHRAGVAAADQFQRVARLKTPPLEGGIDGSESFTPLFYPVASCDGLLLLSIECDLCICNPATRQYAPLEQLDGFMTVGLYPHPLTGEYRLLLYHETDQRAIYVFSIGSNQPPRRIGRPDPLAGDGLLFRGSLHWHTGNRIMVFDTATESFRQIRAPVAHEDYGRLFEMDDMLGIFFLNDEKTTVDIWVMQDYQGEVWAFKCRVELPVAEIRDRCQNSSHIEEVMVVNGDGELLVLVGFEDWLFQVDIDGKLIASFHARGLPSYNIVHKQTLVQHTFFPTLEGYVMNDSPFI

SEQ ID NO: 65131 - protein, 217 aa, Triticum aestivum
  peptide (1)..(217): Ceres Seq. ID no. 13597703
MTVGLYPHPLTGEYRLLLYHETDQRAIYVFSIGSNQPPRRIGRPDPLAGDGLLFRGSLHWHTGNRIMVFDTATESFRQIRAPVAHEDYGRLFEMDDMLGIFFLNDEKTTVDIWVMQDYQGEVWAFKCRVELPVAEIRDRCQNSSHIEEVMVVNGDGELLVLVGFEDWLFQVDIDGKLIASFHARGLPSYNIVHKQTLVQHTFFPTLEGYVMNDSPFI

SEQ ID NO: 65132 - DNA, 1415 bp, Triticum aestivum
  misc_feature (1)..(1415): Ceres Seq. ID no. 13597476
agaacatcctaatcgaaaaatatggcggcgccagagtacaagcacgagacagaaaccccagcaccctccggcgagcagccgccagagccagtagccgccgccgccgccgccgccggccgggagctgcagccatgggagcagcacgctgcggtgatcaatctcccgcgctacgactaccgcgcgtcgggctccctgctcctgcgctcgcactccggcttcctcatcacctgccccatcaaacgagagaaaagtgcaacgaaggaagccatttcaattcttggagagtatattagcgacgcaagcagccacagttctgaaaacttggaaccatgtgttacggaagtggcatcaaagaaaaggaaaatattttctgaggcatccgaaattgaacattcagaagatacaaatgggaagggtgatgcaccagaatctactggcagcattgaagtagaaacaaattcacttcactccgatacaagtggaaattctgacaggacttcaaatctctcattgattaagctatcaatgagtggtttgcttttcttctctttccctactggaggcgttcatgttgttcagatgcttaccgaagtctttcgttcactgaaatctgggaagcttaaatctccacagtggtgtcatcgcatattccctattcaggaaacttgtgttctatcagaaacagaactgcatgccactgtgtcaaagttgttcctggacttcatcaggaataaggaagatcaagatgagcctatcaagttcgcagttgggtacagtaggagaggcattgatgaaacggtgaagacgcagaagaatgacaataacagctcaattcaacaaggtttaatggacaggcaacaatgtttcaaggttgttgctgctgctgtcaagtcagttgctaaggacgcaattgtggatctcaagtctcctgaggtggcagtactagtggaggtgctccccatttctggggtgccagttggatcttcggtggccggggtgtctgttctcccagctgaactcgtctcggctaagcctcgtctttgtgtcaaggctttggtgtctgatacaaaaacaaaaaagaagtgatgcgccagttcggctgcaaccagtcagagcacctgtaacggcaacatatggaggaaacgatcttgttgggcatgctcgtcagccatgccgcagcttgagcattccacaaacaaagaaacggtatcgcagctgtcttgcctggctctgagtatgccaatttgtaagctgcagtgctcgtcccgttctttgaggttagcttcttatcgtttttctagcgtgctccagcgtcaaagcttaactgacctgttgctggatgtgattgtgttatactgtttctctagactttatgtagtattattattatgggcaattcagtgaactactaaagt

SEQ ID NO: 65133 - protein, 354 aa, Triticum aestivum
  peptide (1)..(354): Ceres Seq. ID no. 15222108
MAAPEYKHETETPAPSGEQPPEPVAAAAAAAGRELQPWEQHAAVINLPRYDYRASGSLLLRSHSGFLITCPIKREKSATKEAISILGEYISDASSHSSENLEPCVTEVASKKRKIFSEASEIEHSEDTNGKGDAPESTGSIEVETNSLHSDTSGNSDRTSNLSLIKLSMSGLLFFSFPTGGVHVVQMLTEVFRSLKSGKLKSPQWCHRIFPIQETCVLSETELHATVSKLFLDFIRNKEDQDEPIKFAVGYSRRGIDETVKTQKNDNNSSIQQGLMDRQQCFKVVAAAVKSVAKDAIVDLKSPEVAVLVEVLPISGVPVGSSVAGVSVLPAELVSAKPRLCVKALVSDTKTKKK

SEQ ID NO: 65134 - protein, 186 aa, Triticum aestivum
  peptide (1)..(186): Ceres Seq. ID no. 15222109
MSGLLFFSFPTGGVHVVQMLTEVFRSLKSGKLKSPQWCHRIFPIQETCVLSETELHATVSKLFLDFIRNKEDQDEPIKFAVGYSRRGIDETVKTQKNDNNSSIQQGLMDRQQCFKVVAAAVKSVAKDAIVDLKSPEVAVLVEVLPISGVPVGSSVAGVSVLPAELVSAKPRLCVKALVSDTKTKKK

SEQ ID NO: 65135 - DNA, 1342 bp, Triticum aestivum
  misc_feature (1)..(1342): Ceres Seq. ID no. 12599421
acacacaccttcttctcccccaaaaacgcacactgcaccaccgcacacagatctaaccgaaacccacccccaccggcggcgagccgccgacgagccagccatccaagatgcagtacaacaacctgggacggtcgggcctccgcgtcagccagctctcctacggcgcgtgggtgaccttcggcaaccagctcgacgtcaaggaggcgaaatccctcctccaggcctgccgggacgcgggggtcaacttcttcgacaacgcggaggtgtacgccaacgggcgcgccgaggagatcatggggcaggcgatccgggacctggggtggcgccgcgccgacgtggtcatctccaccaagctcttctggggcggccaggggcccaacgacaagggcctctcccgcaagcacgtcgtcgagggcctgaaagcctcgctcaagcggctcgacatggagtacgtcgacgtggtctactgccaccggcccgacgccaccacgcccatcgaggagacggtgcgggccatgaactgggtgatcgaccaggggtgggccttctactggggcacgtcggagtggaccgcgcagcagatcaccgaggcctggggcgtggcgaaccggcttgacctcgtcgggcccatcgtcgagcagcccgagtacaacctcttctcccgccacaaggttgagtctgagtttgtacctctttacaacacttatggcattgggttgactacatggagtcctctcgcttcaggggttctcactgggaagtatagcaaagggaatatacccgctgaaagccggtttgccctagataactacaagaacctggcaaacaggtctctggttgacgacacgcttagaaaagtgaacgggctcaagccaatcgctttggagcttggcgtctcgatggcgcagctgggtatcgcctggtgcgcgtcgaaccccaacgtgtcgtctgtgatcactggagccaccaaagagagccagatcgtcgagaacatgaaggccctggaggtcgtcccgctgctgaccccagaggtcctggagaagatcgaggcggtcgtccagagcaagccgaagcgcctcgagtcgtacagatgaagcggtcggtcggtcggcttcgtcagctgtgcagcgtgtgcccgcccgccccggtgggattttttcagtacccggttctccgaaaaaccatataccgaacgtcctgtgtggtcggcgtgcccagcgtgcgaaacattttgtcgagtggacctgatgatgacggtggtcgtcacagacaatgcttttatgccgcttgtatgtttgctgctgtcgctgtatgtatgggtctgttgcaaaatctgagcggg

SEQ ID NO: 65136 - protein, 328 aa, Triticum aestivum
  peptide (1)..(328): Ceres Seq. ID no. 12599422
MQYNNLGRSGLRVSQLSYGAWVTFGNQLDVKEAKSLLQACRDAGVNFFDNAEVYANGRAEEIMGQAIRDLGWRRADVVISTKLFWGGQGPNDKGLSRKHVVEGLKASLKRLDMEYVDVVYCHRPDATTPIEETVRAMNWVIDQGWAFYWGTSEWTAQQITEAWGVANRLDLVGPIVEQPEYNLFSRHKVESEFVPLYNTYGIGLTTWSPLASGVLTGKYSKGNIPAESRFALDNYKNLANRSLVDDTLRKVNGLKPIALELGVSMAQLGIAWCASNPNVSSVITGATKESQIVENMKALEVVPLLTPEVLEKIEAVVQSKPKRLESYR

SEQ ID NO: 65137 - protein, 266 aa, Triticum aestivum
  peptide (1)..(266): Ceres Seq. ID no. 12599423
MGQAIRDLGWRRADVVISTKLFWGGQGPNDKGLSRKHVVEGLKASLKRLDMEYVDVVYCHRPDATTPIEETVRAMNWVIDQGWAFYWGTSEWTAQQITEAWGVANRLDLVGPIVEQPEYNLFSRHKVESEFVPLYNTYGIGLTTWSPLASGVLTGKYSKGNIPAESRFALDNYKNLANRSLVDDTLRKVNGLKPIALELGVSMAQLGIAWCASNPNVSSVITGATKESQIVENMKALEVVPLLTPEVLEKIEAVVQSKPKRLESYR

SEQ ID NO: 65138 - protein, 216 aa, Triticum aestivum
  peptide (1)..(216): Ceres Seq. ID no. 12599424
MEYVDVVYCHRPDATTPIEETVRAMNWVIDQGWAFYWGTSEWTAQQITEAWGVANRLDLVGPIVEQPEYNLFSRHKVESEFVPLYNTYGIGLTTWSPLASGVLTGKYSKGNIPAESRFALDNYKNLANRSLVDDTLRKVNGLKPIALELGVSMAQLGIAWCASNPNVSSVITGATKESQIVENMKALEVVPLLTPEVLEKIEAVVQSKPKRLESYR

SEQ ID NO: 65139 - DNA, 1698 bp, Triticum aestivum
  misc_feature (1)..(1698): Ceres Seq. ID no. 12625831
acgactgggtcgagctcggtcaagtctcgtctctccctcctgttcctactggactagatcagccgatggcgacggcgcgggccgagagcgggccggcgagatagcgcacgcttccgcactctcctcccctccccgcccctcgccgcagtccatggacgctctcgcccccacccccacccgccgccgccgcctcctcgccggcgcggccgccgccaccgcctgctacggcctctaccgcctctacctccaccaccgccgccgcatcgccgcggcgctctccctcgccgacgcgctctcgcaggccggctccgacctcgccgacttcctccgctccgactccgaccaggtgccccgcagcctgcgccagctctccaagctcgccgcctccgaccacgtctcctccgccgcctccgccctctccgagtcgctcgcctcgggggccctccgcgccttctcctcccaccgggccgcccggggcccggatccttcctccccgccgctgcaagaccggatcttggaccgcctcctctcccccgccggcgccgggttcgcctccgccgtcctcgggagcttcgccaggaacctcgtgctctcctgccgtgatcccgcggcccggccccgcgcccctggccagccggactggctcgccgcgctgtgcagcgacaggggcaaggaggccgccgcggagctcgtccgggtgttcgtcagcaccgccgtcgccgcctacctcgacaggaccgcggccgtgcgcacctccgaccaggtgctcgccggcgtcagtaaccccaagcacgacgccaagctcaaggacctgctcgtgtccgtctgcaacggggccgtcgagacctttgtcaggacctcgcggcaggtcacaaaggaggcctccatttctcgagctgaagcagcagtggcggtgcgagacgtctgcaattcaggtcctagctgtgtaatggagagagtatcgaccacgttggccatgccaagcaaccggaggtttgtgctggatgtcacgggcagggtcaccgccgagatggtccggtcattcctcgagttctccactcagcgggtgtccgctggtgcacgaaagagcattgtcgttgcccgggatgagatcgccgaaaggggtctcgtcgcggtcaagtacctgagcgccaagtctatggccatcttcaccttatgcctcacaatgtgcatgcacatttcggttggaattaggttcccgttgccggcctaggcatagcctggtgtgggcttcaaggtgacattgttccagttatcctgattgtagttggaaagtaaagtatgtagattgcaaattgattgtttgctactgctagcctttttctgtgttgttgactagcatttggaagcagaaatctgttggatttgtagttgttggtttgttgtttgtgatagtctgatagggagtatataggtcacgaatggataattttgcaattttagtgtaaggtttcatatgtattatggtgttgtatcctagtgtcttctccatcttttctgaaggaagtaggggtcagtatcttattgatgctgactagtgatgttcctcagcactctgtgtgtggataagctatttcgggcaacaatagcatgaaacttgtccacttatgttttccattccctttttgccatgatttgtggaaaagcaaatatgaattgatcagagatttgtgcctg

SEQ ID NO: 65140 - protein, 410 aa, Triticum aestivum
  peptide (1)..(410): Ceres Seq. ID no. 12625832
RLGRARSSLVSPSCSYWTRSADGDGAGRERAGEIAHASALSSPPRPSPQSMDALAPTPTRRRRLLAGAAAATACYGLYRLYLHHRRRIAAALSLADALSQAGSDLADFLRSDSDQVPRSLRQLSKLAASDHVSSAASALSESLASGALRAFSSHRAARGPDPSSPPLQDRILDRLLSPAGAGFASAVLGSFARNLVLSCRDPAARPRAPGQPDWLAALCSDRGKEAAAELVRVFVSTAVAAYLDRTAAVRTSDQVLAGVSNPKHDAKLKDLLVSVCNGAVETFVRTSRQVTKEASISRAEAAVAVRDVCNSGPSCVMERVSTTLAMPSNRRFVLDVTGRVTAEMVRSFLEFSTQRVSAGARKSIVVARDEIAERGLVAVKYLSAKSMAIFTLCLTMCMHISVGIRFPLPA

SEQ ID NO: 65141 - protein, 360 aa, Triticum aestivum
  peptide (1)..(360): Ceres Seq. ID no. 12625833
MDALAPTPTRRRRLLAGAAAATACYGLYRLYLHHRRRIAAALSLADALSQAGSDLADFLRSDSDQVPRSLRQLSKLAASDHVSSAASALSESLASGALRAFSSHRAARGPDPSSPPLQDRILDRLLSPAGAGFASAVLGSFARNLVLSCRDPAARPRAPGQPDWLAALCSDRGKEAAAELVRVFVSTAVAAYLDRTAAVRTSDQVLAGVSNPKHDAKLKDLLVSVCNGAVETFVRTSRQVTKEASISRAEAAVAVRDVCNSGPSCVMERVSTTLAMPSNRRFVLDVTGRVTAEMVRSFLEFSTQRVSAGARKSIVVARDEIAERGLVAVKYLSAKSMAIFTLCLTMCMHISVGIRFPLPA

SEQ ID NO: 65142 - DNA, 716 bp, Triticum aestivum
  misc_feature (1)..(716): Ceres Seq. ID no. 13597600
agccacaacgggacagatcccccgcataaattcctccacccgtcgcgccgcccccattcgcccacgcccacgcgcgcgcacgcggcctccccctcctcctcccccattcgctccctccctccgccggccggggattcgggtttggggggagatggggtacgtcgggagccacggcgtggcgacgctgcgcaagtacaagtacagcggcgtcgaccactccattgtcgccaagtacatcctccagcccttctggtcgcgattcgtcaacgtcttcccgctctggttcccaccaaacatgatcacgctgacaggtttcatgtttctgctgacatcggcattccttggctttttgtattcacctcatcttgatacagcgccccctagatgggttcatctcgcgcatggaatccttctcttcctttaccagacttttgatgctgtggatggtaaacaagcaagacgtaccaactcatcaagtcctttaggcgaactttttgatcacggatgcgacgcgcttgcatgtacttttgagtccctggcttttgggagcacagctatgtgtggaaatgctaccttttggttttgggtcatttcggctgtccccttctactttgcaacctgggaacactattttacaaacacacttgttcttcctatagtcaatgggccaactgaaggccttatgctgatttatgtgtgccatatcttcacctttt

SEQ ID NO: 65143 - protein, 238 aa, Triticum aestivum
  peptide (1)..(238): Ceres Seq. ID no. 13597601
ATTGQIPRINSSTRRAAPIRPRPRARTRPPPPPPPFAPSLRRPGIRVWGEMGYVGSHGVATLRKYKYSGVDHSIVAKYILQPFWSRFVNVFPLWFPPNMITLTGFMFLLTSAFLGFLYSPHLDTAPPRWVHLAHGILLFLYQTFDAVDGKQARRTNSSSPLGELFDHGCDALACTFESLAFGSTAMCGNATFWFWVISAVPFYFATWEHYFTNTLVLPIVNGPTEGLMLIYVCHIFTF

SEQ ID NO: 65144 - protein, 188 aa, Triticum aestivum
  peptide (1)..(188): Ceres Seq. ID no. 13597602
MGYVGSHGVATLRKYKYSGVDHSIVAKYILQPFWSRFVNVFPLWFPPNMITLTGFMFLLTSAFLGFLYSPHLDTAPPRWVHLAHGILLFLYQTFDAVDGKQARRTNSSSPLGELFDHGCDALACTFESLAFGSTAMCGNATFWFWVISAVPFYFATWEHYFTNTLVLPIVNGPTEGLMLIYVCHIFTF

SEQ ID NO: 65145 - protein, 140 aa, Triticum aestivum
  peptide (1)..(140): Ceres Seq. ID no. 13597603
MITLTGFMFLLTSAFLGFLYSPHLDTAPPRWVHLAHGILLFLYQTFDAVDGKQARRTNSSSPLGELFDHGCDALACTFESLAFGSTAMCGNATFWFWVISAVPFYFATWEHYFTNTLVLPIVNGPTEGLMLIYVCHIFTF

SEQ ID NO: 65146 - DNA, 1548 bp, Triticum aestivum
  misc_feature (1)..(1548): Ceres Seq. ID no. 12460981
aacatcctaatcgaaaagtcgtcgcgttccatttcaaaaacgccacctttcgccccctgcatttccaccaaggcctacatgtctccgaccaccgccgcgtcccccgcgccggcgccggcaaccgacgcgcccccgaagccttcgccaggcgcgaagcgcagcctgatgggatccctcatcgacgccaccgcgctgctccgggcggcctccttcaaggaggactcgtacgtggccgcggcgctcccggcctcggacctccgcgcgctcgccgacctcagggcgctcctcgccacccacccggaccaaatctccatctggggcgtgccgctcaacccgcccagcgacgcccccgccgacgagcgcacggacgtggtgctcctcaagttcctccgcgccagggacttccgcgtccgcgacgcgcacgccatgctgctccgctgcgccgcctggcgggccgagttccgcgccgacgccgtgctggacgaggacctcgggttcaaggacctggagggcatcgtcgcctacatgcacggctgggaccgcgatggccacccggtctgctacaacgcctacggcgtgttcaaggaccgggacatgtacgaccgggtgttcggcgacggtgaccgcctcagccggttcctccggtggcgcgtccagatcatggagcgcggcgtgcgcgcgctccagctccgccccggcggcgtcaacgccatcatacaggtgaccgacctcaaggacatgccgaagcgagagctccgcgccgcgtccaaccagatactctccctcttccaggacaactaccccgagatggtcgcccgcaaggtgttcgtgaacgtaccgtggtacttctccgtgctgttctcgatgatctcgcccttcctcacggagcgcaccaagagcaagttcgtcatcgcgcgcgagggcaacgtcgcggagacgctcttcaagttcatccggccggagctggtgccggtgcagtacggcgggctgagccgcgccagcgagctggagaacgggccgcccaagccggcgtccgagttcaccatcaagggcggcgagaaggtcttcctagagatcgacggcatcgaggccggtgcaacaataacgtgggacctggtcgtcggcggctgggagctcgagtacggcgcggagtacgtgccggcgtcggagggcggctacacgctgtgcgtggagaggaccaagaaggtcccggccgccgccgacgagcccgtgcacaacgccttcacggccaaggagcccggcaagatggtgctctccatcgacaactccggctcacggaagcggaaggtcgccgcctaccgctacttcgtgcgcaagccgtcggcgtaggctgctcggctgctgtggccggcggcttgccggccggcttgtgctttgctttgctcgtctcggagaggaggttaatttaggtctatttaattagtgctataatgtgatatgcatgtattatgccatatgtagaatatattgtatgagccgtgagatcctacttgtcatcatcgttatataacgagttaagttttttcg

SEQ ID NO: 65147 - protein, 449 aa, Triticum aestivum
  peptide (1)..(449): Ceres Seq. ID no. 12460982
NILIEKSSRSISKTPPFAPCISTKAYMSPTTAASPAPAPATDAPPKPSPGAKRSLMGSLIDATALLRAASFKEDSYVAAALPASDLRALADLRALLATHPDQISIWGVPLNPPSDAPADERTDVVLLKFLRARDFRVRDAHAMLLRCAAWRAEFRADAVLDEDLGFKDLEGIVAYMHGWDRDGHPVCYNAYGVFKDRDMYDRVFGDGDRLSRFLRWRVQIMERGVRALQLRPGGVNAIIQVTDLKDMPKRELRAASNQILSLFQDNYPEMVARKVFVNVPWYFSVLFSMISPFLTERTKSKFVIAREGNVAETLFKFIRPELVPVQYGGLSRASELENGPPKPASEFTIKGGEKVFLEIDGIEAGATITWDLVVGGWELEYGAEYVPASEGGYTLCVERTKKVPAAADEPVHNAFTAKEPGKMVLSIDNSGSRKRKVAAYRYFVRKPSA

SEQ ID NO: 65148 - protein, 423 aa, Triticum aestivum
  peptide (1)..(423): Ceres Seq. ID no. 12460983
MSPTTAASPAPAPATDAPPKPSPGAKRSLMGSLIDATALLRAASFKEDSYVAAALPASDLRALADLRALLATHPDQISIWGVPLNPPSDAPADERTDVVLLKFLRARDFRVRDAHAMLLRCAAWRAEFRADAVLDEDLGFKDLEGIVAYMHGWDRDGHPVCYNAYGVFKDRDMYDRVFGDGDRLSRFLRWRVQIMERGVRALQLRPGGVNAIIQVTDLKDMPKRELRAASNQILSLFQDNYPEMVARKVFVNVPWYFSVLFSMISPFLTERTKSKFVIAREGNVAETLFKFIRPELVPVQYGGLSRASELENGPPKPASEFTIKGGEKVFLEIDGIEAGATITWDLVVGGWELEYGAEYVPASEGGYTLCVERTKKVPAAADEPVHNAFTAKEPGKMVLSIDNSGSRKRKVAAYRYFVRKPSA

SEQ ID NO: 65149 - protein, 394 aa, Triticum aestivum
  peptide (1)..(394): Ceres Seq. ID no. 12460984
MGSLIDATALLRAASFKEDSYVAAALPASDLRALADLRALLATHPDQISIWGVPLNPPSDAPADERTDVVLLKFLRARDFRVRDAHAMLLRCAAWRAEFRADAVLDEDLGFKDLEGIVAYMHGWDRDGHPVCYNAYGVFKDRDMYDRVFGDGDRLSRFLRWRVQIMERGVRALQLRPGGVNAIIQVTDLKDMPKRELRAASNQILSLFQDNYPEMVARKVFVNVPWYFSVLFSMISPFLTERTKSKFVIAREGNVAETLFKFIRPELVPVQYGGLSRASELENGPPKPASEFTIKGGEKVFLEIDGIEAGATITWDLVVGGWELEYGAEYVPASEGGYTLCVERTKKVPAAADEPVHNAFTAKEPGKMVLSIDNSGSRKRKVAAYRYFVRKPSA

SEQ ID NO: 65150 - DNA, 1601 bp, Triticum aestivum
  misc_feature (1)..(1601): Ceres Seq. ID no. 15226213
acctcctctcggacgcctctccaccgcccgaaaaagtgagagacgaccaccgccgctcgccgacgaccagtaggcggcgccgatccggagccgccggttgaggggacgccaccgtacgtgcgcgcatgacagggaaccggcgccaccgccggcgccggagagcgcgaccgcagcaggccgccgaaccctcgccgccgccggcaccagccagcctcagctccagggaagttgctgttgcagcaaggccctctaagaaaatctgtgatgcctctggatctatttcctcatcctcatcgggatctcatgcctgggaaagccttctagacagcctgctccaccaaatcatttcgctcattagctcatttcatgacttccttgctttccgtggcatctgtcactcatggcacgccgcagcctcttccttcccatctgtatataccttcagcttcccacctctccacctcaaaccagatgtaagccaggagagttacaactcagatcggaaatcgcagcttgttgatcctgctaagaaaagtttatcccatcgttgttcagcacctggaattactccacatcccatgcgctatctgggctgctcatatggttatcttatcttctctgataggagacactgccatctcgtcgatgtgtacactggcacaaaggtgaagccaccaaaattccaatctgagagcaacactttgatctaccttggcatccttacggctccactagattcgcccaattcacgtctcatccttttctcgagaatctccatgctccagtggcaggttggaacaaattcttggacagagcaccctcaggttggtgaactcatccatcagattgtgctcttcaaaggccagatgtttgccatggactttgttcaaaggctacataccatacacatatcacctgagctcagcatgcaggaagtagcagttatgtgggaacagagcatgctcgtaggccttcattctaagccatggttggtggtctgtggtgacatgcttctcttggtagatctctcggtaagcatggaccaactgtttggctttcctggcacctttcaagtcttccgcctcgacttctcagttgaaccagctaagtgggtgaagatggataagttggacaattgggctctcttcctcaccaatgataggagaaaccctacattttcttgcatgaaccccgaaagatggggaggaaagagtaactatatttatgttccaacaaaatcagaagattttgatgagccatggactgcaatagaggttggacagccggtgcccagcttgactcaccgtatgtcattcagttccgcagccactgcccattgcagtccactaaatagcctctgggtgcttcccagtttggtttacggggttgaccagtgattggtcatccttgcttgttgcagttgcaaggcttttcttagtctttcacaatgccagtcctgtcgattcctgcttttgtattattcagttagccactaggttctgtaactcccatggtttcttgacttggcaaatgtattgtgtacaagaatgttgatctatattgtctccaggaagtgattgtcctgcactgggtctatgggg

SEQ ID NO: 65151 - protein, 423 aa, Triticum aestivum
  peptide (1)..(423): Ceres Seq. ID no. 15226214
MTGNRRHRRRRRARPQQAAEPSPPPAPASLSSREVAVAARPSKKICDASGSISSSSSGSHAWESLLDSLLHQIISLISSFHDFLAFRGICHSWHAAASSFPSVYTFSFPPLHLKPDVSQESYNSDRKSQLVDPAKKSLSHRCSAPGITPHPMRYLGCSYGYLIFSDRRHCHLVDVYTGTKVKPPKFQSESNTLIYLGILTAPLDSPNSRLILFSRISMLQWQVGTNSWTEHPQVGELIHQIVLFKGQMFAMDFVQRLHTIHISPELSMQEVAVMWEQSMLVGLHSKPWLVVCGDMLLLVDLSVSMDQLFGFPGTFQVFRLDFSVEPAKWVKMDKLDNWALFLTNDRRNPTFSCMNPERWGGKSNYIYVPTKSEDFDEPWTAIEVGQPVPSLTHRMSFSSAATAHCSPLNSLWVLPSLVYGVDQ

SEQ ID NO: 65152 - protein, 272 aa, Triticum aestivum
  peptide (1)..(272): Ceres Seq. ID no. 15226215
MRYLGCSYGYLIFSDRRHCHLVDVYTGTKVKPPKFQSESNTLIYLGILTAPLDSPNSRLILFSRISMLQWQVGTNSWTEHPQVGELIHQIVLFKGQMFAMDFVQRLHTIHISPELSMQEVAVMWEQSMLVGLHSKPWLVVCGDMLLLVDLSVSMDQLFGFPGTFQVFRLDFSVEPAKWVKMDKLDNWALFLTNDRRNPTFSCMNPERWGGKSNYIYVPTKSEDFDEPWTAIEVGQPVPSLTHRMSFSSAATAHCSPLNSLWVLPSLVYGVDQ

SEQ ID NO: 65153 - DNA, 1222 bp, Triticum aestivum
  misc_feature (1)..(1222): Ceres Seq. ID no. 12618205
aaaaaaactaaggcaacgcaacaagacggaatagacccgcaaccgctgcgccctcttccggtcgattcacgttcactgcgagggggaggaggaggaggacggccagcccctgcgcgagacgagcctctacaagggcttctgcggtggctaatttcgggaggtagaagagggaggaggagccatgaacggtggtagcaagcaaacactgatatacagcttcgtggccaagggctccgtggtgctggccgagcacacggccttctctggcaacttcagcaccatcgccgtgcagtgcctccagaagctgccctccaacagcacaaggtccacctactcctgcgatggccacaccttcaacttcctcgtcgaccgtgattttgtgtttcttgtggtggccgaagaggcgctgggaaggagcgtgccgtttgtgttcctagagagggttagggaagacttcatgcagcggtatgggtccagtatcgatgaggagggacaacacccgcttgctgatgacgcggatgaggacgatttcctgtttgaggaccggtttagcatcgcctacaatcttgaccgggaattcgggccaaggttgaaggatcacatgcagtattgtattaatcatccagaggaaattagcaagctctctaaggtgaaatcacatctttcagaggttaaagggatcatgatggacaacatcgagaagatattagatcgtggcgagaagattgaacttttggtgggaaagaccgaaaccttacagtcgcaggccgacagcttccataggcatggcagagagctcaggcgcaagatgtggcttcagaacctgaggtttaagctgatggtcggtggtggcatcgcgtttttgatcctcatcctctggctaatggtttgctggggcttcaagtgctagagagttcagagtcttcattcgccctttttttccttgtcatttgatgttctgtttacggtgtcatgtgcatataatgaccaccaaattatgcttcgctatgttccgaacaaaagttatgtggtgtgagacccttaattcctcatagaccatccttatgttccataagaccatagggatctggagtactcgtgtaagctttatgagagagggggacgtcagtcgattatctgtacattctgaactgcaagcttattgcctggaccttgttttgctcagatcctcttgacgatgatccatgttgcacctagcgcc

SEQ ID NO: 65154 - protein, 242 aa, Triticum aestivum
  peptide (1)..(242): Ceres Seq. ID no. 12618206
MNGGSKQTLIYSFVAKGSVVLAEHTAFSGNFSTIAVQCLQKLPSNSTRSTYSCDGHTFNFLVDRDFVFLVVAEEALGRSVPFVFLERVREDFMQRYGSSIDEEGQHPLADDADEDDFLFEDRFSIAYNLDREFGPRLKDHMQYCINHPEEISKLSKVKSHLSEVKGIMMDNIEKILDRGEKIELLVGKTETLQSQADSFHRHGRELRRKMWLQNLRFKLMVGGGIAFLILILWLMVCWGFKC

SEQ ID NO: 65155 - protein, 150 aa, Triticum aestivum
  peptide (1)..(150): Ceres Seq. ID no. 12618207
MQRYGSSIDEEGQHPLADDADEDDFLFEDRFSIAYNLDREFGPRLKDHMQYCINHPEEISKLSKVKSHLSEVKGIMMDNIEKILDRGEKIELLVGKTETLQSQADSFHRHGRELRRKMWLQNLRFKLMVGGGIAFLILILWLMVCWGFKC

SEQ ID NO: 65156 - DNA, 1475 bp, Triticum aestivum
  misc_feature (1)..(1475): Ceres Seq. ID no. 14301622
attcttttgttgctgccaccgcaccgctggtcatcgatcacgacttgcgtggcgaccaaagcagcagccaccaacatctgtgcataaatgcacacacgtccgtacttgagttgcctctcagcagccagagaaatagagccctgtgctagagctattgccaggagaagagagctcagctcggtagtgatcatcggcgatatggcgacgaggaggaagacggcgtgcgtcaccggcggcagcgggtacatcgcgtcggcgctggtgaagatgctgctggagaagggatacgccgtcaagaccaccgtcagaaaccccgatgacgcggagaagaacgcgcatctcaaggccttggcagcgctcggctccttggaggtcttccgcgccgatctgaacgaggagggcagcttcgaccacgccgtcgccggctgcgactacgccttcctcgtcgccgctccggtgagcctcatgccagagaaccctgagaaagacgtgatcgagccggccgtccacgggaccctgaacgtgatgaagtcgtgcgtgagagcggggacggtgaagcgagtggtcctcacatcgtcggtggcgggggtgtccagccggccgctggaaggcgacggccatgtccttgacgaggaatcctggtccgacgtggagttcctcagatcaacaaagaccggtccctgggcgtactccgtctcgaaggtgcttgtggagaaggcggcgatggcgttcgcggaggacaagggcatcagcctggtcaccgtgtgcccggccgtcacggtgggcgaggcgccggcggcgaacgacctcaccagcgtcagcatcatcctctccctgctgtccggggatgatgcgtatgccggcgccctggagcacatcgagagggcgacgggctcgatcccgattctgcacatcgaggacctctgccgagcggagatgttcgtggccgaggaggaggccgcgtcggggcggtacatcgtctgcggcctcaaccccaccgccgtcgagattgcccgcttcttggctgccaactacccgcagtacaaggtcaatacagataggttcagagatctccctgagaagccgagagtctgcatttcgtcggcgaagctcgtcaaggaagggtttgagtacaagtacaagaacctggacggaatatatggcagcgtcgtcgagtatggaagggccttgggaatccttccctactaagaagtatgatcgatcttagaatcagacgatgcgcttggaagcaaaataagccttttagtctcctgaagtacacaaatgatgaaatgtgggtgttcagttcatatgaaaaatgtattataaaatgtactgtagtacttgtatggaaagtgatagttgtgtctgatgagagcatgctcagtcatggtgaaaaaagccatagtcgtgcacgtagataaaccgccattaaaatctcccccaacgcagaagaagccttcttgttttcctcc

SEQ ID NO: 65157 - protein, 373 aa, Triticum aestivum
  peptide (1)..(373): Ceres Seq. ID no. 14301623
MHTRPYLSCLSAAREIEPCARAIARRRELSSVVIIGDMATRRKTACVTGGSGYIASALVKMLLEKGYAVKTTVRNPDDAEKNAHLKALAALGSLEVFRADLNEEGSFDHAVAGCDYAFLVAAPVSLMPENPEKDVIEPAVHGTLNVMKSCVRAGTVKRVVLTSSVAGVSSRPLEGDGHVLDEESWSDVEFLRSTKTGPWAYSVSKVLVEKAAMAFAEDKGISLVTVCPAVTVGEAPAANDLTSVSIILSLLSGDDAYAGALEHIERATGSIPILHIEDLCRAEMFVAEEEAASGRYIVCGLNPTAVEIARFLAANYPQYKVNTDRFRDLPEKPRVCISSAKLVKEGFEYKYKNLDGIYGSVVEYGRALGILPY

SEQ ID NO: 65158 - protein, 336 aa, Triticum aestivum
  peptide (1)..(336): Ceres Seq. ID no. 14301624
MATRRKTACVTGGSGYIASALVKMLLEKGYAVKTTVRNPDDAEKNAHLKALAALGSLEVFRADLNEEGSFDHAVAGCDYAFLVAAPVSLMPENPEKDVIEPAVHGTLNVMKSCVRAGTVKRVVLTSSVAGVSSRPLEGDGHVLDEESWSDVEFLRSTKTGPWAYSVSKVLVEKAAMAFAEDKGISLVTVCPAVTVGEAPAANDLTSVSIILSLLSGDDAYAGALEHIERATGSIPILHIEDLCRAEMFVAEEEAASGRYIVCGLNPTAVEIARFLAANYPQYKVNTDRFRDLPEKPRVCISSAKLVKEGFEYKYKNLDGIYGSVVEYGRALGILPY

SEQ ID NO: 65159 - protein, 313 aa, Triticum aestivum
  peptide (1)..(313): Ceres Seq. ID no. 14301625
MLLEKGYAVKTTVRNPDDAEKNAHLKALAALGSLEVFRADLNEEGSFDHAVAGCDYAFLVAAPVSLMPENPEKDVIEPAVHGTLNVMKSCVRAGTVKRVVLTSSVAGVSSRPLEGDGHVLDEESWSDVEFLRSTKTGPWAYSVSKVLVEKAAMAFAEDKGISLVTVCPAVTVGEAPAANDLTSVSIILSLLSGDDAYAGALEHIERATGSIPILHIEDLCRAEMFVAEEEAASGRYIVCGLNPTAVEIARFLAANYPQYKVNTDRFRDLPEKPRVCISSAKLVKEGFEYKYKNLDGIYGSVVEYGRALGILPY

SEQ ID NO: 65160 - DNA, 1187 bp, Triticum aestivum
  misc_feature (1)..(1187): Ceres Seq. ID no. 13597477
atagaggaaaactttcgaggactatgacgatggggcgcaacttggcggcggtgctcgtcgtgcttgcctgcctcgtttccctcgcgtcggcgcagcaggtcaagacgacggacacgcggtggagctaccgtctgccgctgcccgacggcgtcagcggcgccgagagcctcgcgttcgccggcaaggacggggtctacaccggcgtctccgacgggcgcgttctcaggtggggcgggagcgccgccggctggaccaccttcgcttacaatgccaactacaggaaaattcctctgtgctcggattctggggtgccgtcggaacaaaaggagagcatatgcgggcggccgctgggtgtccggttcaacaggaagaccggcgagctctacatcgccgacgcctacttggggctcatgaaggtcggcccggaaggcggcgaagcccaggtgctagcgacggaggcgaacggcatccccttccacttcctcaacggnctcgacgttgatcaggcgaccggcgatgtctacttcaccgacagcagcgccaactacccccggaggttcaacacggagatcatcatgaacgccgacgcgaccggccgcctgctcaagtacgacgcacgcacgaagctcgtcacggtgctcaaggcggagctgccgtacccgaacggcgtcgcgctcagccgcgacaggacgcacctggtggtggcgcacacggtgccgtgccaggcgttccggtactggctcaaggggcccaaggccgggcagtacgagctcttcgccgacctgccggggtacccggacaacgtgaggcgcgacgggcagggcggtttctgggtggcgctcaaccaggagaaggcgcggctcaacgcgacggcggctccggtgaagcacttggtcggcgtccgtctcggcgccgacggcgtggaggtcgaggagctgacggccgccaggggcgtgacgctcagcgaggtggcggagcagaacggcaacaagctgtggctgggctccgtcgagcttgattatataggcctcttcgtttgatcgattatgtgccagcgcctttatggatttgtacgggttcgttagtggttgtctcattgagttagtagacagagttaaaggtcatggcttcgtacggtttcaggactacatgcaacgtttttctacagatgtaattatgcgagtatt

SEQ ID NO: 65161 - protein, 345 aa, Triticum aestivum
  peptide (1)..(345): Ceres Seq. ID no. 13597478
  misc_feature (163)..(163): Xaa is any aa, unknown or other
RGKLSRTMTMGRNLAAVLVVLACLVSLASAQQVKTTDTRWSYRLPLPDGVSGAESLAFAGKDGVYTGVSDGRVLRWGGSAAGWTTFAYNANYRKIPLCSDSGVPSEQKESICGRPLGVRFNRKTGELYIADAYLGLMKVGPEGGEAQVLATEANGIPFHFLNXLDVDQATGDVYFTDSSANYPRRFNTEIIMNADATGRLLKYDARTKLVTVLKAELPYPNGVALSRDRTHLVVAHTVPCQAFRYWLKGPKAGQYELFADLPGYPDNVRRDGQGGFWVALNQEKARLNATAAPVKHLVGVRLGADGVEVEELTAARGVTLSEVAEQNGNKLWLGSVELDYIGLFV

SEQ ID NO: 65162 - protein, 338 aa, Triticum aestivum
  peptide (1)..(338): Ceres Seq. ID no. 13597479
  misc_feature (156)..(156): Xaa is any aa, unknown or other
MTMGRNLAAVLVVLACLVSLASAQQVKTTDTRWSYRLPLPDGVSGAESLAFAGKDGVYTGVSDGRVLRWGGSAAGWTTFAYNANYRKIPLCSDSGVPSEQKESICGRPLGVRFNRKTGELYIADAYLGLMKVGPEGGEAQVLATEANGIPFHFLNXLDVDQATGDVYFTDSSANYPRRFNTEIIMNADATGRLLKYDARTKLVTVLKAELPYPNGVALSRDRTHLVVAHTVPCQAFRYWLKGPKAGQYELFADLPGYPDNVRRDGQGGFWVALNQEKARLNATAAPVKHLVGVRLGADGVEVEELTAARGVTLSEVAEQNGNKLWLGSVELDYIGLFV

SEQ ID NO: 65163 - protein, 336 aa, Triticum aestivum
  peptide (1)..(336): Ceres Seq. ID no. 13597480
  misc_feature (154)..(154): Xaa is any aa, unknown or other
MGRNLAAVLVVLACLVSLASAQQVKTTDTRWSYRLPLPDGVSGAESLAFAGKDGVYTGVSDGRVLRWGGSAAGWTTFAYNANYRKIPLCSDSGVPSEQKESICGRPLGVRFNRKTGELYIADAYLGLMKVGPEGGEAQVLATEANGIPFHFLNXLDVDQATGDVYFTDSSANYPRRFNTEIIMNADATGRLLKYDARTKLVTVLKAELPYPNGVALSRDRTHLVVAHTVPCQAFRYWLKGPKAGQYELFADLPGYPDNVRRDGQGGFWVALNQEKARLNATAAPVKHLVGVRLGADGVEVEELTAARGVTLSEVAEQNGNKLWLGSVELDYIGLFV

SEQ ID NO: 65164 - DNA, 582 bp, Triticum aestivum
  misc_feature (1)..(582): Ceres Seq. ID no. 13662788
cctaatcgaaaaccgtctcgtctcccccaaccaggcgaaaaccagcatcgcgaacggcaccagaccaaacccccgaatccgagccaaggagcaagggcaaaaccccatctgcggcggcggcggcggcggcggcggcggcgatggagtcggtggaggcgctcgtggcgcacatccagggtctctccgggagcccggacgagctggcgcagctccacggcctcctcaagcaggccgacggcgacgccctgcgcgtccactccgccggcctcctgcccttcctctcccacctccaccccggcgcccactccctcggctacctctacctcctggattctttcgtgtcgtcgtctgctaatctgagggcgcacgccggcggggaccttcttgtgaccgtggccgatttcctcacctcttgctcggccgaccagatacgcatggcgcccgacaaatttttgaatgtctgtagggtgctcaagaacgaggtcatgcagctcaatgcgccgatccgagggattgctccgcttcgggctgctgtccgcaagatccagacatcgtcagagcagcttaccccactccacgctg

SEQ ID NO: 65165 - protein, 147 aa, Triticum aestivum
  peptide (1)..(147): Ceres Seq. ID no. 13662789
MESVEALVAHIQGLSGSPDELAQLHGLLKQADGDALRVHSAGLLPFLSHLHPGAHSLGYLYLLDSFVSSSANLRAHAGGDLLVTVADFLTSCSADQIRMAPDKFLNVCRVLKNEVMQLNAPIRGIAPLRAAVRKIQTSSEQLTPLHA

SEQ ID NO: 65166 - protein, 119 aa, Triticum aestivum
  peptide (1)..(119): Ceres Seq. ID no. 13662790
PNRKPSRLPQPGENQHRERHQTKPPNPSQGARAKPHLRRRRRRRRRRWSRWRRSWRTSRVSPGARTSWRSSTASSSRPTATPCASTPPASCPSSPTSTPAPTPSATSTSWILSCRRLLI

SEQ ID NO: 65167 - protein, 117 aa, Triticum aestivum
  peptide (1)..(117): Ceres Seq. ID no. 13662791
LIENRLVSPNQAKTSIANGTRPNPRIRAKEQGQNPICGGGGGGGGGDGVGGGARGAHPGSLREPGRAGAAPRPPQAGRRRRPARPLRRPPALPLPPPPRRPLPRLPLPPGFFRVVVC

SEQ ID NO: 65168 - DNA, 958 bp, Triticum aestivum
  misc_feature (1)..(958): Ceres Seq. ID no. 13598557
aaccatttcacctcacaacacttctcatcttggagctcagcagcacagcatccaagcttcttcttcggcaagatgaacaggaagccaggcgactgggactgcaggtcgtgccagcacctcaacttcagtcgccgggacctatgccagcgctgcggcgagccacgcagtgccgctgaccgtggcagcgtcggtggcgctcttggtggtgactacgccaactttggcggccgtggcgggggtggttcctcctttggtaccggctttggtgccggctctgacgtccgcccgggcgactggtactgcacctgcggggcgcacaacttcgccagccgctccagctgcttcaagtgtgctgccttcaaggaggaagctgccgtcaatggtggcgctggtggctttgatggtgacatgtcacgctcaaggggcttcggcttcggcgctgtcggtggcatgggtggcggcatgggagccggcgcggccggtggtcgtgccagccgccctggctggaagtctggcgactggatttgcaccaggtctggatgcaacgagcacaacttcgccagcaggcaggagtgcttcaggtgcaacgcaccgagggactccggtagcgccacgccatacgaaaatttcttgcactgaggtgtaggaaggccgcggcgatgagcagaagcagcaaagggtgtccgtgtcccgcagtcgacatcatcatcataagaagaagaagaagaaagtagaatgcaaagaaatcctcctcgagtgcatgcttactagttttgtctcttcccgttttagatttggttgtcatttcccatttgggaccgtccgtctgtccgtctgatcgatgatgactagctatgtttaccgttttattatttccgttcctttcatcaagtttgcagttcgagttatgtaacccaaagacgtatgctttgcttcagaagtattattgactagtagt

SEQ ID NO: 65169 - protein, 212 aa, Triticum aestivum
  peptide (1)..(212): Ceres Seq. ID no. 13598558
NHFTSQHFSSWSSAAQHPSFFFGKMNRKPGDWDCRSCQHLNFSRRDLCQRCGEPRSAADRGSVGGALGGDYANFGGRGGGGSSFGTGFGAGSDVRPGDWYCTCGAHNFASRSSCFKCAAFKEEAAVNGGAGGFDGDMSRSRGFGFGAVGGMGGGMGAGAAGGRASRPGWKSGDWICTRSGCNEHNFASRQECFRCNAPRDSGSATPYENFLH

SEQ ID NO: 65170 - protein, 188 aa, Triticum aestivum
  peptide (1)..(188): Ceres Seq. ID no. 13598559
MNRKPGDWDCRSCQHLNFSRRDLCQRCGEPRSAADRGSVGGALGGDYANFGGRGGGGSSFGTGFGAGSDVRPGDWYCTCGAHNFASRSSCFKCAAFKEEAAVNGGAGGFDGDMSRSRGFGFGAVGGMGGGMGAGAAGGRASRPGWKSGDWICTRSGCNEHNFASRQECFRCNAPRDSGSATPYENFLH

SEQ ID NO: 65171 - DNA, 1180 bp, Triticum aestivum
  misc_feature (1)..(1180): Ceres Seq. ID no. 13597481
aaattgtacacagccgctggtgacacacaactggtaacgtgcggcagccaggggaactatgacggggcagccgccgaggctcgtgttccggttcacccaggcggaggtcgccaagatggaggaggtcctccgtgagctcgacgccatgcccaagcgtcctgtcatccagggcctaatcgatcacttcaacgcctccccggaccgctcaggcgacggcaaggtccccgtccagtacaatcaggtgaggaattggttccataaccggaggtccgcgcaatcccagcggtccaggaagatgatgctaccccctgttaacgaggaacaccacccagtggccggatcctactcagggaatatttcttcggatggtggtcatgtccagtttgaagcaaagtcggctagaaatggagcatggtacaatgttgctgcctttctgtcccacaggttcattgacacgagggacccggaagtactagttcgattttgttggcttggacctgaggaggatgaatggattgatgtttgtaaaggtgtgagactgcgttctcttcaatgtgttgctgtgcttcctggggatctcattctttgttttaaggaaggcaaagagcaggcctgctattttgatgcacatgttcttcaagttcaaagacgcaggcatgacataagggggtgccgctgcaggtttcttgtttgttatgatcatgatcactctgaggagtttgttccactgagcaaggtatgtcgtcgaccaatgcaccagacaaccgaaaagccacacaaaatgatgagtgtcaacactgacaaggtgaccgggggagcggttcccattccaccagatcaaggagggccatctgacaaggcggttgctcccttactagacacacctactagcacctgcagctattcagtggcagatgttgagatgggggatgcggaggctgccccaaacagtgaagctgcaaatgaagcacatgtcgacaagatgaatctgggagtgtagttctttcgcttcccagtgcatttcgttgtgaactttctagcgaataatgtttgcctcagaacttccaaaagaggaaggatggttacccagtaactgtaatgtgcccatgttgactggattgcttgtgtggtgcaaaaattgttggattggttatctatatctatatagctatgtcgtcgg

SEQ ID NO: 65172 - protein, 313 aa, Triticum aestivum
  peptide (1)..(313): Ceres Seq. ID no. 15222110
MTGQPPRLVFRFTQAEVAKMEEVLRELDAMPKRPVIQGLIDHFNASPDRSGDGKVPVQYNQVRNWFHNRRSAQSQRSRKMMLPPVNEEHHPVAGSYSGNISSDGGHVQFEAKSARNGAWYNVAAFLSHRFIDTRDPEVLVRFCWLGPEEDEWIDVCKGVRLRSLQCVAVLPGDLILCFKEGKEQACYFDAHVLQVQRRRHDIRGCRCRFLVCYDHDHSEEFVPLSKVCRRPMHQTTEKPHKMMSVNTDKVTGGAVPIPPDQGGPSDKAVAPLLDTPTSTCSYSVADVEMGDAEAAPNSEAANEAHVDKMNLGV

SEQ ID NO: 65173 - protein, 294 aa, Triticum aestivum
  peptide (1)..(294): Ceres Seq. ID no. 15222111
MEEVLRELDAMPKRPVIQGLIDHFNASPDRSGDGKVPVQYNQVRNWFHNRRSAQSQRSRKMMLPPVNEEHHPVAGSYSGNISSDGGHVQFEAKSARNGAWYNVAAFLSHRFIDTRDPEVLVRFCWLGPEEDEWIDVCKGVRLRSLQCVAVLPGDLILCFKEGKEQACYFDAHVLQVQRRRHDIRGCRCRFLVCYDHDHSEEFVPLSKVCRRPMHQTTEKPHKMMSVNTDKVTGGAVPIPPDQGGPSDKAVAPLLDTPTSTCSYSVADVEMGDAEAAPNSEAANEAHVDKMNLGV

SEQ ID NO: 65174 - protein, 284 aa, Triticum aestivum
  peptide (1)..(284): Ceres Seq. ID no. 15222112
MPKRPVIQGLIDHFNASPDRSGDGKVPVQYNQVRNWFHNRRSAQSQRSRKMMLPPVNEEHHPVAGSYSGNISSDGGHVQFEAKSARNGAWYNVAAFLSHRFIDTRDPEVLVRFCWLGPEEDEWIDVCKGVRLRSLQCVAVLPGDLILCFKEGKEQACYFDAHVLQVQRRRHDIRGCRCRFLVCYDHDHSEEFVPLSKVCRRPMHQTTEKPHKMMSVNTDKVTGGAVPIPPDQGGPSDKAVAPLLDTPTSTCSYSVADVEMGDAEAAPNSEAANEAHVDKMNLGV

SEQ ID NO: 65175 - DNA, 1075 bp, Triticum aestivum
  misc_feature (1)..(1075): Ceres Seq. ID no. 13597604
gaaaagctttaaaagggacgggcaggcgactcaccccaccctctccctccccagcccaaaaaatttcctcgcccctccccgaagaatcccaccaccacaaccactgccacgaagaaccaatccgccccctcgcctcccccagggccgccggttcccccccgagaagggtaaatgggatcagaagggccttcaatcgtgactgtacatgttactggatttaagaagttccatggtgttgctgagaacccgacagagaaacttgtgaccaacattaaatcgttcattgaaaagagagggttgccgaaaaatcttgtacttggaagctgcgaaattctcgaaacagccgggcagggggcgcttggaacattatataaagttctagaatctgccattgcagatagagagaacgggtcatcagctcaggggcaaataatttgggtccactttggggtaaatagtggtgcatcacggtttgctcttgagaatcaagctgtgaatgaagccaccttccgctgcccagatgagcttgggtggaaacctcagagagtgcctattgtgccatctgatggaagcatctcacggacaagagagactacactgccagtgaaggagttaaccaagtcactccgaaagacaggctacgatgtgatgccttcggatgacgcggggagattcgtgtgcaactatgtgtactaccactccctccggtttgcagagcagcacggcatcaagtctctgtttgtgcatgtgcccctcttctcgacagtcgacgaggaggtccagatccatttcgtcgcttccctcgtcgaagctcttgctagcttgaactaggaacggcaacttaaaaggtcagcggtttgacctggacgatgtaaagttggacgcagactgaataagattgtgtggtgattggcgcctattggtcagatcttgctccaaaaagggtgtatttaaggggagagaaaaagaaaaacgatgcttagagtgtgtgtgaaatgccggcttgcatgccatcagttacatgtccttaacttgcatgaaaacctggttccaataaaattgacagatcattggg

SEQ ID NO: 65176 - protein, 219 aa, Triticum aestivum
  peptide (1)..(219): Ceres Seq. ID no. 15222146
MGSEGPSIVTVHVTGFKKFHGVAENPTEKLVTNIKSFIEKRGLPKNLVLGSCEILETAGQGALGTLYKVLESAIADRENGSSAQGQIIWVHFGVNSGASRFALENQAVNEATFRCPDELGWKPQRVPIVPSDGSISRTRETTLPVKELTKSLRKTGYDVMPSDDAGRFVCNYVYYHSLRFAEQHGIKSLFVHVPLFSTVDEEVQIHFVASLVEALASLN

SEQ ID NO: 65177 - DNA, 1372 bp, Triticum aestivum
  misc_feature (1)..(1372): Ceres Seq. ID no. 15225093
ctccgtccccccgcgtccccattgccttctccgttcccccaccccgtacctcgtcggcgggcggcgacgcgacgcgacgcgacgagagcggcggcggcgccggcgggggcaggaatgcggatgttctccaaggcctgctcgctcgtcgtctcctccctcccgcgctgctcctcctccgcccccgcgattagggggcagccgtcgttgataccgagggtgagcaggaaatggctcgggaagccgctcatgtacgggatcggcacgctgctggttatgcccctgaggacgatccacggtgtgggccggatgttcggcgccgcgcggtacctctgcaacatgaccagcgtctcctcgtcgcttcaaatcgagctcgtaccctgtcttcaagataactatgcgtacatcttgcatgatgtggatactggaacagttggagttgtagacccttctgaggcggtgcctatcataaacgcattggaaaagagaaaccagaacttgacctacatattaaacacccatcatcactatgatcatactggtggcaacttggaactgaaggcgaaatatggtgcaaaggtaattggttctgagaaggataaagatcgaattcctggcattgacataactctaagcgagggtgacacatggatgtttgcgggtcatcaagttcttgtgatggaaactcctggtcatacatcaggtcatgtgagcttttatttccctggatctggagcaatattcacaggtgataccttgtttagtctatcatgtggaaagctttttgaggggactccagaacagatgtactcttcactccaaaaaattgtagctcttccagatgtgacgaaggtgtactgtggacatgaatatactctgagcaattcaaggtttgccttgagcatagaaccaggaaatgaagaacttcaggaatacgctgcaagtacagctgatctgcgcaataagaatacaccaacggtgccaacaacaattgcgagagagaagcagtgcaatcctttcttgaggacctcaagtccagagataaagaaaaggctgtccattccagatcatttcgatgatgcacgtgttcttgaagttatccgacgggcgaaggataatttttgactaaccacaaaggaaattatcataaaacggtgacccaaccatctcttcgaaaaggagaagtggacaaagaacccggcaagaccacaacagaaggaatgcagggaaggaaatgtgtatagctcgatgttccaaaaatgctttggtgaaaatttgtctagcattgtatgtagcttgcacagagtgcttgttaatctgatagcagctggtgattcttttgtcgactacaaataaaatgtgtcctgtaatcctc

SEQ ID NO: 65178 - protein, 373 aa, Triticum aestivum
  peptide (1)..(373): Ceres Seq. ID no. 15225094
LRPPASPLPSPFPHPVPRRRAATRRDATRAAAAPAGAGMRMFSKACSLVVSSLPRCSSSAPAIRGQPSLIPRVSRKWLGKPLMYGIGTLLVMPLRTIHGVGRMFGAARYLCNMTSVSSSLQIELVPCLQDNYAYILHDVDTGTVGVVDPSEAVPIINALEKRNQNLTYILNTHHHYDHTGGNLELKAKYGAKVIGSEKDKDRIPGIDITLSEGDTWMFAGHQVLVMETPGHTSGHVSFYFPGSGAIFTGDTLFSLSCGKLFEGTPEQMYSSLQKIVALPDVTKVYCGHEYTLSNSRFALSIEPGNEELQEYAASTADLRNKNTPTVPTTIAREKQCNPFLRTSSPEIKKRLSIPDHFDDARVLEVIRRAKDNF

SEQ ID NO: 65179 - protein, 335 aa, Triticum aestivum
  peptide (1)..(335): Ceres Seq. ID no. 15225095
MRMFSKACSLVVSSLPRCSSSAPAIRGQPSLIPRVSRKWLGKPLMYGIGTLLVMPLRTIHGVGRMFGAARYLCNMTSVSSSLQIELVPCLQDNYAYILHDVDTGTVGVVDPSEAVPIINALEKRNQNLTYILNTHHHYDHTGGNLELKAKYGAKVIGSEKDKDRIPGIDITLSEGDTWMFAGHQVLVMETPGHTSGHVSFYFPGSGAIFTGDTLFSLSCGKLFEGTPEQMYSSLQKIVALPDVTKVYCGHEYTLSNSRFALSIEPGNEELQEYAASTADLRNKNTPTVPTTIAREKQCNPFLRTSSPEIKKRLSIPDHFDDARVLEVIRRAKDNF

SEQ ID NO: 65180 - protein, 333 aa, Triticum aestivum
  peptide (1)..(333): Ceres Seq. ID no. 15225096
MFSKACSLVVSSLPRCSSSAPAIRGQPSLIPRVSRKWLGKPLMYGIGTLLVMPLRTIHGVGRMFGAARYLCNMTSVSSSLQIELVPCLQDNYAYILHDVDTGTVGVVDPSEAVPIINALEKRNQNLTYILNTHHHYDHTGGNLELKAKYGAKVIGSEKDKDRIPGIDITLSEGDTWMFAGHQVLVMETPGHTSGHVSFYFPGSGAIFTGDTLFSLSCGKLFEGTPEQMYSSLQKIVALPDVTKVYCGHEYTLSNSRFALSIEPGNEELQEYAASTADLRNKNTPTVPTTIAREKQCNPFLRTSSPEIKKRLSIPDHFDDARVLEVIRRAKDNF

SEQ ID NO: 65181 - DNA, 1582 bp, Triticum aestivum
  misc_feature (1)..(1582): Ceres Seq. ID no. 14303165
atttcgagacaattatgctgtgctggtccgtcgcactcgcacggaagaaaaggcccggagcgcagagacggccaaatgagttgctcataattccgtctcgctgctggttcgtttagcgccattctcccaggctgctacgaaactcagggccgcgtccgcgtcaatggcttcttgctgctgcccaatcattgcctggttcgtctctttcctcctcgtcttccccgtcctcgtctcctccgcgacggcgggcaatggcagcacattcggggaggagcagctcgggctccggcggatgaaggcccggctcgccagggtcagggaagcctctgtcaagacgatccagagccccgacggcgacgtcatagactgcgtgccctctcacctgcagcccgcgttcgatcatcccaggctgagaggccagaaaccagaggacgaacctgcggcgcggccagggaatgccggcgccgtggcagacgacgaggaggaggtcttgccgcagacgtggaggagctccggcgagtggtgccccaaggggacgataccggttaggcgggcgacggagggcgacctgctcagggccagctccgtccggaggttcgggatgaagccccggagtgccgcggcacggcgggactccaccagcaacggccatgagcacgcggtggggtacgtgagcggcgggcagttctacggcgccaaggcgagcctgaacgtgtggccggcgcacgtgtcgtcgccggcggagttcagcctgtcccagatctgggtcatctccggctccttcggcaacgacctcaacaccatcgaggccggctggcaggtcagccctgagctgtacggggacaacagccccaggttcttcacctactggaccaacgacgcgtaccaggagacggggtgctacaacctgcactgcgcggggttcgtgcagaccaacggccgggtggtgatcggcgccgccatcacgccggtgtcggcctacggcggccggcagttcgacatcacgctcatgatctggaaggaccccaagaagggcaactggtggctgcagctgggcccgtcgggcgcgctcgtgggctactggccgtcctccctcttcacccacctgggcgcgcgcggccgcggcggcgccgacatggtgcagttcggcggcgaggcggtcaacacgcggccgtccgggtcgcacacgcccacgcagatgggcagcggccggttccccggcgaagggtacggccgcgcggcctacttccggaacgtgcaggtcgtggactgggacaacaacctcatcccggcggccgggctacggctcctcgccgaccacccggggtgctacgacatcgccggcggccagggcggcgcgtggggcagctacttctactacggcgggcctggcaggaacgtccggtgcccctagaaccgatactgcttactcaggccacagatgctaattccagcaaaattaatataccacaaaagtctttagttataatttctttgcatgcatgcttgtttatgatcatagatagagtttttttgcactcgaatttatttgaaaggagggacattgactcgcattgcacgc

SEQ ID NO: 65182 - protein, 416 aa, Triticum aestivum
  peptide (1)..(416): Ceres Seq. ID no. 14303166
MASCCCPIIAWFVSFLLVFPVLVSSATAGNGSTFGEEQLGLRRMKARLARVREASVKTIQSPDGDVIDCVPSHLQPAFDHPRLRGQKPEDEPAARPGNAGAVADDEEEVLPQTWRSSGEWCPKGTIPVRRATEGDLLRASSVRRFGMKPRSAAARRDSTSNGHEHAVGYVSGGQFYGAKASLNVWPAHVSSPAEFSLSQIWVISGSFGNDLNTIEAGWQVSPELYGDNSPRFFTYWTNDAYQETGCYNLHCAGFVQTNGRVVIGAAITPVSAYGGRQFDITLMIWKDPKKGNWWLQLGPSGALVGYWPSSLFTHLGARGRGGADMVQFGGEAVNTRPSGSHTPTQMGSGRFPGEGYGRAAYFRNVQVVDWDNNLIPAAGLRLLADHPGCYDIAGGQGGAWGSYFYYGGPGRNVRCP

SEQ ID NO: 65183 - protein, 373 aa, Triticum aestivum
  peptide (1)..(373): Ceres Seq. ID no. 14303167
MKARLARVREASVKTIQSPDGDVIDCVPSHLQPAFDHPRLRGQKPEDEPAARPGNAGAVADDEEEVLPQTWRSSGEWCPKGTIPVRRATEGDLLRASSVRRFGMKPRSAAARRDSTSNGHEHAVGYVSGGQFYGAKASLNVWPAHVSSPAEFSLSQIWVISGSFGNDLNTIEAGWQVSPELYGDNSPRFFTYWTNDAYQETGCYNLHCAGFVQTNGRVVIGAAITPVSAYGGRQFDITLMIWKDPKKGNWWLQLGPSGALVGYWPSSLFTHLGARGRGGADMVQFGGEAVNTRPSGSHTPTQMGSGRFPGEGYGRAAYFRNVQVVDWDNNLIPAAGLRLLADHPGCYDIAGGQGGAWGSYFYYGGPGRNVRCP

SEQ ID NO: 65184 - protein, 270 aa, Triticum aestivum
  peptide (1)..(270): Ceres Seq. ID no. 14303168
MKPRSAAARRDSTSNGHEHAVGYVSGGQFYGAKASLNVWPAHVSSPAEFSLSQIWVISGSFGNDLNTIEAGWQVSPELYGDNSPRFFTYWTNDAYQETGCYNLHCAGFVQTNGRVVIGAAITPVSAYGGRQFDITLMIWKDPKKGNWWLQLGPSGALVGYWPSSLFTHLGARGRGGADMVQFGGEAVNTRPSGSHTPTQMGSGRFPGEGYGRAAYFRNVQVVDWDNNLIPAAGLRLLADHPGCYDIAGGQGGAWGSYFYYGGPGRNVRCP

SEQ ID NO: 65185 - DNA, 1157 bp, Triticum aestivum
  misc_feature (1)..(1157): Ceres Seq. ID no. 12617447
tccctaaaatcttccccaaaacccccattgctccgcgatgagacccgcagcaacagcggtagcagccaccgccgccgcgctccgagccgcgttcctcgcccctcccgctgccgccttccgcctcctccctccccgccgtgtcttcctcctccccctgcaccgcctctcctcctcctcgtccccggtcgcccctccttgcgccgcttcctccgactcccagccgccgccgttgcctgccttcatggacgcgcagttcgagtccttccgggcgcagctcgatggctcctccgccctccgcgaccgcatccgcgccgtcgtctccgaggtcgagtcagcctcccgggccgcctccgctgcgctcctcctcatccaccagcccgtccccctatctgatgtgctcggcaaggcgaaggcgcaggtggaggtgatcaaggggctgtactctcagctcgcggagatcctcaaagagtgccccggtcagtactacaggtaccatggggactggaagagtgagacacagtctgtggtgtcgatgctagcgttcacgcactggctcgagactggtggcctgctcacgcacgccgaggcccaggaaaagctaggattgggttctggggagtttggcctggacgttgaagactacctgactggattgtgcttcatgtccaatgattttcctagatatgtagtgaatcgggtcacggcgggtgactacgactgcccacggaaggtgctaagctttttgactgatctgcatgcttcatttaggatgctgaatctgcgcaatgacttcttgcgtaagaaatttgatgggatgaagtatgatttgagaagggtggaggaagtattttatgatgtgaagatacgcggacttgtccctggggagtcaaagcaggaggttgctcagtcatagacggtgagcggtgccgtaccatttacttgcaatcgacagctgtcatgtgttgtcgtcgttaccgatgatgtttatgttggaccgatggttcctagaaaaagctcatgctgtgaggatctctttttttgactgtagcatcgctttaagttcggcactttttcggacccacctagaggttggaaaatgacatgagaattattctgttgcaaaaaaaaaaaaaaaaaagcttatcgataccgtcgac

SEQ ID NO: 65186 - protein, 291 aa, Triticum aestivum
  peptide (1)..(291): Ceres Seq. ID no. 12617448
MRPAATAVAATAAALRAAFLAPPAAAFRLLPPRRVFLLPLHRLSSSSSPVAPPCAASSDSQPPPLPAFMDAQFESFRAQLDGSSALRDRIRAVVSEVESASRAASAALLLIHQPVPLSDVLGKAKAQVEVIKGLYSQLAEILKECPGQYYRYHGDWKSETQSVVSMLAFTHWLETGGLLTHAEAQEKLGLGSGEFGLDVEDYLTGLCFMSNDFPRYVVNRVTAGDYDCPRKVLSFLTDLHASFRMLNLRNDFLRKKFDGMKYDLRRVEEVFYDVKIRGLVPGESKQEVAQS

SEQ ID NO: 65187 - protein, 223 aa, Triticum aestivum
  peptide (1)..(223): Ceres Seq. ID no. 12617449
MDAQFESFRAQLDGSSALRDRIRAVVSEVESASRAASAALLLIHQPVPLSDVLGKAKAQVEVIKGLYSQLAEILKECPGQYYRYHGDWKSETQSVVSMLAFTHWLETGGLLTHAEAQEKLGLGSGEFGLDVEDYLTGLCFMSNDFPRYVVNRVTAGDYDCPRKVLSFLTDLHASFRMLNLRNDFLRKKFDGMKYDLRRVEEVFYDVKIRGLVPGESKQEVAQS

SEQ ID NO: 65188 - DNA, 1583 bp, Triticum aestivum
  misc_feature (1)..(1583): Ceres Seq. ID no. 13655915
gtgtgcttgccagcagtttgttgctcttcctcctccgccgccgctggaatggcactgccaaacatggccggcgacgccctcagggtagtcgacctcccgggccgcggccgcgcgctcctcgccgcccgcgacatcctcgagggcgaggtgctcctgtcggagtcgcccatcctcctctacccgtcctcgctcgcctccctctcctcctactgctccgcctgcttccgctcgctcccaccgccgccccacaccccctgcccttcctgccgcgccgccgccttctgctcccctgcctgcgccgccgcctcccacccgcgcctcctctgcgccgcgctctccagcggcctcgccgccgcccccgaggcgcaacaggagcccctcctcttcctcctctcggcctactcgctccaggagccctctctcagcgccatcctctctctctcctcggcaccctctccgacccagcagcaagacgccgcgggcctccacgccgcggtggcgtcggtggcgccgccgcacacgctgcccgcgggcttctcgctggacctcacggtggctctcctctccaaggaccggaccaacagcttctcgatcctggagccataccgccccgacgtgccgctggaggtccgcaaggcgcggtgctgcgcggtgtaccctcgcgcgtcactgctcaaccacgactgcctgcccaatgcttgccacttcgattatgccgacaggccggggccagggaacacggacatcgtcgtgcgctctctccatggtataacagaggggaaggaggtttgcatcagctatttcgcggccaattggaggtatgctgacaggcaacgcaggctgctggaggattatgggttccggtgtgagtgtgatcggtgtcagattgagagcaagtggaagtttgatgatgataatgatggtgctgatggggatgacaccatggaagaggagcatggcaaggaggtcgctgaagatggcggtgatgaggggatggagcaggaggaagggagtgacgacgatgacgacgatttcccgcatgccttcttctttgtgaggtatctgtgtgatcgtgaggactgctatggcatgcttgcgccgctgccacccttaccgaacggtgagctgtcccatgtatttgagtgcaatgcctgtgggcaactgaagaaggaggaagacgaggatgagcctgatgctggtgattgcagcatggaccagtaggatgtttgctgctgttttttgggagcacttggtggatggtgatgaaatggatgcaccggtcggcttccgtactttggggctgtttgccttgaagaactggtctaatgcacctgaagtcaggaagacgtatgttgtactgcatgatttcgttcactgaatgtgatttgtaggcaaccttgcctggacctgtacaattattattacgcctatatctatcttggccatgtgaacctggtgtggcgttaggaactgacagtgcaaagtccactcgtcagcgtatggattattgcccctctgtttatcttgcctttgacctgcatcattgcccgttcgttcaggttataaaaatcatctttctttgt

SEQ ID NO: 65189 - protein, 406 aa, Triticum aestivum
  peptide (1)..(406): Ceres Seq. ID no. 13655916
VCLPAVCCSSSSAAAGMALPNMAGDALRVVDLPGRGRALLAARDILEGEVLLSESPILLYPSSLASLSSYCSACFRSLPPPPHTPCPSCRAAAFCSPACAAASHPRLLCAALSSGLAAAPEAQQEPLLFLLSAYSLQEPSLSAILSLSSAPSPTQQQDAAGLHAAVASVAPPHTLPAGFSLDLTVALLSKDRTNSFSILEPYRPDVPLEVRKARCCAVYPRASLLNHDCLPNACHFDYADRPGPGNTDIVVRSLHGITEGKEVCISYFAANWRYADRQRRLLEDYGFRCECDRCQIESKWKFDDDNDGADGDDTMEEEHGKEVAEDGGDEGMEQEEGSDDDDDDFPHAFFFVRYLCDREDCYGMLAPLPPLPNGELSHVFECNACGQLKKEEDEDEPDAGDCSMDQ

SEQ ID NO: 65190 - protein, 390 aa, Triticum aestivum
  peptide (1)..(390): Ceres Seq. ID no. 13655917
MALPNMAGDALRVVDLPGRGRALLAARDILEGEVLLSESPILLYPSSLASLSSYCSACFRSLPPPPHTPCPSCRAAAFCSPACAAASHPRLLCAALSSGLAAAPEAQQEPLLFLLSAYSLQEPSLSAILSLSSAPSPTQQQDAAGLHAAVASVAPPHTLPAGFSLDLTVALLSKDRTNSFSILEPYRPDVPLEVRKARCCAVYPRASLLNHDCLPNACHFDYADRPGPGNTDIVVRSLHGITEGKEVCISYFAANWRYADRQRRLLEDYGFRCECDRCQIESKWKFDDDNDGADGDDTMEEEHGKEVAEDGGDEGMEQEEGSDDDDDDFPHAFFFVRYLCDREDCYGMLAPLPPLPNGELSHVFECNACGQLKKEEDEDEPDAGDCSMDQ

SEQ ID NO: 65191 - protein, 385 aa, Triticum aestivum
  peptide (1)..(385): Ceres Seq. ID no. 13655918
MAGDALRVVDLPGRGRALLAARDILEGEVLLSESPILLYPSSLASLSSYCSACFRSLPPPPHTPCPSCRAAAFCSPACAAASHPRLLCAALSSGLAAAPEAQQEPLLFLLSAYSLQEPSLSAILSLSSAPSPTQQQDAAGLHAAVASVAPPHTLPAGFSLDLTVALLSKDRTNSFSILEPYRPDVPLEVRKARCCAVYPRASLLNHDCLPNACHFDYADRPGPGNTDIVVRSLHGITEGKEVCISYFAANWRYADRQRRLLEDYGFRCECDRCQIESKWKFDDDNDGADGDDTMEEEHGKEVAEDGGDEGMEQEEGSDDDDDDFPHAFFFVRYLCDREDCYGMLAPLPPLPNGELSHVFECNACGQLKKEEDEDEPDAGDCSMDQ

SEQ ID NO: 65192 - DNA, 1277 bp, Triticum aestivum
  misc_feature (1)..(1277): Ceres Seq. ID no. 13585433
aacatcctaatcgaaaagaaagaaaaaaaaaactcctactagggaatctgctccgggcgcacgccggccggatcgccggcctcccgccgtcggcgcaccccaggaagagagatcggctcggctcatctgaggatttgcggagggcggccatggagggggcggaagctcctctccccgtccccacggagaagctctccatggatccaaatcgggatggggggaatcgaggtggtgtggtgctggtggccaccggcagcttcaatccccccacctacatgcacctgcgcatgttcgagcttgcaaaggacgagctgcagcagcgagggtactgtgttttgggtggatacatgtcgccggtgaacgacgcctacaagaagaaggacctcttgccggctgctcaccgggttcgcctctgcgaattggcgtgccgaagctcatctttcgtgatggttgatccctgggaggcaatgcagaaaggttatcagcgcaccttgaccgttctatctcgagttaagaactctctatgcaaggatggcttagctgatcaaggtggtgtcaaggtaatgcttttgtgtggttctgaccttctcgagtcattcagcacgccaggggtttggattccagatcaggtcagggccatatgtaaagactttggtgttgtctgtattcgtagggaaggaaaagatgttcaaaagctaatatccagcagcgagacactgcaagaatgcagggataacatcatttcggttgatgagattgtgccaaatcagatcagttcatccagagtaagagaatgtataagaaaacatctctcgataaagtatcttacttgcgacgaagtaatcgggtacattagagagcacagactgtacatggaaactggagagagtgataccagatcatgacaatgttgcaagcctttcggaacgaccgtcgagcatggactgtgccgccttgggcttcaatgttatgataaaatctgaactatcagcgacaagctgcgattatcatgaatgggtccgactgcctttgaagcatcatgaatggatgcaaatgtatggagaccagtaggctatacacaatacttgctactagaaggttcttgaatcttccttacattgttgtcaatgtatcggtctttcgaccaacagaatatatcgctaataaagcatttatatgacatgaaactctttgtcacagtaatattctgccatttgtttcatcctctatatgtaccaagatattattcagtaagtaatttgatgtgctacaaattc

SEQ ID NO: 65193 - protein, 300 aa, Triticum aestivum
  peptide (1)..(300): Ceres Seq. ID no. 13585434
HPNRKERKKKLLLGNLLRAHAGRIAGLPPSAHPRKRDRLGSSEDLRRAAMEGAEAPLPVPTEKLSMDPNRDGGNRGGVVLVATGSFNPPTYMHLRMFELAKDELQQRGYCVLGGYMSPVNDAYKKKDLLPAAHRVRLCELACRSSSFVMVDPWEAMQKGYQRTLTVLSRVKNSLCKDGLADQGGVKVMLLCGSDLLESFSTPGVWIPDQVRAICKDFGVVCIRREGKDVQKLISSSETLQECRDNIISVDEIVPNQISSSRVRECIRKHLSIKYLTCDEVIGYIREHRLYMETGESDTRS

SEQ ID NO: 65194 - protein, 251 aa, Triticum aestivum
  peptide (1)..(251): Ceres Seq. ID no. 13585435
MEGAEAPLPVPTEKLSMDPNRDGGNRGGVVLVATGSFNPPTYMHLRMFELAKDELQQRGYCVLGGYMSPVNDAYKKKDLLPAAHRVRLCELACRSSSFVMVDPWEAMQKGYQRTLTVLSRVKNSLCKDGLADQGGVKVMLLCGSDLLESFSTPGVWIPDQVRAICKDFGVVCIRREGKDVQKLISSSETLQECRDNIISVDEIVPNQISSSRVRECIRKHLSIKYLTCDEVIGYIREHRLYMETGESDTRS

SEQ ID NO: 65195 - protein, 235 aa, Triticum aestivum
  peptide (1)..(235): Ceres Seq. ID no. 13585436
MDPNRDGGNRGGVVLVATGSFNPPTYMHLRMFELAKDELQQRGYCVLGGYMSPVNDAYKKKDLLPAAHRVRLCELACRSSSFVMVDPWEAMQKGYQRTLTVLSRVKNSLCKDGLADQGGVKVMLLCGSDLLESFSTPGVWIPDQVRAICKDFGVVCIRREGKDVQKLISSSETLQECRDNIISVDEIVPNQISSSRVRECIRKHLSIKYLTCDEVIGYIREHRLYMETGESDTRS

SEQ ID NO: 65196 - DNA, 1706 bp, Triticum aestivum
  misc_feature (1)..(1706): Ceres Seq. ID no. 12521308
cccgagaagcagccacccaccccgacctccaccttgacggcgcccgccgccggcgtcgccgttcccaaatcgacgcgaccgaggaggccgtcgaaatggccggccgccgccgcagccgatcccgaatccacaccagcgacgacgacgacggggcgacccgtcccagccgccgccgccgccgcgcggaggtggctgtccctctgccggacggcggcgataccctgtcggagtcgctgcaggacgacagcagacctcctcctgcgccatcggagtcgctgccgttgccgttggacatgctttggaagatcctcctccttctgccaccgcagccgtcctcccgcctccgcgcatccgccgtctcccggcgctggcgaggcgtcgccaccgaccccaactttaaaagccagttccgtgtccaccgcaggaactgcaagccgccacccattctcggattatttgtgcgccgatggaagatggagttcaggcagggcttcctccacccttccgaccgtgtccctgccgagcgcttctccatcccgtcccgctacgacatccgtgggtgccgacatggtcgtgtgctcgctgtacaccgtgagtatgcaaagcttcttgtgtttgccccactctctggcgaggtgtgcaccctgtccgttcccgatgagttcaggccaccgtcttgcttccacctcaatggggcggtgctctgtgatgccaacgaccacgggccatgttcatggcatgtgccaccagagccccttcaaggtggtattgctttcaaggtattctatggaagatcgattcattacctctgtttactcgtcaaggtccaaaaaatggagtgtcgtcgtttcaaaagaggctccatgctccgttgattctgacgttccggcgatcctggttaataatcgactctactggctgctttcgtctaaagcccgtggtctccttgagtttgatttggataggcagagcctaactgtgatcgagtggcctactagtatgattgattccggaagccatgggatgatcaaaacagaggaaggcgcagttggcttggtcaggttttcattcccgagcctagaaatatggcagaggaagatcaatcagggtgttgccacgtggttggatccaaggatagttgatatgcataacgttcttgggatcccccctcagattggtaggagaagatggccatgcagtttgagaggctatgaggaggaaaaccatgtgatcattctgtatgttgatgatagtgcctacatggttgatcttaagtcaatgcaatccacaaaacttgatggaagccgttcgatgaatcgctgtcaccctttcaccagtttctatccaccagacatggccatataagaagcgccgatataggaacatggacacgaggatacgggcacagatacaaaagcattttccagaaacagccatacggcgacacggcgagtatatacataaataaataaagtacaacatgtattgttgtgaggacaagagtatatttgtaagatgtaaggtcaaagtactgcccatttgttttccgctttcagttccacgtttgtatatggctgagcttaatgcagctgattctgcaagtatatgtgagtgaaaaattcaggaaagggaaaatataatacagcatgtaatatggacataattatatttgtaagatgtgggatcaagtcttgattctgtcatgg

SEQ ID NO: 65197 - protein, 454 aa, Triticum aestivum
  peptide (1)..(454): Ceres Seq. ID no. 12521309
PEKQPPTPTSTLTAPAAGVAVPKSTRPRRPSKWPAAAAADPESTPATTTTGRPVPAAAAAARRWLSLCRTAAIPCRSRCRTTADLLLRHRSRCRCRWTCFGRSSSFCHRSRPPASAHPPSPGAGEASPPTPTLKASSVSTAGTASRHPFSDYLCADGRWSSGRASSTLPTVSLPSASPSRPATTSVGADMVVCSLYTVSMQSFLCLPHSLARCAPCPFPMSSGHRLASTSMGRCSVMPTTTGHVHGMCHQSPFKVVLLSRYSMEDRFITSVYSSRSKKWSVVVSKEAPCSVDSDVPAILVNNRLYWLLSSKARGLLEFDLDRQSLTVIEWPTSMIDSGSHGMIKTEEGAVGLVRFSFPSLEIWQRKINQGVATWLDPRIVDMHNVLGIPPQIGRRRWPCSLRGYEEENHVIILYVDDSAYMVDLKSMQSTKLDGSRSMNRCHPFTSFYPPDMAI

SEQ ID NO: 65198 - protein, 290 aa, Triticum aestivum
  peptide (1)..(290): Ceres Seq. ID no. 12521310
REAATHPDLHLDGARRRRRRSQIDATEEAVEMAGRRRSRSRIHTSDDDDGATRPSRRRRRAEVAVPLPDGGDTLSESLQDDSRPPPAPSESLPLPLDMLWKILLLLPPQPSSRLRASAVSRRWRGVATDPNFKSQFRVHRRNCKPPPILGLFVRRWKMEFRQGFLHPSDRVPAERFSIPSRYDIRGCRHGRVLAVHREYAKLLVFAPLSGEVCTLSVPDEFRPPSCFHLNGAVLCDANDHGPCSWHVPPEPLQGGIAFKVFYGRSIHYLCLLVKVQKMECRRFKRGSMLR

SEQ ID NO: 65199 - protein, 265 aa, Triticum aestivum
  peptide (1)..(265): Ceres Seq. ID no. 12521311
MVVCSLYTVSMQSFLCLPHSLARCAPCPFPMSSGHRLASTSMGRCSVMPTTTGHVHGMCHQSPFKVVLLSRYSMEDRFITSVYSSRSKKWSVVVSKEAPCSVDSDVPAILVNNRLYWLLSSKARGLLEFDLDRQSLTVIEWPTSMIDSGSHGMIKTEEGAVGLVRFSFPSLEIWQRKINQGVATWLDPRIVDMHNVLGIPPQIGRRRWPCSLRGYEEENHVIILYVDDSAYMVDLKSMQSTKLDGSRSMNRCHPFTSFYPPDMAI

SEQ ID NO: 65200 - DNA, 1528 bp, Triticum aestivum
  misc_feature (1)..(1528): Ceres Seq. ID no. 13598547
ctcgcgccgctggcccggcaatttccccactattccctccacaaccgaaaggtcccccccctcccctcaaaaaaaaaaaaaamcccaccccagcgccatggccgccgcctcctccgccgccgccgcctcctccgccgccgccgcccccgccgacacgtacgacatcccgtgggtggagaagtaccgccccagccgcgtcgccgatgtcgtcggcaacgccgacgccgtcagccgcctcgaggtcatcgcccgcgacggcaacatgcccaacctcatcctctccgggcctccggggaccgggaagacgacgagcatcctggcgctcgcccacgagatgctcgggcccagctaccgcgagggagtgctcgagctcaacgcctcggacgacagggggcttgatgtggtgcggaacaagatcaagatgttcgcgcagaagaaggtcacactgccacccggacggcacaagatcgtcatactggacgaagctgacagcatgacaacaggagcacagcaagcactgagaagaaccatggagatttattccaacaccacaagatttgctcttgcatgcaatacttcatctaaaatcattgaacccatccaaagtcgctgcgctattgtccggttctcgaggctttcagatcaggagatccttggccgccttatggtcgtggtggcagctgagaaggtcccttatgtgccagaaggtcttgaagccatcatttttactgctgatggtgacatgaggcaagctttgaacaatttgcaagctacagtcagcgggttccgttttgttaatcaagaaaatgtgttcaaggtatgcgatcaaccacatcccttgcatgtcaagagtatggtgaaaaatgtactcgatgggaagtttgatgaggcctgctctggcctaaagcaactctatgatttgggctactctcctactgacatcatcactaccctcttccgtgtcatcaagaactatgacatggctgaatatctgaagctggaactgctgaaggaaacgggatttgcgcacatgaggatctgtgatggcgttgggtcattccttcagctttctggccttctggccaaatttgctctggtgagagaaacagcaaaggcctaacgctgtgcagctgctctgacaccagttaacagtgttgtcatgcatagcctattttatcgctcctctgtcgtggtatctcagtgtgtaagatagttctttgctgaagtgaactatttatgcttgtttagcatcggagatgtagttgtagcctgtagtgactagtgaggagactgagtcctcgtagttcgagtactgctgtatttcggaactaatctgggtatttttcgggtcttttgtagtctattgagctgtcgtaccaccatcatgaaggaaccgtcagttatccaagtcaactgcatatcaattatggattggcagaaaatggattcatcatttccttgcatttttattttaggtctgaawttttacagtccaactgtctgaatttatgaacasagwtwamgcggg

SEQ ID NO: 65201 - protein, 372 aa, Triticum aestivum
  peptide (1)..(372): Ceres Seq. ID no. 15222366
  misc_feature (28)..(28): Xaa is any aa, unknown or other
SRRWPGNFPTIPSTTERSPPSPQKKKKXHPSAMAAASSAAAASSAAAAPADTYDIPWVEKYRPSRVADVVGNADAVSRLEVIARDGNMPNLILSGPPGTGKTTSILALAHEMLGPSYREGVLELNASDDRGLDVVRNKIKMFAQKKVTLPPGRHKIVILDEADSMTTGAQQALRRTMEIYSNTTRFALACNTSSKIIEPIQSRCAIVRFSRLSDQEILGRLMVVVAAEKVPYVPEGLEAIIFTADGDMRQALNNLQATVSGFRFVNQENVFKVCDQPHPLHVKSMVKNVLDGKFDEACSGLKQLYDLGYSPTDIITTLFRVIKNYDMAEYLKLELLKETGFAHMRICDGVGSFLQLSGLLAKFALVRETAKA

SEQ ID NO: 65202 - protein, 340 aa, Triticum aestivum
  peptide (1)..(340): Ceres Seq. ID no. 15222367
MAAASSAAAASSAAAAPADTYDIPWVEKYRPSRVADVVGNADAVSRLEVIARDGNMPNLILSGPPGTGKTTSILALAHEMLGPSYREGVLELNASDDRGLDVVRNKIKMFAQKKVTLPPGRHKIVILDEADSMTTGAQQALRRTMEIYSNTTRFALACNTSSKIIEPIQSRCAIVRFSRLSDQEILGRLMVVVAAEKVPYVPEGLEAIIFTADGDMRQALNNLQATVSGFRFVNQENVFKVCDQPHPLHVKSMVKNVLDGKFDEACSGLKQLYDLGYSPTDIITTLFRVIKNYDMAEYLKLELLKETGFAHMRICDGVGSFLQLSGLLAKFALVRETAKA

SEQ ID NO: 65203 - protein, 285 aa, Triticum aestivum
  peptide (1)..(285): Ceres Seq. ID no. 15222368
MPNLILSGPPGTGKTTSILALAHEMLGPSYREGVLELNASDDRGLDVVRNKIKMFAQKKVTLPPGRHKIVILDEADSMTTGAQQALRRTMEIYSNTTRFALACNTSSKIIEPIQSRCAIVRFSRLSDQEILGRLMVVVAAEKVPYVPEGLEAIIFTADGDMRQALNNLQATVSGFRFVNQENVFKVCDQPHPLHVKSMVKNVLDGKFDEACSGLKQLYDLGYSPTDIITTLFRVIKNYDMAEYLKLELLKETGFAHMRICDGVGSFLQLSGLLAKFALVRETAKA

SEQ ID NO: 65204 - DNA, 1483 bp, Triticum aestivum
  misc_feature (1)..(1483): Ceres Seq. ID no. 13598532
atttcaaaacttccagatccacctagggtttgcgcctcttccctccgcccccatcacacaagccgcatcgagggggacgacgccgacctcggaccgtcggaagcaccatggagaagtacgagaagttggagaaggtcggggagggcacctacggcaaggtgtacaaggcgcaggacaaggcgacgggccaggtggtggcgctcaagaagacccgcctggagatggacgacgaagggatcccgcccaccgcgctccgtgagatctccctcctccgcctcctctccagctccctctacgtcgtccgcctccttgccgtcgagcaggccaccaagggcgggggcgccggcggtggagggaagcccgtcctctacctcgtcttcgagttccttgacactgacctcaagaagttcgtcgacgcctaccgccgtggacccgcccctaagccgctcccaacgcaggtcgtcaagagctttttgtatcagttatgcaaaggaattgcacactgccatggccatggtgttcttcatcgggatttaaagccccaaaatctcttggttgacaaggagaagatgatactgaaaattgcagatcttgggttaagtagagcttttactgttcctatgaaaagctacacccatgagatcgtgacgctttggtatagagctcctgaagtactgcttggagcaacacattactcaaccagtgttgatatttggtccatcggatgcatctttgccgagatggtcagaaaacaggctcttttccctggtgactctgagttacagcaactgcttcacattttcaagctgttgggaactcctaccgaggaggattggcctggagtaactgctctgagggactggcacgagtttcctcagtggaaagcacaaagattgacgcgtgcagtccctacactggaaccagaaggaattgacctgttatcgaaaatgctccagttcgacccggcgaacaggatctcagccaaagctgcgctagagcatccctatttcaacagcctcgacaagtctcagttctagctgttctagctaccgtgtgatttttctcaacttggtgtgtgtgctctgctcgccaacttgttccgccatgagatcgatgctgaaaacgcacgaaaccatgtttcatctacctacaatcagcaacggcgtgttgctggtagttggctcccatgagcgcccgtctcctagacctccagcacttgatttgccttgagaattattgactgaagatacttgttcagatcatgtaggagttttatttgctctgtacggaattgtttgatgagatgggtttgcggacaatagacatttgtgtagcataataaggtagtactggtatttgttaagaaaatgttgcttcatgacaagtgaagttatttggagctgcgaagtggtgagaggcgtgtgtccgtggaaggagctaatagttagcatttgatgtggacattgaaaaaaaaaaaaaaaaa

SEQ ID NO: 65205 - protein, 309 aa, Triticum aestivum
  peptide (1)..(309): Ceres Seq. ID no. 13598533
MEKYEKLEKVGEGTYGKVYKAQDKATGQVVALKKTRLEMDDEGIPPTALREISLLRLLSSSLYVVRLLAVEQATKGGGAGGGGKPVLYLVFEFLDTDLKKFVDAYRRGPAPKPLPTQVVKSFLYQLCKGIAHCHGHGVLHRDLKPQNLLVDKEKMILKIADLGLSRAFTVPMKSYTHEIVTLWYRAPEVLLGATHYSTSVDIWSIGCIFAEMVRKQALFPGDSELQQLLHIFKLLGTPTEEDWPGVTALRDWHEFPQWKAQRLTRAVPTLEPEGIDLLSKMLQFDPANRISAKAALEHPYFNSLDKSQF

SEQ ID NO: 65206 - protein, 271 aa, Triticum aestivum
  peptide (1)..(271): Ceres Seq. ID no. 13598534
MDDEGIPPTALREISLLRLLSSSLYVVRLLAVEQATKGGGAGGGGKPVLYLVFEFLDTDLKKFVDAYRRGPAPKPLPTQVVKSFLYQLCKGIAHCHGHGVLHRDLKPQNLLVDKEKMILKIADLGLSRAFTVPMKSYTHEIVTLWYRAPEVLLGATHYSTSVDIWSIGCIFAEMVRKQALFPGDSELQQLLHIFKLLGTPTEEDWPGVTALRDWHEFPQWKAQRLTRAVPTLEPEGIDLLSKMLQFDPANRISAKAALEHPYFNSLDKSQF

SEQ ID NO: 65207 - protein, 178 aa, Triticum aestivum
  peptide (1)..(178): Ceres Seq. ID no. 13598535
ISKLPDPPRVCASSLRPHHTSRIEGDDADLGPSEAPWRSTRSWRRSGRAPTARCTRRRTRRRARWWRSRRPAWRWTTKGSRPPRSVRSPSSASSPAPSTSSASLPSSRPPRAGAPAVEGSPSSTSSSSSLTLTSRSSSTPTAVDPPLSRSQRRSSRAFCISYAKELHTAMAMVFFIGI

SEQ ID NO: 65208 - DNA, 1368 bp, Triticum aestivum
  misc_feature (1)..(1368): Ceres Seq. ID no. 13597643
aaaacctcccccgactcctaaaaccttaaaccctagctccggccactcccccatggcggccatccgggtcatcctccctcatccccacctccccatcccctcgtggagaccccagctcaagccctcctcatcctatccccgccgcgcggtcgccgccccagcttcgctgtctccgtcgcccctcacggcttccctgcaactcggagatgtgatcgaggcgcagcagttcgatcggcaggcgcttaatgagatctttgaggtggcgcgggagatggaggccgtggagcgcagctcccacgggttccggagccgcgtccttgaggggtacctcatggccacgctcttctacgagccctccacccgcacgcgcctctccttcgaggccgccatgcgccgtcttggcggggaggtgctcactaccgagaacgctcgcgagttctcgtccgctgccaagggcgagaccctagaagataccataagaaccgttgaaggttattctgatattatcgttctgagacattttgaaagtggagctgccagaagagcagcggctactgcagaaattccggttattaatgcaggtgatgggccagggcaacatcctactcaggctttgttggatgtatatacaataaagagagagattggtaggctagatggaatcaaacttggtttggttggagaccttgccaatgggagaactgttcgttctctggcctatttgatcgctaagtaccagaacattaagatatacttcgtatctccagatgttgtaaaaatgaaggatgatattaaggagtacttaacttcacaaggtgttgaatgggaagaaagttcagatttattggatgtggcatccaggtgtgatgtaatttatcaaacacgcattcaaaaagaaagattcggagagaggatcgatcactatgaggcagctcgtgggaaatatattgtggataagaaggttttaggtgtgctgccaaagcatgctgttatcatgcatccccttccaaggctggatgagatcacagtagatgttgatagtgatccaagggctgcatattttaggcaggctaagaatggcctctacataaggatggcactgctcaaacttctgcttgttggccattgacattctttttcctggtgcgtgagctttgcgatgtcaaaggatcagaaatgtagtcttaatcattggctccaagttcaactgttcggtgctgtgcaaggtataagaaaattggatccttgcaagaataaagcaatgattgtatgatacatgctccataggaattttctctgttattatgtggaacatccttttccccaggatggaatgcaatgttcgaaaagaaaattatattttacctg

SEQ ID NO: 65209 - protein, 375 aa, Triticum aestivum
  peptide (1)..(375): Ceres Seq. ID no. 13597644
KPPPTPKTLNPSSGHSPMAAIRVILPHPHLPIPSWRPQLKPSSSYPRRAVAAPASLSPSPLTASLQLGDVIEAQQFDRQALNEIFEVAREMEAVERSSHGFRSRVLEGYLMATLFYEPSTRTRLSFEAAMRRLGGEVLTTENAREFSSAAKGETLEDTIRTVEGYSDIIVLRHFESGAARRAAATAEIPVINAGDGPGQHPTQALLDVYTIKREIGRLDGIKLGLVGDLANGRTVRSLAYLIAKYQNIKIYFVSPDVVKMKDDIKEYLTSQGVEWEESSDLLDVASRCDVIYQTRIQKERFGERIDHYEAARGKYIVDKKVLGVLPKHAVIMHPLPRLDEITVDVDSDPRAAYFRQAKNGLYIRMALLKLLLVGH

SEQ ID NO: 65210 - protein, 358 aa, Triticum aestivum
  peptide (1)..(358): Ceres Seq. ID no. 13597645
MAAIRVILPHPHLPIPSWRPQLKPSSSYPRRAVAAPASLSPSPLTASLQLGDVIEAQQFDRQALNEIFEVAREMEAVERSSHGFRSRVLEGYLMATLFYEPSTRTRLSFEAAMRRLGGEVLTTENAREFSSAAKGETLEDTIRTVEGYSDIIVLRHFESGAARRAAATAEIPVINAGDGPGQHPTQALLDVYTIKREIGRLDGIKLGLVGDLANGRTVRSLAYLIAKYQNIKIYFVSPDVVKMKDDIKEYLTSQGVEWEESSDLLDVASRCDVIYQTRIQKERFGERIDHYEAARGKYIVDKKVLGVLPKHAVIMHPLPRLDEITVDVDSDPRAAYFRQAKNGLYIRMALLKLLLVGH

SEQ ID NO: 65211 - protein, 285 aa, Triticum aestivum
  peptide (1)..(285): Ceres Seq. ID no. 13597646
MEAVERSSHGFRSRVLEGYLMATLFYEPSTRTRLSFEAAMRRLGGEVLTTENAREFSSAAKGETLEDTIRTVEGYSDIIVLRHFESGAARRAAATAEIPVINAGDGPGQHPTQALLDVYTIKREIGRLDGIKLGLVGDLANGRTVRSLAYLIAKYQNIKIYFVSPDVVKMKDDIKEYLTSQGVEWEESSDLLDVASRCDVIYQTRIQKERFGERIDHYEAARGKYIVDKKVLGVLPKHAVIMHPLPRLDEITVDVDSDPRAAYFRQAKNGLYIRMALLKLLLVGH

SEQ ID NO: 65212 - DNA, 1343 bp, Triticum aestivum
  misc_feature (1)..(1343): Ceres Seq. ID no. 13656123
ccccgtcacttgctctatcccgagttagtgacacaagaatatttccctgtgcagtcttgtgctagctgccgtgtctaccaggaatggccgacggcgtccttccggcagcgctgacagtggcgttcctgctgctccttggaacaatcggcgccgcgcacggtcagctccagatggggttctactccgactcctgccccggcgccgaggacatggtcaccgccgccgtccaggaggccgccgcctcggacgccaccatcctccccgccctcgtccgcctccagttccacgactgcttcgtcagaggatgcgacgcgtcggtgctgatcacgagcgcgggcaacgccgcggaggtgaacaacaacaagcaccagggcctccgaggcctggatgtggttgaccgcgccaaggcggagctcgaggagcagtgccccggcgttccaacwktrkygtstctmctgcgccgacatcatcgctctcgccgcacgcgacgccatagccatgacgaacgggccgtcgttcgaggtgccgacggggcggcgcgacgggctgtcgtcgaacgtacgcgacgccgacgtgctgccggacgtgagtgactccatccaggtgctccgctccaagttcgccgccagcagcctcaacgaccgcgacctcgttctcctcacagcggcgcacacgatcggcaccacggcgtgcttcttcgtcaaggatcggctctacagctacccactgccgggcagccgcacggggtcggacccgtcgatcccggcggcgttcctgtcggagctcaaggcccggtgcgcgcccggcgacttcaacacgcgcgtgccgctggaccggggcagccagggaacattcgacgactccatcctccgcaacatccgtgcgggcctcgtccccatcgcctccgacgcggcgctcgaggccagcaacgccaccggcgcgctcgtcggcgcctacctcggcgcggcgtcctccagcttcgcgcaggactttgtgggcgccatgatcaagatgggcaccatcggcgccatcaccggcgacgccggcgagatcagggacgtatgctcggcgttcaacacgaactgatcgacgcgtcattgctataaaatcatacgaatggtcgcattcaaattagcactgtaaatctcttgcggaaacatgaattcattcctckttgsmwctkkaggggnnnaaaaaaaaaaaaaaaaaaaaaaaaaaaaaaaaaaaaaaaaaaaaaaaaaaaaaaaaaaaaaaaaaaaaaaaaaaaaaaaaaaaaaaagggraaaaaaaaaaaaaaagggcttaagggaacggggsaatccscccccccccaggggggcccc

SEQ ID NO: 65213 - protein, 232 aa, Triticum aestivum
  peptide (1)..(232): Ceres Seq. ID no. 15219796
  misc_feature (19)..(19): Xaa is any aa, unknown or other
  misc_feature (20)..(20): Xaa is any aa, unknown or other
  misc_feature (21)..(21): Xaa is any aa, unknown or other
  misc_feature (22)..(22): Xaa is any aa, unknown or other
  misc_feature (23)..(23): Xaa is any aa, unknown or other
MWLTAPRRSSRSSAPAFQXXXXXCADIIALAARDAIAMTNGPSFEVPTGRRDGLSSNVRDADVLPDVSDSIQVLRSKFAASSLNDRDLVLLTAAHTIGTTACFFVKDRLYSYPLPGSRTGSDPSIPAAFLSELKARCAPGDFNTRVPLDRGSQGTFDDSILRNIRAGLVPIASDAALEASNATGALVGAYLGAASSSFAQDFVGAMIKMGTIGAITGDAGEIRDVCSAFNTN

SEQ ID NO: 65214 - protein, 195 aa, Triticum aestivum
  peptide (1)..(195): Ceres Seq. ID no. 15219797
MTNGPSFEVPTGRRDGLSSNVRDADVLPDVSDSIQVLRSKFAASSLNDRDLVLLTAAHTIGTTACFFVKDRLYSYPLPGSRTGSDPSIPAAFLSELKARCAPGDFNTRVPLDRGSQGTFDDSILRNIRAGLVPIASDAALEASNATGALVGAYLGAASSSFAQDFVGAMIKMGTIGAITGDAGEIRDVCSAFNTN

SEQ ID NO: 65215 - protein, 169 aa, Triticum aestivum
  peptide (1)..(169): Ceres Seq. ID no. 15219798
  misc_feature (120)..(120): Xaa is any aa, unknown or other
  misc_feature (121)..(121): Xaa is any aa, unknown or other
  misc_feature (122)..(122): Xaa is any aa, unknown or other
  misc_feature (123)..(123): Xaa is any aa, unknown or other
  misc_feature (124)..(124): Xaa is any aa, unknown or other
MADGVLPAALTVAFLLLLGTIGAAHGQLQMGFYSDSCPGAEDMVTAAVQEAAASDATILPALVRLQFHDCFVRGCDASVLITSAGNAAEVNNNKHQGLRGLDVVDRAKAELEEQCPGVPXXXXXLRRHHRSRRTRRHSHDERAVVRGADGAARRAVVERTRRRRAAGRE

SEQ ID NO: 65216 - DNA, 1140 bp, Triticum aestivum
  misc_feature (1)..(1140): Ceres Seq. ID no. 13597609
cactttgacttcggagcaaccgcgaccacgtcggtagcataaagctttcgcccggctggctcgggtgagagagacagggaaggcggagggggcggaggctgggcggcagaggcggcgccgtcactctgttcttgcgctcatctccagaggaaggggagcgtcacggttcagcaatggcagctccgaatacctacgccgtccatctctcctcggagacccacaagatcgaggcctggtgcgaatcggacgaggctttggctaagcaactgcaggaggaggaggattcgctcgctacaagggaatttgccggcagcgtgtccttggaaccatcatcaccagctgttgagtataggcctgccaataatgcagctcaggtggcgacagaagataatgtcgatccggataatatgtcatacgagcaactgcaagcaatcggtgaagaagtaggaactcagtccagaggattatctgatgacctgatcagctacctggagccttttaggaacaaatgtaacttcttctcctgcaaaaagaataccgatgaatgtgtgatctgcaaatcgaactataaaagcctacagaagttgataagattgccctgcagccattgttaccatgcaaattgcataactcgctggcttaagattaacaaggcatgcccagtctgcaatgaggaggtattcggttaacttgcgatgttagtggagacgctgtggcctcctcgccgcatcatgataatggacaatcttgctctcctatagcctattatactataaaatacttgatggtctaccgtgctttaagaacaaatgtatttcggatcatgccatgtttgatgtcccccaacttagttttgtcattaaggtaatgataaatatgtgcgggcagtgggttatatagtttgcaattttccgagaatgcaaccgagcaggagcagctaagtagatgatgtggtttgctatgtcttgcacagtctttacatcagcccactgtgtaaagtccgaagcaagatttgtaaatgtttatataggacgtctctttttgactttgaaaggttcagacaagtgtgttctggggtttccaaaattttgggaacaaatcttgcatgtaaaaattataatggaatgaactgtgtttttc

SEQ ID NO: 65217 - protein, 171 aa, Triticum aestivum
  peptide (1)..(171): Ceres Seq. ID no. 13597610
MAAPNTYAVHLSSETHKIEAWCESDEALAKQLQEEEDSLATREFAGSVSLEPSSPAVEYRPANNAAQVATEDNVDPDNMSYEQLQAIGEEVGTQSRGLSDDLISYLEPFRNKCNFFSCKKNTDECVICKSNYKSLQKLIRLPCSHCYHANCITRWLKINKACPVCNEEVFG

SEQ ID NO: 65218 - protein, 93 aa, Triticum aestivum
  peptide (1)..(93): Ceres Seq. ID no. 13597611
MSYEQLQAIGEEVGTQSRGLSDDLISYLEPFRNKCNFFSCKKNTDECVICKSNYKSLQKLIRLPCSHCYHANCITRWLKINKACPVCNEEVFG

SEQ ID NO: 65219 - DNA, 1353 bp, Triticum aestivum
  misc_feature (1)..(1353): Ceres Seq. ID no. 12617639
aaaagtacgcctgaagccctacaggctcccgccgcccccctccccctcccgcccccaaaccctaacccctccgccaccatcgccgccaccgcggctcccctctcttcctcctcgccgcgacaccccgtccccgccctctccaccacgtccacaatcttcctccattagatttcgaggggtctcgggaggatggcgttcctgcagaaggtcgggaatgccctcaagcggtccgcgggctccggctcggcgatgctccaggcggtccggtccatgtcctcctccaaggtcttcgtcggaggcatctcgtacggcaccgatgaccagagcctcgcggatgcgttttccaactacggccaagtcgtggaatccaaggtgatcatggaccgtgaatctgggaggtcaagggggtttggtttcgtgacctacacttcggcggaggaggctggagctgccatcaccggaatggatgggaaggatctgcagggtcggatagtgagggtgagctatgctcatgaccgtggtagtcgtccaagttttggcggtggtggcggctatggcggcggtggtggcggctatggcggcggtgacggtggttacggtggagctggtggtgcctatggtggtggtggaggctacagcggaggtggtggatatgggggtggaggcagaggtggtggatacaatagtggtggcaattataattcaggatacaacagtgggggaaactatggtgcccctcaaggcgagcaaggtggctatgggggtgatgctggtttcacaggggttggtggtggtggatacgatgctgctcctgccaacaactatggcggcgatagcctgaatcaagggggtggagcacctcctgcatttggaggtggaaactatggcgtaggcaacgacagctacgcggacgatgcccctgttgatctgccccctggtaagctcaatgacctgctgaaggatctcaaatttgatgttggtggcaaggaggatggtgctggggaggacgccggcttggttgacgcggacatcaagagaagcgagggacaggatgactttcttgacgacgacttcagcaaggatgaagatgactacgccaacaagagaagctgaatgttggtccagcaagaagcatcagccgaataatttcccgtcgatatgttctccatgactgccttgtttttggtattgtcctgtgatgaagataataatgtagtgcttgcaaacaagttatgttcggtctcttagctacgttctgtacgtctgctttgtgtactgtgttctggattcatagtatggtgcgaacttgaacctgaactctgcatgtattgcacgctgtgaaattgcactttc

SEQ ID NO: 65220 - protein, 307 aa, Triticum aestivum
  peptide (1)..(307): Ceres Seq. ID no. 12617640
MAFLQKVGNALKRSAGSGSAMLQAVRSMSSSKVFVGGISYGTDDQSLADAFSNYGQVVESKVIMDRESGRSRGFGFVTYTSAEEAGAAITGMDGKDLQGRIVRVSYAHDRGSRPSFGGGGGYGGGGGGYGGGDGGYGGAGGAYGGGGGYSGGGGYGGGGRGGGYNSGGNYNSGYNSGGNYGAPQGEQGGYGGDAGFTGVGGGGYDAAPANNYGGDSLNQGGGAPPAFGGGNYGVGNDSYADDAPVDLPPGKLNDLLKDLKFDVGGKEDGAGEDAGLVDADIKRSEGQDDFLDDDFSKDEDDYANKRS

SEQ ID NO: 65221 - protein, 287 aa, Triticum aestivum
  peptide (1)..(287): Ceres Seq. ID no. 12617641
MLQAVRSMSSSKVFVGGISYGTDDQSLADAFSNYGQVVESKVIMDRESGRSRGFGFVTYTSAEEAGAAITGMDGKDLQGRIVRVSYAHDRGSRPSFGGGGGYGGGGGGYGGGDGGYGGAGGAYGGGGGYSGGGGYGGGGRGGGYNSGGNYNSGYNSGGNYGAPQGEQGGYGGDAGFTGVGGGGYDAAPANNYGGDSLNQGGGAPPAFGGGNYGVGNDSYADDAPVDLPPGKLNDLLKDLKFDVGGKEDGAGEDAGLVDADIKRSEGQDDFLDDDFSKDEDDYANKRS

SEQ ID NO: 65222 - protein, 280 aa, Triticum aestivum
  peptide (1)..(280): Ceres Seq. ID no. 12617642
MSSSKVFVGGISYGTDDQSLADAFSNYGQVVESKVIMDRESGRSRGFGFVTYTSAEEAGAAITGMDGKDLQGRIVRVSYAHDRGSRPSFGGGGGYGGGGGGYGGGDGGYGGAGGAYGGGGGYSGGGGYGGGGRGGGYNSGGNYNSGYNSGGNYGAPQGEQGGYGGDAGFTGVGGGGYDAAPANNYGGDSLNQGGGAPPAFGGGNYGVGNDSYADDAPVDLPPGKLNDLLKDLKFDVGGKEDGAGEDAGLVDADIKRSEGQDDFLDDDFSKDEDDYANKRS

SEQ ID NO: 65223 - DNA, 1613 bp, Triticum aestivum
  misc_feature (1)..(1613): Ceres Seq. ID no. 13584612
aaaaaccccacaaatccatcccggccgaccgccgccgccgccgttgccacccccaccgccatgaatccggcatgcgcggaggcagcagccgccaagaagtcccggcacaaggacaagaaggagaagaaaaacaagcgcaaagacaccgcggagcacctcggcggcgagcccgcgacggccgacgaggaagccgtccacaagaagaagaagaagaagcacgcgaaggaggaggaggaggcggattcgaaggggaagccgacggtgagcatcgccgtcgccggttccgtcatcgacaacgcccagtccctcgagctcgccaccctcctggccggtcagatagcccgcgcggcggccgtattccgcatcgacgagatcgttgtcttcgacagcagcccacctgcggagaacggcggcggcggtgccgaagacgaagaggagagcggtgcgcggttcctcgttcgcatactggagtatctggagacgccgcagtacctgcgccgccgtctcttcccaatgcacaagaactttaaatatgtggggttgcttccgcctctggacgcgccgcaccatgtgcgcaagcatgagtggtctgaatttcgtgaaggtgtaacattgggcggggatcgttcaaagggtacacttgttgatgttgggttaagtcagaacgttctggttgagcaaatcctagaacaaggaaaaagggtaactgtagccatgggaaccaacagagaccttacaccagcttgtataaggaaagtcgttcctccgtcctcacccagcgaagaaatgggatcatattggggctataaagtccgctatgcttcaaatttaagtggtgttatcaatgattcaccatacaaggaaggatatgatcatatcattggcacttctgagcatggtgaaaccattatttcatctgagctaatcttaccttcattcaggcaccttttaattgcgtttggtggactggctggtctggaagaaagcatcgaagaggacccaaatctgaatggcaaaggtgcaaatgatgtattcgcatcttattttaatacatgccccaaccaaggtagcagaacaataaggacagaggaggcacttctcatatcccttcagtacttccaagaccccatcaggcgagcagggatatcgaattagaaggttttatgcagacacatgcaaatacaacattgcgcttaccaaaggattggctttaacgcttggaatagacatggaagatgcaccttgggtttgtttttgatggtcaatcgctggattgtagcacctacgggttttctgctcgggtcaagcactgtaaagcaaagaggaggtgcaagaataggtgatagctttaacttctattttgaaacaggcaaggcacacattttcattattaagaagagaatttgcctggttaattagaggaaaactgggcaaaagccaagatagcttgaacattgatgctagcattggtagagttttcttaagggggcattgatagagttgagaagaagatcagtgccccccaaaagagtgtttagagagggagcataattatcgtcggggatttgttttctttgctccaaattggctgaaatgagtgttttgtttttttt

SEQ ID NO: 65224 - protein, 384 aa, Triticum aestivum
  peptide (1)..(384): Ceres Seq. ID no. 13584613
KNPTNPSRPTAAAAVATPTAMNPACAEAAAAKKSRHKDKKEKKNKRKDTAEHLGGEPATADEEAVHKKKKKKHAKEEEEADSKGKPTVSIAVAGSVIDNAQSLELATLLAGQIARAAAVFRIDEIVVFDSSPPAENGGGGAEDEEESGARFLVRILEYLETPQYLRRRLFPMHKNFKYVGLLPPLDAPHHVRKHEWSEFREGVTLGGDRSKGTLVDVGLSQNVLVEQILEQGKRVTVAMGTNRDLTPACIRKVVPPSSPSEEMGSYWGYKVRYASNLSGVINDSPYKEGYDHIIGTSEHGETIISSELILPSFRHLLIAFGGLAGLEESIEEDPNLNGKGANDVFASYFNTCPNQGSRTIRTEEALLISLQYFQDPIRRAGISN

SEQ ID NO: 65225 - protein, 364 aa, Triticum aestivum
  peptide (1)..(364): Ceres Seq. ID no. 13584614
MNPACAEAAAAKKSRHKDKKEKKNKRKDTAEHLGGEPATADEEAVHKKKKKKHAKEEEEADSKGKPTVSIAVAGSVIDNAQSLELATLLAGQIARAAAVFRIDEIVVFDSSPPAENGGGGAEDEEESGARFLVRILEYLETPQYLRRRLFPMHKNFKYVGLLPPLDAPHHVRKHEWSEFREGVTLGGDRSKGTLVDVGLSQNVLVEQILEQGKRVTVAMGTNRDLTPACIRKVVPPSSPSEEMGSYWGYKVRYASNLSGVINDSPYKEGYDHIIGTSEHGETIISSELILPSFRHLLIAFGGLAGLEESIEEDPNLNGKGANDVFASYFNTCPNQGSRTIRTEEALLISLQYFQDPIRRAGISN

SEQ ID NO: 65226 - protein, 213 aa, Triticum aestivum
  peptide (1)..(213): Ceres Seq. ID no. 13584615
MHKNFKYVGLLPPLDAPHHVRKHEWSEFREGVTLGGDRSKGTLVDVGLSQNVLVEQILEQGKRVTVAMGTNRDLTPACIRKVVPPSSPSEEMGSYWGYKVRYASNLSGVINDSPYKEGYDHIIGTSEHGETIISSELILPSFRHLLIAFGGLAGLEESIEEDPNLNGKGANDVFASYFNTCPNQGSRTIRTEEALLISLQYFQDPIRRAGISN

SEQ ID NO: 65227 - DNA, 1513 bp, Triticum aestivum
  misc_feature (1)..(1513): Ceres Seq. ID no. 13598548
atagagcgagtcttcttcttcctccctgctctgaccgagatccgctccagtggactcgattagggttagggtttgcctctccgatcgtgaggcgggttgctacatctgccttgttcgtcggattccggtagaatcaaccactcgatcgacttaatttcccccgccggtgctgcctctgttttgccgaagatgctgggcggactttacggcgacctcccgccgcccacctcggcggccggcgacgacgacaagccgaccgcctccgtctggtcgagcgccaccaagatggcaccgcccaccctccgcaagccctccgcgaccttcgcccctcccacgtccctcctcaggaaccagcacccccgccccgccgccgctcccaaggccagcgccgtccaccagcagcagcagcagcagccgccgcaccccctccccctcgcctccgccgtcaccaccaccaccgcagcgtccttccaccccgccctcgtcgccgtgcagtccaccgtgctcgaggagtacgaccccgccaggcccaacgactacgaggactaccgcaaggagaagctcaagcgggccaaggacgccgagatgaagaaggagctcgaccggaggcgccgcgaggaccaggagcgggagagggagcgcgagctgagggaggccgaggcacgcctgcgggaggagcagtccagggcctcctccctcaacatatccggcgaggaagcctggaagaggagggccgccatgagcggcgctggcggcggcgctactcctcagagggtctcgtctccgccccacggcgatgccagtggcttctccatcccaggctcctcctcctctggcttgggcgtgggcgccggcggccagatgaccgctgcccagagaatgatggccaagatggggtggaaggaaggccaggggctcggcaagcaagagcagggaatcacagcgcctctggttgctaggaagactgatcggagggcaggggttattgtcgatgagagcagttccaggaggcccagatcagccaactttgaaggccagcccaccagagtagtgctgctgcgtaacatgattggtccgggcgaggttgacgacgagctggaagacgagattgcctcggagtgctccaagtttggggctgtgttgcgcgtgctgatattcgagatcacccaggcaaacttccccgcagacgaagcagtgaggatcttcgtgctgttcgagaggacagaagattcaaccaaggcgttggtcgaactggaagggcgctactttggcggacgcatagtgcacgccaccttcttcgatgagggaaggttcgagaggaacgagctcgctccgatgcccggcgaagtaccagggttcgactaaaccttcataagcagactaaagaactggacgttggtgtctcgggtgtaatttaatctagagcatgaacgctgtttttctcttttcttttgaggacagtttacggcatgttgacctattgccgttttattattgcagagttgttattgtt

SEQ ID NO: 65228 - protein, 391 aa, Triticum aestivum
  peptide (1)..(391): Ceres Seq. ID no. 13598549
MLGGLYGDLPPPTSAAGDDDKPTASVWSSATKMAPPTLRKPSATFAPPTSLLRNQHPRPAAAPKASAVHQQQQQQPPHPLPLASAVTTTTAASFHPALVAVQSTVLEEYDPARPNDYEDYRKEKLKRAKDAEMKKELDRRRREDQERERERELREAEARLREEQSRASSLNISGEEAWKRRAAMSGAGGGATPQRVSSPPHGDASGFSIPGSSSSGLGVGAGGQMTAAQRMMAKMGWKEGQGLGKQEQGITAPLVARKTDRRAGVIVDESSSRRPRSANFEGQPTRVVLLRNMIGPGEVDDELEDEIASECSKFGAVLRVLIFEITQANFPADEAVRIFVLFERTEDSTKALVELEGRYFGGRIVHATFFDEGRFERNELAPMPGEVPGFD

SEQ ID NO: 65229 - protein, 359 aa, Triticum aestivum
  peptide (1)..(359): Ceres Seq. ID no. 13598550
MAPPTLRKPSATFAPPTSLLRNQHPRPAAAPKASAVHQQQQQQPPHPLPLASAVTTTTAASFHPALVAVQSTVLEEYDPARPNDYEDYRKEKLKRAKDAEMKKELDRRRREDQERERERELREAEARLREEQSRASSLNISGEEAWKRRAAMSGAGGGATPQRVSSPPHGDASGFSIPGSSSSGLGVGAGGQMTAAQRMMAKMGWKEGQGLGKQEQGITAPLVARKTDRRAGVIVDESSSRRPRSANFEGQPTRVVLLRNMIGPGEVDDELEDEIASECSKFGAVLRVLIFEITQANFPADEAVRIFVLFERTEDSTKALVELEGRYFGGRIVHATFFDEGRFERNELAPMPGEVPGFD

SEQ ID NO: 65230 - protein, 259 aa, Triticum aestivum
  peptide (1)..(259): Ceres Seq. ID no. 13598551
MKKELDRRRREDQERERERELREAEARLREEQSRASSLNISGEEAWKRRAAMSGAGGGATPQRVSSPPHGDASGFSIPGSSSSGLGVGAGGQMTAAQRMMAKMGWKEGQGLGKQEQGITAPLVARKTDRRAGVIVDESSSRRPRSANFEGQPTRVVLLRNMIGPGEVDDELEDEIASECSKFGAVLRVLIFEITQANFPADEAVRIFVLFERTEDSTKALVELEGRYFGGRIVHATFFDEGRFERNELAPMPGEVPGFD

SEQ ID NO: 65231 - DNA, 1031 bp, Triticum aestivum
  misc_feature (1)..(1031): Ceres Seq. ID no. 13585449
atttgcatttgatcacgcctctcaagtctacgcccatccgtctcacagcctctcggtctgggagacatcggctcaaagattactggagaaatggagacgagcgtgatcgtcctgtccgtcgtggtaggattgctcggggtcggaagcgccgtgctggggttcatcgccgagggcaccaagctcgagcggaatgacatcggggtgtccaagaccgagtgcgtgtaccccggcaacccggcgttcgcgctggggctggtcgcggcgctcctgctgctggcggcccagatcaccgtctcggccgccggccgctgctgcggctgctgcaagccccggggcgccgccttctccgcgtccaggcggaacatcggcgtcgtcttcgccgtcctctcatgggtggcgacggtgatcgcggagatctacttcgtgcagggcgcggcgtggaacgcgccggtgacgcgcgaggtcaacacggggtgctacttcgtcagggacggcgtgttcaggagggcggccatcctgagcatcatcgcaaccgtgctcgggatcaagtcctacttcttgcttcgcgccgctgcggccacggcggcggcggcggctgctgctgtgccaggatacccgggggccgtggcggggccgtcgttggcgggcgagcccaagcccgacgggatcgcgatgggtcaccctgctccgatgtacgggcaggcgccgtacgcgcactaccctccgcctccgaacgcgcaggggtacgggcagtacccgccccctccaaacgcgcaggggtatggacagtaccctcctcctgctcaggggtacgggcacggacactgattccagcccgctgctccccctcagggtcaaggatacgggcaagccgtgtagattgatcactggcctatgtgcaggcgtgctatgttcttctgtctctagtagaattctgctgcgtaaatcaccacacgggtcacggctcgtaggctgttcccgttgtggtgaatgatgatcgtctctgcttggaagtgcaaatttgagctttg

SEQ ID NO: 65232 - protein, 245 aa, Triticum aestivum
  peptide (1)..(245): Ceres Seq. ID no. 13585450
METSVIVLSVVVGLLGVGSAVLGFIAEGTKLERNDIGVSKTECVYPGNPAFALGLVAALLLLAAQITVSAAGRCCGCCKPRGAAFSASRRNIGVVFAVLSWVATVIAEIYFVQGAAWNAPVTREVNTGCYFVRDGVFRRAAILSIIATVLGIKSYFLLRAAAATAAAAAAAVPGYPGAVAGPSLAGEPKPDGIAMGHPAPMYGQAPYAHYPPPPNAQGYGQYPPPPNAQGYGQYPPPAQGYGHGH

SEQ ID NO: 65233 - protein, 164 aa, Triticum aestivum
  peptide (1)..(164): Ceres Seq. ID no. 13585451
MGGDGDRGDLLRAGRGVERAGDARGQHGVLLRQGRRVQEGGHPEHHRNRARDQVLLLASRRCGHGGGGGCCCARIPGGRGGAVVGGRAQARRDRDGSPCSDVRAGAVRALPSASERAGVRAVPAPSKRAGVWTVPSSCSGVRARTLIPARCSPSGSRIRASRVD

SEQ ID NO: 65234 - DNA, 1546 bp, Triticum aestivum
  misc_feature (1)..(1546): Ceres Seq. ID no. 13584616
atcccctctcccaccccaccaatctaccgtcgccggaccaggcgcgggccggggcgcgcgatgctgccgcagcagagccaggccgcggcgatgatgcagcaggcggccgcgatgcagtccatgtacgcgatgccgccgccgcctcaccaccaccacctcctcggcgccgcgccgccgcagcagatagagccaattctcactggaaatctgccacctggttttgatacaagtacatgccgcagtgtatatgtcggcaatattcatgttcaagtgactgaggcacttctccgagaggtttttcagagtgctggttcagttgacggatgcaagcttataagaaaagagaagtcctcatatggttttgttgactactacgaacgcggatcagctgccctagcaattttgacacttaacgggaagcaaatttttgggcagcctatcagagttaattgggcatatgctagcggtcagagggaggatacaacagaccatttccatatttttgttggtgatcttagccctgaggtcacggattctgcattatttgcattcttctcagcatattcccctaactgctctgatgctcgagtaatgtgggaccaaaagaccggaagatcaagaggttatggctttgtttccttcaggaatcaacaggatgcgcagagtgccataaatgacttaaatggtcagtggcttggaaatcggcagattcgttgcaactgggcaacaaaaggtgccaacagtggcgaggaccagctaacatcagattcgaaaagtatagctgatgtaaataacaatttcacagaaaatgcaaagcagaaatcaaacgaagatgctcccgagaataatccactgtacagaactgtttatgttgggaaccttgctcacgaggttactcaagacgtgcttcaccgtttcttccatgcacttggtgctggagccatcgaggaggtgcgtgtccagcatggcaaaggctttggttttgtcaagtacagcaatcatgccgaaactgcccttgcaattcagacgggtaatggtcgtattttgggtggtaaaccagtcaagtgttcctggggcaacaagcctacaccccctggtaccacctctgcgccactgccccctcctgctgctcctagccaccccgctgccgccgatctcgtagcgtatcaacgtgctattgcgatgagcaagatggcttcaacccaggcattgatgcaggctcagcatctcaggcacgcagccatggggatgggtgtaggtgcgagtcaggcgatgtacgatggtactttccagaacgtcggtgcctcgcagcagcaacagcagcagcagcagcagctcatgtactattaattccagccttggagggagctcatctttgtaatttgacccggattttattttttcttttctatcttcgtcgtgtctatatgcagtgtgacactatatgtcggtgttgccgtctggctgtgttggtagtgcaccgaatctgtgtctgtagtgatgcaagttgaccggttaatatcgaattttatgttattttctcgtg

SEQ ID NO: 65235 - protein, 449 aa, Triticum aestivum
  peptide (1)..(449): Ceres Seq. ID no. 13584617
IPSPTPPIYRRRTRRGPGRAMLPQQSQAAAMMQQAAAMQSMYAMPPPPHHHHLLGAAPPQQIEPILTGNLPPGFDTSTCRSVYVGNIHVQVTEALLREVFQSAGSVDGCKLIRKEKSSYGFVDYYERGSAALAILTLNGKQIFGQPIRVNWAYASGQREDTTDHFHIFVGDLSPEVTDSALFAFFSAYSPNCSDARVMWDQKTGRSRGYGFVSFRNQQDAQSAINDLNGQWLGNRQIRCNWATKGANSGEDQLTSDSKSIADVNNNFTENAKQKSNEDAPENNPLYRTVYVGNLAHEVTQDVLHRFFHALGAGAIEEVRVQHGKGFGFVKYSNHAETALAIQTGNGRILGGKPVKCSWGNKPTPPGTTSAPLPPPAAPSHPAAADLVAYQRAIAMSKMASTQALMQAQHLRHAAMGMGVGASQAMYDGTFQNVGASQQQQQQQQQLMYY

SEQ ID NO: 65236 - protein, 429 aa, Triticum aestivum
  peptide (1)..(429): Ceres Seq. ID no. 13584618
MLPQQSQAAAMMQQAAAMQSMYAMPPPPHHHHLLGAAPPQQIEPILTGNLPPGFDTSTCRSVYVGNIHVQVTEALLREVFQSAGSVDGCKLIRKEKSSYGFVDYYERGSAALAILTLNGKQIFGQPIRVNWAYASGQREDTTDHFHIFVGDLSPEVTDSALFAFFSAYSPNCSDARVMWDQKTGRSRGYGFVSFRNQQDAQSAINDLNGQWLGNRQIRCNWATKGANSGEDQLTSDSKSIADVNNNFTENAKQKSNEDAPENNPLYRTVYVGNLAHEVTQDVLHRFFHALGAGAIEEVRVQHGKGFGFVKYSNHAETALAIQTGNGRILGGKPVKCSWGNKPTPPGTTSAPLPPPAAPSHPAAADLVAYQRAIAMSKMASTQALMQAQHLRHAAMGMGVGASQAMYDGTFQNVGASQQQQQQQQQLMYY

SEQ ID NO: 65237 - protein, 419 aa, Triticum aestivum
  peptide (1)..(419): Ceres Seq. ID no. 13584619
MMQQAAAMQSMYAMPPPPHHHHLLGAAPPQQIEPILTGNLPPGFDTSTCRSVYVGNIHVQVTEALLREVFQSAGSVDGCKLIRKEKSSYGFVDYYERGSAALAILTLNGKQIFGQPIRVNWAYASGQREDTTDHFHIFVGDLSPEVTDSALFAFFSAYSPNCSDARVMWDQKTGRSRGYGFVSFRNQQDAQSAINDLNGQWLGNRQIRCNWATKGANSGEDQLTSDSKSIADVNNNFTENAKQKSNEDAPENNPLYRTVYVGNLAHEVTQDVLHRFFHALGAGAIEEVRVQHGKGFGFVKYSNHAETALAIQTGNGRILGGKPVKCSWGNKPTPPGTTSAPLPPPAAPSHPAAADLVAYQRAIAMSKMASTQALMQAQHLRHAAMGMGVGASQAMYDGTFQNVGASQQQQQQQQQLMYY

SEQ ID NO: 65238 - DNA, 1896 bp, Triticum aestivum
  misc_feature (1)..(1896): Ceres Seq. ID no. 13584620
atccagtggatcccggtgaacggcacatggcggctaccaactctcgatcccctttcttcttcctcctcgcccgaaccccagctactctccatcttgtgtaatcgctacttgatcatgtatctgtgagtgagattgccaccatatattcgagctactactattgtgtaccttatatttggtatcagtcgccaccaccatcctctccgcagcgcgctctggctcacttcatcgagacgcgccgactccgccaagcgcgcctgcaactggaacacatggatccagcggtcaagtcctacctcgacaagctctcggctacgatggaggccaacacgacggctctgacggtgatcacctcccgtctcgacgatctagcggcgtggcggcctgatctggagaagtgcgtcgccgatctaggggaagcggtggctgcgctgcagcaagggcgcccgggctccaccaacggcgagggtacacaggcgccggcaccaacggcgccactgccagcgactcgtgccacggcaagtcgtgtcgctgaaggtgcggcgggcgcaccccacgggtccattgaccatggcgagttccacctgcaacgagggtcgacggtggtgtcatcccagacgccgccgccactcccgaccaacggtcagctcaaaatcccgtccccaaattctcttccatcgccttttgcgcatgctagtcagatgttagcggggctaggacaggcgcacccatccatcgctttccctcaattctcgagggagaatccaaatctctggaaaaccatgtgtgagcagtactttaacatgtttggaatacacgaatacttttaggttccgatggtggcgctgaatttttcagggcctgctgccatttggctgcaatccatacagaaaaaactgggatcatttacatgggaatcatttgctgccttgctatgcactagatttgggcgtgatacgcaccgaaatctaatccgtcggttctacaccattaagcagacttcctcaatagctaattttattgagaaatttgagcttattacaaatcacttgagttcatattcagattcaattcacccctactatttccttactcgttttgtggagggactgaggccggacatacgcgcggtggtcatagtgcagcggccgccggacctggacacagcttgtgctctagctctgctccaggaggaggtggctgatggagcaggcctggagtcgtcgcggcagttccactaccagtcacggcctccaaaggtgaacacgcgccctcccgcggcgctgccacttccaccaccatcgggtcgcccaccaccaccagctggggcggccgatcggcgtgggactgaagccgctcgagctgaagcggcgaaaatcaagactctgcgcgactacagaagagcgcgggggctatgcttcaagtgtggcgaacgatggggtcatgaccacacctgacccacgtcagtccagctccatgtggtcgaggaactcctggagctgtttggcatcgacgcagtcacggatcagcagagcttgccagcggacgagcaacagcaagatatagtcatggcgatctcatgatctgccgtgacgggaggggtgtcatctaaagctttttagctccgtgcttggattcaaggccgcgaagtgttgatgctcgtcgactccggaagcacaacttcttcttcctcctcgcccgaaccctagttactctcgatcttgtgtaatcgctacttgatcgtgtatctgtgagtgagattgccaccatatattcgagctactactactatgtaaaaaaaaaaaaaaaaaaaaaaaaaaaaaaaaaaaaaaaaaaaaaaaaaaaaaaaaaaaaccaaaaaaaaaaaaaaaaaggtttatcaataccgccaacctc

SEQ ID NO: 65239 - protein, 206 aa, Triticum aestivum
  peptide (1)..(206): Ceres Seq. ID no. 13584621
MVALNFSGPAAIWLQSIQKKLGSFTWESFAALLCTRFGRDTHRNLIRRFYTIKQTSSIANFIEKFELITNHLSSYSDSIHPYYFLTRFVEGLRPDIRAVVIVQRPPDLDTACALALLQEEVADGAGLESSRQFHYQSRPPKVNTRPPAALPLPPPSGRPPPPAGAADRRGTEAARAEAAKIKTLRDYRRARGLCFKCGERWGHDHT

SEQ ID NO: 65240 - protein, 185 aa, Triticum aestivum
  peptide (1)..(185): Ceres Seq. ID no. 13584622
MDPAVKSYLDKLSATMEANTTALTVITSRLDDLAAWRPDLEKCVADLGEAVAALQQGRPGSTNGEGTQAPAPTAPLPATRATASRVAEGAAGAPHGSIDHGEFHLQRGSTVVSSQTPPPLPTNGQLKIPSPNSLPSPFAHASQMLAGLGQAHPSIAFPQFSRENPNLWKTMCEQYFNMFGIHEYF

SEQ ID NO: 65241 - protein, 170 aa, Triticum aestivum
  peptide (1)..(170): Ceres Seq. ID no. 13584623
MEANTTALTVITSRLDDLAAWRPDLEKCVADLGEAVAALQQGRPGSTNGEGTQAPAPTAPLPATRATASRVAEGAAGAPHGSIDHGEFHLQRGSTVVSSQTPPPLPTNGQLKIPSPNSLPSPFAHASQMLAGLGQAHPSIAFPQFSRENPNLWKTMCEQYFNMFGIHEYF

SEQ ID NO: 65242 - DNA, 1783 bp, Triticum aestivum
  misc_feature (1)..(1783): Ceres Seq. ID no. 14316025
acgcaaaaagggacgaaaaaccaaacttctcccgcaagactggctcgcaccaaatcgcatcgcccttggagtcgcccctcactgatcccttggcgtcctgcttcccaagccacagcccacaggcccccacgcccagctcctcccgctccgatttcacagcctgcgagctagccatgtcgattcggccgctgttgctgccggagccgccgggcgaggtggatcgggcgccggagatcttcgcgggtggcgtggccgcggtgcgccgcgcagttgtcatcgggaacggctgcgccggcgccgagaaccagtgcctcggcctcgtccgcgccctcggcctggccgaccgcctcacgctctaccgtattatcaggccaaccggaggaatcaacaagtggctgcactttctccctatctccttgcataaaatggtggaccaagtactcagacatatactgtctaacacgacattcacaacactgtttcaaggaaaactgtcggcaccttatcctgtcagtaatgttcaatctcttggattgtcttctgtactggaagcagattccaaaaggatagtgacaatggtccgtgataccttcgagaaggaaggcctggcgatagttgttgcttgtggccgtgataccataccatatgcaagctctgtaaggtgtttagctccagataatgtctttgtcattcagatacaacaccccaggtatcgccttgataggtttgatttggtggtgactcctcgccatgattactacgctttaactgcaaagggacaacaagaagtaccgtggctttttcggagatggattactccacgagaaccacccggtcctaatgtggtcctgacgtctggagcacttcaccaagcagattctgctgcactacgcattgctgctacaaactggcatgatgaacttgctcccttgccaaagccattggtagtagtaaatattggagaaccaacaagaaactgtaattatggtgtagaccttgccaagcagttggtaagctcactgcacaatgtttcagagacctgtggaagtgtcagaatttcattttccaggagaacgccacaaaacgtgtccgatcttatattgagagagttcagcacacatccaaagttctacatttggggtggtgaagaacctaacccacacctagggcatcttgcatgggccgatgctttcatcataacagcagactcgataagtatgctaagtgaggcgtgcagcactgggaagccggtctatgtcgttggaactgagcattgcaggtggaaattctcagattttcacaacactctgcagaaacgaggggctgttcgtcctttcactggatcagaagatatgtcagacagctggagctaccctcctctgaacgatgccattgatgtggctgcacgggttcgtgaagtgcttgcacaacgtggatggacagtgggttaatagcggtcgaagcagagaaaaagagtgccatttttgctcagttacgttccaagcccagacaattcagagcctgcatttcagttatcttagttgcatctgcatgaggattttttttgccatatgaccgttgcaagacgacatcgcttcttttcaaaagatggctatatttttgggaacatactgtgtaaagttttgagcaatcacacatagacagcagtgtttattcttggcatattcatgcattattgtacctagtgttatgctgtaaagaagccgatagaagtgcgaacggaagttaaaaatctttgtccttggaacgaggtgacatcatg

SEQ ID NO: 65243 - protein, 482 aa, Triticum aestivum
  peptide (1)..(482): Ceres Seq. ID no. 14316026
AKRDEKPNFSRKTGSHQIASPLESPLTDPLASCFPSHSPQAPTPSSSRSDFTACELAMSIRPLLLPEPPGEVDRAPEIFAGGVAAVRRAVVIGNGCAGAENQCLGLVRALGLADRLTLYRIIRPTGGINKWLHFLPISLHKMVDQVLRHILSNTTFTTLFQGKLSAPYPVSNVQSLGLSSVLEADSKRIVTMVRDTFEKEGLAIVVACGRDTIPYASSVRCLAPDNVFVIQIQHPRYRLDRFDLVVTPRHDYYALTAKGQQEVPWLFRRWITPREPPGPNVVLTSGALHQADSAALRIAATNWHDELAPLPKPLVVVNIGEPTRNCNYGVDLAKQLVSSLHNVSETCGSVRISFSRRTPQNVSDLILREFSTHPKFYIWGGEEPNPHLGHLAWADAFIITADSISMLSEACSTGKPVYVVGTEHCRWKFSDFHNTLQKRGAVRPFTGSEDMSDSWSYPPLNDAIDVAARVREVLAQRGWTVG

SEQ ID NO: 65244 - protein, 425 aa, Triticum aestivum
  peptide (1)..(425): Ceres Seq. ID no. 14316027
MSIRPLLLPEPPGEVDRAPEIFAGGVAAVRRAVVIGNGCAGAENQCLGLVRALGLADRLTLYRIIRPTGGINKWLHFLPISLHKMVDQVLRHILSNTTFTTLFQGKLSAPYPVSNVQSLGLSSVLEADSKRIVTMVRDTFEKEGLAIVVACGRDTIPYASSVRCLAPDNVFVIQIQHPRYRLDRFDLVVTPRHDYYALTAKGQQEVPWLFRRWITPREPPGPNVVLTSGALHQADSAALRIAATNWHDELAPLPKPLVVVNIGEPTRNCNYGVDLAKQLVSSLHNVSETCGSVRISFSRRTPQNVSDLILREFSTHPKFYIWGGEEPNPHLGHLAWADAFIITADSISMLSEACSTGKPVYVVGTEHCRWKFSDFHNTLQKRGAVRPFTGSEDMSDSWSYPPLNDAIDVAARVREVLAQRGWTVG

SEQ ID NO: 65245 - protein, 341 aa, Triticum aestivum
  peptide (1)..(341): Ceres Seq. ID no. 14316028
MVDQVLRHILSNTTFTTLFQGKLSAPYPVSNVQSLGLSSVLEADSKRIVTMVRDTFEKEGLAIVVACGRDTIPYASSVRCLAPDNVFVIQIQHPRYRLDRFDLVVTPRHDYYALTAKGQQEVPWLFRRWITPREPPGPNVVLTSGALHQADSAALRIAATNWHDELAPLPKPLVVVNIGEPTRNCNYGVDLAKQLVSSLHNVSETCGSVRISFSRRTPQNVSDLILREFSTHPKFYIWGGEEPNPHLGHLAWADAFIITADSISMLSEACSTGKPVYVVGTEHCRWKFSDFHNTLQKRGAVRPFTGSEDMSDSWSYPPLNDAIDVAARVREVLAQRGWTVG

SEQ ID NO: 65246 - DNA, 1097 bp, Triticum aestivum
  misc_feature (1)..(1097): Ceres Seq. ID no. 12625805
gatatccggcatcgccgcgtctctcacataaacgcacgcttccatcgggacaagacagcggcgcgtagcaaagggaacacggcgaggccggcgatggatgtcaagtgccggcgtctggaggggaaggtggccgtcgtgacggcttccacgcagggcatcggcctcgccatcgccgagcgcctcggccgggagggcgccgcggtcgtcatctcctcccgcaagcagaaaaacgtggacgatgcggtggagggcctcagggcaaaggggatcaccgtggtcggggccgtctgccacgtctccaacgccgagcagcgcaagcaccttgttgacacggccgtcaagaatttcggacatattgatattgttgtctccaatgccgctgcaaatccttctgtggatagcatactagagatgaaagagtcagttcttgacaagctatgggacattaatgtcaaagcttctattcttctacttcaggacgccgcaccacatttgaggaagggatcatctgtgatactaatttcttcaattgctggctataatcctgatgcagctttaacgatgtatggtgttacaaagactgccctttttggtctcacgaaggctcttgctactgagatgggcccaaatacccgtgttaactgtatagctcctgggtttgttcctacacgttttgctggtttcctcacaactaatgagaccattagaaatgaacttatcgagaggagcataattaagagattgggtagcgtggaagacatggcttcagccgccgctttcctggcatccgacgatgcatccttcattacagctgaaacaattgttgttgctggaggaacacaatcaagactatagagaagttttgagggtcaatcagccacagtgtcctgatcaataaatatagtgatactagtaggtctagtatacaacatttcaagtgcgcttagatataaacaagatgcagtgtaataaatttgatgttggggtgccatacaatcttgcaaggacgaatgatagtctatcggcattgtggtccgaacatgtattgttgtataacctgtgttcatgtataggaattgcgatgaagtgacagagtg

SEQ ID NO: 65247 - protein, 284 aa, Triticum aestivum
  peptide (1)..(284): Ceres Seq. ID no. 12625806
DIRHRRVSHINARFHRDKTAARSKGNTARPAMDVKCRRLEGKVAVVTASTQGIGLAIAERLGREGAAVVISSRKQKNVDDAVEGLRAKGITVVGAVCHVSNAEQRKHLVDTAVKNFGHIDIVVSNAAANPSVDSILEMKESVLDKLWDINVKASILLLQDAAPHLRKGSSVILISSIAGYNPDAALTMYGVTKTALFGLTKALATEMGPNTRVNCIAPGFVPTRFAGFLTTNETIRNELIERSIIKRLGSVEDMASAAAFLASDDASFITAETIVVAGGTQSRL

SEQ ID NO: 65248 - protein, 253 aa, Triticum aestivum
  peptide (1)..(253): Ceres Seq. ID no. 12625807
MDVKCRRLEGKVAVVTASTQGIGLAIAERLGREGAAVVISSRKQKNVDDAVEGLRAKGITVVGAVCHVSNAEQRKHLVDTAVKNFGHIDIVVSNAAANPSVDSILEMKESVLDKLWDINVKASILLLQDAAPHLRKGSSVILISSIAGYNPDAALTMYGVTKTALFGLTKALATEMGPNTRVNCIAPGFVPTRFAGFLTTNETIRNELIERSIIKRLGSVEDMASAAAFLASDDASFITAETIVVAGGTQSRL

SEQ ID NO: 65249 - protein, 147 aa, Triticum aestivum
  peptide (1)..(147): Ceres Seq. ID no. 12625808
MKESVLDKLWDINVKASILLLQDAAPHLRKGSSVILISSIAGYNPDAALTMYGVTKTALFGLTKALATEMGPNTRVNCIAPGFVPTRFAGFLTTNETIRNELIERSIIKRLGSVEDMASAAAFLASDDASFITAETIVVAGGTQSRL

SEQ ID NO: 65250 - DNA, 1483 bp, Triticum aestivum
  misc_feature (1)..(1483): Ceres Seq. ID no. 13598565
acacacatcgatcagcagcagcctcaagcaaacgcaaactcgtactgctagcccgtgtagtttgttaagcagcaagcttgcatccacacatcgatcggcagaccaccgtggtcaccggacaccaatccaccatgccgtccattgacaaggccaccgacaacggcgagatgaagcagcggcagccggagcaggagctggtctgcgtcacgggggccggaggcttcatcggctcctgggtcgtgaaggagctcctcctccgcggctaccgcgtcaggggaaccgccagggaccccgctgaccaaaagaacgcacacctgctggcgatggagggcgccgaggagaggctcaccctgtgccgggccgacgttcttgactacgacggcctccgcaccgccttccgcggctgccacggcgtcttccacgtcgcctcgccagtctccaacgacccggacctcgtgccggtcgccgtggaggggacgaggaacgtgatcagagcggcggcggacgcgggcgtgcggcgcgtggtgttcacttcgtcctatggcgccgtgcacatggaccccaaccgcaggcccgacgcagtgctcgacgagtcgtgctggagcgactatgagtactgcaaaaacacagggaacatgtactgctgcgccaagatgatggcggagatcacggcgacggaggaggcggccaagaggggcctggagctagcggtggtggtgccgtccatgaccatgggccccatgctgcagcagtcgctcaacttcagcagcagccacgtggcccgctacctcaccggcgcaaagcccacctacccgaatgccgtcgccgcctacaccgacgtccgtgatgtcgcccgcgcgcacgtcttcgtctacgagcacccggacgcgcgcggccgctacctctgcatcggtgccgtgctgcaccgcgcgcatttccttcagctcctcggcgacctctttcctcagtacaacataaccgccaagtgcgaagacgacgacaattccatggccaagccatacaagttctcgaaccggaggctgagggagctcggattagagttcactccgttgagggaaagcttgtacgagacagtgatgtgcttgcagaaaaagggctatctgcctctccccgttgttcccatagcacagaagcgtgcgtacttgtaacagggcaggacaggggataagcccatctgatgaaacaacaagagcaaagccgcaagaacaaaagaagatactatccggattttggagcttcagcatagaattaattgtgtattcctacaaagcacagtgtggcatgtaaatagaattaaaaccacaataagtattttggaacggagggagtactacctccgtctaggtgaataagtcattcgcgcagttctaggtcatcgatttgaggaattaaacatatgctaaaaaaaaaaaaaaaaaagcttatcgataccgtcgacctcgagggggggcccggtacccaa

SEQ ID NO: 65251 - protein, 345 aa, Triticum aestivum
  peptide (1)..(345): Ceres Seq. ID no. 15222372
MPSIDKATDNGEMKQRQPEQELVCVTGAGGFIGSWVVKELLLRGYRVRGTARDPADQKNAHLLAMEGAEERLTLCRADVLDYDGLRTAFRGCHGVFHVASPVSNDPDLVPVAVEGTRNVIRAAADAGVRRVVFTSSYGAVHMDPNRRPDAVLDESCWSDYEYCKNTGNMYCCAKMMAEITATEEAAKRGLELAVVVPSMTMGPMLQQSLNFSSSHVARYLTGAKPTYPNAVAAYTDVRDVARAHVFVYEHPDARGRYLCIGAVLHRAHFLQLLGDLFPQYNITAKCEDDDNSMAKPYKFSNRRLRELGLEFTPLRESLYETVMCLQKKGYLPLPVVPIAQKRAYL

SEQ ID NO: 65252 - protein, 333 aa, Triticum aestivum
  peptide (1)..(333): Ceres Seq. ID no. 15222373
MKQRQPEQELVCVTGAGGFIGSWVVKELLLRGYRVRGTARDPADQKNAHLLAMEGAEERLTLCRADVLDYDGLRTAFRGCHGVFHVASPVSNDPDLVPVAVEGTRNVIRAAADAGVRRVVFTSSYGAVHMDPNRRPDAVLDESCWSDYEYCKNTGNMYCCAKMMAEITATEEAAKRGLELAVVVPSMTMGPMLQQSLNFSSSHVARYLTGAKPTYPNAVAAYTDVRDVARAHVFVYEHPDARGRYLCIGAVLHRAHFLQLLGDLFPQYNITAKCEDDDNSMAKPYKFSNRRLRELGLEFTPLRESLYETVMCLQKKGYLPLPVVPIAQKRAYL

SEQ ID NO: 65253 - protein, 281 aa, Triticum aestivum
  peptide (1)..(281): Ceres Seq. ID no. 15222374
MEGAEERLTLCRADVLDYDGLRTAFRGCHGVFHVASPVSNDPDLVPVAVEGTRNVIRAAADAGVRRVVFTSSYGAVHMDPNRRPDAVLDESCWSDYEYCKNTGNMYCCAKMMAEITATEEAAKRGLELAVVVPSMTMGPMLQQSLNFSSSHVARYLTGAKPTYPNAVAAYTDVRDVARAHVFVYEHPDARGRYLCIGAVLHRAHFLQLLGDLFPQYNITAKCEDDDNSMAKPYKFSNRRLRELGLEFTPLRESLYETVMCLQKKGYLPLPVVPIAQKRAYL

SEQ ID NO: 65254 - DNA, 1212 bp, Triticum aestivum
  misc_feature (1)..(1212): Ceres Seq. ID no. 13598589
gagtaggacagccccagaggaggaggatacacagccgctagctcttcccccgcggcgcccgatctcgtcgtacttggagccttggaggagactcgaaccctaatcccctcccgccgcaggagagatcccgctcagcctcggctccaatccgcgactcgactcgactcgaagctccagctccgccgccgccccccgccgctgccgatggatccgaagctggtggaggtgacgcagctgatcgaccgcttcaaggcggccttcaaggccagcaatttcgacgtctgctcgaccctcctctcgcagctcaaggtcctcctcaccaagttccccagccttcccccggtgttccagcagacgcccaacgccgtggaggagctcaagcttgcgagggaaatttatgagcaggcagttattttgagtgtgaaaatggaagaccaagatgcatttgaaagggacttctgccagctcaagccgtattacatggacacatgtggcataattcccccatcatcggaggagtacccaatcatgggggctaaccttctgaggctgttagtccagaatagaattgcggagttccacactgagctggagcttcttcccgccaaagcgctggataatgcttacatcaagcacggggttgagctcgagcagtcctttatggagggcgcatacaaccgcgtgctgagcgctcgacaaaccgcgccgcatgaaacctacatatacttcatggaccttctcgtcaaaacggttagagacgagatagctgggtgcagcgagaagggatatgattacctgtcaataaacgacgcgaagcagatgtttaagttcagctccgacaaggaactgcaacagtacatcgcagaggagcaccccgagtgggatgtcaaggacggccgggtcttgttccagaaggcgaaggagtcccagccctgcaaggagatcccggcggcgccggtcatcaaccagacccttggctacgcgagggaattggagaggattgtgtgatttgtttgcctcttttttcttcatctttggactgagtttcccatgaagaggtggattattggattgccctgtgactcggctgtactattttgttaaatcgtttgtttcacctagggtttccaaagctacacaactgtgaaatgtcggcctaaaatggcacaagaaacaatgcctgttatgttaatcaattgattgtgtaagcgg

SEQ ID NO: 65255 - protein, 267 aa, Triticum aestivum
  peptide (1)..(267): Ceres Seq. ID no. 13598590
MDPKLVEVTQLIDRFKAAFKASNFDVCSTLLSQLKVLLTKFPSLPPVFQQTPNAVEELKLAREIYEQAVILSVKMEDQDAFERDFCQLKPYYMDTCGIIPPSSEEYPIMGANLLRLLVQNRIAEFHTELELLPAKALDNAYIKHGVELEQSFMEGAYNRVLSARQTAPHETYIYFMDLLVKTVRDEIAGCSEKGYDYLSINDAKQMFKFSSDKELQQYIAEEHPEWDVKDGRVLFQKAKESQPCKEIPAAPVINQTLGYARELERIV

SEQ ID NO: 65256 - protein, 193 aa, Triticum aestivum
  peptide (1)..(193): Ceres Seq. ID no. 13598591
MEDQDAFERDFCQLKPYYMDTCGIIPPSSEEYPIMGANLLRLLVQNRIAEFHTELELLPAKALDNAYIKHGVELEQSFMEGAYNRVLSARQTAPHETYIYFMDLLVKTVRDEIAGCSEKGYDYLSINDAKQMFKFSSDKELQQYIAEEHPEWDVKDGRVLFQKAKESQPCKEIPAAPVINQTLGYARELERIV

SEQ ID NO: 65257 - protein, 175 aa, Triticum aestivum
  peptide (1)..(175): Ceres Seq. ID no. 13598592
MDTCGIIPPSSEEYPIMGANLLRLLVQNRIAEFHTELELLPAKALDNAYIKHGVELEQSFMEGAYNRVLSARQTAPHETYIYFMDLLVKTVRDEIAGCSEKGYDYLSINDAKQMFKFSSDKELQQYIAEEHPEWDVKDGRVLFQKAKESQPCKEIPAAPVINQTLGYARELERIV

SEQ ID NO: 65258 - DNA, 1826 bp, Triticum aestivum
  misc_feature (1)..(1826): Ceres Seq. ID no. 13597647
gaccattacctagaacatcctaatcgaaaaaaaaataaaccaagagagagagagggaggaagggcggaaggcggagtggagcgaccccgaataaccctagcttcttcctggtcctcgtcgtcgccgtggccctcctactcgccagccacccggccggcgccccgatcccgccgccatggtgctcggcaagatcgccatcgtcatcggctcagggatcatcggaaccatggtcaccggcggcgacggcagcaagcttccggacctcagggacgtgctctccttctccttcaagttcatgaagcaggacaagaaggaaggctcgtccaacgcctcgccgcagaacgacctcttgttgtctcaggtcaactatctcagggatcagctccaagcattgtcccgtgaggctcaatgcccgcagattatcaacgtcaatggcggaccaggcgctggtgcttatggtttaacttttattgctgttggagccattggctatttatacataagatggaagggatggaaaatttctgatatgatgtttgtcaccaagcgtggcttggctgatgcctgcaacatagttggcaaacaattggatcaggtttcagaaagtgttcatgcttcaaaaaagcatttggctggaaggatcgaccgagtcgattgtagtctagatgaatgccacgaaattattgaagccacagggaaagaggttacagtcatacatggagatctaagtgcctttcaggaggaaatacaatcagttcaccatgttgtccgcactctggagacaaagcttggacgccttgcatatactcaagatcacacaacacgaggaatacatgagttatgtgagttcactaaaagattggatcggagtccgaaagccgatactcttaaggtcacagcatcaactcctctccctgcaatcgagtcttcagaaggaattactaggactgcttcgttgccgtcaggttcagaacccgtgtctcctgtagctcaatcacctagagcagatccacctaaggttctgcgttcgtctacagccatatcagcatcaggactgagtatgctagctggaactacagcaatacctaaaagggctgtgatcaaccgggcaacttcgatgaaggaaggagtgccgacccccgaggccccaaagaacacttcaagcgcagcagcagcaaccatcaagagacctgtttcgggttcgagccggttcggtttcctgcggggtttcgccagttgagggacaggcgaacagtgatgatatactacatatggcactgccttgctgtggtttgtgccaaaggacagcacgacatcccagtaacctttttttattacttgtaacatttattatctatctatccatctagctagatatgcagggcaggtaaggtagtagaaaaacatggcagtgggcaaaggaaggggaatttgctttgccagacaaatttttgtagaaagcaaaatatgtatggtggagatacgaggggcggtgatatgatggcaagagatgcgttacgtacactgtcatttactcgcatggttaattttggcgaagcaaggatgatgcatacgaggtttctgatctcgatatcaatggatattacatgtagccgcatctggaagatgcggatgaaaacagtgtcttgttcgagtctagcgagtcatgtagcgggggactgctactgttttaagtatgggcaagcaagaatgttgctgataagaaaaggagacctggtagctggtggtgttgctctaccaccattctgttgctgatgctttgcaccatgaataaaatcaatctgcttagcatgttttgtgcaccc

SEQ ID NO: 65259 - protein, 354 aa, Triticum aestivum
  peptide (1)..(354): Ceres Seq. ID no. 15222156
MVLGKIAIVIGSGIIGTMVTGGDGSKLPDLRDVLSFSFKFMKQDKKEGSSNASPQNDLLLSQVNYLRDQLQALSREAQCPQIINVNGGPGAGAYGLTFIAVGAIGYLYIRWKGWKISDMMFVTKRGLADACNIVGKQLDQVSESVHASKKHLAGRIDRVDCSLDECHEIIEATGKEVTVIHGDLSAFQEEIQSVHHVVRTLETKLGRLAYTQDHTTRGIHELCEFTKRLDRSPKADTLKVTASTPLPAIESSEGITRTASLPSGSEPVSPVAQSPRADPPKVLRSSTAISASGLSMLAGTTAIPKRAVINRATSMKEGVPTPEAPKNTSSAAAATIKRPVSGSSRFGFLRGFAS

SEQ ID NO: 65260 - protein, 337 aa, Triticum aestivum
  peptide (1)..(337): Ceres Seq. ID no. 15222157
MVTGGDGSKLPDLRDVLSFSFKFMKQDKKEGSSNASPQNDLLLSQVNYLRDQLQALSREAQCPQIINVNGGPGAGAYGLTFIAVGAIGYLYIRWKGWKISDMMFVTKRGLADACNIVGKQLDQVSESVHASKKHLAGRIDRVDCSLDECHEIIEATGKEVTVIHGDLSAFQEEIQSVHHVVRTLETKLGRLAYTQDHTTRGIHELCEFTKRLDRSPKADTLKVTASTPLPAIESSEGITRTASLPSGSEPVSPVAQSPRADPPKVLRSSTAISASGLSMLAGTTAIPKRAVINRATSMKEGVPTPEAPKNTSSAAAATIKRPVSGSSRFGFLRGFAS

SEQ ID NO: 65261 - protein, 314 aa, Triticum aestivum
  peptide (1)..(314): Ceres Seq. ID no. 15222158
MKQDKKEGSSNASPQNDLLLSQVNYLRDQLQALSREAQCPQIINVNGGPGAGAYGLTFIAVGAIGYLYIRWKGWKISDMMFVTKRGLADACNIVGKQLDQVSESVHASKKHLAGRIDRVDCSLDECHEIIEATGKEVTVIHGDLSAFQEEIQSVHHVVRTLETKLGRLAYTQDHTTRGIHELCEFTKRLDRSPKADTLKVTASTPLPAIESSEGITRTASLPSGSEPVSPVAQSPRADPPKVLRSSTAISASGLSMLAGTTAIPKRAVINRATSMKEGVPTPEAPKNTSSAAAATIKRPVSGSSRFGFLRGFAS

SEQ ID NO: 65262 - DNA, 1088 bp, Triticum aestivum
  misc_feature (1)..(1088): Ceres Seq. ID no. 13585437
agtcagccatacaggtcgatcacgggagttttgactcttgaacccgatttggagcaaccgagcggcgagcggcgcgggcgcgggagcggccaaggagtgcgacagtgcgaccggcaaccggcagccggcgcggcttgctgtcgtctcggcgaaggcgcgcccagatctactaaagcaatcacatggcaactctgaaagatgcagtagcacggaagcctatactggcaacaatccgcctgcttgttccagctggtgctgcacgtcctgcaccaccagttggtccggcactcggtttttataggctcaatttgatggcgttctgcaaggatttcaatgcaaggacccagaaatacaaggcagaaactcctatgcaggtcacgctaactgcctacaaagatagcactttcgagtttgtagtcaagtcgccgtccgtttcatggttcctcaagaaggcagcaggaattgagaccgccagcactcgtcctggtcacaacgttgtgtcatccctaacactccgccacgtttacgagattgcaaaacttaaacaagctgaccccttctgcaagcatatgtcactcgaggcgttgtgcaaatctatcattggcacagctaactcaatgggcattgagattgtcaaggatctctgagtggattggctcgtctccaatactaccaagctcctaccttcccaggtgacatttgtgagctgtagtttctcattgatgtgggagaagatgggagtttttcaactgttgatccttactgagctcttcagcccaggcaatattttcattttcttcatacccagtcttcagctgttcctgctgcaatgttgatctcttccatgggagatatttcacggaaaataatgttacttctaagcttgcgccagacgaacaatattatccatttctgttaccttgccaagttgctagttgtttgtttacttttggtatcattgtcatttctcgtgtaatggcaatgtatttgaaacacaaatatgtaatggttaattttggtgcttttacatgacttttacttgcaactttaaaaaaaaaaaaaaaaaacggcacgagaagcttatcgat

SEQ ID NO: 65263 - protein, 154 aa, Triticum aestivum
  peptide (1)..(154): Ceres Seq. ID no. 13585438
MATLKDAVARKPILATIRLLVPAGAARPAPPVGPALGFYRLNLMAFCKDFNARTQKYKAETPMQVTLTAYKDSTFEFVVKSPSVSWFLKKAAGIETASTRPGHNVVSSLTLRHVYEIAKLKQADPFCKHMSLEALCKSIIGTANSMGIEIVKDL

SEQ ID NO: 65264 - protein, 111 aa, Triticum aestivum
  peptide (1)..(111): Ceres Seq. ID no. 13585439
MAFCKDFNARTQKYKAETPMQVTLTAYKDSTFEFVVKSPSVSWFLKKAAGIETASTRPGHNVVSSLTLRHVYEIAKLKQADPFCKHMSLEALCKSIIGTANSMGIEIVKDL

SEQ ID NO: 65265 - protein, 92 aa, Triticum aestivum
  peptide (1)..(92): Ceres Seq. ID no. 13585440
MQVTLTAYKDSTFEFVVKSPSVSWFLKKAAGIETASTRPGHNVVSSLTLRHVYEIAKLKQADPFCKHMSLEALCKSIIGTANSMGIEIVKDL

SEQ ID NO: 65266 - DNA, 1210 bp, Triticum aestivum
  misc_feature (1)..(1210): Ceres Seq. ID no. 13597551
ctacggccgcttagccaacgcgaggcgccgccggagacggcgatgcaggcggcggcctcttaccggggcgcggcaggccaccgccgcgccggccacccctcccggcgccctcccggtccctctcttcttctacccgtcagcgtcgctggcgtcggccgtttctccgacgcggcggttccgctccgagtcggctccctgccccttcctcgggctcgcggcggcggcgatttcgcgcggctggatgccagggacggggaggcgtggcagctgacgcgcgcgctcgggctaatccttcctggtcaccagaaaatggtgcatgctaacctgctgaaaactgctgttctttcaacaatgtcgatgctcataatgcctcttgaggcatcagcggagacatgtcaaccaactagttcttttgccaatatgccgattttcattgctgtcgctctaataggagctgctgtgggtggattattagcacggcaaagaaaggacgaactgaagcgattgaataatcaacttcgtcagattaatactgcccttagaaggcaggcacagattgaatcgtttgcccccggccttacttatgcgcctgtagggagagcaggagaaattgaggtcattgttgatcccaggaagcagcagttggtggtaaatttgaaaaatgggaagaattatatgaggaatcaggaccttgataaggcagtaatggagttcaagacagctctggagcttgcagaaagcataggggatcgctttgaggagaagaaagctgcgcgaggattaggcgcatcactacaaaggttgggacagtacagagaagcaatgagctggtactacaaggttctggcgctatcaaaggagaccggcgaggattctggctgcaccgaggcctacggcgcgatagccgactgctgcgtcgatctcggcgacttggaaggagcagcgaagctgtatgacgagtacatatcaaggctgcagccccgtgattgagcgctcggaccgttgttggagatcaaacacatcatatgccagagcccgtccgttgccctgcttctgatgtcgcggttgcttgcttgctatctggcggaaaacgagccgattttgcttgtcttttaacttggttggagcacttggattgtccatgaggagcccctctctacttgtgtatatgaatttcgatggtgctatggcatgtgctggttcagagttc

SEQ ID NO: 65267 - protein, 329 aa, Triticum aestivum
  peptide (1)..(329): Ceres Seq. ID no. 13597552
LRPLSQREAPPETAMQAAASYRGAAGHRRAGHPSRRPPGPSLLLPVSVAGVGRFSDAAVPLRVGSLPLPRARGGGDFARLDARDGEAWQLTRALGLILPGHQKMVHANLLKTAVLSTMSMLIMPLEASAETCQPTSSFANMPIFIAVALIGAAVGGLLARQRKDELKRLNNQLRQINTALRRQAQIESFAPGLTYAPVGRAGEIEVIVDPRKQQLVVNLKNGKNYMRNQDLDKAVMEFKTALELAESIGDRFEEKKAARGLGASLQRLGQYREAMSWYYKVLALSKETGEDSGCTEAYGAIADCCVDLGDLEGAAKLYDEYISRLQPRD

SEQ ID NO: 65268 - protein, 315 aa, Triticum aestivum
  peptide (1)..(315): Ceres Seq. ID no. 13597553
MQAAASYRGAAGHRRAGHPSRRPPGPSLLLPVSVAGVGRFSDAAVPLRVGSLPLPRARGGGDFARLDARDGEAWQLTRALGLILPGHQKMVHANLLKTAVLSTMSMLIMPLEASAETCQPTSSFANMPIFIAVALIGAAVGGLLARQRKDELKRLNNQLRQINTALRRQAQIESFAPGLTYAPVGRAGEIEVIVDPRKQQLVVNLKNGKNYMRNQDLDKAVMEFKTALELAESIGDRFEEKKAARGLGASLQRLGQYREAMSWYYKVLALSKETGEDSGCTEAYGAIADCCVDLGDLEGAAKLYDEYISRLQPRD

SEQ ID NO: 65269 - protein, 226 aa, Triticum aestivum
  peptide (1)..(226): Ceres Seq. ID no. 13597554
MVHANLLKTAVLSTMSMLIMPLEASAETCQPTSSFANMPIFIAVALIGAAVGGLLARQRKDELKRLNNQLRQINTALRRQAQIESFAPGLTYAPVGRAGEIEVIVDPRKQQLVVNLKNGKNYMRNQDLDKAVMEFKTALELAESIGDRFEEKKAARGLGASLQRLGQYREAMSWYYKVLALSKETGEDSGCTEAYGAIADCCVDLGDLEGAAKLYDEYISRLQPRD

SEQ ID NO: 65270 - DNA, 549 bp, Triticum aestivum
  misc_feature (1)..(549): Ceres Seq. ID no. 13597555
agagctccgtccccccgcgtcgccgcttagcgtacgcaccaccgcaccggcagcaggcgaggggcggccggcgacctactttggagcgcagacggaaggtttctacattttccatggcgcttgtggtgatgtgcgggcagccgtgcagcggcaagtcagaggctgcagcttgtctcgctgccgctcttcgctcctccgtgcttgacgttactgtccgcgtcattgacgagtcatcgctccatcttggacgcgatgaaagctacaaagatatggttgtggagaaaaacttaagaggagttttgagatcagaagttgataggtccgtgtcacgggatggcataatcatcgtggattctctgaacaatattaaggggtaccgatacgagctgtggtgtcttgcgcgtgcttcgggaataagatattgtgtgttcttttgtgatacagaagtggaccattgtagggattggaacgtcaagcgtcaggagaaaggagaaccctcatatgatagcaatatatttgaagatctggcaaggagatttgagaggcctg

SEQ ID NO: 65271 - protein, 182 aa, Triticum aestivum
  peptide (1)..(182): Ceres Seq. ID no. 13597556
SSVPPRRRLAYAPPHRQQARGGRRPTLERRRKVSTFSMALVVMCGQPCSGKSEAAACLAAALRSSVLDVTVRVIDESSLHLGRDESYKDMVVEKNLRGVLRSEVDRSVSRDGIIIVDSLNNIKGYRYELWCLARASGIRYCVFFCDTEVDHCRDWNVKRQEKGEPSYDSNIFEDLARRFERP

SEQ ID NO: 65272 - protein, 145 aa, Triticum aestivum
  peptide (1)..(145): Ceres Seq. ID no. 13597557
MALVVMCGQPCSGKSEAAACLAAALRSSVLDVTVRVIDESSLHLGRDESYKDMVVEKNLRGVLRSEVDRSVSRDGIIIVDSLNNIKGYRYELWCLARASGIRYCVFFCDTEVDHCRDWNVKRQEKGEPSYDSNIFEDLARRFERP

SEQ ID NO: 65273 - protein, 140 aa, Triticum aestivum
  peptide (1)..(140): Ceres Seq. ID no. 13597558
MCGQPCSGKSEAAACLAAALRSSVLDVTVRVIDESSLHLGRDESYKDMVVEKNLRGVLRSEVDRSVSRDGIIIVDSLNNIKGYRYELWCLARASGIRYCVFFCDTEVDHCRDWNVKRQEKGEPSYDSNIFEDLARRFERP

SEQ ID NO: 65274 - DNA, 1479 bp, Triticum aestivum
  misc_feature (1)..(1479): Ceres Seq. ID no. 13597559
acacagcccactcgcagcagcagtgccactaccagcgcacaccaatccagctgattttgagcacgagcagctcttgcccaacagccaccgtcgtcggctactgtcatccatggccatgaggaacgcgacgcagcaggtggtccgggccttggagccgtccctcaccaggagccttcatgcgtccccggacagcaagaagatcgtgggcgtgttctacaagggcggcgagtacgcggggcagaaccccaacttcgtggggtgtgtggagaacgcgctgggcatccgtagctggctcgagtcgcagggccaccagtacatcgtcaccgacgacaaggacggccccaactgcgagctagagaagcacatcgcggacgcgcacgtgctcatcaccacgccgttccacccggcgtacgtgagcgcggaccggatcaggcgcggcaagaacctggagctgctcctcacggcggggatcggctccgaccacatcgagctgtcggcggcggcggccgcggggctgaccgtcgccgaggtcacgggcagcaacaccgtgtcggtggcggaggaccagctgatgcgcatcctggtcctcatgcgcaacttcctgccgggccaccaccaagccatcaacggggagtgggacctcgccggcatcgcgcaccgggcctacgacctggagggcaagacggtgggcaccgtcggcgccggccgcatcgggaagctgctgctccagcgcctcaagccattcggctgcaacctgctctaccacgacaagctccgcgtcgacgccgcgctggagaaggagctcggcgccgccttcgaggaggacctcgacgccatgctgcccaagtgcgacgtcgtcgtgctcaacatgccgctcaccgagaagacaaagggcatgttcaacaaggagaagatcgccaagatgaagaaaggcgtcatcatcgtgaacaacgctcgtggagcgatcatggatacgcaggcagtggcagacgcttgcaagagtaggcacatcgctggatacggcggcgacgtgtggtacccgcagccggcgcccaaggagcacccgtggaggtacatgcccaacaacgcaatgaccccgcacatctccggcaccaccattgacggccagctgaggtacgcggccggtgtgaaggacatgctggagaggtacttcaagggacaggacttcccggagcccaactacattgtcaaggaaggcaagctcgccagccagtaccagtgagcgtccatccatggagccgcagctgcacgcctgcatcagcatgccggttaccagaaactaaataaaagatgcttggccgttgcaatggccatcacccataaatatatctatacctaaataaaatggaacaaaaactggttgctttaatttgctatcagcttcctttgctgtatttttctcgtacactgtccttcgctgtatttcgtttgaactataataaagtcaaagtgttgtcc

SEQ ID NO: 65275 - protein, 413 aa, Triticum aestivum
  peptide (1)..(413): Ceres Seq. ID no. 13597560
HSPLAAAVPLPAHTNPADFEHEQLLPNSHRRRLLSSMAMRNATQQVVRALEPSLTRSLHASPDSKKIVGVFYKGGEYAGQNPNFVGCVENALGIRSWLESQGHQYIVTDDKDGPNCELEKHIADAHVLITTPFHPAYVSADRIRRGKNLELLLTAGIGSDHIELSAAAAAGLTVAEVTGSNTVSVAEDQLMRILVLMRNFLPGHHQAINGEWDLAGIAHRAYDLEGKTVGTVGAGRIGKLLLQRLKPFGCNLLYHDKLRVDAALEKELGAAFEEDLDAMLPKCDVVVLNMPLTEKTKGMFNKEKIAKMKKGVIIVNNARGAIMDTQAVADACKSRHIAGYGGDVWYPQPAPKEHPWRYMPNNAMTPHISGTTIDGQLRYAAGVKDMLERYFKGQDFPEPNYIVKEGKLASQYQ

SEQ ID NO: 65276 - protein, 377 aa, Triticum aestivum
  peptide (1)..(377): Ceres Seq. ID no. 13597561
MAMRNATQQVVRALEPSLTRSLHASPDSKKIVGVFYKGGEYAGQNPNFVGCVENALGIRSWLESQGHQYIVTDDKDGPNCELEKHIADAHVLITTPFHPAYVSADRIRRGKNLELLLTAGIGSDHIELSAAAAAGLTVAEVTGSNTVSVAEDQLMRILVLMRNFLPGHHQAINGEWDLAGIAHRAYDLEGKTVGTVGAGRIGKLLLQRLKPFGCNLLYHDKLRVDAALEKELGAAFEEDLDAMLPKCDVVVLNMPLTEKTKGMFNKEKIAKMKKGVIIVNNARGAIMDTQAVADACKSRHIAGYGGDVWYPQPAPKEHPWRYMPNNAMTPHISGTTIDGQLRYAAGVKDMLERYFKGQDFPEPNYIVKEGKLASQYQ

SEQ ID NO: 65277 - protein, 375 aa, Triticum aestivum
  peptide (1)..(375): Ceres Seq. ID no. 13597562
MRNATQQVVRALEPSLTRSLHASPDSKKIVGVFYKGGEYAGQNPNFVGCVENALGIRSWLESQGHQYIVTDDKDGPNCELEKHIADAHVLITTPFHPAYVSADRIRRGKNLELLLTAGIGSDHIELSAAAAAGLTVAEVTGSNTVSVAEDQLMRILVLMRNFLPGHHQAINGEWDLAGIAHRAYDLEGKTVGTVGAGRIGKLLLQRLKPFGCNLLYHDKLRVDAALEKELGAAFEEDLDAMLPKCDVVVLNMPLTEKTKGMFNKEKIAKMKKGVIIVNNARGAIMDTQAVADACKSRHIAGYGGDVWYPQPAPKEHPWRYMPNNAMTPHISGTTIDGQLRYAAGVKDMLERYFKGQDFPEPNYIVKEGKLASQYQ

SEQ ID NO: 65278 - DNA, 1328 bp, Triticum aestivum
  misc_feature (1)..(1328): Ceres Seq. ID no. 13655934
acacgcgcgcacccacgcataggtcgctctcctgctccgctctcccttcgcgtccaagcctccctcccatccccgctgcaccgcaagtcaaccgcctttccacctcctccgccccctcgccgtcgcctccttcctggcgcaacgccagtatatagagccgcacaggcattcctttgctgccacgacaaagaggaggcagaggttcgcaaggttgaaactgcaatcccggcgacggcaaaggcttctctttagttagctagcgtagcagacttctattcatatactgttcttgcgtgctctgcacttcttggctagctagctggtcggccatggcggatcaccagaggcagaggatccacccggtggacctggaggcgggccagccgaggccctcggcgccgctggtgccgccggggagctcgttccggtccgacaagggcgaccctgccgcggccccggacaggaggccgccgcaccaccagccgctgcccccgccgaagcggcgcaggggctgctgctgccgcttcatctgctgcgtcctggtgaccgtcatcctgctcgccgtcctcgccgcggtggccctgggcgcgctctacctggtgttccagcccaaggcgccccactactcggtggaccggctgtcggtgtcgcagttccaggtggacccgaccctcacggcgagcgcgcggttcgacgtcacggtgacggcggcgaaccccaacagccgcatcggcatcttctacgagcgcgggtccagcctgagcgtgtggtacgacacccaccggctcgcccagggcgcgctcccggccttctaccagggccgccgcaacacgacggtgctgggcgtggtaatggccgggcaggcgcagctgggcagcgcggtggtggcggcgctgcgcgacgagcagcagacgggcgccgtgccgctggtgttccgcgccgacgtgcccgtgcgggtggagctcggcagcctcaagctgtggacggtcacgtccagggtgcgctgcgacctcgtcgtcgacagcctcctcaacgccagcagccagatcaagatcaaggccagcaactgcaagttcagcttgaagctgtgatcggcccttgtctttcttttcgttcatggtgtagtgtaattctttgggtggttcgttctggggataggtcgatcgagttcttcgccctgtgggcgcgctggattcttttggcagcagagagccgtgccgtgtttgcatcggtgcactcccgccccctagcatatcttttctagtagctccgtgcatgtacatcttgtgtagagttgatattaccttgcgttagagaggagtaataat

SEQ ID NO: 65279 - protein, 253 aa, Triticum aestivum
  peptide (1)..(253): Ceres Seq. ID no. 13655935
MADHQRQRIHPVDLEAGQPRPSAPLVPPGSSFRSDKGDPAAAPDRRPPHHQPLPPPKRRRGCCCRFICCVLVTVILLAVLAAVALGALYLVFQPKAPHYSVDRLSVSQFQVDPTLTASARFDVTVTAANPNSRIGIFYERGSSLSVWYDTHRLAQGALPAFYQGRRNTTVLGVVMAGQAQLGSAVVAALRDEQQTGAVPLVFRADVPVRVELGSLKLWTVTSRVRCDLVVDSLLNASSQIKIKASNCKFSLKL

SEQ ID NO: 65280 - DNA, 1945 bp, Triticum aestivum
  misc_feature (1)..(1945): Ceres Seq. ID no. 13585454
atcactcgacacatcgacccttgactcgagtagacgcaacaacagcaccgacttgaccaaagtaacttccttctcggcatgagcggctcatcagccattgcccttgcaatccgcccaacctcgcatccctttccccgaggagtggcagagctcgcctccctcgcgtcgtcgtcctcgtcggcatgagcggtttcctcgctgtggccggcaagattgtcacgttcctgctgtgggtgctcttcctggtcctgcagacagccaccaaggttgtcgggggcctcctgcaggttgcaccgccagccgagccacaagaagagccgcaaccagaagcagcaccacgacccagatcgccgccggctgcgaggaaccgcgccggcggcggccccgcggatccatacggtccgcagtcacagctgtgggacccaccaccgcccccccacaccgctccggtgacggatgagtatcactcgtcctcgatctaccggcggcgggtgagcgccccgcaggccgctgaagatttggtggtttcctccagcagttactctcattcggccgtggcagcagcgccagcctctccggctcatgccgtctcagtgccaccagtgtcgcggacaattaagacaccggcagttgccagtaagcggcccaagctggagaggaagtactccaagattgtggaccagtaccgctccttggatgaggttattgaagcattagcgcaagctggcctcgagtcttccaatttaatcattggaattgatttcacgaaaagtaatgaatggacaggaaagagttcattcaatggtgtgagcctgcatcatattggtgatgcccccaatccttacgagcaggcaatctccatcattggacaaacactgtcagcttttgatgaggataacttaattccgtgctatggttttggagatgcatctacacatgaccaagatgtatttgccttcaaccctgacgaaagaccatgctatgggtttcaggaggctttggctcgatatagagaaattgttcctcatcttcgtctttccggtcctacatcattttctccaataattgaaatggccacaaccattgttgagcaaagcggtggccaataccatgttttagtaataattgccgatggacaagtcacacgaagtgttaacactgaatttggtcaattaagtacccaagagcagatgactgtagatgctattgtgcaagccagtgaatttcctttgtctataattctggtcggagttggagatggtccttgggacatgatgaatgaatttgatgacaacattcctgctagatcttttgacaatttccagtttgtcaacttcaccggaatcatgtcaaaaaagatcagtcaaagcaacaaggagacagagtttgctctttcagcactcatggaaatacctttgcagtacaaagcaacattacagcttggaatactggggcgtcgacttgcaaagtctccagagcgagttccacttcctcctccttttgcaagttataataccacctcaagagcagcaccatcttgggcaaataacttccgaagtgtgccttctaatcttagggaggaggcgactttagattcaacaatcacaccgtcagttacacccccaccagctgcagatgctagagcatcagaactccaattctgcccagtttgccttgccaaaccccgggacatggcatttggttgtggtcatcagacttgttcagggtgtggaccgcaggtcgtggattgccctatctgtcgaaggccaattgatacaagagtaaaactatactaacagcctcacatgcctgactaggtttgactgaagtacgctggagtgttgaaagtagaatccatggaaaagaaaaagaactccgtttgcactgtagcttgtaccataaagaaaatgaataacagttgtgtactgcacaaaaaaaaaaaaaa

SEQ ID NO: 65281 - protein, 537 aa, Triticum aestivum
  peptide (1)..(537): Ceres Seq. ID no. 13585455
MSGFLAVAGKIVTFLLWVLFLVLQTATKVVGGLLQVAPPAEPQEEPQPEAAPRPRSPPAARNRAGGGPADPYGPQSQLWDPPPPPHTAPVTDEYHSSSIYRRRVSAPQAAEDLVVSSSSYSHSAVAAAPASPAHAVSVPPVSRTIKTPAVASKRPKLERKYSKIVDQYRSLDEVIEALAQAGLESSNLIIGIDFTKSNEWTGKSSFNGVSLHHIGDAPNPYEQAISIIGQTLSAFDEDNLIPCYGFGDASTHDQDVFAFNPDERPCYGFQEALARYREIVPHLRLSGPTSFSPIIEMATTIVEQSGGQYHVLVIIADGQVTRSVNTEFGQLSTQEQMTVDAIVQASEFPLSIILVGVGDGPWDMMNEFDDNIPARSFDNFQFVNFTGIMSKKISQSNKETEFALSALMEIPLQYKATLQLGILGRRLAKSPERVPLPPPFASYNTTSRAAPSWANNFRSVPSNLREEATLDSTITPSVTPPPAADARASELQFCPVCLAKPRDMAFGCGHQTCSGCGPQVVDCPICRRPIDTRVKLY

SEQ ID NO: 65282 - DNA, 1321 bp, Triticum aestivum
  misc_feature (1)..(1321): Ceres Seq. ID no. 13584630
aaaccgaaacactttctctctctcccttgtttctcgtgctcggaaaccctagccgcacgaagacttcgcctcgcccccacatcgcccgccgtctgacctgcctacgagggcgaacgatggccgcggagaactactggaggtacgccgacgcgcggcagcagcaggccatggtggcggctgcggcggccgcggcggggatggcccctgcagctaccgttgcgcaggccgcgacggccgcggggggcatgcagcagcaccagcaccagcaccagcaccagcaggcggcgatggcgcaacagcagcagcagcagcaacagcagcagcaggcggccgcgccgtcgcttaagcgcgcgcgcccagactatggcgatggtcctggaggacaagagatggctggatattatccgcgggaaaatgcaggttaccactcacttagagacaatgaagcaattggagcatcttacgaccgctacttacgcaatgggatgccttctgtggcagccaatgaaccaagtagggcagttgttggtgccatgggtggagctgcaatggttggtggtggaatgagtggatatcctgttgatgaccgccgtatgatgggtgtcgttggtatggacagcagagccatggggtatggtgcaagacctgagcctcctcttcccccggatgcatccaacaccttgtatattgaaggtctgcctgcaaactgcacccgtagggaggtttcacatatattccgcccttttgttggtttccgtgaagtgaggcttgtcaacaaagagtcaagacaccctggtggagatcctcatgtcctgtgtttcgttgattttgatagccctgcccaagctactattgcacttgaagccctgcaaggttataagtttgacgaacacgatcgtgaatcagcccatttaaggctgcaattctcgcgctttcctggtccgaggtcagctggcgggcctcgtggtaggcgttaagtcgtgcgggtcaggcggttgacgaacctaccgtttatacgagcgatcgaacctgcttggtgtaacgctttgcgccgaattctccgccggtggctcgtagggttcgtcagcccttgtcgtgaaagcgtgaaaaggacgatgcaataatctcgctgttcagtatccattagattctcggggtcgcatgtgtgtctgctttagtatttatggtctactgtattttgttatctcgcggcgtgacccagacaatatcagtcttttatcatgtgtaacgctaactttcttaaagcacttgctcgtttgtttagccgtgctagtaatatcaactcttttcttcgtcttgc

SEQ ID NO: 65283 - protein, 324 aa, Triticum aestivum
  peptide (1)..(324): Ceres Seq. ID no. 13584631
TETLSLSPLFLVLGNPSRTKTSPRPHIARRLTCLRGRTMAAENYWRYADARQQQAMVAAAAAAAGMAPAATVAQAATAAGGMQQHQHQHQHQQAAMAQQQQQQQQQQQAAAPSLKRARPDYGDGPGGQEMAGYYPRENAGYHSLRDNEAIGASYDRYLRNGMPSVAANEPSRAVVGAMGGAAMVGGGMSGYPVDDRRMMGVVGMDSRAMGYGARPEPPLPPDASNTLYIEGLPANCTRREVSHIFRPFVGFREVRLVNKESRHPGGDPHVLCFVDFDSPAQATIALEALQGYKFDEHDRESAHLRLQFSRFPGPRSAGGPRGRR

SEQ ID NO: 65284 - protein, 286 aa, Triticum aestivum
  peptide (1)..(286): Ceres Seq. ID no. 13584632
MAAENYWRYADARQQQAMVAAAAAAAGMAPAATVAQAATAAGGMQQHQHQHQHQQAAMAQQQQQQQQQQQAAAPSLKRARPDYGDGPGGQEMAGYYPRENAGYHSLRDNEAIGASYDRYLRNGMPSVAANEPSRAVVGAMGGAAMVGGGMSGYPVDDRRMMGVVGMDSRAMGYGARPEPPLPPDASNTLYIEGLPANCTRREVSHIFRPFVGFREVRLVNKESRHPGGDPHVLCFVDFDSPAQATIALEALQGYKFDEHDRESAHLRLQFSRFPGPRSAGGPRGRR

SEQ ID NO: 65285 - protein, 269 aa, Triticum aestivum
  peptide (1)..(269): Ceres Seq. ID no. 13584633
MVAAAAAAAGMAPAATVAQAATAAGGMQQHQHQHQHQQAAMAQQQQQQQQQQQAAAPSLKRARPDYGDGPGGQEMAGYYPRENAGYHSLRDNEAIGASYDRYLRNGMPSVAANEPSRAVVGAMGGAAMVGGGMSGYPVDDRRMMGVVGMDSRAMGYGARPEPPLPPDASNTLYIEGLPANCTRREVSHIFRPFVGFREVRLVNKESRHPGGDPHVLCFVDFDSPAQATIALEALQGYKFDEHDRESAHLRLQFSRFPGPRSAGGPRGRR

SEQ ID NO: 65286 - DNA, 1052 bp, Triticum aestivum
  misc_feature (1)..(1052): Ceres Seq. ID no. 12617659
tgacattttctcctcccgacctccgtaccaaacacagccaaccgctccaaatcgccgaagctactctctcctatcggcgagaagaagtgggggagatcttcgtcttcagcactcgcgcgcgcaagctcattcgctccagatcttcccttaccatcgtagatctcacgaccccaagccgccacgcccccaacgaaaccctagctcgcgcccctccgccgcgtaggggcgccgccatgggcatcgtgttcacgcggctcttctcgtcggtattcggaaaccgcgaggcccgcatcctcgtcctcggcctcgacaatgccggcaagactactatcctctatcggctgcagatgggggaggtcgtttccacgatcccaacgatcgggttcaacgtggagacggtgcagtacaataacatcaagttccaagtttgggatctcggtggtcaaacaagcatcaggccatactggagatgctactttccaaacactcaggctatcatatatgttgttgattcaagtgatactgataggctggtaactgcaaaagaagaatttcattccatccttgaggaggatgagctgaaaggtgcggttgtccttgtatatgcgaataaacaggaccttccaggtgcacttgatgatgctgccataactgaatcattagaacttcacaagattaagagccgccaatgggcaattttcaaaacatctgctataaaaggggaggggctttttgaaggcttgaactggctcagtaatgcactcaagtccggaggcagctaatgtaggaggcccagcctccattccgtgaatcattgcttgatggtaaggaacagtgacgatgacagccttctcgctagtctgcgtgaaaatcagaatctctttatttcaactccggaagttatacacaatcagttatctgtagagtgcttgttgaagtttccagatacaacactaggtgtaccatgtcgagagcaagaatatatttgtagaaaataccgagcaaacgattacggtttgaaatatgtggcttacaccgcgtaaaatttcacc

SEQ ID NO: 65287 - protein, 259 aa, Triticum aestivum
  peptide (1)..(259): Ceres Seq. ID no. 12617660
TFSPPDLRTKHSQPLQIAEATLSYRREEVGEIFVFSTRARKLIRSRSSLTIVDLTTPSRHAPNETLARAPPPRRGAAMGIVFTRLFSSVFGNREARILVLGLDNAGKTTILYRLQMGEVVSTIPTIGFNVETVQYNNIKFQVWDLGGQTSIRPYWRCYFPNTQAIIYVVDSSDTDRLVTAKEEFHSILEEDELKGAVVLVYANKQDLPGALDDAAITESLELHKIKSRQWAIFKTSAIKGEGLFEGLNWLSNALKSGGS

SEQ ID NO: 65288 - protein, 182 aa, Triticum aestivum
  peptide (1)..(182): Ceres Seq. ID no. 12617661
MGIVFTRLFSSVFGNREARILVLGLDNAGKTTILYRLQMGEVVSTIPTIGFNVETVQYNNIKFQVWDLGGQTSIRPYWRCYFPNTQAIIYVVDSSDTDRLVTAKEEFHSILEEDELKGAVVLVYANKQDLPGALDDAAITESLELHKIKSRQWAIFKTSAIKGEGLFEGLNWLSNALKSGGS

SEQ ID NO: 65289 - protein, 144 aa, Triticum aestivum
  peptide (1)..(144): Ceres Seq. ID no. 12617662
MGEVVSTIPTIGFNVETVQYNNIKFQVWDLGGQTSIRPYWRCYFPNTQAIIYVVDSSDTDRLVTAKEEFHSILEEDELKGAVVLVYANKQDLPGALDDAAITESLELHKIKSRQWAIFKTSAIKGEGLFEGLNWLSNALKSGGS

SEQ ID NO: 65290 - DNA, 561 bp, Triticum aestivum
  misc_feature (1)..(561): Ceres Seq. ID no. 13597688
ctcctctcttcgtgagcctcgactcgtgtctcctctccttccacagagagagggagcaccaccgccgcacggcccgcgtgacctagaccccgccctccgccgccgtattgattcggctgcgctgctgggagctatggcgggcggctctaggggcggcttccccgcctggatgaccgccgccgcggcgcgcatcgacctctccggcggcgccgccgccacgtccggctcacagcctccccaacctgggcctccggccgcggtggtggccgaccaggagctcgggatggccgagcgtgccctctccgccgcaagcgccgccttcatctccgccatcatcgttaaccctctcgacgtnnnnaagacgaggttgcaggcgcaggccgcgggggtgccttactaccaagcaccccagatggcggcgctcggcccggatgcgatactgtctgagttgcgatgctctccatcatgcacacgtggtatcattttgggaagcgaacctatttgcccacccgattgctttcagtacaagggaacagttgatgtattcttgaaagttgttag

SEQ ID NO: 65291 - protein, 186 aa, Triticum aestivum
  peptide (1)..(186): Ceres Seq. ID no. 13597689
  misc_feature (118)..(118): Xaa is any aa, unknown or other
  misc_feature (119)..(119): Xaa is any aa, unknown or other
SSLREPRLVSPLLPQREGAPPPHGPRDLDPALRRRIDSAALLGAMAGGSRGGFPAWMTAAAARIDLSGGAAATSGSQPPQPGPPAAVVADQELGMAERALSAASAAFISAIIVNPLDXXKTRLQAQAAGVPYYQAPQMAALGPDAILSELRCSPSCTRGIILGSEPICPPDCFQYKGTVDVFLKVV

SEQ ID NO: 65292 - protein, 142 aa, Triticum aestivum
  peptide (1)..(142): Ceres Seq. ID no. 13597690
  misc_feature (74)..(74): Xaa is any aa, unknown or other
  misc_feature (75)..(75): Xaa is any aa, unknown or other
MAGGSRGGFPAWMTAAAARIDLSGGAAATSGSQPPQPGPPAAVVADQELGMAERALSAASAAFISAIIVNPLDXXKTRLQAQAAGVPYYQAPQMAALGPDAILSELRCSPSCTRGIILGSEPICPPDCFQYKGTVDVFLKVV

SEQ ID NO: 65293 - protein, 130 aa, Triticum aestivum
  peptide (1)..(130): Ceres Seq. ID no. 13597691
  misc_feature (62)..(62): Xaa is any aa, unknown or other
  misc_feature (63)..(63): Xaa is any aa, unknown or other
MTAAAARIDLSGGAAATSGSQPPQPGPPAAVVADQELGMAERALSAASAAFISAIIVNPLDXXKTRLQAQAAGVPYYQAPQMAALGPDAILSELRCSPSCTRGIILGSEPICPPDCFQYKGTVDVFLKVV

SEQ ID NO: 65294 - DNA, 1436 bp, Triticum aestivum
  misc_feature (1)..(1436): Ceres Seq. ID no. 13598582
tccgccgcgcacgcacacaacctccatctcttccccccttccgcagaaccctagctgtccacaagtctcttcgtcggcgatggcggcggcggagaacgccggggacgtggcggcgggggagagccgcaagctgttcgtgggtggcatcccgtcctcagcgcaggagacggagctgcggggtcactttgcccgcttcggtgcggtgcgctcaatcgtcgtgatgcgggacaaggagtcgggccacggccgcgggttcgggttcgtcgagttcgaggacgaagaagcggccgccaaggcgctcggcgatggggagaggcccaagcacttcatctgcggccgactggtggacgttaagagggcgcgtgctagacctcctcggaacttgggcgagcaacctgtgcatcaacatcagcatcagcatcagctggaacagggtccagttcagggtcaccaagacgctggggacagtaccgaggccagtagtgacagtatgagctatgcttcaaagaaggtattcattggtggtttgcgtgacaacatcacagaggaggagttcagagcttactttgaggcgtttggcactgtaacagatgttgttgtgatatacgacagcctgacaagcaggtcaaggggttttggttttgtcacctttgattccgaggaagctgtgagaaaggtgatggggcaaagctttcatgacttgaaagggacaagggtggaagcaaagatcgctatccccaaggatgctcagtattaccgtaatggccgaggtcgtggctcaagaacctttggcggaaggggtcctgttggctttgatggttcaacataccaaccgtacaataaccgacatggtttctacaatggctatatgccacaacctgttcccacacatccctactatcatggcctctattttggtatgggaggcaatccctatgcaaatgcatatccaaaccatgcagtcatggcaaatgttccaaacatggtggcaaggcgtccagtatatagcccatatcccccaatgtatcctggctatggttttgcatacagaagtggttatgcgggtgctgcaccttctgttcagtatggcgttaatggtggcagggattacatgaatgaccaagactctatggatgtacaagaacttgacagcactgctaccattgctacaaagtttgaatacatgaagctaggttcacaatgacgttctgggcaattatttctacactgatgacagcggaagtcgcaactgtgaagacatgagctgagattctttggttgacaagtacatcattggaaattatcaacttacccccattccttgtttcaactgcatgtagactgaaaacattcaagttccaactggctgttgagctcacatgccttgtaccaatgcttaaatccttttaatgtatcagaatcagaacatttgatgc

SEQ ID NO: 65295 - protein, 400 aa, Triticum aestivum
  peptide (1)..(400): Ceres Seq. ID no. 13598583
PPRTHTTSISSPLPQNPSCPQVSSSAMAAAENAGDVAAGESRKLFVGGIPSSAQETELRGHFARFGAVRSIVVMRDKESGHGRGFGFVEFEDEEAAAKALGDGERPKHFICGRLVDVKRARARPPRNLGEQPVHQHQHQHQLEQGPVQGHQDAGDSTEASSDSMSYASKKVFIGGLRDNITEEEFRAYFEAFGTVTDVVVIYDSLTSRSRGFGFVTFDSEEAVRKVMGQSFHDLKGTRVEAKIAIPKDAQYYRNGRGRGSRTFGGRGPVGFDGSTYQPYNNRHGFYNGYMPQPVPTHPYYHGLYFGMGGNPYANAYPNHAVMANVPNMVARRPVYSPYPPMYPGYGFAYRSGYAGAAPSVQYGVNGGRDYMNDQDSMDVQELDSTATIATKFEYMKLGSQ

SEQ ID NO: 65296 - protein, 374 aa, Triticum aestivum
  peptide (1)..(374): Ceres Seq. ID no. 13598584
MAAAENAGDVAAGESRKLFVGGIPSSAQETELRGHFARFGAVRSIVVMRDKESGHGRGFGFVEFEDEEAAAKALGDGERPKHFICGRLVDVKRARARPPRNLGEQPVHQHQHQHQLEQGPVQGHQDAGDSTEASSDSMSYASKKVFIGGLRDNITEEEFRAYFEAFGTVTDVVVIYDSLTSRSRGFGFVTFDSEEAVRKVMGQSFHDLKGTRVEAKIAIPKDAQYYRNGRGRGSRTFGGRGPVGFDGSTYQPYNNRHGFYNGYMPQPVPTHPYYHGLYFGMGGNPYANAYPNHAVMANVPNMVARRPVYSPYPPMYPGYGFAYRSGYAGAAPSVQYGVNGGRDYMNDQDSMDVQELDSTATIATKFEYMKLGSQ

SEQ ID NO: 65297 - protein, 327 aa, Triticum aestivum
  peptide (1)..(327): Ceres Seq. ID no. 13598585
MRDKESGHGRGFGFVEFEDEEAAAKALGDGERPKHFICGRLVDVKRARARPPRNLGEQPVHQHQHQHQLEQGPVQGHQDAGDSTEASSDSMSYASKKVFIGGLRDNITEEEFRAYFEAFGTVTDVVVIYDSLTSRSRGFGFVTFDSEEAVRKVMGQSFHDLKGTRVEAKIAIPKDAQYYRNGRGRGSRTFGGRGPVGFDGSTYQPYNNRHGFYNGYMPQPVPTHPYYHGLYFGMGGNPYANAYPNHAVMANVPNMVARRPVYSPYPPMYPGYGFAYRSGYAGAAPSVQYGVNGGRDYMNDQDSMDVQELDSTATIATKFEYMKLGSQ

SEQ ID NO: 65298 - DNA, 1247 bp, Triticum aestivum
  misc_feature (1)..(1247): Ceres Seq. ID no. 13584577
gtgctagctagctggcctgattcgcgtgagttcatccatccatccaccatggcctccgaccgcctcgccgccctcaaggccttcgacgagaccaaggccggcgtgaagggcctcgtggacgccggcgtcaaggccgtcccggacatcttccgccaccctcccgacccgctcccccagtgcaccaaggtcgccgccatcccggtcgtcgacctctcgggtccccgctcggaggtggtcgccgcggtgagggaggcggcgcggacggcgggcttcttccagctggtgaaccacggcgtgccggaggcggccatgtcggggatgctggcggcggtgcggcggttcaacgaggagcccgcggaggccaaggcgccctactacacgcgggacgccgcgcggcgcgtgcgctacaactgcaacgccgacctcttccggaccctggtgggcaagtggcgcgacaccatctacatggacgacgtggaccggctggcggcgggcgaggaggaggaggtcctcccgccggcgtgccggggcgtcgcgcccaagtacacggcgcagatacggatgctggggcgcgcgctcttcgagctgctgtcggaggccctgggcgtgcggcgcgggtacctggaggaggaggccggctgcctggggacgctcagcgtcgccggccactactacccggcgtgcccggagccgcacctgacgctgggcgccgtcaggcacaacgaccccggcttcctcaccgtgctgctccaggacggggtcggcggcctccaggtgctcacggacgtcgaggacggcgaagggaacgtgtccgccgcgtgggccgacgtgccggcggtgccgggggcgctggtggtgaacgtcggcgacttcctgcagctggtgtccaacgacaggttcaggagcgtcgcgcaccgcgtggtggccaacagcgtggggccccggatgtcggtggcgtgcttcttcagggccaagggagcgaccgtgtgcgccccggtggtggcggacgggggtggcccgccgcgctacaggaccgtcacggcggaggagctgctccgctcgtccgggaagcagaacgggctccgcgacgtgaggctctagctggcgagcctcaagaaagcagagagcagagacgaggcgtgaatgcatgttgggacatggtgatgaaatgcgtgtcgatgaagttggagctttgcatgaatttgcttatctttgtctgaaaaataaataaatttgcttatctgctg

SEQ ID NO: 65299 - protein, 366 aa, Triticum aestivum
  peptide (1)..(366): Ceres Seq. ID no. 13584578
VLASWPDSREFIHPSTMASDRLAALKAFDETKAGVKGLVDAGVKAVPDIFRHPPDPLPQCTKVAAIPVVDLSGPRSEVVAAVREAARTAGFFQLVNHGVPEAAMSGMLAAVRRFNEEPAEAKAPYYTRDAARRVRYNCNADLFRTLVGKWRDTIYMDDVDRLAAGEEEEVLPPACRGVAPKYTAQIRMLGRALFELLSEALGVRRGYLEEEAGCLGTLSVAGHYYPACPEPHLTLGAVRHNDPGFLTVLLQDGVGGLQVLTDVEDGEGNVSAAWADVPAVPGALVVNVGDFLQLVSNDRFRSVAHRVVANSVGPRMSVACFFRAKGATVCAPVVADGGGPPRYRTVTAEELLRSSGKQNGLRDVRL

SEQ ID NO: 65300 - protein, 350 aa, Triticum aestivum
  peptide (1)..(350): Ceres Seq. ID no. 13584579
MASDRLAALKAFDETKAGVKGLVDAGVKAVPDIFRHPPDPLPQCTKVAAIPVVDLSGPRSEVVAAVREAARTAGFFQLVNHGVPEAAMSGMLAAVRRFNEEPAEAKAPYYTRDAARRVRYNCNADLFRTLVGKWRDTIYMDDVDRLAAGEEEEVLPPACRGVAPKYTAQIRMLGRALFELLSEALGVRRGYLEEEAGCLGTLSVAGHYYPACPEPHLTLGAVRHNDPGFLTVLLQDGVGGLQVLTDVEDGEGNVSAAWADVPAVPGALVVNVGDFLQLVSNDRFRSVAHRVVANSVGPRMSVACFFRAKGATVCAPVVADGGGPPRYRTVTAEELLRSSGKQNGLRDVRL

SEQ ID NO: 65301 - protein, 263 aa, Triticum aestivum
  peptide (1)..(263): Ceres Seq. ID no. 13584580
MSGMLAAVRRFNEEPAEAKAPYYTRDAARRVRYNCNADLFRTLVGKWRDTIYMDDVDRLAAGEEEEVLPPACRGVAPKYTAQIRMLGRALFELLSEALGVRRGYLEEEAGCLGTLSVAGHYYPACPEPHLTLGAVRHNDPGFLTVLLQDGVGGLQVLTDVEDGEGNVSAAWADVPAVPGALVVNVGDFLQLVSNDRFRSVAHRVVANSVGPRMSVACFFRAKGATVCAPVVADGGGPPRYRTVTAEELLRSSGKQNGLRDVRL

SEQ ID NO: 65302 - DNA, 1368 bp, Triticum aestivum
  misc_feature (1)..(1368): Ceres Seq. ID no. 13597612
acttgtcatggccttggcctccttcgcggtgtcgcccccaatcgccgcctgcgccgccgtcctccgccgcgccatgtcgttctcctccgtctccgctgcgtcgcagacgagggtgggtgtggtgcagatgacctccgtgggggacctcgacgccaactacgccacctgctcccgcctcaccaaggaagctgctgcggccggagtcaaatttctttgcttccctgaggtcttctccttcataggatccaaggatggcgagtctgttaagctagccgaaccattagatggcccaataatgcagagatattgctcacttgcaaatgagtcaagtatttggttgtctcttggagggtttcaagaaaggggcccagatgattcacaccagtacaacactcatgtattaatcgatgaatctggaaaagttaggagctcataccggaaaattcatttgtttgatgtggatgtacctggcaacatggtgtataaggaaagccgtttcacgacagcaggtgataccgtcgtagcggtggatagcccttttggacgattgggccttactgtttgctatgatttgagatttccagagctttaccaatgtttgcgttttaagcatcaagctcaggtcttgctcgtaccatctgcattcacaaaggtaactggggaagcacactgggaaattctccttcgtgctcgtgcaattgagacacaatgttatgttattgctgcggctcaagctggaaaacacaatgagaaaagagaaagctatggcgattctataattattgacccatggggaacagttatagctcgacttccagatcgactgtccactggatttgcagtagcagatatcgacttgtcaaaagttgaggctgtgcgaaccaaaatgccaatctctgtgcaccgcaagtttgagagcatctggaagtcctcatcactataatagttgaaggtggtcttgcacgcttcgccgctcttattctcacattccggagattcttcttttgtgtataataactgccattttgttcacaagatggtccagttcgattgggatttccagtgagacatgtcatagaactaaataagctacaactgtagtagcatatctagtaaatagggcatatccaaacatggctcagagcaccttatgacttggtttgagatggcttctacctcagcttatggtccagataaaccagaagccgttccaaacccaaagcttaggaacagcttaggttgtgtttgattgggccttagggtcttttaagccaaaagctcaaccaaatccagcgaatttgatgtttgtgtgtatgttgacatgtacaaatgcatggtagcggtactttcatgagtttgtcacttttt

SEQ ID NO: 65303 - protein, 313 aa, Triticum aestivum
  peptide (1)..(313): Ceres Seq. ID no. 15222147
LVMALASFAVSPPIAACAAVLRRAMSFSSVSAASQTRVGVVQMTSVGDLDANYATCSRLTKEAAAAGVKFLCFPEVFSFIGSKDGESVKLAEPLDGPIMQRYCSLANESSIWLSLGGFQERGPDDSHQYNTHVLIDESGKVRSSYRKIHLFDVDVPGNMVYKESRFTTAGDTVVAVDSPFGRLGLTVCYDLRFPELYQCLRFKHQAQVLLVPSAFTKVTGEAHWEILLRARAIETQCYVIAAAQAGKHNEKRESYGDSIIIDPWGTVIARLPDRLSTGFAVADIDLSKVEAVRTKMPISVHRKFESIWKSSSL

SEQ ID NO: 65304 - protein, 311 aa, Triticum aestivum
  peptide (1)..(311): Ceres Seq. ID no. 15222148
MALASFAVSPPIAACAAVLRRAMSFSSVSAASQTRVGVVQMTSVGDLDANYATCSRLTKEAAAAGVKFLCFPEVFSFIGSKDGESVKLAEPLDGPIMQRYCSLANESSIWLSLGGFQERGPDDSHQYNTHVLIDESGKVRSSYRKIHLFDVDVPGNMVYKESRFTTAGDTVVAVDSPFGRLGLTVCYDLRFPELYQCLRFKHQAQVLLVPSAFTKVTGEAHWEILLRARAIETQCYVIAAAQAGKHNEKRESYGDSIIIDPWGTVIARLPDRLSTGFAVADIDLSKVEAVRTKMPISVHRKFESIWKSSSL

SEQ ID NO: 65305 - protein, 289 aa, Triticum aestivum
  peptide (1)..(289): Ceres Seq. ID no. 15222149
MSFSSVSAASQTRVGVVQMTSVGDLDANYATCSRLTKEAAAAGVKFLCFPEVFSFIGSKDGESVKLAEPLDGPIMQRYCSLANESSIWLSLGGFQERGPDDSHQYNTHVLIDESGKVRSSYRKIHLFDVDVPGNMVYKESRFTTAGDTVVAVDSPFGRLGLTVCYDLRFPELYQCLRFKHQAQVLLVPSAFTKVTGEAHWEILLRARAIETQCYVIAAAQAGKHNEKRESYGDSIIIDPWGTVIARLPDRLSTGFAVADIDLSKVEAVRTKMPISVHRKFESIWKSSSL

SEQ ID NO: 65306 - DNA, 936 bp, Triticum aestivum
  misc_feature (1)..(936): Ceres Seq. ID no. 15178534
gaaatcgcacaatctcagaggccaaaaccctcgcccccaaacaccccaccgccggcgatctcctcctcctcctccgatggatctctcagctgtccacgccgcgctctccgccaagtcctactccgccatcgccaccctctgcgacgacctcctcctccaggttgcgtcccggggcgtcgccaccgacgactggccttacgccgttcatctcctcgcccatctctacctcaacgacctgaacagcgcgaggtttctatggaaaacggtgccgcaggaggtgaaggaagctcatccggagctgggcgccatctggaagattggccagtgcctctggaaccgtgactatgctggggtctatacttccgcacaggggttcgagtgggggcctgaaatcgctgattttgtggccggcttcctagaaagctacagaaagaggatatttgagctgttgacttctgcgtataccacaatcagcattgcagatgtggctcacttcatggggatgagcgaggaggatgctactaactatgcggtgcaaaatggttggagtctggatgtggcaaccaagatgcttactgtcagaaaacagaagccccagactaaccagaagcttgatgcaagcaaactgcagcgtttgaccgaatgtgttttccacctggagcactgatgccatccgttccgcttttaaggcgcctattaatcgtacatggtggtagcttaatactgcacggctagattgtgttttggctggaaaggagagatcgctctgtactgaatatgcgtcttctggttgagcgagcttgccatttctgtcttgtttgcttgttaacaaggagtgcgtgtattgaagttaagcgaatgattactgtgcctatgttgaacctattagttgttttaagtgatgtgaagtttgaaattagaaaaaaaaaaaaaaaa

SEQ ID NO: 65307 - protein, 221 aa, Triticum aestivum
  peptide (1)..(221): Ceres Seq. ID no. 15178535
KSHNLRGQNPRPQTPHRRRSPPPPPMDLSAVHAALSAKSYSAIATLCDDLLLQVASRGVATDDWPYAVHLLAHLYLNDLNSARFLWKTVPQEVKEAHPELGAIWKIGQCLWNRDYAGVYTSAQGFEWGPEIADFVAGFLESYRKRIFELLTSAYTTISIADVAHFMGMSEEDATNYAVQNGWSLDVATKMLTVRKQKPQTNQKLDASKLQRLTECVFHLEH

SEQ ID NO: 65308 - protein, 196 aa, Triticum aestivum
  peptide (1)..(196): Ceres Seq. ID no. 15178536
MDLSAVHAALSAKSYSAIATLCDDLLLQVASRGVATDDWPYAVHLLAHLYLNDLNSARFLWKTVPQEVKEAHPELGAIWKIGQCLWNRDYAGVYTSAQGFEWGPEIADFVAGFLESYRKRIFELLTSAYTTISIADVAHFMGMSEEDATNYAVQNGWSLDVATKMLTVRKQKPQTNQKLDASKLQRLTECVFHLEH

SEQ ID NO: 65309 - protein, 113 aa, Triticum aestivum
  peptide (1)..(113): Ceres Seq. ID no. 15178537
EIAQSQRPKPSPPNTPPPAISSSSSDGSLSCPRRALRQVLLRHRHPLRRPPPPGCVPGRRHRRLALRRSSPRPSLPQRPEQREVSMENGAAGGEGSSSGAGRHLEDWPVPLEP

SEQ ID NO: 65310 - DNA, 1130 bp, Triticum aestivum
  misc_feature (1)..(1130): Ceres Seq. ID no. 13656105
atcccagccctacctgccattttcctccgttcgttcatctccttcgcctcgccaccgtccctcctcctctcttccctccctcatccctcatctcgtgtcggctcgaaagtcgaaaccctagaccaaccaccctcccctagtacgtaggaacagggacagagatgtatgcagaccagatctccaccggccgcaagcgctccatccatgaccgccttgacgccgacctcccctccgaccgcggcggcgcggacgccgccggccgggctcgtaacgcgctgtccaagaggcaacgacaaactgatgataaatggaagcatgatctttaccgggatgatgaatcagcttcaagatcagttgatccacgggatttgcgattcaagcttcagaagaaaagctctcagcaagggtttgctggccaaaagggttccggggtacgtgatctacgtgagatgttatctggaacaatgcacgcacaaccatcaaatgttgaccctcaaaagaggaaaccggtgtcagaggttgtgaaagtcacaaggcgtgaaattgttgatgaaaggcctgtacgcctaagtaagaaagtatcaaaaccatcaacatccaagaagacttctcagccaaaggctgaaagtccactcgacagttttctgaaatcacttggacttgagaagtattctattaccttccaggcggaggaggttgacatggcggccctacgtcacatgactgaaagtgatctcaaggcgttgggcatcccgatgggtcctaggaagaagattacccttgccttggaatccagagcgtagggcaatgtccctggagtacaatgtagaaaagcagggagatgtggtaggtttttgctcatctgcaaatttggcatatcttggaaagcagtggtacaggtaaacaatgcggtgtctcttgtaatggcatgttgctgtaagattattagactgctgttgtttatctggtctgcatgctttcctggccagaccagctgatttaactgatgaggtatccgtgctgttgaagctgcggtgatgttctcgctgtatactattattatgccttttttttcattggaaactggcattattagagtaatagagttgagattcttcagttagtatttc

SEQ ID NO: 65311 - protein, 213 aa, Triticum aestivum; identical to SEQ ID NO: 56059
  peptide (1)..(213): Ceres Seq. ID no. 13656106

SEQ ID NO: 65312 - protein, 119 aa, Triticum aestivum; identical to SEQ ID NO: 56060
  peptide (1)..(119): Ceres Seq. ID no. 13656107

SEQ ID NO: 65313 - protein, 117 aa, Triticum aestivum; identical to SEQ ID NO: 56061
  peptide (1)..(117): Ceres Seq. ID no. 13656108

SEQ ID NO: 65314 - DNA, 1128 bp, Triticum aestivum
  misc_feature (1)..(1128): Ceres Seq. ID no. 12617704
ctaggtctaagcagagctctttttttggtcgctcctcgacctcggggtggaaatcgtaaaagctctgggcgaagagaaaccccctttcctccgcaccgatgttctccgctgttcgatcccgagccctcggccgatggcgcccgccgccgcaccttctcccgcgcctcctctcctccgccggcgcctcgtcggcccggccggcggagcttatcgagctctcggaggtggagaaggtgctgcacgacgtccgggcgggggacgtgcgtgtgttccccgtcggcgagggcgggctccacggcggcgcttgtgcggactacatggtcgtcgccaccggccgctccgactggcacgtccgcaacatcgctcaggccatactttacaagataaagcagaaacagaagggttctaatcgaatattgatgccgagtgtagaaggccagcaagctggaaagtgggttgtcattgattctggaagtatcatcatccacgcgcttgaagaaagagcaagagagtactatgatttggaaagtatttggacaaaggcggtgtcccctaacatttctgttcaggagttggagacctcacttgtgaagacgcgccgcagggacctgtcacaaaaacccatgaagagcatttgagttaatgtgctgcggtctgtagtgggtttgttcaaggtttgtcagattggcagcgtcaagcttgtttgtgtcaagaaccttggaaggataggcttgcaaggttgcttgtgaatgagaccgtctggattcatgccagcatgatgtctctctgtcaagtttgcttcagctatcttttatcatgtcgtcgtttgcaagttcaagccaagattgtggactttttttgcttctttcattttgttattcaccccttcgttggatggtaatcataatactatactatcttgaagccaaggtaacacgttggacaatttagggtgtgtttgtttgggctgcaacttctaagttgcaacggctccctctggaaggaggagctgtagttgttaggttgacgatgaggtgcagctgtttggtagttttgttgtagcagctatggctgatgctgaaatgtgccgtcatacttgtagttgcgatcacatttaaatacttagat

SEQ ID NO: 65315 - protein, 179 aa, Triticum aestivum
  peptide (1)..(179): Ceres Seq. ID no. 12617705
MFSAVRSRALGRWRPPPHLLPRLLSSAGASSARPAELIELSEVEKVLHDVRAGDVRVFPVGEGGLHGGACADYMVVATGRSDWHVRNIAQAILYKIKQKQKGSNRILMPSVEGQQAGKWVVIDSGSIIIHALEERAREYYDLESIWTKAVSPNISVQELETSLVKTRRRDLSQKPMKSI

SEQ ID NO: 65316 - protein, 128 aa, Triticum aestivum
  peptide (1)..(128): Ceres Seq. ID no. 12617706
LGLSRALFLVAPRPRGGNRKSSGRRETPFPPHRCSPLFDPEPSADGARRRTFSRASSPPPAPRRPGRRSLSSSRRWRRCCTTSGRGTCVCSPSARAGSTAALVRTTWSSPPAAPTGTSATSLRPYFTR

SEQ ID NO: 65317 - protein, 106 aa, Triticum aestivum
  peptide (1)..(106): Ceres Seq. ID no. 12617707
MVVATGRSDWHVRNIAQAILYKIKQKQKGSNRILMPSVEGQQAGKWVVIDSGSIIIHALEERAREYYDLESIWTKAVSPNISVQELETSLVKTRRRDLSQKPMKSI

SEQ ID NO: 65318 - DNA, 1184 bp, Triticum aestivum
  misc_feature (1)..(1184): Ceres Seq. ID no. 14303553
ttttttcttcttgctcagcctcggacgcaatggccgccgttggtcttctcggcgtgcgtccagctccggcgaccggccgccttgagaggcaggcgagggcttcacctgacgcggttagctggggctggcgtgcccgcgcgcgcccccttcggtccgttccgccgcccgggcgagcggggaggggcggggcaagggcggcgaggcccttgcgcgccgcgatgggcggcggcgacctgtacgccctcgacttcgacggcgtcttctgcgacagctgcggcgagagctccctctccgccgtcaaggccgccaaggtgaggtggccgtgggcgtttgagcaggtcgacgccgccatggaagagtggatagtggagcagatgcacacccttcgtccagtgatagaaacaggatatgagaacctgttgcttgtaaggttgcttgttgagatccagataccctctgctcgaaagtcatcagttgcagatgggcttagcatccaagaaatattggacaactggtcaaaactgttgcccactctcatggacgagtggcaagaagatagggaatctcttgtagatctctttggccgtgtaagggatgactggcttgaaaatgatttgtctggctggataggtgctaacaggttttatcctgggacggctgatgcattaaagctttcaagctctgaactttacatagtcacaacaaaacagagtagatttactggagcactacttaaagaattggctggagtagattttccctctgaaaggatatatggccttggcactggtccgaaggtaaaagttctccagcagttgcaggaaatgccacagcaccaaggtcttacacttcatttcgtcgaggaccgactagcaactctgaagaacgtgataaaagaaccagcgctggacaaatggaacctctacctggtgaaatggggatacaacacgcaagaagagagggaagaagcaggggccatatcgaggatccagctcatcgatctcccagatttcagtaagcagctgaaataagtaactggcagacctagatgcagccttcgaaactttgtttttgttggacgcgctcgtaaacagcaacggatttacttgacttttatttattattgtttgcatatttgtgaagtggtttatttcgtcagttctcctagagactgactttaccag

SEQ ID NO: 65319 - protein, 342 aa, Triticum aestivum
  peptide (1)..(342): Ceres Seq. ID no. 14303554
FSSCSASDAMAAVGLLGVRPAPATGRLERQARASPDAVSWGWRARARPLRSVPPPGRAGRGGARAARPLRAAMGGGDLYALDFDGVFCDSCGESSLSAVKAAKVRWPWAFEQVDAAMEEWIVEQMHTLRPVIETGYENLLLVRLLVEIQIPSARKSSVADGLSIQEILDNWSKLLPTLMDEWQEDRESLVDLFGRVRDDWLENDLSGWIGANRFYPGTADALKLSSSELYIVTTKQSRFTGALLKELAGVDFPSERIYGLGTGPKVKVLQQLQEMPQHQGLTLHFVEDRLATLKNVIKEPALDKWNLYLVKWGYNTQEEREEAGAISRIQLIDLPDFSKQLK

SEQ ID NO: 65320 - protein, 333 aa, Triticum aestivum
  peptide (1)..(333): Ceres Seq. ID no. 14303555
MAAVGLLGVRPAPATGRLERQARASPDAVSWGWRARARPLRSVPPPGRAGRGGARAARPLRAAMGGGDLYALDFDGVFCDSCGESSLSAVKAAKVRWPWAFEQVDAAMEEWIVEQMHTLRPVIETGYENLLLVRLLVEIQIPSARKSSVADGLSIQEILDNWSKLLPTLMDEWQEDRESLVDLFGRVRDDWLENDLSGWIGANRFYPGTADALKLSSSELYIVTTKQSRFTGALLKELAGVDFPSERIYGLGTGPKVKVLQQLQEMPQHQGLTLHFVEDRLATLKNVIKEPALDKWNLYLVKWGYNTQEEREEAGAISRIQLIDLPDFSKQLK

SEQ ID NO: 65321 - protein, 270 aa, Triticum aestivum
  peptide (1)..(270): Ceres Seq. ID no. 14303556
MGGGDLYALDFDGVFCDSCGESSLSAVKAAKVRWPWAFEQVDAAMEEWIVEQMHTLRPVIETGYENLLLVRLLVEIQIPSARKSSVADGLSIQEILDNWSKLLPTLMDEWQEDRESLVDLFGRVRDDWLENDLSGWIGANRFYPGTADALKLSSSELYIVTTKQSRFTGALLKELAGVDFPSERIYGLGTGPKVKVLQQLQEMPQHQGLTLHFVEDRLATLKNVIKEPALDKWNLYLVKWGYNTQEEREEAGAISRIQLIDLPDFSKQLK

SEQ ID NO: 65322 - DNA, 1547 bp, Triticum aestivum
  misc_feature (1)..(1547): Ceres Seq. ID no. 13597580
atcgaaaaatcgatgcaattcgggaaaaaaaggaaaacgtgggaactggaatatccccacttctccgcggaaccccccaccatttctcctctctgctctcaagctcgctcgcaccaatggccggctcccggctcgtccatctcttccttctcatcctcttcttcccctccctccgcgccgcccccaacaccaccgccgtggtgtccaggatcgcatttggctcctgcgccaaccagagcgcgccccagcccgtgtgggaggccatcgtggggttcgacccgcaggtcttcatctggctcggggacaacgtctacggggacaacaagcgcccgttccgggtgttcgggagggagcgcacggtggggccctggaggaacgtgccgcgcttctacccggcgaccgaggaggagctgcgccggaagtacgagctggccaaggctaacccggggtacgccaagctgagggagagggctagggtcattggaacatgggatgaccatgattatggagtgaatgatgcaggaaaggaatatagtgggaaagtgttatcccaaaggcttctattagatttcctggatgaagacgaagacagtccacggaggaaacaagcaggtgtttatgcctcatacatgtttggccccgaaggaaaacgtgtaaaggtaataatgttggacaccagatatcacagagacccactcttaagtgatggaactatacttggagatcctcagtggcagtggctggagagggagctacgtggtcctcagtcagagatgaccatcattggatcttcaattcaggtggtgtccaatctttctgccaccactcgacctttgttctatgtggagtcttgggcatgctttccgagggaaagagaacggctgtttagactgatcgatagcacaatatttcaatctgttatgagacttctggcttggctgacaccaacccccatgcgagtcttcagccctaactgccgtcacaaatcatgctcatatggtcagccaaattttggagcaatcgaaatagattggaatgcagtaactccacgggttaaaattgaactaagagatttacagggcaattctgttgatggtgtggagttccctatatctgagctgaagccatcaantgcacatgcaaacaaaaaagaagggcattcttttgaagcacattgtagtctcgaaacagagcttccatggctgctacggtaccgccttgcgatgctattctttggcaccattgccgtttttgtcgttgctttggtgcttgtcggaatcgcttgctgttcagctactaaaatgtttactaggaagtgcaagatggcatagctacacatgacagtggacaagagcagagacttttcgatctgactagtgttggacactgaccaggtgagcagggatgttgattggccaaggatcaacatgacacttacttgattgtgaatatggcacgctgtgagcacatactggaaagtgtaacgaagctgtgacgagtcttcatataggtggagaaatgatgccatggaaatccgtttggttggc

SEQ ID NO: 65323 - protein, 442 aa, Triticum aestivum
  peptide (1)..(442): Ceres Seq. ID no. 15222137
  misc_feature (377)..(377): Xaa is any aa, unknown or other
RKIDAIREKKENVGTGISPLLRGTPHHFSSLLSSSLAPMAGSRLVHLFLLILFFPSLRAAPNTTAVVSRIAFGSCANQSAPQPVWEAIVGFDPQVFIWLGDNVYGDNKRPFRVFGRERTVGPWRNVPRFYPATEEELRRKYELAKANPGYAKLRERARVIGTWDDHDYGVNDAGKEYSGKVLSQRLLLDFLDEDEDSPRRKQAGVYASYMFGPEGKRVKVIMLDTRYHRDPLLSDGTILGDPQWQWLERELRGPQSEMTIIGSSIQVVSNLSATTRPLFYVESWACFPRERERLFRLIDSTIFQSVMRLLAWLTPTPMRVFSPNCRHKSCSYGQPNFGAIEIDWNAVTPRVKIELRDLQGNSVDGVEFPISELKPSXAHANKKEGHSFEAHCSLETELPWLLRYRLAMLFFGTIAVFVVALVLVGIACCSATKMFTRKCKMA

SEQ ID NO: 65324 - protein, 404 aa, Triticum aestivum
  peptide (1)..(404): Ceres Seq. ID no. 15222138
  misc_feature (339)..(339): Xaa is any aa, unknown or other
MAGSRLVHLFLLILFFPSLRAAPNTTAVVSRIAFGSCANQSAPQPVWEAIVGFDPQVFIWLGDNVYGDNKRPFRVFGRERTVGPWRNVPRFYPATEEELRRKYELAKANPGYAKLRERARVIGTWDDHDYGVNDAGKEYSGKVLSQRLLLDFLDEDEDSPRRKQAGVYASYMFGPEGKRVKVIMLDTRYHRDPLLSDGTILGDPQWQWLERELRGPQSEMTIIGSSIQVVSNLSATTRPLFYVESWACFPRERERLFRLIDSTIFQSVMRLLAWLTPTPMRVFSPNCRHKSCSYGQPNFGAIEIDWNAVTPRVKIELRDLQGNSVDGVEFPISELKPSXAHANKKEGHSFEAHCSLETELPWLLRYRLAMLFFGTIAVFVVALVLVGIACCSATKMFTRKCKMA

SEQ ID NO: 65325 - protein, 233 aa, Triticum aestivum
  peptide (1)..(233): Ceres Seq. ID no. 15222139
  misc_feature (168)..(168): Xaa is any aa, unknown or other
MFGPEGKRVKVIMLDTRYHRDPLLSDGTILGDPQWQWLERELRGPQSEMTIIGSSIQVVSNLSATTRPLFYVESWACFPRERERLFRLIDSTIFQSVMRLLAWLTPTPMRVFSPNCRHKSCSYGQPNFGAIEIDWNAVTPRVKIELRDLQGNSVDGVEFPISELKPSXAHANKKEGHSFEAHCSLETELPWLLRYRLAMLFFGTIAVFVVALVLVGIACCSATKMFTRKCKMA

SEQ ID NO: 65326 - DNA, 1251 bp, Triticum aestivum
  misc_feature (1)..(1251): Ceres Seq. ID no. 13597706
atcacgcggcgctaacgagtagcgacgcggacaggggttgcgtgacactaccggcactgcagaagcacgggagccatggcgcgggaggaggaaggacccgcaatgatggacgccgcggagcgacgcctccgcgtggtctccgcgcacctcgagccgcaggccggcgccaccgctggcctcgcctctaaccccaccgccggcgagtacgcccacgtgcagggctacagcgttgttcttcctgaaaagttgcaaactggaaagtggaacgtgtaccgatctgcagagtcacctctgcgtttaattaacagatttcctgctactccagacattggaacactgcatgataattttgtgtatgcagtcgagacttttacagattgtaggtatctgggtacaagagtgtgcgctgatggagcagtcggagactacaaatggatgacgtatggagaagctagtacgagcagaactgcaataggttctggtcttatttatcatggaatatctgaaggtgcacgcattggtctgtattttataaacagacctgagtggatcataattgatcatgcttgtgctgcatattcatatgtatctgtaccactttatgatactcttggtccagatgcagttcagttcattgtgaaccatgcaacagtagaaactattttctgtgtgcctcaaacactaagcactctgctaagcttcctaactcaaatgccatgtgtccgccttatagtggtagttggtggagacaatgcaaatacgccatctacaacagcagctgctggagtggaaatcataacttactccaggctacacagccagggaaagatgagttctcaaacttaccgtcctccaaaacctgaagatgttgccactatctgctacacgagtggcactactggcacaccaaagggagctgttctttctcatgagaacttaatcgcgaatgttgcaggatcaagcttgggcgttaagttttacccctccgacgtgtatatctcatacctacctttagctcacatctatgagagagctaaccaaattgcactgcttcactatggagttgccattggattttaccaaggggtatgtagattttgaactatttaagatgagagctagtagtactttgcattgttgtatagaaactgaacgacatgaaggacatgtattgagagaagtaactgataatatgtgatcttgtataagttttactcatctaatgcaatagtttgcacttgagttgttttt

SEQ ID NO: 65327 - protein, 341 aa, Triticum aestivum
  peptide (1)..(341): Ceres Seq. ID no. 13597707
MAREEEGPAMMDAAERRLRVVSAHLEPQAGATAGLASNPTAGEYAHVQGYSVVLPEKLQTGKWNVYRSAESPLRLINRFPATPDIGTLHDNFVYAVETFTDCRYLGTRVCADGAVGDYKWMTYGEASTSRTAIGSGLIYHGISEGARIGLYFINRPEWIIIDHACAAYSYVSVPLYDTLGPDAVQFIVNHATVETIFCVPQTLSTLLSFLTQMPCVRLIVVVGGDNANTPSTTAAAGVEIITYSRLHSQGKMSSQTYRPPKPEDVATICYTSGTTGTPKGAVLSHENLIANVAGSSLGVKFYPSDVYISYLPLAHIYERANQIALLHYGVAIGFYQGVCRF

SEQ ID NO: 65328 - protein, 332 aa, Triticum aestivum
  peptide (1)..(332): Ceres Seq. ID no. 13597708
MMDAAERRLRVVSAHLEPQAGATAGLASNPTAGEYAHVQGYSVVLPEKLQTGKWNVYRSAESPLRLINRFPATPDIGTLHDNFVYAVETFTDCRYLGTRVCADGAVGDYKWMTYGEASTSRTAIGSGLIYHGISEGARIGLYFINRPEWIIIDHACAAYSYVSVPLYDTLGPDAVQFIVNHATVETIFCVPQTLSTLLSFLTQMPCVRLIVVVGGDNANTPSTTAAAGVEIITYSRLHSQGKMSSQTYRPPKPEDVATICYTSGTTGTPKGAVLSHENLIANVAGSSLGVKFYPSDVYISYLPLAHIYERANQIALLHYGVAIGFYQGVCRF

SEQ ID NO: 65329 - protein, 331 aa, Triticum aestivum
  peptide (1)..(331): Ceres Seq. ID no. 13597709
MDAAERRLRVVSAHLEPQAGATAGLASNPTAGEYAHVQGYSVVLPEKLQTGKWNVYRSAESPLRLINRFPATPDIGTLHDNFVYAVETFTDCRYLGTRVCADGAVGDYKWMTYGEASTSRTAIGSGLIYHGISEGARIGLYFINRPEWIIIDHACAAYSYVSVPLYDTLGPDAVQFIVNHATVETIFCVPQTLSTLLSFLTQMPCVRLIVVVGGDNANTPSTTAAAGVEIITYSRLHSQGKMSSQTYRPPKPEDVATICYTSGTTGTPKGAVLSHENLIANVAGSSLGVKFYPSDVYISYLPLAHIYERANQIALLHYGVAIGFYQGVCRF

SEQ ID NO: 65330 - DNA, 1875 bp, Triticum aestivum
  misc_feature (1)..(1875): Ceres Seq. ID no. 13590644
ccctctgaagcctcctcccacccccctcaacgccgccgccgcaacccggaaaccctaaccaaaccccccagcgccacaccatggcgtccgcctacgaccgggaggacggcctcgcgccgccgcagccgcacggcggcggccccgccgacgcctacgatcccaactacgtcccggactcggtgaagaccttcgtggtgcacctgtaccgccacatccgcgacaagaacgtctacgagatccaccagatgtacgagggcggcttccagcgcctctccgaccgcctcttccgcgacacgccctggccgtcggccgaggccgtggcgccctactgcgacggcgaccacgtcttcctcctcctctaccgcgagctctggtaccgccacgcctacgcgcgcctctcccccctcaccgccagccaccgctccgagtcctggaacaactactgcgacctcttcagcgtcgtcctccacggcgtcgtcaacatgcagctgcctaaccagtggctgtgggacatggtggacgagttcgtctaccagttccagagcttctgccagtaccgcgccaagctcaagaacaagacggaagacgagctccagcagctaaagcagtttgacaaggcatggaatgtctatggggttctcaattacctgcaagcactcgttgagaagtccatgatcgcacagattctggagagggagaaagaggggctggagtcgtttaccgccaccgacgggtatgactaccagggtgggagcaatgtgctcaaggtcctgggttactacagcatgattgggcttctcaggatacactgccttcttggtgattaccacactggcctcaagtgcttggcaccgatcaaccttaaccagcagggggtctacaccattgtgattgggagtcacatctcgacaatctatcattatggatttgcaaaccttatgatgcgcaggtatgtcgatgctaccaaggaattcaacaaaattctgctttacattataaagtataagcagtaccatcagaaatcccctcagtatgaccagattctgaagaaaaatgagcagatgtatgcgctgctggcaatttgcctatctctgtgtccgcagaacaaactcatagatgaaaatgttagcgcccagctgaaagaaaagtacaatgacaaaatgacaaagatgcagaggtttgatgatgaagcatatgctgcctacgatgagctattttcgtatgcctgccccaagtttattacgccatcacctccagttctggaccagccacttacaaattataaccaggacgcctatcggcttcaattgaagctgttcctgtatgaagtgaagcagcaacagctgctttctgggatccggagctatctaaagttatactcagcaataactatcaccaaacttgcccagtatatggaaatggatgaggcaacacttaggtctatccttatgacgtacaagcacaaaatgcatgcagttgacagtaatgggaaaattgtatccagtgcagactttgatttctacattaatgaggatgttattcatgtcgtggagtccaagtcgaccaagcgccatggtgactactttttgagacagattttaaagtttgaagaaaccattgctgaattggacaaggtacagcttgactgagcatggtagagatcatggaggagagaaacgtcccaggatcctgttttccttttcttttttcctattgtgagaggcagttgtgatggctactgttagcagagcattagttgtgccttctggtacactttttgactcagtgaagcattggcaattcactgtattatcccgtttctagttcctgtwtgctatttgacgagtaatccgtcggttacgaattgagaacttg

SEQ ID NO: 65331 - protein, 522 aa, Triticum aestivum
  peptide (1)..(522): Ceres Seq. ID no. 15220986
MASAYDREDGLAPPQPHGGGPADAYDPNYVPDSVKTFVVHLYRHIRDKNVYEIHQMYEGGFQRLSDRLFRDTPWPSAEAVAPYCDGDHVFLLLYRELWYRHAYARLSPLTASHRSESWNNYCDLFSVVLHGVVNMQLPNQWLWDMVDEFVYQFQSFCQYRAKLKNKTEDELQQLKQFDKAWNVYGVLNYLQALVEKSMIAQILEREKEGLESFTATDGYDYQGGSNVLKVLGYYSMIGLLRIHCLLGDYHTGLKCLAPINLNQQGVYTIVIGSHISTIYHYGFANLMMRRYVDATKEFNKILLYIIKYKQYHQKSPQYDQILKKNEQMYALLAICLSLCPQNKLIDENVSAQLKEKYNDKMTKMQRFDDEAYAAYDELFSYACPKFITPSPPVLDQPLTNYNQDAYRLQLKLFLYEVKQQQLLSGIRSYLKLYSAITITKLAQYMEMDEATLRSILMTYKHKMHAVDSNGKIVSSADFDFYINEDVIHVVESKSTKRHGDYFLRQILKFEETIAELDKVQLD

SEQ ID NO: 65332 - protein, 467 aa, Triticum aestivum
  peptide (1)..(467): Ceres Seq. ID no. 15220987
MYEGGFQRLSDRLFRDTPWPSAEAVAPYCDGDHVFLLLYRELWYRHAYARLSPLTASHRSESWNNYCDLFSVVLHGVVNMQLPNQWLWDMVDEFVYQFQSFCQYRAKLKNKTEDELQQLKQFDKAWNVYGVLNYLQALVEKSMIAQILEREKEGLESFTATDGYDYQGGSNVLKVLGYYSMIGLLRIHCLLGDYHTGLKCLAPINLNQQGVYTIVIGSHISTIYHYGFANLMMRRYVDATKEFNKILLYIIKYKQYHQKSPQYDQILKKNEQMYALLAICLSLCPQNKLIDENVSAQLKEKYNDKMTKMQRFDDEAYAAYDELFSYACPKFITPSPPVLDQPLTNYNQDAYRLQLKLFLYEVKQQQLLSGIRSYLKLYSAITITKLAQYMEMDEATLRSILMTYKHKMHAVDSNGKIVSSADFDFYINEDVIHVVESKSTKRHGDYFLRQILKFEETIAELDKVQLD

SEQ ID NO: 65333 - protein, 388 aa, Triticum aestivum
  peptide (1)..(388): Ceres Seq. ID no. 15220988
MQLPNQWLWDMVDEFVYQFQSFCQYRAKLKNKTEDELQQLKQFDKAWNVYGVLNYLQALVEKSMIAQILEREKEGLESFTATDGYDYQGGSNVLKVLGYYSMIGLLRIHCLLGDYHTGLKCLAPINLNQQGVYTIVIGSHISTIYHYGFANLMMRRYVDATKEFNKILLYIIKYKQYHQKSPQYDQILKKNEQMYALLAICLSLCPQNKLIDENVSAQLKEKYNDKMTKMQRFDDEAYAAYDELFSYACPKFITPSPPVLDQPLTNYNQDAYRLQLKLFLYEVKQQQLLSGIRSYLKLYSAITITKLAQYMEMDEATLRSILMTYKHKMHAVDSNGKIVSSADFDFYINEDVIHVVESKSTKRHGDYFLRQILKFEETIAELDKVQLD

SEQ ID NO: 65334 - DNA, 1599 bp, Triticum aestivum
  misc_feature (1)..(1599): Ceres Seq. ID no. 13597613
aaatcgaaaacgaaacccaaacccaaatcgcttccgttacgaaattcccccaaatctatcccccgtcggatcgatcgccgccgccgccatgtcgtcgtcggcgccgctcccgctgcagcgctacttctgccaccagtgcgaccgcgccgtcgccatcgccgcgccggcctcccgcgacgacgaggtcttctgcccgctctgcgccggggggttcgtcgaggagctcctcgacgacgaggaccccccaaaccctagcccccaaatccaccccttcttccccctcgccagcttcctcgacctccgcaaccccagcgacctcgccggggtcctcggcccgccctccccctctgcgccccgcgccgcctccgcctccgccaacaaccagttcgacgtcaccgacttcctccacggccacctcggcggcctcctctccggcggcgccaccatccagatcgtcctcgagggttcctccttccccggcggcttcgcctccttcggcgccgggggccccgtccccggcggggtcagcctcggcgactacttcatgggatccggcctcgagcagctcatccagcagctcgccgagaacgaccccagccgctacggcaccccgccagccgccaaggccgccgtcgccgccctgcccgatgtcgccgtctctgctgacatgatggccgccgacgggggcgcccagtgcgccgtctgtatggacgacttccttctcggcgccgccgccaagcagctcccctgcaagcacgtctttcacaaggactgcatcctgccgtggctcaacctccacagctcctgccctgtctgccgccatgagatgcccactgatgaccctgactatgagaaccaccagcgccaggctgctgcccctgctgctgctgcggcagcgcctgcgtcccctggtggcggcccttcgcctagggtcatggagaggaggttcaggatctccctgccgtggcctctcagggccgcttttggcgcgcagcaggcggagagcagcgaccaggatgctgctggctctggtgactacaacgacgatccgaatgcgagcggtcgctcgtatgatgatcttgactgaagcgcctgcaaggaagagggcaacaggggggataaggaggggcaaacggactggctggaagaaggaagggagtctgaatgcgaggaagagaagacaagaagaaggaagacttatgttgttgttgttgatccaaattgaattggaagcttttttggtgatgaagagtggcgccgtccgtctattgatctccgttgcctcctctcccctcccctcccctctttgcctgtcatggttgtagaaagagagagagaaaagtagagatgatattcttttgttgcctggtctggtctggtctggtctggttggtgggttgacttgactgaatatataccttcttgtgggaaggaagaagctccctccttcctaacttgtctgtgttatcatagtacaattgtctgtctgtgtcgattggtcggtcttcctttctctcttgtggggttggaagaaagtaagaaagggaactctagcgatccgatccgaccctcttatatatacataatgtgttatacatg

SEQ ID NO: 65335 - protein, 361 aa, Triticum aestivum
  peptide (1)..(361): Ceres Seq. ID no. 13597614
NRKRNPNPNRFRYEIPPNLSPVGSIAAAAMSSSAPLPLQRYFCHQCDRAVAIAAPASRDDEVFCPLCAGGFVEELLDDEDPPNPSPQIHPFFPLASFLDLRNPSDLAGVLGPPSPSAPRAASASANNQFDVTDFLHGHLGGLLSGGATIQIVLEGSSFPGGFASFGAGGPVPGGVSLGDYFMGSGLEQLIQQLAENDPSRYGTPPAAKAAVAALPDVAVSADMMAADGGAQCAVCMDDFLLGAAAKQLPCKHVFHKDCILPWLNLHSSCPVCRHEMPTDDPDYENHQRQAAAPAAAAAAPASPGGGPSPRVMERRFRISLPWPLRAAFGAQQAESSDQDAAGSGDYNDDPNASGRSYDDLD

SEQ ID NO: 65336 - protein, 332 aa, Triticum aestivum
  peptide (1)..(332): Ceres Seq. ID no. 13597615
MSSSAPLPLQRYFCHQCDRAVAIAAPASRDDEVFCPLCAGGFVEELLDDEDPPNPSPQIHPFFPLASFLDLRNPSDLAGVLGPPSPSAPRAASASANNQFDVTDFLHGHLGGLLSGGATIQIVLEGSSFPGGFASFGAGGPVPGGVSLGDYFMGSGLEQLIQQLAENDPSRYGTPPAAKAAVAALPDVAVSADMMAADGGAQCAVCMDDFLLGAAAKQLPCKHVFHKDCILPWLNLHSSCPVCRHEMPTDDPDYENHQRQAAAPAAAAAAPASPGGGPSPRVMERRFRISLPWPLRAAFGAQQAESSDQDAAGSGDYNDDPNASGRSYDDLD

SEQ ID NO: 65337 - protein, 222 aa, Triticum aestivum
  peptide (1)..(222): Ceres Seq. ID no. 13597616
IENETQTQIASVTKFPQIYPPSDRSPPPPCRRRRRSRCSATSATSATAPSPSPRRPPATTRSSARSAPGGSSRSSSTTRTPQTLAPKSTPSSPSPASSTSATPATSPGSSARPPPLRPAPPPPPPTTSSTSPTSSTATSAASSPAAPPSRSSSRVPPSPAASPPSAPGAPSPAGSASATTSWDPASSSSSSSSPRTTPAATAPRQPPRPPSPPCPMSPSLLT

SEQ ID NO: 65338 - DNA, 1214 bp, Triticum aestivum
  misc_feature (1)..(1214): Ceres Seq. ID no. 13662799
agctatcatcccgcacccgcacgagctcaaccactctctctctctctctcttctacctctgccccgtcctccatggaggggcgagcgagtgtgtgagttgagtctgacttgcatgtgagccagcctacagcgagcacacggcccatcctagacagagagagagagagagagaggaagtaatcttgcttgcttgcttagttgggttgggttgggttgtgctttgtgtgtgcgtctatggcgctgccggcggagaggcgggcggaggaggccgcgggcgtcggcgggtgccgggcgccggccggccagggcgggctgcccatcgggttccggttccggcccaccgacgaggagctgctgctgcactacctgcgccgcaaggccctctcctgccccctccccgccgacatcatccccgtcgccgacctcgcgcgcctccacccatcggacctgccaggcgaggccgacggcgagcgctacttcttccacctgccggcgacggggtgctggcggaagggcggcggcgcgggcagggcgggcggcagcggcgtgtggagggcctccgggaaggagcggctggtcgtggcgccacgctgcggccggcctatcggcgccaagcggacgctcgtcttctgccgcccaggcggcgcgcgcaccggctgggccatgcacgagtaccgcctgctccccgccggcctcgccgcttacgccacacccaagagcctccacgccgccaaggactgggtggtctgccgcgtgttcaagaaggccacgccagcgcgccacggcacagcggggcggcgtaggggggacgccgacgccgacatgacaccggcgtcaccgtccccggcgtcctcctgcgtgaccgagtcgggcatggaggaggacgatgatgagaccgcctctaacctggcgcggcgagaggattagagcagctgacctgacctcaatcatggtccctgtaattttctaatgagtgcccctttaattcgtcgatctgctaatgtggtactagtccgtagtagcagcagtagtaatcatcagccccaacttatcaggagaaacaaaccgagctcaagcaatcagcaaaccgagctcaagcaatcaaacacctcaccatgtttgacgagtgagctgagactgagagctcactgtgaatcaaagagttcatgttccaacgttaaattggagttcttttgcacaaaaaaaaaaaaaaa

SEQ ID NO: 65339 - protein, 230 aa, Triticum aestivum
  peptide (1)..(230): Ceres Seq. ID no. 13662800
MALPAERRAEEAAGVGGCRAPAGQGGLPIGFRFRPTDEELLLHYLRRKALSCPLPADIIPVADLARLHPSDLPGEADGERYFFHLPATGCWRKGGGAGRAGGSGVWRASGKERLVVAPRCGRPIGAKRTLVFCRPGGARTGWAMHEYRLLPAGLAAYATPKSLHAAKDWVVCRVFKKATPARHGTAGRRRGDADADMTPASPSPASSCVTESGMEEDDDETASNLARRED

SEQ ID NO: 65340 - DNA, 1180 bp, Triticum aestivum
  misc_feature (1)..(1180): Ceres Seq. ID no. 13584593
aaacaatccagtgaaccgcccatgctcaccctcccgtgcttcaccactcctcctcaacctccaccgacccggccggtccggtccggtccggtcccggctccggaagtctccagaacccggacaaccaccgccacgcgggcccgcatggcagggtcacgtccctcacgcgccgctacctccggcgagacctgctcgcaccaccccctcataaatactggtgcgcccaagcctcgccgcagatcgaccgcgctcgccctctccactttcctgctgctggtgctgttaaccggactccccgacgccgccgtcgccgccaacatgaccgaggtctgcgtcaaggccgccgtcggccaccccgacacgctcggcgactgtcccttctcccagagggtgctgctcacgctggaggagaagaaggtgccctaccagatgaagctcatcgacgtcagcaacaagcccgactggttcctgaagatcaatccagagggcaaggtgcctgtgtataacggtggtgatggcaaatggattgctgattctgatgtgatcactcaagtcattgaggagaagtacccaactccatcacttgtgacccctgctgaatatgcatcagtgggatcaaagatcttctccacctttgtcacgttcttgaagagcaaggatgccagcgatggttcggagaaggcacttgttgatgagctgcaggcgctcgaagagcacctgaaggcccatggaccctacatcaatggggcgaacatctccgctgtcgatctcagcctggctccgaagctctaccatctccaggtcgccctggagcacttcaagggctggaaggtccctgaaaccctgaccagcgtccatgcctacaccgaggctctcttcagccgcgagtcgttcgtcaagaccaaggcgaccaaggagaacctgatcgccgggtgggcgccgaaagtgaacccgtaagccctcccgccgctcggagacccggcccacccccgtcgtgtgagagtagcgacgggcctcatctgtctaggttggaataatgcgagcgagccttgatgtgctctggttgtcgcaagacgtgcacttgctgcctgggctgtgccctgcctggcttgtgtgtgtgggtgtgggtgatatgtgtgtggtctgtcctctttcgtgtgaatgaataatggagctgcgt

SEQ ID NO: 65341 - protein, 318 aa, Triticum aestivum
  peptide (1)..(318): Ceres Seq. ID no. 13584594
KQSSEPPMLTLPCFTTPPQPPPTRPVRSGPVPAPEVSRTRTTTATRARMAGSRPSRAATSGETCSHHPLINTGAPKPRRRSTALALSTFLLLVLLTGLPDAAVAANMTEVCVKAAVGHPDTLGDCPFSQRVLLTLEEKKVPYQMKLIDVSNKPDWFLKINPEGKVPVYNGGDGKWIADSDVITQVIEEKYPTPSLVTPAEYASVGSKIFSTFVTFLKSKDASDGSEKALVDELQALEEHLKAHGPYINGANISAVDLSLAPKLYHLQVALEHFKGWKVPETLTSVHAYTEALFSRESFVKTKATKENLIAGWAPKVNP

SEQ ID NO: 65342 - protein, 311 aa, Triticum aestivum
  peptide (1)..(311): Ceres Seq. ID no. 13584595
MLTLPCFTTPPQPPPTRPVRSGPVPAPEVSRTRTTTATRARMAGSRPSRAATSGETCSHHPLINTGAPKPRRRSTALALSTFLLLVLLTGLPDAAVAANMTEVCVKAAVGHPDTLGDCPFSQRVLLTLEEKKVPYQMKLIDVSNKPDWFLKINPEGKVPVYNGGDGKWIADSDVITQVIEEKYPTPSLVTPAEYASVGSKIFSTFVTFLKSKDASDGSEKALVDELQALEEHLKAHGPYINGANISAVDLSLAPKLYHLQVALEHFKGWKVPETLTSVHAYTEALFSRESFVKTKATKENLIAGWAPKVNP

SEQ ID NO: 65343 - protein, 270 aa, Triticum aestivum
  peptide (1)..(270): Ceres Seq. ID no. 13584596
MAGSRPSRAATSGETCSHHPLINTGAPKPRRRSTALALSTFLLLVLLTGLPDAAVAANMTEVCVKAAVGHPDTLGDCPFSQRVLLTLEEKKVPYQMKLIDVSNKPDWFLKINPEGKVPVYNGGDGKWIADSDVITQVIEEKYPTPSLVTPAEYASVGSKIFSTFVTFLKSKDASDGSEKALVDELQALEEHLKAHGPYINGANISAVDLSLAPKLYHLQVALEHFKGWKVPETLTSVHAYTEALFSRESFVKTKATKENLIAGWAPKVNP

SEQ ID NO: 65344 - DNA, 1444 bp, Triticum aestivum
  misc_feature (1)..(1444): Ceres Seq. ID no. 13597581
acgcaacggtccaatcgacgagtttgaaacctaccctctccccaacggtcggcttcggagcggcacacatggcggtggcggcggcggcgggagacctggcggtgcttgacgcggagactctggcgctgctggggggagggcccgatatggcgccggtggccgtgtgcggcgagtgggagaccttcaaggagaacgtgcggccgctgaaacgcgggcggaacgtcggcctcctcaaccaagccctcaaggcgcacaccgaccccgcccagcgtgccgccctcctcgccgaacgcaggaggatgatcgaagcaatagaagagtaccaaggggaagatccgctccagccatgggtagactgcatcaaatgggttcaggagtcgttcccggccggcggggagttctcagggctggtcgtgatctacgagcagtgtgtgcgtgcattttggcacgatgagcggtacaaggatgatctccggtacctcaaagtctggttagaatatgctgggaactgttcggacgctgaggtgatattcaggttcctggagtccaaccggattggtgagggccatgctgttttctacattcgctatgcattgctaatggagtcgaagaacaaggttaagaaagttgacgagatctttaatcttggaatagctaggamagcaaagcctgtggagaagttggaaactacatacagggcatttcttgggagatcaaccagaaagaaggaacacgaggatgataccgcaagtgatgatccgcccgtacgcaaattcggtagtgacttgaaccgtggtgaaactagaggtcagcatgcagagaattcccacatgttggcaaaacctagggtaaagctgcaaagaatcgatgttaatacaccgatttcaatttacaaagagaacccattgccaagtcagggccttgagagagctaggagcaaagacagggcgtggaacacccttggaacacaagcagatagaaacaaagaaaataacatgatgcctgccagatggacctcgcacaagattccaccaaaggtagcagcacgacaagcagttccgccagctcgtgtcagctccattgaggtctttgtagatgaagaatgtgccgaggaaccagccccgcctcgagtgccaaagagtccaaaaccatctgttctgaagcttaggcaagcaacaagcaaaaaccttaagaaggaatcagaattgcttaaggagaatccgctgcgcaacttcccgctgagcagccttagataattaacagtaatattgttgacgacttgtttgaatctgttcctttatgccaaataagctttagactctaaagcttatagatgcaccaagcattgtaggctcgaatcgattgttgtggtccgtgtacactagtttgattgattaatcctcatcgaggtgaggattgaataaaatcttcagttttgtcacgc

SEQ ID NO: 65345 - protein, 417 aa, Triticum aestivum
  peptide (1)..(417): Ceres Seq. ID no. 15222140
  misc_feature (220)..(220): Xaa is any aa, unknown or other
ATVQSTSLKPTLSPTVGFGAAHMAVAAAAGDLAVLDAETLALLGGGPDMAPVAVCGEWETFKENVRPLKRGRNVGLLNQALKAHTDPAQRAALLAERRRMIEAIEEYQGEDPLQPWVDCIKWVQESFPAGGEFSGLVVIYEQCVRAFWHDERYKDDLRYLKVWLEYAGNCSDAEVIFRFLESNRIGEGHAVFYIRYALLMESKNKVKKVDEIFNLGIARXAKPVEKLETTYRAFLGRSTRKKEHEDDTASDDPPVRKFGSDLNRGETRGQHAENSHMLAKPRVKLQRIDVNTPISIYKENPLPSQGLERARSKDRAWNTLGTQADRNKENNMMPARWTSHKIPPKVAARQAVPPARVSSIEVFVDEECAEEPAPPRVPKSPKPSVLKLRQATSKNLKKESELLKENPLRNFPLSSLR

SEQ ID NO: 65346 - protein, 395 aa, Triticum aestivum
  peptide (1)..(395): Ceres Seq. ID no. 15222141
  misc_feature (198)..(198): Xaa is any aa, unknown or other
MAVAAAAGDLAVLDAETLALLGGGPDMAPVAVCGEWETFKENVRPLKRGRNVGLLNQALKAHTDPAQRAALLAERRRMIEAIEEYQGEDPLQPWVDCIKWVQESFPAGGEFSGLVVIYEQCVRAFWHDERYKDDLRYLKVWLEYAGNCSDAEVIFRFLESNRIGEGHAVFYIRYALLMESKNKVKKVDEIFNLGIARXAKPVEKLETTYRAFLGRSTRKKEHEDDTASDDPPVRKFGSDLNRGETRGQHAENSHMLAKPRVKLQRIDVNTPISIYKENPLPSQGLERARSKDRAWNTLGTQADRNKENNMMPARWTSHKIPPKVAARQAVPPARVSSIEVFVDEECAEEPAPPRVPKSPKPSVLKLRQATSKNLKKESELLKENPLRNFPLSSLR

SEQ ID NO: 65347 - protein, 369 aa, Triticum aestivum
  peptide (1)..(369): Ceres Seq. ID no. 15222142
  misc_feature (172)..(172): Xaa is any aa, unknown or other
MAPVAVCGEWETFKENVRPLKRGRNVGLLNQALKAHTDPAQRAALLAERRRMIEAIEEYQGEDPLQPWVDCIKWVQESFPAGGEFSGLVVIYEQCVRAFWHDERYKDDLRYLKVWLEYAGNCSDAEVIFRFLESNRIGEGHAVFYIRYALLMESKNKVKKVDEIFNLGIARXAKPVEKLETTYRAFLGRSTRKKEHEDDTASDDPPVRKFGSDLNRGETRGQHAENSHMLAKPRVKLQRIDVNTPISIYKENPLPSQGLERARSKDRAWNTLGTQADRNKENNMMPARWTSHKIPPKVAARQAVPPARVSSIEVFVDEECAEEPAPPRVPKSPKPSVLKLRQATSKNLKKESELLKENPLRNFPLSSLR

SEQ ID NO: 65348 - DNA, 1477 bp, Triticum aestivum
  misc_feature (1)..(1477): Ceres Seq. ID no. 13597582
atggatggccaacaagccaaacgccacctaaaggtatccggaccggatatccaggacagataggatgcctcggagatgcccttgctccccgatcccaagtcgtcaagttcgctgcacctcccgtccccgtggtgccctcgccgtgacctcaccggcggccgctatgacctcgccggcttccacctcttcctggttctccggaatcgtgcgcacagcatccggcaatcccccttcttcagccatgcctcccgccggcggcgtcacctccgcccccgtctcccttcccgacacccctgctgccgtgagcggcaagggtggcgtcgttgcccctgtagccaccacaggcgtaggtgctcgcaggaagcagctccagggcacgctgttcaagtacgggcccaagtccgctcaggttgcgtttaggactggtgattttacccgtcaggtgattttcattggtggtttggcagatgggctcttagcaactgattacttggaaccattgtcacttgcgttggaggttgagaaatggtcactggttcaaccattactttcttcatcatatactggatacggaatttccaccttggagcaagatgcattggaacttgatcagctcatcggttacttgataaataaagataattctgaaggagtaatactgctcggtcacagcactggttgccaggatattatacattacatgcggacaaactttgcatgttccaaagcagtttctggggtaattttgcaggccccagtaagtgacagggagtatagggcaactcttccagaaacaggagaaatgatagatctagcagcgaaaatgattagtgcgggccgtggaatggatttgatgcccagagaagcaaattcagatgctccaattactgcctacaggttccactccctttgtgcatatatgggtgatgatgatatgttcagttctgatcttagtgaagatcagctgaagcagagacttggtcatatgtcaaccacacagtgcctggttgttttttcaatggcggatgagtatgtccctgaatacgtcgataagaaggcacttgtagacagactctctcgtgcacttggagattcagagaaagttgaaataaaatggggaaaccatgctctttccaacagggtgcaagaggctgtcgaggttattgtagattttgttaagagggagggacccaaaggatgggacgatccatggagctagatacaatagtcatatgatgcaatctttacccccctttacctgttagaatctttcgtttttgtagttttcttagtcaattttctatgtactaatgttctgatctatttaattttattgtgtaaacccttgtctagtacttgattctcgatctcgtgttcatctgtggacattcagatatgctgtttgaaaattgtaagttgtaatgctactatctctggaatgttcctctttgtctattcagagtgtttttttaaggct

SEQ ID NO: 65349 - protein, 384 aa, Triticum aestivum
  peptide (1)..(384): Ceres Seq. ID no. 15222143
MPRRCPCSPIPSRQVRCTSRPRGALAVTSPAAAMTSPASTSSWFSGIVRTASGNPPSSAMPPAGGVTSAPVSLPDTPAAVSGKGGVVAPVATTGVGARRKQLQGTLFKYGPKSAQVAFRTGDFTRQVIFIGGLADGLLATDYLEPLSLALEVEKWSLVQPLLSSSYTGYGISTLEQDALELDQLIGYLINKDNSEGVILLGHSTGCQDIIHYMRTNFACSKAVSGVILQAPVSDREYRATLPETGEMIDLAAKMISAGRGMDLMPREANSDAPITAYRFHSLCAYMGDDDMFSSDLSEDQLKQRLGHMSTTQCLVVFSMADEYVPEYVDKKALVDRLSRALGDSEKVEIKWGNHALSNRVQEAVEVIVDFVKREGPKGWDDPWS

SEQ ID NO: 65350 - protein, 351 aa, Triticum aestivum
  peptide (1)..(351): Ceres Seq. ID no. 15222144
MTSPASTSSWFSGIVRTASGNPPSSAMPPAGGVTSAPVSLPDTPAAVSGKGGVVAPVATTGVGARRKQLQGTLFKYGPKSAQVAFRTGDFTRQVIFIGGLADGLLATDYLEPLSLALEVEKWSLVQPLLSSSYTGYGISTLEQDALELDQLIGYLINKDNSEGVILLGHSTGCQDIIHYMRTNFACSKAVSGVILQAPVSDREYRATLPETGEMIDLAAKMISAGRGMDLMPREANSDAPITAYRFHSLCAYMGDDDMFSSDLSEDQLKQRLGHMSTTQCLVVFSMADEYVPEYVDKKALVDRLSRALGDSEKVEIKWGNHALSNRVQEAVEVIVDFVKREGPKGWDDPWS

SEQ ID NO: 65351 - protein, 325 aa, Triticum aestivum
  peptide (1)..(325): Ceres Seq. ID no. 15222145
MPPAGGVTSAPVSLPDTPAAVSGKGGVVAPVATTGVGARRKQLQGTLFKYGPKSAQVAFRTGDFTRQVIFIGGLADGLLATDYLEPLSLALEVEKWSLVQPLLSSSYTGYGISTLEQDALELDQLIGYLINKDNSEGVILLGHSTGCQDIIHYMRTNFACSKAVSGVILQAPVSDREYRATLPETGEMIDLAAKMISAGRGMDLMPREANSDAPITAYRFHSLCAYMGDDDMFSSDLSEDQLKQRLGHMSTTQCLVVFSMADEYVPEYVDKKALVDRLSRALGDSEKVEIKWGNHALSNRVQEAVEVIVDFVKREGPKGWDDPWS

SEQ ID NO: 65352 - DNA, 1410 bp, Triticum aestivum
  misc_feature (1)..(1410): Ceres Seq. ID no. 12617729
atccataacccggctgcccctcgcccgtctccgccgcaccccccaaaaccctagctcccctccccaccccgccccccaccgccgccgccgcccgcgaagatgccgccgaacctcgagtgccggatgtacgagccgcggttcccggaggtggacgcggcggtgatgatccaggtgaagcacatcgccgacatgggcgcctacgtctcgctcctcgagtacaacaacatcgagggcatgatcctcttctccgagctctcccgccgccgcatccgctccatctcctccctcatcaaggtcggccgccaggagccctccatggtgctccgcgtcgaccgcgacaagggctacatcgacctctccaagcgccgggtctcggaggaggaggccgccacctgcgaggaccgctacaacaagtccaagctcgtccactccatcatgcgccacgccgccgacaccctcggcgtcgacctcgagcccctctaccagcgcatcggctggccgctctaccgcaggtacggccacgcctttgaggccttcaagctcatcgtcaccgaccccgacggggtgctcgacgtcctcacctacgaggagaccgtcgtcggacccgatggcgaggaggtgactaaagttgtgccggcggtcacccctgaggttaaggatgccctggtcaagaacataaggaggagaatgacaccacagcctcttaagattcgtgctgatgttgagatgaaatgcttccagtttgacggtgttctccacattaaggaagccatgaggaaagctgaagctgctggaaacgctgattgccctgtgaagattaagctagttgctcctccgctttatgttctgaccacacagacacttgacaaagaccaggggatagcagttctgacaaatgcaaccaaaatttgtgccgaggcaattgaaaagcacaaggggaaattggtggtgaaggaagcagctagagctgtgagcgagagagacgacaagctgtttgcggacacgattgagaagctcaagctagcaggtgaggaggtcgacggcgacgacgatagcgaggaggaggactctggcatgggagacgtagacttcacaaaggctggcgctggcgcggactgagcgggtctcctcccaggtgggatgagattgcttgtacagcgccagcaatgaaggggaagaatgtttggctcctcctgtttgtttgaggaggcacgttggatggatggacgagtgtttactctgttattagatattgatgatcagttgtaggctacccgtagtcttacagattgatttgcttttcgctgagcactgattctgaatactgttaattgcgcttttgctacctgttttcatcagcatttatacatggattttgcttatcgttgctcactaagtggaatttggtgc

SEQ ID NO: 65353 - protein, 339 aa, Triticum aestivum
  peptide (1)..(339): Ceres Seq. ID no. 12617730
MPPNLECRMYEPRFPEVDAAVMIQVKHIADMGAYVSLLEYNNIEGMILFSELSRRRIRSISSLIKVGRQEPSMVLRVDRDKGYIDLSKRRVSEEEAATCEDRYNKSKLVHSIMRHAADTLGVDLEPLYQRIGWPLYRRYGHAFEAFKLIVTDPDGVLDVLTYEETVVGPDGEEVTKVVPAVTPEVKDALVKNIRRRMTPQPLKIRADVEMKCFQFDGVLHIKEAMRKAEAAGNADCPVKIKLVAPPLYVLTTQTLDKDQGIAVLTNATKICAEAIEKHKGKLVVKEAARAVSERDDKLFADTIEKLKLAGEEVDGDDDSEEEDSGMGDVDFTKAGAGAD

SEQ ID NO: 65354 - protein, 331 aa, Triticum aestivum
  peptide (1)..(331): Ceres Seq. ID no. 12617731
MYEPRFPEVDAAVMIQVKHIADMGAYVSLLEYNNIEGMILFSELSRRRIRSISSLIKVGRQEPSMVLRVDRDKGYIDLSKRRVSEEEAATCEDRYNKSKLVHSIMRHAADTLGVDLEPLYQRIGWPLYRRYGHAFEAFKLIVTDPDGVLDVLTYEETVVGPDGEEVTKVVPAVTPEVKDALVKNIRRRMTPQPLKIRADVEMKCFQFDGVLHIKEAMRKAEAAGNADCPVKIKLVAPPLYVLTTQTLDKDQGIAVLTNATKICAEAIEKHKGKLVVKEAARAVSERDDKLFADTIEKLKLAGEEVDGDDDSEEEDSGMGDVDFTKAGAGAD

SEQ ID NO: 65355 - protein, 318 aa, Triticum aestivum
  peptide (1)..(318): Ceres Seq. ID no. 12617732
MIQVKHIADMGAYVSLLEYNNIEGMILFSELSRRRIRSISSLIKVGRQEPSMVLRVDRDKGYIDLSKRRVSEEEAATCEDRYNKSKLVHSIMRHAADTLGVDLEPLYQRIGWPLYRRYGHAFEAFKLIVTDPDGVLDVLTYEETVVGPDGEEVTKVVPAVTPEVKDALVKNIRRRMTPQPLKIRADVEMKCFQFDGVLHIKEAMRKAEAAGNADCPVKIKLVAPPLYVLTTQTLDKDQGIAVLTNATKICAEAIEKHKGKLVVKEAARAVSERDDKLFADTIEKLKLAGEEVDGDDDSEEEDSGMGDVDFTKAGAGAD

SEQ ID NO: 65356 - DNA, 1501 bp, Triticum aestivum
  misc_feature (1)..(1501): Ceres Seq. ID no. 14303596
agtttgttaagttaggagcttgtgatcaaggcagcaaggcgagaagctgaagctctagctagctctggcgggcatgtttccggcggaggcgtcgttcgccggcgcggaagcggccatgctgccgcccttcttcgtgggctccatgtggcagtcggcgccaggcggcggcgcggctgccttgtccgaggaggacgaggtagccgccgctgcggctgccgaggcagcgcacgaccgcgcggtggcggcgacgcggaaccaccgcgaggccgagaagcgccgccgcgagcggatcaagtcgcacctcgaccgcctccgcgccgtcctcgcctgcgaccccaagatagacaaggcaacgctgctggccaaggcggtggagagggtgcgggagctgaagcagcgcatggacggcgtcgttggcgaggcggcggcgccggcgagccacctgttccccacggagcacgacgagatcgtggtgctcgcgtcgggaggcggcgccggcggcgcggcggccgtgtttgaggcctccgtctgctgcgacgaccgctccgacctcctcccgggcctcatcgacacgctgcgcgcgctccgcctccgcacgctccgcgccgagatggccaccctcggcggccgcgtccgcaacgtgctcgtcctcgcgcgcgacgccggaggacacgccgacgacgactactccacatcctccgaggacggcggcgccgacttcctcaaggaggccctgagggccctcgtggagaggcagggggctgccgccggcgaccggcccaagaggagacgcgtcgccgacatgaacatgcaagcggctgcttaatgaatcagctagccggccggcggccatagctcatagtatctggtcgatatgattgcatatggcgatggatctcatgcatgccatggtaatggtactactactactactatacagcgtgttaatttgctttcaaggttaattagttttgtgtgatggttaattagttccaattctccatatataccactatatggctagctaactctccttggtgatgccaatatgccatgtataattagggatatatatattactactcttttaccattagggtttgcttgagctttaatcaaatgttgcttcaaagccatggcaaacccagcccctaaaataacagttaatgtcagaatatatgcacaatgcaaagttccagacttgattgccatatgctacatatacattggataactctggaagcatttctgtttacaagatcccacaagtccatttttgatcatgtcagggcatgcagctagctagctagccttatatgcatgcatgcatgtaagacaagtcttcggatcaaacaaagatgtttgcatgcatacatgtagcaatgcatggcaagtcctaagatcaaaacaaagatggttgttccaacgcattgcatagcaatgtagcagcatgcttcctgtctgtccggtcttgtgaatgaatgaaaaaagaatgaatgtc

SEQ ID NO: 65357 - protein, 250 aa, Triticum aestivum
  peptide (1)..(250): Ceres Seq. ID no. 14303597
MFPAEASFAGAEAAMLPPFFVGSMWQSAPGGGAAALSEEDEVAAAAAAEAAHDRAVAATRNHREAEKRRRERIKSHLDRLRAVLACDPKIDKATLLAKAVERVRELKQRMDGVVGEAAAPASHLFPTEHDEIVVLASGGGAGGAAAVFEASVCCDDRSDLLPGLIDTLRALRLRTLRAEMATLGGRVRNVLVLARDAGGHADDDYSTSSEDGGADFLKEALRALVERQGAAAGDRPKRRRVADMNMQAAA

SEQ ID NO: 65358 - protein, 236 aa, Triticum aestivum
  peptide (1)..(236): Ceres Seq. ID no. 14303598
MLPPFFVGSMWQSAPGGGAAALSEEDEVAAAAAAEAAHDRAVAATRNHREAEKRRRERIKSHLDRLRAVLACDPKIDKATLLAKAVERVRELKQRMDGVVGEAAAPASHLFPTEHDEIVVLASGGGAGGAAAVFEASVCCDDRSDLLPGLIDTLRALRLRTLRAEMATLGGRVRNVLVLARDAGGHADDDYSTSSEDGGADFLKEALRALVERQGAAAGDRPKRRRVADMNMQAAA

SEQ ID NO: 65359 - protein, 227 aa, Triticum aestivum
  peptide (1)..(227): Ceres Seq. ID no. 14303599
MWQSAPGGGAAALSEEDEVAAAAAAEAAHDRAVAATRNHREAEKRRRERIKSHLDRLRAVLACDPKIDKATLLAKAVERVRELKQRMDGVVGEAAAPASHLFPTEHDEIVVLASGGGAGGAAAVFEASVCCDDRSDLLPGLIDTLRALRLRTLRAEMATLGGRVRNVLVLARDAGGHADDDYSTSSEDGGADFLKEALRALVERQGAAAGDRPKRRRVADMNMQAAA

SEQ ID NO: 65360 - DNA, 1353 bp, Triticum aestivum
  misc_feature (1)..(1353): Ceres Seq. ID no. 14303564
attaccagttgccgaagagtgagagtgagtaccgagcagttggtgcgctgctctgtcctgacattgcacgcgcttgccaccgagctctgcattgcgtctactagcagctatcctcgatggggctgccgggatgcatcgccgtcattgtgctccttctgatttcatggagagagggggaggcggcgatgttcacgttcgtcaaccggtgcgccgacacggtgtggccgggcgtcctgtccaacgctggcacggctcggctcggcaccacggggttcgagctcccgccgggcgcgtcgcgcgctgtgccggcgccctcggcctggtccggccgcctctgggcccgcaccggatgcgcgcaggacggcgccacggggcggctcgtctgcgccaccggcgactgcggctccggcacggccgagtgcgccggggccggcgcggcgcccccagcgacgctggccgagttcacgctcgacggcacgggcgggctggacttctacgacgtcagcctggtggacgggtacaacctgccggtgctggtggagccgtcctccggggagcgccccggcggcgcgtcgaccgctgggtcctgcgcttcggcggggtgcgcggcggacctgaacgcgatgtgccccgccgagctccggtccggcggcggcgcggcctgccggagcgcgtgcgacgcgttcgggcggcccgagtactgctgcagcggcgcctacgccaaccccgggacgtgccggccgacgtcctactcgcaggtgttcaagatggcctgcccgcgctcctacagctacgccttcgacgaccccacctccaccttcacctgcgccggcggccccgactacaccgtcaccttctgccccggcgccaccccgagccagaagtcgaccacggtgccggcggccacaacgccgacgcaaacgacccccacgccgacgacggtgcctgtgacggatacgccggcgatgatgccggggatgacgttcacggacgccaaccaggacagcatgccgatgccgatgggcggcgaggccgggactggtggtggcggcagcatccaggggcagggcgtgatcctcgggggcaccagcagcgacgcctggctcgccaacatggccaccggcgacgcgacgggcgcggcagcggcagcggcagcctccgggcggctagtcgccgcgccattggtactgctcgcgctccatctgctgcgatagatggaggtcggcggagcactgattgatcggtgcaatgtgtacgggtgaaaagagagattggttgtagggttagattcggagaaaaccattgtaacattccgtgttgatgggattttgttgtacgtagattgttggttag

SEQ ID NO: 65361 - protein, 369 aa, Triticum aestivum
  peptide (1)..(369): Ceres Seq. ID no. 14303565
MHRRHCAPSDFMERGGGGDVHVRQPVRRHGVAGRPVQRWHGSARHHGVRAPAGRVARCAGALGLVRPPLGPHRMRAGRRHGAARLRHRRLRLRHGRVRRGRRGAPSDAGRVHARRHGRAGLLRRQPGGRVQPAGAGGAVLRGAPRRRVDRWVLRFGGVRGGPERDVPRRAPVRRRRGLPERVRRVRAARVLLQRRLRQPRDVPADVLLAGVQDGLPALLQLRLRRPHLHLHLRRRPRLHRHLLPRRHPEPEVDHGAGGHNADANDPHADDGACDGYAGDDAGDDVHGRQPGQHADADGRRGRDWWWRQHPGAGRDPRGHQQRRLARQHGHRRRDGRGSGSGSLRAASRRAIGTARAPSAAIDGGRRSTD

SEQ ID NO: 65362 - protein, 365 aa, Triticum aestivum
  peptide (1)..(365): Ceres Seq. ID no. 14303566
MGLPGCIAVIVLLLISWREGEAAMFTFVNRCADTVWPGVLSNAGTARLGTTGFELPPGASRAVPAPSAWSGRLWARTGCAQDGATGRLVCATGDCGSGTAECAGAGAAPPATLAEFTLDGTGGLDFYDVSLVDGYNLPVLVEPSSGERPGGASTAGSCASAGCAADLNAMCPAELRSGGGAACRSACDAFGRPEYCCSGAYANPGTCRPTSYSQVFKMACPRSYSYAFDDPTSTFTCAGGPDYTVTFCPGATPSQKSTTVPAATTPTQTTPTPTTVPVTDTPAMMPGMTFTDANQDSMPMPMGGEAGTGGGGSIQGQGVILGGTSSDAWLANMATGDATGAAAAAAASGRLVAAPLVLLALHLLR

SEQ ID NO: 65363 - protein, 358 aa, Triticum aestivum
  peptide (1)..(358): Ceres Seq. ID no. 14303567
MERGGGGDVHVRQPVRRHGVAGRPVQRWHGSARHHGVRAPAGRVARCAGALGLVRPPLGPHRMRAGRRHGAARLRHRRLRLRHGRVRRGRRGAPSDAGRVHARRHGRAGLLRRQPGGRVQPAGAGGAVLRGAPRRRVDRWVLRFGGVRGGPERDVPRRAPVRRRRGLPERVRRVRAARVLLQRRLRQPRDVPADVLLAGVQDGLPALLQLRLRRPHLHLHLRRRPRLHRHLLPRRHPEPEVDHGAGGHNADANDPHADDGACDGYAGDDAGDDVHGRQPGQHADADGRRGRDWWWRQHPGAGRDPRGHQQRRLARQHGHRRRDGRGSGSGSLRAASRRAIGTARAPSAAIDGGRRSTD

SEQ ID NO: 65364 - DNA, 1786 bp, Triticum aestivum
  misc_feature (1)..(1786): Ceres Seq. ID no. 14303568
acccgacagtgaacagacagcgcacggcaacgacgcaccatcagtcacgcaccctccacccaagtcgccgactcccgccgtcgcgatcgcggcggccgccggcaatgtcttggctcgcgcgctccatcgccaactccctcctatcccccgacagccccgaggccgacggcgaagacccccgcgcctccgactccacctccccgggctcaccccctcgcggcgtccgcgaggatctctcggagctcactgacgccctcgcccaccggttccagggccttgcctccttcctcgcggcgcccactcccgcaggaagcggcggcgcaccccgcgggctgaacccgtccgagattgcggggcgcttccgcctggggctcgcgcggctcccgggccgccaggccgtggcagatctcgccaagaacgcgtcctctctactgcacccggacgaatactggggcgggtcggaggccgccggggctaccgaggacgtggtcgccttcgcgcgggacgccgccatgcggcccgagctctggctggacttcccccttctccccgacgacgcggactcggacgattttgacattagtgatgcgcagcaagatcacgcgctggccgtcgagagcatggcgccggagctggcagatctgaggatcgaactctgcccaagccacatgagcgagggctgcttctggaagatatactttgtgctactgcaccctaagctcacaaaggaggaagccgagcttctttctactcctcagattttggaagctagagggaagttgtcacaaaattcgcaacatcggacaaagctagagagcaacgaagacacagtggctctgactttcagtaatggagatggtactgtacctatacctgtagaggtggtcagcgtagtaaaagatcaagatgcttccggcaggcccacagctttgggcaatgtagattatggtatacttgaatcgattcctctggaagagctagcaaaagatacagtcagtgatgctggagctgttccttcagataaaatcagcagtggcgtgcctgtacagctattgccggtattaagagatgccactgagttctcagtctcacaatcaaggatgggagaaaccattcacactccctctaaagaacatcccactgggttctcacaatctagcattgaagaaagaacacccgactcaattacagatgatgttgtagcaaatgagcagtgtgtaccatttgtagacagtgctccatcggaagaagatcaacataaatggtcattgagtgacctcagcgagcaatcaagagttgtcactcaaaagtcccataacgatggcactgatgatgatggggatgaatggctggaagaggacacggctggtccaggaagcacgcacattccaatagtaggcgacgatgaggatatatctttcagtgatctggaggaagatgactgatgtagcatgatatcaatggcgagcttggtcatcaccgtcttggtgcttctggttcgaagcgatatgtatatgtgggtttgggttctgtccactgtatggtctcatggatctgctatgatcaatgcccactgcagcaggattgttcaccttctgctcatatctctgtgccgccaagatcagttttgcggtctagttctcccttgtggcaactatgcctgttgtacagtgtgtagagagcacatacttgtgcatgtggttgtttggatcaacactttgattcttggatcaagcgtgtgtcctgacaatgatgatgggaactcgagtattcttatgtttcggtg

SEQ ID NO: 65365 - protein, 480 aa, Triticum aestivum
  peptide (1)..(480): Ceres Seq. ID no. 14303569
PTVNRQRTATTHHQSRTLHPSRRLPPSRSRRPPAMSWLARSIANSLLSPDSPEADGEDPRASDSTSPGSPPRGVREDLSELTDALAHRFQGLASFLAAPTPAGSGGAPRGLNPSEIAGRFRLGLARLPGRQAVADLAKNASSLLHPDEYWGGSEAAGATEDVVAFARDAAMRPELWLDFPLLPDDADSDDFDISDAQQDHALAVESMAPELADLRIELCPSHMSEGCFWKIYFVLLHPKLTKEEAELLSTPQILEARGKLSQNSQHRTKLESNEDTVALTFSNGDGTVPIPVEVVSVVKDQDASGRPTALGNVDYGILESIPLEELAKDTVSDAGAVPSDKISSGVPVQLLPVLRDATEFSVSQSRMGETIHTPSKEHPTGFSQSSIEERTPDSITDDVVANEQCVPFVDSAPSEEDQHKWSLSDLSEQSRVVTQKSHNDGTDDDGDEWLEEDTAGPGSTHIPIVGDDEDISFSDLEEDD

SEQ ID NO: 65366 - protein, 446 aa, Triticum aestivum
  peptide (1)..(446): Ceres Seq. ID no. 14303570
MSWLARSIANSLLSPDSPEADGEDPRASDSTSPGSPPRGVREDLSELTDALAHRFQGLASFLAAPTPAGSGGAPRGLNPSEIAGRFRLGLARLPGRQAVADLAKNASSLLHPDEYWGGSEAAGATEDVVAFARDAAMRPELWLDFPLLPDDADSDDFDISDAQQDHALAVESMAPELADLRIELCPSHMSEGCFWKIYFVLLHPKLTKEEAELLSTPQILEARGKLSQNSQHRTKLESNEDTVALTFSNGDGTVPIPVEVVSVVKDQDASGRPTALGNVDYGILESIPLEELAKDTVSDAGAVPSDKISSGVPVQLLPVLRDATEFSVSQSRMGETIHTPSKEHPTGFSQSSIEERTPDSITDDVVANEQCVPFVDSAPSEEDQHKWSLSDLSEQSRVVTQKSHNDGTDDDGDEWLEEDTAGPGSTHIPIVGDDEDISFSDLEEDD

SEQ ID NO: 65367 - protein, 310 aa, Triticum aestivum
  peptide (1)..(310): Ceres Seq. ID no. 14303571
MRPELWLDFPLLPDDADSDDFDISDAQQDHALAVESMAPELADLRIELCPSHMSEGCFWKIYFVLLHPKLTKEEAELLSTPQILEARGKLSQNSQHRTKLESNEDTVALTFSNGDGTVPIPVEVVSVVKDQDASGRPTALGNVDYGILESIPLEELAKDTVSDAGAVPSDKISSGVPVQLLPVLRDATEFSVSQSRMGETIHTPSKEHPTGFSQSSIEERTPDSITDDVVANEQCVPFVDSAPSEEDQHKWSLSDLSEQSRVVTQKSHNDGTDDDGDEWLEEDTAGPGSTHIPIVGDDEDISFSDLEEDD

SEQ ID NO: 65368 - DNA, 1346 bp, Triticum aestivum
  misc_feature (1)..(1346): Ceres Seq. ID no. 14302780
cttttccccgtcagacgccagcaagctgcttgctttgcttcggttagctcgctgcgcggcgccgctctcggctcccccgcggccaggctgctcggatggcggggcggccggggtacgtcacgctgccgataatctcggtgttcgccgcgatcgggtacgtctactacaccgcggtgttcctcgcgatccccgcgtggctggggctcgccacggcggcgggggtcgccaacgtcgcggcctacaccgcgctcgcgctcgcctgcgtcgccgcctacggcctcgtcgtcacgcgcgacccgggccgcgtgccgcccgccttcgtgcccgacgtcgaggacacggagacccccctccatgagatcaagcgcaagggtggtgatttgagatactgccagaagtgttttcattataaacctcctcgcgcgcatcattgtcgtgtctgcaagagatgtattctgaaaatggatcaccactgtatttggattaacaattgtgttgggcatgagaattacaaaattttcctcgtctttgtgttgtatgctgcaaccgcaagcttctattctttggctctgatgattggaggcgtagtgcatagtgtgcctacagatgaacaatcaggaattgattctccaagaaaatcgttagttatttgtggcgtctttgtgggtgtaatgactttggcgttgtctatcctcttggtctggcatgtttacctcatcttacataataagactactattgagtaccatgaaggagttagggcaatgtggttggcagaaaaggctggaaatctttaccatcatccatatgatctcggtgtctatcataatattgtttcggtcctaggccccaacatgctatgctggttctgccctgtatcgaggaacataggcgacggcgttcgtttccgcacatcgtatgatattccgctatcgacaccaccatccaaagcagaaaagcatctggcaatgtcttgagctcttgcattgagagcgtatattgtgggatcaaatctgtgaatcatgccgcaagtgtaaggtacatagcgagggctgaggagcttcaagagtagttcctccaggccccagggatgtatctggagttagaaaccctaatctagctagttattccattatactttttggccagcttgatgagaagaatcaccgatgggcctcaatagatctggagtgacctggctcgcctgtactcatacaaaaagtctgaactgaagagtcaaagactgctctgttgtaaagtacgtgcctgtagtgtcgtttaccctgaagtccgtatattgcgtttttgtgtcagagagagttaagggacaaatgtcctatttactc

SEQ ID NO: 65369 - protein, 293 aa, Triticum aestivum
  peptide (1)..(293): Ceres Seq. ID no. 14302781
MAGRPGYVTLPIISVFAAIGYVYYTAVFLAIPAWLGLATAAGVANVAAYTALALACVAAYGLVVTRDPGRVPPAFVPDVEDTETPLHEIKRKGGDLRYCQKCFHYKPPRAHHCRVCKRCILKMDHHCIWINNCVGHENYKIFLVFVLYAATASFYSLALMIGGVVHSVPTDEQSGIDSPRKSLVICGVFVGVMTLALSILLVWHVYLILHNKTTIEYHEGVRAMWLAEKAGNLYHHPYDLGVYHNIVSVLGPNMLCWFCPVSRNIGDGVRFRTSYDIPLSTPPSKAEKHLAMS

SEQ ID NO: 65370 - protein, 171 aa, Triticum aestivum
  peptide (1)..(171): Ceres Seq. ID no. 14302782
MDHHCIWINNCVGHENYKIFLVFVLYAATASFYSLALMIGGVVHSVPTDEQSGIDSPRKSLVICGVFVGVMTLALSILLVWHVYLILHNKTTIEYHEGVRAMWLAEKAGNLYHHPYDLGVYHNIVSVLGPNMLCWFCPVSRNIGDGVRFRTSYDIPLSTPPSKAEKHLAMS

SEQ ID NO: 65371 - DNA, 1216 bp, Triticum aestivum
  misc_feature (1)..(1216): Ceres Seq. ID no. 13589061
atcgaaaagttgctcttatcttatcccatttcttcctctttcctctccctctctctctctcttacacaagttgctgctgagttggtgctgtccttgttcctggacggacacatcctacatgtcgacggcggtggcgcggccctacggcggcggcttccccggatcggggagggccaagggggacgagctgctcggcaagaagatgagcgacgggttcttcatcgaggaggaggaggaggaggaggaggaggaggcggaggaggtgctcacggagagctcctccatcggcgcgccgtcgccgtcgagctcctccatcggcgaggactcctcgtcggaggttggcggcgacggggaggacgaggaggtggagagcaagctcaaggaggagcccgggctcgggtgcctggacgccctggaggactccttgcccatcaagaacgggctgtcgagcttctacgccggaaagtcgaagtcattcaccagcctcgcggaggcggcggcgcgggacgccgtgaaggagctcgccaagccggagaaccccttcaacaagcgccgccgcatcctggccacctggtcccgccgcgcctcctgcagctcgctggccaccgccacctacctgcccccgctcctcgcccccgaccacgccctccccgagggggaggaaggcgaggaggacgacgactccgactccggctccgacgagcagcaccgcggcaagaacgggtgggaggcaccggcattgccgcccccgaggctgagcgtgaacacccagatgggcgcggcggcggcgaggaagggcggcagcttcagatcgccgaggtcctactcgctctcagatcttcgaaatggcggcgatgcgagatacaaccagtagctgcgaattcgcagccattgatctgtcttgtgtcccgtagatctgttactactacttactccttaattatatataagcaagtaatcgcaagagcatgtgtaagtgtctaagctaaattcgtcgtgctcttgtatccgtcagttggatcccgttgacctcgctcacccgacccgatgtacgcagacatgtatgaactgctccggcgaactgagttcaccgaactgatccaacaccccggccatcattaactaatgatgaaccgtcctcaagataagattagttagtttaatggcattgctcccgatccctttgtgtacaaacatatatacaatttgttgatcc

SEQ ID NO: 65372 - protein, 327 aa, Triticum aestivum
  peptide (1)..(327): Ceres Seq. ID no. 13589062
IEKLLLSYPISSSFLSLSLSLTQVAAELVLSLFLDGHILHVDGGGAALRRRLPRIGEGQGGRAARQEDERRVLHRGGGGGGGGGGGGGAHGELLHRRAVAVELLHRRGLLVGGWRRRGGRGGGEQAQGGARARVPGRPGGLLAHQERAVELLRRKVEVIHQPRGGGGAGRREGARQAGEPLQQAPPHPGHLVPPRLLQLAGHRHLPAPAPRPRPRPPRGGGRRGGRRLRLRLRRAAPRQERVGGTGIAAPEAEREHPDGRGGGEEGRQLQIAEVLLALRSSKWRRCEIQPVAANSQPLICLVSRRSVTTTYSLIIYKQVIARACVSV

SEQ ID NO: 65373 - protein, 290 aa, Triticum aestivum
  peptide (1)..(290): Ceres Seq. ID no. 13589063
SKSCSYLIPFLPLSSPSLSLLHKLLLSWCCPCSWTDTSYMSTAVARPYGGGFPGSGRAKGDELLGKKMSDGFFIEEEEEEEEEEAEEVLTESSSIGAPSPSSSSIGEDSSSEVGGDGEDEEVESKLKEEPGLGCLDALEDSLPIKNGLSSFYAGKSKSFTSLAEAAARDAVKELAKPENPFNKRRRILATWSRRASCSSLATATYLPPLLAPDHALPEGEEGEEDDDSDSGSDEQHRGKNGWEAPALPPPRLSVNTQMGAAAARKGGSFRSPRSYSLSDLRNGGDARYNQ

SEQ ID NO: 65374 - protein, 251 aa, Triticum aestivum
  peptide (1)..(251): Ceres Seq. ID no. 13589064
MSTAVARPYGGGFPGSGRAKGDELLGKKMSDGFFIEEEEEEEEEEAEEVLTESSSIGAPSPSSSSIGEDSSSEVGGDGEDEEVESKLKEEPGLGCLDALEDSLPIKNGLSSFYAGKSKSFTSLAEAAARDAVKELAKPENPFNKRRRILATWSRRASCSSLATATYLPPLLAPDHALPEGEEGEEDDDSDSGSDEQHRGKNGWEAPALPPPRLSVNTQMGAAAARKGGSFRSPRSYSLSDLRNGGDARYNQ

SEQ ID NO: 65375 - DNA, 2073 bp, Triticum aestivum
  misc_feature (1)..(2073): Ceres Seq. ID no. 13597678
gannntgatctccatccacactccaaaacagagcaggcaccacaccacagtcgagagcagaggaggcaccattctccggcacagcagagcaggcacacaccgctcgtcgtcggccggatggacggtgccgcagccgcctggacgccccggaagcaggtggtgctgtacccttcgcccggcatgggccacctggtgtccatgatcgagctcggcaaggtcctcgcggctcgtggcctcgccatcaccatcgtcatcgtgagcctgccgttcgtggacaccggggccagggggccgttcctggccggcgtcaccgcggccaacccctccatctccttccactgcctcccgcaggtcgacgtcccgccgctcgactccgaccaccccgaggcggtcacctacgaggtcgccggcctctccatcccacacctccgcggcttcctcgccagggcctcaccgaccgtcctcgtcgtcgactttttttgcagcatcgcgctcgacgtggccgcggagctcggcgtccccgggtactgtttcttcacgtctcccgcggaggtcctggctttttccctgtatttgccggtcctgcatgctaggagcgcggccagctttkgggagatgggggaggagctcgtgcacgtgccggggatccccgcgctgscggcgacgcacttccccaagccgctcatggaccgtgacgacccggcatacatatggtcgctgagagtgtcccccgacctctgccgctcccagggaatcatcgtcaacaccttccgctcgctcgagccacgcgcggtggacaccatcgccgccgggctctgcacgcctcccggcctcccgacgccgccggtctactgcatcgggccgctgataaagtcggaggaggtgggcgtgaagcgcggccacgagtgcctggcgtggctggacacgcagccgacggccagcgtggtgttcctctgcttcggcagcctcggcgtgttcaacgcagagcagatcaggcaggtggccatcggcctggaggccagcggcaagaggttcctgtgggtcgtgcggagcccgccgagcgacgacccgacaaagaagttcgaggagccgccggagccggacctcgatgctctcctcccggagggcttcctggaccggaccaagggcacgggtctcgtcgtcaagtcatgggcgccgcagcggsacgtgctggtgcatggcgcggtgggcggtttcgtgacgcactgcgggtggaactccgtgctcgaggtgatcatggccggcgtgcccatgctggcctggccgctgtaggcggagcagcggatgaacagagtgttcctggaaaaggagctgggtctggctgtggcggtggatgaatatgacaaggaggtggtggacgccgacgaagtggcggcaaaggtgaggtggctgatggactccgacggcggcagggtgctccgggagtggacgcaggcggctatgcgacgggccaagcaggcgctgggcgagggtggggagtcgaatttgacgttgacgcgactggtccagggctggatgcttgacgtgggcaatgacgtgagttcggctgagaaaagatagtgcaactcatggtcacgggagaaaagcaattctcccattcatggctcaaccgttgaatttagatggagatnnngatgcatgcacacctcttctaattgtatttcacccattaatgaacccacactctcccatgcagcacactacacccatgctttttcatgtgatttcaaagtttgaaataattttatcktttaaacwcaatraasykggaamwrraggggggaaagraaaaaaaaaaaaaaaaaaaaaaaaaaaaaaaaaaaaaaaaaaaaaaaaaarraaaaaaaaaaaaaaaaaaaaaargaaaaaaaaaaaaaaaaaggtttaycgatcccsccaaccccaagggggggcccggaacccaattccccccaaaagggagccraawaacscscscccmmgggccgccgtttaaaaacgscggracgggaaaamcccgggggtamcccaaytaaaycgcctggaaraaaaccccccttyccccagtggggg

SEQ ID NO: 65376 - protein, 430 aa, Triticum aestivum
  peptide (1)..(430): Ceres Seq. ID no. 15222165
  misc_feature (1)..(1): Xaa is any aa, unknown or other
  misc_feature (2)..(2): Xaa is any aa, unknown or other
  misc_feature (204)..(204): Xaa is any aa, unknown or other
  misc_feature (220)..(220): Xaa is any aa, unknown or other
  misc_feature (396)..(396): Xaa is any aa, unknown or other
XXDLHPHSKTEQAPHHSREQRRHHSPAQQSRHTPLVVGRMDGAAAAWTPRKQVVLYPSPGMGHLVSMIELGKVLAARGLAITIVIVSLPFVDTGARGPFLAGVTAANPSISFHCLPQVDVPPLDSDHPEAVTYEVAGLSIPHLRGFLARASPTVLVVDFFCSIALDVAAELGVPGYCFFTSPAEVLAFSLYLPVLHARSAASFXEMGEELVHVPGIPALXATHFPKPLMDRDDPAYIWSLRVSPDLCRSQGIIVNTFRSLEPRAVDTIAAGLCTPPGLPTPPVYCIGPLIKSEEVGVKRGHECLAWLDTQPTASVVFLCFGSLGVFNAEQIRQVAIGLEASGKRFLWVVRSPPSDDPTKKFEEPPEPDLDALLPEGFLDRTKGTGLVVKSWAPQRXVLVHGAVGGFVTHCGWNSVLEVIMAGVPMLAWPL

SEQ ID NO: 65377 - protein, 391 aa, Triticum aestivum
  peptide (1)..(391): Ceres Seq. ID no. 15222166
  misc_feature (165)..(165): Xaa is any aa, unknown or other
  misc_feature (181)..(181): Xaa is any aa, unknown or other
  misc_feature (357)..(357): Xaa is any aa, unknown or other
MDGAAAAWTPRKQVVLYPSPGMGHLVSMIELGKVLAARGLAITIVIVSLPFVDTGARGPFLAGVTAANPSISFHCLPQVDVPPLDSDHPEAVTYEVAGLSIPHLRGFLARASPTVLVVDFFCSIALDVAAELGVPGYCFFTSPAEVLAFSLYLPVLHARSAASFXEMGEELVHVPGIPALXATHFPKPLMDRDDPAYIWSLRVSPDLCRSQGIIVNTFRSLEPRAVDTIAAGLCTPPGLPTPPVYCIGPLIKSEEVGVKRGHECLAWLDTQPTASVVFLCFGSLGVFNAEQIRQVAIGLEASGKRFLWVVRSPPSDDPTKKFEEPPEPDLDALLPEGFLDRTKGTGLVVKSWAPQRXVLVHGAVGGFVTHCGWNSVLEVIMAGVPMLAWPL

SEQ ID NO: 65378 - protein, 370 aa, Triticum aestivum
  peptide (1)..(370): Ceres Seq. ID no. 15222167
  misc_feature (144)..(144): Xaa is any aa, unknown or other
  misc_feature (160)..(160): Xaa is any aa, unknown or other
  misc_feature (336)..(336): Xaa is any aa, unknown or other
MGHLVSMIELGKVLAARGLAITIVIVSLPFVDTGARGPFLAGVTAANPSISFHCLPQVDVPPLDSDHPEAVTYEVAGLSIPHLRGFLARASPTVLVVDFFCSIALDVAAELGVPGYCFFTSPAEVLAFSLYLPVLHARSAASFXEMGEELVHVPGIPALXATHFPKPLMDRDDPAYIWSLRVSPDLCRSQGIIVNTFRSLEPRAVDTIAAGLCTPPGLPTPPVYCIGPLIKSEEVGVKRGHECLAWLDTQPTASVVFLCFGSLGVFNAEQIRQVAIGLEASGKRFLWVVRSPPSDDPTKKFEEPPEPDLDALLPEGFLDRTKGTGLVVKSWAPQRXVLVHGAVGGFVTHCGWNSVLEVIMAGVPMLAWPL

SEQ ID NO: 65379 - DNA, 1477 bp, Triticum aestivum
  misc_feature (1)..(1477): Ceres Seq. ID no. 14302844
acactccaactcagtggcaacagcatctcccctgttccgcccgcccgctcgcctctgtttcttttctttctttccacagcggctctgctccgctcctcacctccctcgatcgcacataccatatttggtagctcagcacagccatggtggttcttgccagcacgcccgccgtcgatcacatcccgctcctcaggtcccccgaccccggggactacttctccggcatgccggttgtcgacctctccagccctggcgcgccgcgggccatcgccgacgcctgcgagcgcttcgggttcttcaagctcgtcaaccacggggtgccagcggacacgatggacaggctcgagtcagaggccgtcaggttcttctcgctgccgcaggccgacaaggaccgctccggcccggcctacccgttcggctacggcagcaagcgcatcgggctcaatggcgacatgggctggctcgagtacctcctcctcgccgtcgagtccgcgtcgctctccggcgcctgcaccgtcccgtcctgcgcgctcttccgggcggcgctgaacgagtacatcgcggcggtgcggaaggtggcggtgcgggtgatggaggcgatggcggaggggctgggcattgcgcccgttgacgcgctgagcgcgatggtgacggcgggggggagcgaccaggtgttccgggtgaaccactacccgccgtgccacgcgctgcaagggctgggctgcagcgccacaggcttcggcgagcacaccgacccgcagctcatctccgtgctgcgctccaacggcacgtccggcctgcagatcgcgctccagaacgggcagtgggtgtccgtgccctcggaccgcgacgccttcttcgtcaacgtcggcgactcgttgcaggtgctgaccaacgggaggttcaagagcgtgaagcacagggtggtggccaacagcctaaagtctagggtttccatgatctactttggagggccagcgatgacacagaggattgcaccattgccgcagctgctgggcgcgggagagcagagcctgtacaaggacttcacatggggcgagtacaagaaggctgcctacaactcgaggctcggggacaacaggctggctcagttccacaggtagcctcgcctgccgcctgggcctgctcaaggagcagcttttaccaagccagctagctctagcttagctagctctgccgtggcttgtatttcccacacgatcgatgaagatcaagagggggggaagctactactagaaaagaaaaagaaacagggctaaaagaagatgatttcaagattcacatgcagtagtagagctgcggaggtagctagatcctttttgcgtgtgcgcgtgcgtgtgtgttcatagttgctaaaactcgcctttcctattcgggaatgccggacgaacgatgaacagataagttaacttgatgaatagttagtgtgaaccagatacagcagaggattggcatc

SEQ ID NO: 65380 - protein, 326 aa, Triticum aestivum
  peptide (1)..(326): Ceres Seq. ID no. 14302845
MVVLASTPAVDHIPLLRSPDPGDYFSGMPVVDLSSPGAPRAIADACERFGFFKLVNHGVPADTMDRLESEAVRFFSLPQADKDRSGPAYPFGYGSKRIGLNGDMGWLEYLLLAVESASLSGACTVPSCALFRAALNEYIAAVRKVAVRVMEAMAEGLGIAPVDALSAMVTAGGSDQVFRVNHYPPCHALQGLGCSATGFGEHTDPQLISVLRSNGTSGLQIALQNGQWVSVPSDRDAFFVNVGDSLQVLTNGRFKSVKHRVVANSLKSRVSMIYFGGPAMTQRIAPLPQLLGAGEQSLYKDFTWGEYKKAAYNSRLGDNRLAQFHR

SEQ ID NO: 65381 - protein, 299 aa, Triticum aestivum
  peptide (1)..(299): Ceres Seq. ID no. 14302846
MPVVDLSSPGAPRAIADACERFGFFKLVNHGVPADTMDRLESEAVRFFSLPQADKDRSGPAYPFGYGSKRIGLNGDMGWLEYLLLAVESASLSGACTVPSCALFRAALNEYIAAVRKVAVRVMEAMAEGLGIAPVDALSAMVTAGGSDQVFRVNHYPPCHALQGLGCSATGFGEHTDPQLISVLRSNGTSGLQIALQNGQWVSVPSDRDAFFVNVGDSLQVLTNGRFKSVKHRVVANSLKSRVSMIYFGGPAMTQRIAPLPQLLGAGEQSLYKDFTWGEYKKAAYNSRLGDNRLAQFHR

SEQ ID NO: 65382 - protein, 263 aa, Triticum aestivum
  peptide (1)..(263): Ceres Seq. ID no. 14302847
MDRLESEAVRFFSLPQADKDRSGPAYPFGYGSKRIGLNGDMGWLEYLLLAVESASLSGACTVPSCALFRAALNEYIAAVRKVAVRVMEAMAEGLGIAPVDALSAMVTAGGSDQVFRVNHYPPCHALQGLGCSATGFGEHTDPQLISVLRSNGTSGLQIALQNGQWVSVPSDRDAFFVNVGDSLQVLTNGRFKSVKHRVVANSLKSRVSMIYFGGPAMTQRIAPLPQLLGAGEQSLYKDFTWGEYKKAAYNSRLGDNRLAQFHR

SEQ ID NO: 65383 - DNA, 961 bp, Triticum aestivum
  misc_feature (1)..(961): Ceres Seq. ID no. 13597620
ccacgcagcacctcctctcctcgccccccgagatcggaatcggcgcccccctccctccgccgccgccgccgccgccgccatgtcgccgtctctgctcggggggctcaccaagtcgctggccatgaccgtgctctccgaggtcggcgacaagaccttcttcgccgccgcgattctggccatgcgccatccccggaagctcgtccttgctggctgtctatcggcgttaacagtgatgaccgctttatctgcttctctcggctgggctgcaccaaatctgatatcacgtaaatggactcatcatatcaccactctgctgttctttgtgtttggcatctggtcattgtgggaaggcttcaaagaagaaggagagtcagaagatctggctgaattggaagcaaagctggatgcggactttaagactaacaaaggggaatcgaaaaataaatcaaaggcaactgaagatacaaagaaaaagcaaaggccatttctcatgcagttcttctcgccaatttttataaaggcattttccatcactttctttggtgagtggggtgacaagagccagattgctacaattggcttggctgctgatgaaaacccattcggtgtcgtcatcgggggagtcatagctcaagcactctgcactaccgctgccgtgatgggagggaagagcctggcctctcagatatccgagaagatggttgaattgtcgagcggggtgctattcctgttgtttggcataatgtccttgttgtcagggccagaagggcaattgtaatttccccaggaacttcggcaggactctgccagactcctggagtagttaccaagcttaccttatttgatgggtgatggcgacgaaagccggccgtccttcaccaactggatggcgattcattagtttagtcaacacatcattgtaacacttggcttgccactcataaataacttgatgttactg

SEQ ID NO: 65384 - protein, 258 aa, Triticum aestivum
  peptide (1)..(258): Ceres Seq. ID no. 13597621
HAAPPLLAPRDRNRRPPPSAAAAAAAMSPSLLGGLTKSLAMTVLSEVGDKTFFAAAILAMRHPRKLVLAGCLSALTVMTALSASLGWAAPNLISRKWTHHITTLLFFVFGIWSLWEGFKEEGESEDLAELEAKLDADFKTNKGESKNKSKATEDTKKKQRPFLMQFFSPIFIKAFSITFFGEWGDKSQIATIGLAADENPFGVVIGGVIAQALCTTAAVMGGKSLASQISEKMVELSSGVLFLLFGIMSLLSGPEGQL

SEQ ID NO: 65385 - protein, 232 aa, Triticum aestivum
  peptide (1)..(232): Ceres Seq. ID no. 13597622
MSPSLLGGLTKSLAMTVLSEVGDKTFFAAAILAMRHPRKLVLAGCLSALTVMTALSASLGWAAPNLISRKWTHHITTLLFFVFGIWSLWEGFKEEGESEDLAELEAKLDADFKTNKGESKNKSKATEDTKKKQRPFLMQFFSPIFIKAFSITFFGEWGDKSQIATIGLAADENPFGVVIGGVIAQALCTTAAVMGGKSLASQISEKMVELSSGVLFLLFGIMSLLSGPEGQL

SEQ ID NO: 65386 - protein, 218 aa, Triticum aestivum
  peptide (1)..(218): Ceres Seq. ID no. 13597623
MTVLSEVGDKTFFAAAILAMRHPRKLVLAGCLSALTVMTALSASLGWAAPNLISRKWTHHITTLLFFVFGIWSLWEGFKEEGESEDLAELEAKLDADFKTNKGESKNKSKATEDTKKKQRPFLMQFFSPIFIKAFSITFFGEWGDKSQIATIGLAADENPFGVVIGGVIAQALCTTAAVMGGKSLASQISEKMVELSSGVLFLLFGIMSLLSGPEGQL

SEQ ID NO: 65387 - DNA, 1133 bp, Triticum aestivum
  misc_feature (1)..(1133): Ceres Seq. ID no. 12618069
agatcacgcgccgctcctcccggtcgccctagcgccgccaccgaacgatcccccgaccccccagaccacgagaccacccgcggcggttggccggcgcagggatgggcgacgaggcgaagtacctggagactgcgcgggcggaccgctccgtgtggctcatgaagtgcccccccgtcgtctcccaggcctggcagggcgcctcctcctcctccggcgatgctaaccctaacccggtcgtcgccaaggtcgtgctgtccctcgaccccctcagctccgccgagccctccctccagttcaagatggagatgtctcaaactagtgtagccagcacttgcaatctaccaaagagttactccttgaatatgttcaaggattttgtacccatgtgtgttttctctgagactaatcagggaaaactctcatgtgaaggaaaagtcgagcataaattcgacatggaacctcacaaggataacttattaaactacgcgaagttatgccgtgaaagaacacaaaagtcgatggttaaaactagaaaagtgcaggtacttgataatgaccatggaatgagcatgagacccatgcctggcatggttggtctgatatcttctagttccaaggagaagaggaagccaacgccaaccaaaccatccgatgtcaaaaggacacgtagggaccgtcgggaactggaaaacattatcttcaagcttttcgaaaagcagcctaactgggcactgaaggctctagtgcaagagactgaccagccagagcaattcctcaaggagatattgaacgacctctgtatgtacaacaaacgaggtccgaaccagggcacgcacgagctcaagcccgagtacaagaagtcgtcggaggacgccgccggtgctgctccgtgaagacgatttgcgtatccgactgctgttgtataaccgagtacctgttggctttgatgtgcggaacgatgagttgtctatctgaagcctccgatcatgcctgggctgcatttgtttgctttttattaagaaggcactgttgtaactgtatgggtataagatgatacatatactgatatacaacacatgtcacagaagggaacgaatctactgataaaccacatgaaaagatcgtttgatttc

SEQ ID NO: 65388 - protein, 263 aa, Triticum aestivum
  peptide (1)..(263): Ceres Seq. ID no. 12618070
MGDEAKYLETARADRSVWLMKCPPVVSQAWQGASSSSGDANPNPVVAKVVLSLDPLSSAEPSLQFKMEMSQTSVASTCNLPKSYSLNMFKDFVPMCVFSETNQGKLSCEGKVEHKFDMEPHKDNLLNYAKLCRERTQKSMVKTRKVQVLDNDHGMSMRPMPGMVGLISSSSKEKRKPTPTKPSDVKRTRRDRRELENIIFKLFEKQPNWALKALVQETDQPEQFLKEILNDLCMYNKRGPNQGTHELKPEYKKSSEDAAGAAP

SEQ ID NO: 65389 - protein, 244 aa, Triticum aestivum
  peptide (1)..(244): Ceres Seq. ID no. 12618071
MKCPPVVSQAWQGASSSSGDANPNPVVAKVVLSLDPLSSAEPSLQFKMEMSQTSVASTCNLPKSYSLNMFKDFVPMCVFSETNQGKLSCEGKVEHKFDMEPHKDNLLNYAKLCRERTQKSMVKTRKVQVLDNDHGMSMRPMPGMVGLISSSSKEKRKPTPTKPSDVKRTRRDRRELENIIFKLFEKQPNWALKALVQETDQPEQFLKEILNDLCMYNKRGPNQGTHELKPEYKKSSEDAAGAAP

SEQ ID NO: 65390 - protein, 197 aa, Triticum aestivum
  peptide (1)..(197): Ceres Seq. ID no. 12618072
MEMSQTSVASTCNLPKSYSLNMFKDFVPMCVFSETNQGKLSCEGKVEHKFDMEPHKDNLLNYAKLCRERTQKSMVKTRKVQVLDNDHGMSMRPMPGMVGLISSSSKEKRKPTPTKPSDVKRTRRDRRELENIIFKLFEKQPNWALKALVQETDQPEQFLKEILNDLCMYNKRGPNQGTHELKPEYKKSSEDAAGAAP

SEQ ID NO: 65391 - DNA, 1004 bp, Triticum aestivum
  misc_feature (1)..(1004): Ceres Seq. ID no. 13598617
ctgtttttccccgtcgtcaacaatatcttctatcccgaaaatcaagctggttttccccttctctcgccaccccttcttctccaccgtccctcccctggagcgagcgagccctcgtctcactccccgcgatggcttcctccactgctctctccccggtggccttcaagtcctccttctcgccgctcccctccagaccagctcgtactaggataaatgtacaaggcgcattctgtttgccatgttccacttggaaaagagctaataatagatcgttccgggtatacagtttatttggaggaaagaaggagaaagatgagaatggtgacgaggcaccatcaaagggaggaatctttggaaacattggaaatatgcaaaacctttatgaaactgtgaagaaggcccaaatggttgtccaagtggaggctgtgcgggtgcaaaaggagcttgcagcgactgagattgagggttattgtgaaggcgaactaatcaaggttacactatctgggaaccaacaacctataaatgttgaaatcacggaagctgcaatggagttgggtgctgaaaaagtctccgagctggtcaatgaagcctacaaggatgcacaccagaggagcgtccaggcaatgaaggaaaggatggctgatctagcgcagagcataggaatgcctgcagggctcggcgacggtctcaagtgataaaaggcctggtacttgaatgctttccaataatgaaagaagcgtctctcaattttgtattctagctgtgtcgggtcatggttaaacccctccgcagcatcggttagctgtgcatgaactgtaactgtggacacctgtttccttgctcatttgcacatcatagttacagcattagttctaatgtgttgttttacaccaaacagatgttgcttttgtgctagtagaccggcagcctggagaacatttgtaaactaataactgcagagtgaaatatgtttacgttgcgaatagagtactctttggttatgg

SEQ ID NO: 65392 - protein, 230 aa, Triticum aestivum
  peptide (1)..(230): Ceres Seq. ID no. 15222384
VFPRRQQYLLSRKSSWFSPSLATPSSPPSLPWSERALVSLPAMASSTALSPVAFKSSFSPLPSRPARTRINVQGAFCLPCSTWKRANNRSFRVYSLFGGKKEKDENGDEAPSKGGIFGNIGNMQNLYETVKKAQMVVQVEAVRVQKELAATEIEGYCEGELIKVTLSGNQQPINVEITEAAMELGAEKVSELVNEAYKDAHQRSVQAMKERMADLAQSIGMPAGLGDGLK

SEQ ID NO: 65393 - protein, 188 aa, Triticum aestivum
  peptide (1)..(188): Ceres Seq. ID no. 15222385
MASSTALSPVAFKSSFSPLPSRPARTRINVQGAFCLPCSTWKRANNRSFRVYSLFGGKKEKDENGDEAPSKGGIFGNIGNMQNLYETVKKAQMVVQVEAVRVQKELAATEIEGYCEGELIKVTLSGNQQPINVEITEAAMELGAEKVSELVNEAYKDAHQRSVQAMKERMADLAQSIGMPAGLGDGLK

SEQ ID NO: 65394 - DNA, 1457 bp, Triticum aestivum
  misc_feature (1)..(1457): Ceres Seq. ID no. 13662804
atccgtccatatatcgcttcttccgccgctccgcttcccttccacgcgcaccaaccgccgcctgctcttcgattcccccgaggccccagcaggagcagcaaccccttcttctgcttcttgttcttggtgcggtgcgcgggcatggccatcgaccacgagtcgcccttcaaggagctccgcctcaagaacaggaggatcatgggaggcggcgcccctgagccggacgaagaggaggcggaggcgcaggtggcggcggcggcgggggaggaggagcagtggccgcagtggctgcgcccgctgctgtccgcgcgcttcttcgcgcaatgcaagacgcacaccgagtcgcaccggagcggcgagtgcaacatgttctgcctcgactgcgccgccggggcggccgccggcgcggcggcgctctgctcgctgtgcctcgcgcacgcgcaccgcggccaccacaccatccagatccgccgctcctcctaccacgacgtcatccgggtgtcggacatccagcgcttcatggacatcgccggcgtgcagacctacgtcatcaacagcgcgcgcgtcgtcttcctcaacgagcgcccccagcagaagcagcccggcaaggccggcggcggcgccggcggcgccaacctctgcgaggtctgcagccgcagcctcctcgacaacttccgcttctgctccctcggctgcaaggtcgccggctgctcctccgacgggggcggcaacgacaaggcgaggatgatgcgggccagcaggcccggccgcgccaagggctcgtcggactccgaggcggcctcctcctcctctcctctgcgcaatgccgccaggcagagcttcacgccgtccacgccgccgccgcctccgcctccagcggccaagcggcgcaagggcatcccgcaccgcgcgccgttcggcaacctcatcatcgactgctaggcgcgcaccaccccgccattgacaaagctgcgacccacacgcccagttgcagagtgaatggagcgagaaagcggccaccacttcggtgcccgccattgccttcggttgtgcttctcgatgtggattccaccattagcttttcagggagaaagcaggcaggcaagaaagggaggtggatggatggaaacacagctgaaaaagcaccagccttttcttactgcttataatcatcatcatcatcactaggacagaaaccaaaaattaccacaccacagagagattactgtatatgattatggccctgctctactatttctaccacactagacttgagttttgtgataaatgttttgaggtaataccaggcaatgcgccagtggtcagctagctagagtaataagcaattgccacttgttaatcaggttttgtgatagcttgtgctttcttcatctgtaaatatggagtgctgggagaggatgactgcttgttagaaaatatggtgttgctcaaccttc

SEQ ID NO: 65395 - protein, 313 aa, Triticum aestivum
  peptide (1)..(313): Ceres Seq. ID no. 13662805
IRPYIASSAAPLPFHAHQPPPALRFPRGPSRSSNPFFCFLFLVRCAGMAIDHESPFKELRLKNRRIMGGGAPEPDEEEAEAQVAAAAGEEEQWPQWLRPLLSARFFAQCKTHTESHRSGECNMFCLDCAAGAAAGAAALCSLCLAHAHRGHHTIQIRRSSYHDVIRVSDIQRFMDIAGVQTYVINSARVVFLNERPQQKQPGKAGGGAGGANLCEVCSRSLLDNFRFCSLGCKVAGCSSDGGGNDKARMMRASRPGRAKGSSDSEAASSSSPLRNAARQSFTPSTPPPPPPPAAKRRKGIPHRAPFGNLIIDC

SEQ ID NO: 65396 - protein, 281 aa, Triticum aestivum
  peptide (1)..(281): Ceres Seq. ID no. 13662806
MQDAHRVAPERRVQHVLPRLRRRGGRRRGGALLAVPRARAPRPPHHPDPPLLLPRRHPGVGHPALHGHRRRADLRHQQRARRLPQRAPPAEAARQGRRRRRRRQPLRGLQPQPPRQLPLLLPRLQGRRLLLRRGRQRQGEDDAGQQARPRQGLVGLRGGLLLLSSAQCRQAELHAVHAAAASASSGQAAQGHPAPRAVRQPHHRLLGAHHPAIDKAATHTPSCRVNGARKRPPLRCPPLPSVVLLDVDSTISFSGRKQAGKKGRWMDGNTAEKAPAFSYCL

SEQ ID NO: 65397 - protein, 266 aa, Triticum aestivum
  peptide (1)..(266): Ceres Seq. ID no. 13662807
MAIDHESPFKELRLKNRRIMGGGAPEPDEEEAEAQVAAAAGEEEQWPQWLRPLLSARFFAQCKTHTESHRSGECNMFCLDCAAGAAAGAAALCSLCLAHAHRGHHTIQIRRSSYHDVIRVSDIQRFMDIAGVQTYVINSARVVFLNERPQQKQPGKAGGGAGGANLCEVCSRSLLDNFRFCSLGCKVAGCSSDGGGNDKARMMRASRPGRAKGSSDSEAASSSSPLRNAARQSFTPSTPPPPPPPAAKRRKGIPHRAPFGNLIIDC

SEQ ID NO: 65398 - DNA, 1489 bp, Triticum aestivum
  misc_feature (1)..(1489): Ceres Seq. ID no. 14302787
aaccaatcacccccatcccccctccatctcgcgtggattaatggatctccgccccgccccgccctgctctctcgcttgctaggaaccgtagctgccgccagcccagcccaccccgcccgattcggagccgcgccgagggagagggagcgacatggggctccgcaggagaggccctctgctgctgctcctcctcctcggcctcgtggtggccacggccgcggcggcggcggacgacgcctccgcctccgagggcgacgccgatccgctctacagagcttgcttcgaagaatgtcaaaggactggcaccctgaaagaggattctattaaacactgtgttgtgccgaccgatgaccagcctgctgacaaggcatggtacgcgcacgagccattgtacctgcagtggaaggagtggaactgcaacagcgaatgccgataccattgtatgatggaaagagagcaggaaagggaagagcttgggctagggcccgtcaagtatcatggcaaatggcctctcaaacgtgcttctgtatttcaggaacctctttctgcagctctgtctgccctgactcttctcgtgcaatttaacggatggctatcgtttttcctcttgctttcttacaagctgcctcttaggccagaaactcatgccacatactacgaatacaccgggttatggcacattaacgcgctcttggccttgaattcatggttctggtgtgccatatatcacagttgtgatactgcttggacagaaaagctgtacctgtcatcagctgctgcttttcttggctactccctcatcttggccatactgcgaacttcgaatctgagggatgaagcttcaagagtgatggttgcagctccaattctggcttttgtgacaacccacattttgtacctcaacttctatgaactcgacaaaggcctgaacatgaaggtttgcactgttattagcgttgctcagctccttctgtggacagtgtgggctgctatcacaaggcatccttcacgcctgaaggtcgtctttgttgccatcggcggtgtcctctcactatacctggaagcccatgatgtccctccgcgatggggatatgttgatggacacgcaatctgcctcgccatggctatccccctgtcatacctctggtggagcttcgccaaggaagacgctgagatgcgcacggcggcaattatgaagaagaaacgataacgggcttcgccagaccaaatacttccatctttggtggcgaatctgtgaaaacttgtctccactcatccaatgtaaagatgagtttttcattgtaaatttaggagatctcgtatgtgaattactgttttttccatgctactttttgcctcagctcaggaggtttacatggtttgaaacttgtgatagccctttgtatttctctcatttacaagccaattgagtgtgtgctaggtttgttttcatctcttttagatgcacttactggaagcagttctgatc

SEQ ID NO: 65399 - protein, 352 aa, Triticum aestivum
  peptide (1)..(352): Ceres Seq. ID no. 14302788
MGLRRRGPLLLLLLLGLVVATAAAAADDASASEGDADPLYRACFEECQRTGTLKEDSIKHCVVPTDDQPADKAWYAHEPLYLQWKEWNCNSECRYHCMMEREQEREELGLGPVKYHGKWPLKRASVFQEPLSAALSALTLLVQFNGWLSFFLLLSYKLPLRPETHATYYEYTGLWHINALLALNSWFWCAIYHSCDTAWTEKLYLSSAAAFLGYSLILAILRTSNLRDEASRVMVAAPILAFVTTHILYLNFYELDKGLNMKVCTVISVAQLLLWTVWAAITRHPSRLKVVFVAIGGVLSLYLEAHDVPPRWGYVDGHAICLAMAIPLSYLWWSFAKEDAEMRTAAIMKKKR

SEQ ID NO: 65400 - protein, 255 aa, Triticum aestivum
  peptide (1)..(255): Ceres Seq. ID no. 14302789
MMEREQEREELGLGPVKYHGKWPLKRASVFQEPLSAALSALTLLVQFNGWLSFFLLLSYKLPLRPETHATYYEYTGLWHINALLALNSWFWCAIYHSCDTAWTEKLYLSSAAAFLGYSLILAILRTSNLRDEASRVMVAAPILAFVTTHILYLNFYELDKGLNMKVCTVISVAQLLLWTVWAAITRHPSRLKVVFVAIGGVLSLYLEAHDVPPRWGYVDGHAICLAMAIPLSYLWWSFAKEDAEMRTAAIMKKKR

SEQ ID NO: 65401 - protein, 254 aa, Triticum aestivum
  peptide (1)..(254): Ceres Seq. ID no. 14302790
MEREQEREELGLGPVKYHGKWPLKRASVFQEPLSAALSALTLLVQFNGWLSFFLLLSYKLPLRPETHATYYEYTGLWHINALLALNSWFWCAIYHSCDTAWTEKLYLSSAAAFLGYSLILAILRTSNLRDEASRVMVAAPILAFVTTHILYLNFYELDKGLNMKVCTVISVAQLLLWTVWAAITRHPSRLKVVFVAIGGVLSLYLEAHDVPPRWGYVDGHAICLAMAIPLSYLWWSFAKEDAEMRTAAIMKKKR

SEQ ID NO: 65402 - DNA, 1465 bp, Triticum aestivum
  misc_feature (1)..(1465): Ceres Seq. ID no. 13503573
aatacatacgggagcgcaaaatccccaacgaaacagggctgacagcgcgagatcgggcagagagagcgcgacagatggcgatcggcggcgttggcgctgggggcggggctgggggcgccgaggcgcaggggaggagcgtgctggtgacgggcggcgcggggttcatcggcacccacaccgtgctgcagctgctggagaagggctacgccgtcaccgtggtggataacttccacaactccgtccccgaggcgctcgaccgcgtccgccacatcgtcggccccgccctctccgcccgcctccaattcatcttcggggacctgacgatcaaggatgacctcgagaaggtgttcgccgccaagaggtacgacgccgtgatacacttcgccgggctgaaggcggtggcggagagcgtggcgcacccggagatgtacaaccgcaacaacatcgtcggcaccgtcaacctatacgacgtcatgaagaagcacggatgcaacaagttggtgttctcgtcgtcggcgaccgtgtacggccagccggagaaggtgccctgcttcgaggactcccccctcaaggccctcaacccgtacggcaggaccaagctgtacctggaggagatgctgcgcgactaccagcacgcgaacccggagtggaggacgatcctgctgcgctacttcaaccccatcggcgcccacgagagcggcgacatcggggaggaccccaagggcgtccccaacaacctgctcccctacatccagcaggtggccgtcggccgccgccccgagctcaacgtctacggccacgactaccgcacccgggacggcaccgccgtcagggactacatccacgtggtcgacctcgccgacggccacatcgcggcgctcgagaagctcttcgccacccctgacatcggctgtgtggcgtacaacctggggacggggcgcgggacgacggtgctggagatggtgagcgcgttcgagaaggcatacggcaagaaaatcccggtgaagatgtgccccaggaggccgggcgattcggagcaggtgtacgcgtccaccgccaaggccgaagaggagctcggctggagggccaagtacgggatcgaggagatgtgcagggaccagtggaactgggccaagaagaacccctatggctactgcggaaacgctgaaaacaaagactgattcggtggcccatcgggagccttgtagcgtgaaagaaagatgttgtcaataagcccagggcgttaaagtgtgcccagaaaatgtttcctgttgtagtattattcgtaagatggaacttgagttgggtgggttagactggactctcactcggccgggctggtgcttgccacagaattttggtctggtttcaaacatgggtcgtcatctgcttccttcttttttccttccaattatagagcgagaccgatgaagcgaatcattacaaactttttactgcttgcggg

SEQ ID NO: 65403 - protein, 392 aa, Triticum aestivum
  peptide (1)..(392): Ceres Seq. ID no. 15223239
YIRERKIPNETGLTARDRAERARQMAIGGVGAGGGAGGAEAQGRSVLVTGGAGFIGTHTVLQLLEKGYAVTVVDNFHNSVPEALDRVRHIVGPALSARLQFIFGDLTIKDDLEKVFAAKRYDAVIHFAGLKAVAESVAHPEMYNRNNIVGTVNLYDVMKKHGCNKLVFSSSATVYGQPEKVPCFEDSPLKALNPYGRTKLYLEEMLRDYQHANPEWRTILLRYFNPIGAHESGDIGEDPKGVPNNLLPYIQQVAVGRRPELNVYGHDYRTRDGTAVRDYIHVVDLADGHIAALEKLFATPDIGCVAYNLGTGRGTTVLEMVSAFEKAYGKKIPVKMCPRRPGDSEQVYASTAKAEEELGWRAKYGIEEMCRDQWNWAKKNPYGYCGNAENKD

SEQ ID NO: 65404 - protein, 368 aa, Triticum aestivum
  peptide (1)..(368): Ceres Seq. ID no. 15223240
MAIGGVGAGGGAGGAEAQGRSVLVTGGAGFIGTHTVLQLLEKGYAVTVVDNFHNSVPEALDRVRHIVGPALSARLQFIFGDLTIKDDLEKVFAAKRYDAVIHFAGLKAVAESVAHPEMYNRNNIVGTVNLYDVMKKHGCNKLVFSSSATVYGQPEKVPCFEDSPLKALNPYGRTKLYLEEMLRDYQHANPEWRTILLRYFNPIGAHESGDIGEDPKGVPNNLLPYIQQVAVGRRPELNVYGHDYRTRDGTAVRDYIHVVDLADGHIAALEKLFATPDIGCVAYNLGTGRGTTVLEMVSAFEKAYGKKIPVKMCPRRPGDSEQVYASTAKAEEELGWRAKYGIEEMCRDQWNWAKKNPYGYCGNAENKD

SEQ ID NO: 65405 - protein, 251 aa, Triticum aestivum
  peptide (1)..(251): Ceres Seq. ID no. 15223241
MYNRNNIVGTVNLYDVMKKHGCNKLVFSSSATVYGQPEKVPCFEDSPLKALNPYGRTKLYLEEMLRDYQHANPEWRTILLRYFNPIGAHESGDIGEDPKGVPNNLLPYIQQVAVGRRPELNVYGHDYRTRDGTAVRDYIHVVDLADGHIAALEKLFATPDIGCVAYNLGTGRGTTVLEMVSAFEKAYGKKIPVKMCPRRPGDSEQVYASTAKAEEELGWRAKYGIEEMCRDQWNWAKKNPYGYCGNAENKD

SEQ ID NO: 65406 - DNA, 1454 bp, Triticum aestivum
  misc_feature (1)..(1454): Ceres Seq. ID no. 13598618
aaaaaccgtgcctttccaatcccccggatccagtctcgctcccagcacaagtcctcccacccagccgctgcccggggcggcaatccgtcgagcaccagccgcgcgcgcgctccactccgctgcgcctgcggccgccgccgtccatggcgtccgccgcgcgggctctgggcgcgctcctccacagggcctcgtcgctttcgtcctccgcctctgctctcaggagcgcctcccttgtacacaggaatagcccaactggtggcgccagcttgttccaggggcacgtggctaggcggaggatttggacgttccagccgctctgtatggggcggcgctcctgcaagatcgccgggaggaagggtgctcagaatttgaaaaagatgaagcgcaacagcaaaatcggaaaagaaatcgttgctgccatcaagaagggtggtccaagtccttcgtccaacacagctttagcagcgatactagagaaagtaagagagcttgatgtccccaaggaagttgttgagcgtaacatcaaaagagcttcagaaaagggtcaagatacttacacagaaaagatttatgaggtctatggttttggtggagtaggtatggtcgttgaggtccttacagacaaaattacaagatctattgcggatattagaaatgttgtaaaagactgtggagcaaaattggctgatcctggatctgttacattcagattcagacaagctcgagtggttaacataaaagttacagatgccgataaggaccaactactctctgttgctttggatgctggcgccgatgatgttattgaaccaaattttgatgatgaagatgactctgaagaggttctagagaggttttacaagatagttactacatctgaaaactatcctgttgtgctatcaaagctacaagaggaagggctgaaatttgaaacggataacggttatgaactgctgcctctcaatccgattgaggtggatgacgaggccatggaacttaacaaggaccttgtattgaagttgcttgaattggatgatgttgatgctgtctacacagaccagaagtgagccaatttggaacccacaggctctctcagctctcaagacgctgctcgatgactccatttgggtagggcttgttttcaacttcgtgtccattaaggatttcttatcagcactgtttgcgccgattacgaagcctgcactcgtaacatcagcttcaagtgtccaaaatgaaaattggtgaacgcagcagtttccttttgggggtacttttccccacattctgccgtctcatagttttttaccttacgtttgttgtccctgatctcttcaccttgtccgtgtctcagtgagctgctagacgctgctcatataacgaatgttgtagctgcatcttttcatgtgattgtaagcaatacaagtaaaactgacctatgcatggactttggagtc

SEQ ID NO: 65407 - protein, 354 aa, Triticum aestivum
  peptide (1)..(354): Ceres Seq. ID no. 13598619
KPCLSNPPDPVSLPAQVLPPSRCPGRQSVEHQPRARSTPLRLRPPPSMASAARALGALLHRASSLSSSASALRSASLVHRNSPTGGASLFQGHVARRRIWTFQPLCMGRRSCKIAGRKGAQNLKKMKRNSKIGKEIVAAIKKGGPSPSSNTALAAILEKVRELDVPKEVVERNIKRASEKGQDTYTEKIYEVYGFGGVGMVVEVLTDKITRSIADIRNVVKDCGAKLADPGSVTFRFRQARVVNIKVTDADKDQLLSVALDAGADDVIEPNFDDEDDSEEVLERFYKIVTTSENYPVVLSKLQEEGLKFETDNGYELLPLNPIEVDDEAMELNKDLVLKLLELDDVDAVYTDQK

SEQ ID NO: 65408 - protein, 307 aa, Triticum aestivum
  peptide (1)..(307): Ceres Seq. ID no. 13598620
MASAARALGALLHRASSLSSSASALRSASLVHRNSPTGGASLFQGHVARRRIWTFQPLCMGRRSCKIAGRKGAQNLKKMKRNSKIGKEIVAAIKKGGPSPSSNTALAAILEKVRELDVPKEVVERNIKRASEKGQDTYTEKIYEVYGFGGVGMVVEVLTDKITRSIADIRNVVKDCGAKLADPGSVTFRFRQARVVNIKVTDADKDQLLSVALDAGADDVIEPNFDDEDDSEEVLERFYKIVTTSENYPVVLSKLQEEGLKFETDNGYELLPLNPIEVDDEAMELNKDLVLKLLELDDVDAVYTDQK

SEQ ID NO: 65409 - protein, 248 aa, Triticum aestivum
  peptide (1)..(248): Ceres Seq. ID no. 13598621
MGRRSCKIAGRKGAQNLKKMKRNSKIGKEIVAAIKKGGPSPSSNTALAAILEKVRELDVPKEVVERNIKRASEKGQDTYTEKIYEVYGFGGVGMVVEVLTDKITRSIADIRNVVKDCGAKLADPGSVTFRFRQARVVNIKVTDADKDQLLSVALDAGADDVIEPNFDDEDDSEEVLERFYKIVTTSENYPVVLSKLQEEGLKFETDNGYELLPLNPIEVDDEAMELNKDLVLKLLELDDVDAVYTDQK

SEQ ID NO: 65410 - DNA, 934 bp, Triticum aestivum
  misc_feature (1)..(934): Ceres Seq. ID no. 15178542
gaaactcgaagctcttccgcgcccccgctcgccccccgaaccttccagaagcttccagcgcgcagttgccccgagagccgagcggcatggcgtcggccatctccgcggggcccacgccgccggccgcggcgccgtcgtcggtggagtggcaccagcggccgccgaaccccaagaacccggtggtgttcttcgacgtgaccatcgggtccatcccggccgggcgcatcaagatggagctcttcgccgacatcgtccccaagaccgccgagaacttcaggcagttctgcactggcgagtacaggaaatcagctattccacaggggtataagggttgtcagttccatcgagtgatcaaagatttcatgattcagggaggtgacttcgtaaagggtgatggcagtggatgcatatcaatctatggcaccaaatttgatgatgaaaatttcattgcgaagcatactgggcctggcctgctctccatggcgaacagtggagctaactctaatgggtctcagttctttttaacttgtgcaaagtgtgagtggctggacaacaagcatgtggtttttgggagggtgctgggagatggtctgctcgtgctgcggaagattgagaacgtcgctactggaccaaacaaccggccgaagcttgcctgcgtgataagtgagtgcggtgagatgtagcttgctttttgagcgcggcatgtcctagcgctgccttgacatggatgaaagtactgaatcactggaaacagattggagtctagagcattgctgtattaatctacttattgtgacttgtgggcatgcggaatttggactctgacaaactggcaacatgtatctgtatcagccaatgctgtagagcctttaaaaaaacgtgtatggtgttgaataatattcaaagcaggagatgtggtttcatgaaaaaaaaa

SEQ ID NO: 65411 - protein, 226 aa, Triticum aestivum
  peptide (1)..(226): Ceres Seq. ID no. 15178543
NSKLFRAPARPPNLPEASSAQLPREPSGMASAISAGPTPPAAAPSSVEWHQRPPNPKNPVVFFDVTIGSIPAGRIKMELFADIVPKTAENFRQFCTGEYRKSAIPQGYKGCQFHRVIKDFMIQGGDFVKGDGSGCISIYGTKFDDENFIAKHTGPGLLSMANSGANSNGSQFFLTCAKCEWLDNKHVVFGRVLGDGLLVLRKIENVATGPNNRPKLACVISECGEM

SEQ ID NO: 65412 - protein, 198 aa, Triticum aestivum
  peptide (1)..(198): Ceres Seq. ID no. 15178544
MASAISAGPTPPAAAPSSVEWHQRPPNPKNPVVFFDVTIGSIPAGRIKMELFADIVPKTAENFRQFCTGEYRKSAIPQGYKGCQFHRVIKDFMIQGGDFVKGDGSGCISIYGTKFDDENFIAKHTGPGLLSMANSGANSNGSQFFLTCAKCEWLDNKHVVFGRVLGDGLLVLRKIENVATGPNNRPKLACVISECGEM

SEQ ID NO: 65413 - protein, 150 aa, Triticum aestivum
  peptide (1)..(150): Ceres Seq. ID no. 15178545
MELFADIVPKTAENFRQFCTGEYRKSAIPQGYKGCQFHRVIKDFMIQGGDFVKGDGSGCISIYGTKFDDENFIAKHTGPGLLSMANSGANSNGSQFFLTCAKCEWLDNKHVVFGRVLGDGLLVLRKIENVATGPNNRPKLACVISECGEM

SEQ ID NO: 65414 - DNA, 1361 bp, Triticum aestivum
  misc_feature (1)..(1361): Ceres Seq. ID no. 13503549
acaggggaaaaacctcttcctagcgagatttccccacccgtcttcttcctccgaaaccctaatccccaaatcggagaatcggacccagcccggcgccgcggagagcatccccccgtcgaccggcatggcaattgctcgcactggcgtgtacgtggacgactacttggagtattcgagcaccctggccggcgacctgcagaggatcctctccaccatgcacgagctcgacgagagggcccatggcattttgggtcagacaaaagggcagatcaaatatctcctgggggtgccatcccatgggttcgacaggccaaacgtggtgcatgatgaaaatgcctcggagaagatgacgagggatattgaaaatagccaggacaacgcgcttagtctctgcacggagaaagtgttgctcgcacgccaagcttatgacctgatagagagccatatcaaacgtcttgatgaagacctaggccagtttgcagaagatttaaagcaagaaggaaaaatacctccagatgaaccgcatatccttcctccaatgccggtgggtggcagggatgaaagacggaggtccagttttagtacaccccaagcagcaaggaagtttgtcagagagaaggaatgggatagggatagggagagaggtatggacttcgacttaatgccccctccaggtagcagcaacaagaaggccgttgcatctatggatgtggatcaaatgattgatccaaatgaaccaacatattgtatatgccaccaggtttcatatggtgatatgattgcttgtgacaatgagaattgtgaaggaggcgaatggttccattactcgtgcgttggtctgacaccagaaacaagattcaaagggaaatggttttgcccaacttgcaggaatcttcaatgagaggttctcctaaattgtgttgacgaggcgagcggttccggtcggcccagactttccgcaacatgcaggactcttcaacacgaggctctcagaagcttttcttggacaggaggataccaaatggtacatgtttcaatttgtaaggaggcgtttgcttacagtgtggtcttattttggtaataatgtatatgctggagaggacgcgactgttctagagaaggataaaaaagcttggcgtgttctgttgttgtatcttgtcgccgcaaacaatctatcatagtttcaggtgttggtaacctggtaactattttactttggtcgtgatgtctattaagcgtcatcgcaacctttgctcgcatgattctgcccctgagcaccattatctgctgcatcttggttgagctggaggtgcagcatatgcacttctacagcacacattgtattaaattattgtgtaact

SEQ ID NO: 65415 - protein, 299 aa, Triticum aestivum
  peptide (1)..(299): Ceres Seq. ID no. 13503550
QGKNLFLARFPHPSSSSETLIPKSENRTQPGAAESIPPSTGMAIARTGVYVDDYLEYSSTLAGDLQRILSTMHELDERAHGILGQTKGQIKYLLGVPSHGFDRPNVVHDENASEKMTRDIENSQDNALSLCTEKVLLARQAYDLIESHIKRLDEDLGQFAEDLKQEGKIPPDEPHILPPMPVGGRDERRRSSFSTPQAARKFVREKEWDRDRERGMDFDLMPPPGSSNKKAVASMDVDQMIDPNEPTYCICHQVSYGDMIACDNENCEGGEWFHYSCVGLTPETRFKGKWFCPTCRNLQ

SEQ ID NO: 65416 - protein, 258 aa, Triticum aestivum
  peptide (1)..(258): Ceres Seq. ID no. 13503551
MAIARTGVYVDDYLEYSSTLAGDLQRILSTMHELDERAHGILGQTKGQIKYLLGVPSHGFDRPNVVHDENASEKMTRDIENSQDNALSLCTEKVLLARQAYDLIESHIKRLDEDLGQFAEDLKQEGKIPPDEPHILPPMPVGGRDERRRSSFSTPQAARKFVREKEWDRDRERGMDFDLMPPPGSSNKKAVASMDVDQMIDPNEPTYCICHQVSYGDMIACDNENCEGGEWFHYSCVGLTPETRFKGKWFCPTCRNLQ

SEQ ID NO: 65417 - protein, 228 aa, Triticum aestivum
  peptide (1)..(228): Ceres Seq. ID no. 13503552
MHELDERAHGILGQTKGQIKYLLGVPSHGFDRPNVVHDENASEKMTRDIENSQDNALSLCTEKVLLARQAYDLIESHIKRLDEDLGQFAEDLKQEGKIPPDEPHILPPMPVGGRDERRRSSFSTPQAARKFVREKEWDRDRERGMDFDLMPPPGSSNKKAVASMDVDQMIDPNEPTYCICHQVSYGDMIACDNENCEGGEWFHYSCVGLTPETRFKGKWFCPTCRNLQ

SEQ ID NO: 65418 - DNA, 1386 bp, Triticum aestivum
  misc_feature (1)..(1386): Ceres Seq. ID no. 15224695
cggaagcaaacggcagcccagcacaaattcctagcggcagccagcagccgggcgccggaagcgagcaagatggcggcggcggctgtggcggcgcgggcgtacgaggcagcggcgcggtccgcgctggcggcgctggagcgcaacctgctgccggacgcggtcacccggcggctcacgcgcctcctgctcgcgcagcgcctccgcctcggctacctcccctccgcgccgctccagctgcaggacctcatcctcttcgcccactcacttgaaggcatgcccattgccatcgaaacggacacagctaaaacccagcactacgagctgccgaccacattcttcaagctagtgctcggaaaaaacctcaaatacagctcatgttacttccctgatgattcaagcaccctagaagatgccgaggttgcaatgttggagttgtactgtgagagggcgcagctgcaagatggccaaagcgttctcgatgttggatgtggatggggatccctctctgtatacatagcaaagaaatataggaactgcaatatcacggggatatgcaactcaacaactcaaaaggcttttatagaagagcagtgtagggagaatgagctatccaatgttgagatcattgtagcagacatcagcaagtttgagatggagcgttcttttgacaggatcatatcgatagagatgtttgagcacatgaaaaactacaaggcacttcttaagaagatatccagatggatgaaagaggattccttattgtttgttcactacttctgccacaagacatttgcgtatcacttcgaggacaagaatgacgatgattggatcacaaggtatttctttactggaggaacaatgccatcagcaaacctccttctgtactttcaggaagatgtatctgtggtcaatcattggcttgtcagtggcacacattatgctagaactagcgaggagtggctgaaacgcatggacaagaacatcgctgccataaggccaatctttgagaagacttatgggagggaatcagctaccaaatggatagcttattggaggacattcttcatctcagtagctgaactttttggatataacaatggtgatgaatggatggttgcacatcacctgttccgaaagaagtagaagtgccgctggacatttctggagcaaagtagaattgtatgttgagaatcatccatcacacaggctatgcctagttatataattatttttgtgtgtgttgagctgttatcctcctttttttttttgaagagaggcaaaagatttgcctcattcattaaataagaggaatagagtttatgttcgtgttacaacagtgacagcgccgcaacacccgaaataaaggtgaccaactactctcgcgtc

SEQ ID NO: 65419 - protein, 380 aa, Triticum aestivum
  peptide (1)..(380): Ceres Seq. ID no. 15224696
RKQTAAQHKFLAAASSRAPEASKMAAAAVAARAYEAAARSALAALERNLLPDAVTRRLTRLLLAQRLRLGYLPSAPLQLQDLILFAHSLEGMPIAIETDTAKTQHYELPTTFFKLVLGKNLKYSSCYFPDDSSTLEDAEVAMLELYCERAQLQDGQSVLDVGCGWGSLSVYIAKKYRNCNITGICNSTTQKAFIEEQCRENELSNVEIIVADISKFEMERSFDRIISIEMFEHMKNYKALLKKISRWMKEDSLLFVHYFCHKTFAYHFEDKNDDDWITRYFFTGGTMPSANLLLYFQEDVSVVNHWLVSGTHYARTSEEWLKRMDKNIAAIRPIFEKTYGRESATKWIAYWRTFFISVAELFGYNNGDEWMVAHHLFRKK

SEQ ID NO: 65420 - protein, 357 aa, Triticum aestivum
  peptide (1)..(357): Ceres Seq. ID no. 15224697
MAAAAVAARAYEAAARSALAALERNLLPDAVTRRLTRLLLAQRLRLGYLPSAPLQLQDLILFAHSLEGMPIAIETDTAKTQHYELPTTFFKLVLGKNLKYSSCYFPDDSSTLEDAEVAMLELYCERAQLQDGQSVLDVGCGWGSLSVYIAKKYRNCNITGICNSTTQKAFIEEQCRENELSNVEIIVADISKFEMERSFDRIISIEMFEHMKNYKALLKKISRWMKEDSLLFVHYFCHKTFAYHFEDKNDDDWITRYFFTGGTMPSANLLLYFQEDVSVVNHWLVSGTHYARTSEEWLKRMDKNIAAIRPIFEKTYGRESATKWIAYWRTFFISVAELFGYNNGDEWMVAHHLFRKK

SEQ ID NO: 65421 - protein, 289 aa, Triticum aestivum
  peptide (1)..(289): Ceres Seq. ID no. 15224698
MPIAIETDTAKTQHYELPTTFFKLVLGKNLKYSSCYFPDDSSTLEDAEVAMLELYCERAQLQDGQSVLDVGCGWGSLSVYIAKKYRNCNITGICNSTTQKAFIEEQCRENELSNVEIIVADISKFEMERSFDRIISIEMFEHMKNYKALLKKISRWMKEDSLLFVHYFCHKTFAYHFEDKNDDDWITRYFFTGGTMPSANLLLYFQEDVSVVNHWLVSGTHYARTSEEWLKRMDKNIAAIRPIFEKTYGRESATKWIAYWRTFFISVAELFGYNNGDEWMVAHHLFRKK

SEQ ID NO: 65422 - DNA, 1617 bp, Triticum aestivum
  misc_feature (1)..(1617): Ceres Seq. ID no. 13662880
cccacatcgtatcagtcccagctatcgcacacacctgcaacggccagctcaggagcgggcaagaagagaagacatttattttcttccctcgcgggagatcgatcacagccgggcagccatgggcgaggaggccccggccgcggtcaccgcggcggcgacgtcgccggcgccccacttgctcctcatatgcttcccggggcagggccacgtcaaccccatgctccgcctcgccaagcgcttcgcggccaagggcctcctggtcaccttctcctcgacctcctacgttggaggcaagatcacggcctcctccggggtggaggctggcggcgacggcgtgccgctcggccgcggccgcatccggttcgagttcttggacgacgatttcgacgggaatgacctcgacgacctgatgaggcacctggagacgactggccccgtggtgttcgcggagctgctgaggcgccaggaggaggcggggcggcctgtgacgtgcgtcgtcgggaacccgttcctcccgtgggcgatcgacgtcgcccacgacgccggcatccccacggcagtgctgtgggtgcagtcgtgcgcggtgttctcgctctactaccaccacgtgcacgggctcgtggagttcccgcccgaggacgacctcgacgcccgggtcaacctcccgggcctcccggcgctgtccgtcgccgacgtgccgtcgttcctgctgccgtccaacccctacaagctcctcaccgatgcgatactgaagcagttccgcaccatccacaaggcgtcgtgggtgttcgtcaactccttctacgagctggagcccgacgtggtggacgcgctcccgggcatctcgccgccgccgccgccgctcatccccgtgggcccgctcgtcgagctggaggaggagggcgccgtgcgcggcgacatgatcaaggcggcggacgactgcgtggggtggctggacgcgcaggcgccgcgctccgtcgtgtacgcgtcgctcggcagcgtcgtggtgctgtccgccgaggagctggccgagatggcgcacgggctcgcgtccaccggccgccccttcctgtgggtggttcggccggactgcagcgcgatgctcccggaggggtacctggactccgtcgccgggcgcggcatggtggtgccgtggagcccgcaggacctggtgctcgcgcacccgtccacggcgtgcttcctcacgcactgcggctggaactccacgctggagacgctcgcggcggggcttcccgtggtggcgttcccgcagtggggcgaccagtgcacggacgccaagtacctcgtggaggagttcaagatgggggtgcgcatcggcacgccgctgcggagggactccgtgcgcgacgccgtggaggacgtcgtggccgggccggacgccggcgcgatgctcgagaaggccagagcgtggtgcgcggcggcgaggacggcggtggcggccggcgggtcgtcggaccgccacgtacaggcgtttgttgaccaggttgtggcgggaaccattggcgcacgagcagataaggacattgtggctgcggagcagcaaggtttcgattcatcttctctacgtggaaactaaggattatttcggccatctcc

SEQ ID NO: 65423 - protein, 531 aa, Triticum aestivum
  peptide (1)..(531): Ceres Seq. ID no. 13662881
PHRISPSYRTHLQRPAQERARREDIYFLPSREIDHSRAAMGEEAPAAVTAAATSPAPHLLLICFPGQGHVNPMLRLAKRFAAKGLLVTFSSTSYVGGKITASSGVEAGGDGVPLGRGRIRFEFLDDDFDGNDLDDLMRHLETTGPVVFAELLRRQEEAGRPVTCVVGNPFLPWAIDVAHDAGIPTAVLWVQSCAVFSLYYHHVHGLVEFPPEDDLDARVNLPGLPALSVADVPSFLLPSNPYKLLTDAILKQFRTIHKASWVFVNSFYELEPDVVDALPGISPPPPPLIPVGPLVELEEEGAVRGDMIKAADDCVGWLDAQAPRSVVYASLGSVVVLSAEELAEMAHGLASTGRPFLWVVRPDCSAMLPEGYLDSVAGRGMVVPWSPQDLVLAHPSTACFLTHCGWNSTLETLAAGLPVVAFPQWGDQCTDAKYLVEEFKMGVRIGTPLRRDSVRDAVEDVVAGPDAGAMLEKARAWCAAARTAVAAGGSSDRHVQAFVDQVVAGTIGARADKDIVAAEQQGFDSSSLRGN

SEQ ID NO: 65424 - protein, 492 aa, Triticum aestivum
  peptide (1)..(492): Ceres Seq. ID no. 13662882
MGEEAPAAVTAAATSPAPHLLLICFPGQGHVNPMLRLAKRFAAKGLLVTFSSTSYVGGKITASSGVEAGGDGVPLGRGRIRFEFLDDDFDGNDLDDLMRHLETTGPVVFAELLRRQEEAGRPVTCVVGNPFLPWAIDVAHDAGIPTAVLWVQSCAVFSLYYHHVHGLVEFPPEDDLDARVNLPGLPALSVADVPSFLLPSNPYKLLTDAILKQFRTIHKASWVFVNSFYELEPDVVDALPGISPPPPPLIPVGPLVELEEEGAVRGDMIKAADDCVGWLDAQAPRSVVYASLGSVVVLSAEELAEMAHGLASTGRPFLWVVRPDCSAMLPEGYLDSVAGRGMVVPWSPQDLVLAHPSTACFLTHCGWNSTLETLAAGLPVVAFPQWGDQCTDAKYLVEEFKMGVRIGTPLRRDSVRDAVEDVVAGPDAGAMLEKARAWCAAARTAVAAGGSSDRHVQAFVDQVVAGTIGARADKDIVAAEQQGFDSSSLRGN

SEQ ID NO: 65425 - protein, 459 aa, Triticum aestivum
  peptide (1)..(459): Ceres Seq. ID no. 13662883
MLRLAKRFAAKGLLVTFSSTSYVGGKITASSGVEAGGDGVPLGRGRIRFEFLDDDFDGNDLDDLMRHLETTGPVVFAELLRRQEEAGRPVTCVVGNPFLPWAIDVAHDAGIPTAVLWVQSCAVFSLYYHHVHGLVEFPPEDDLDARVNLPGLPALSVADVPSFLLPSNPYKLLTDAILKQFRTIHKASWVFVNSFYELEPDVVDALPGISPPPPPLIPVGPLVELEEEGAVRGDMIKAADDCVGWLDAQAPRSVVYASLGSVVVLSAEELAEMAHGLASTGRPFLWVVRPDCSAMLPEGYLDSVAGRGMVVPWSPQDLVLAHPSTACFLTHCGWNSTLETLAAGLPVVAFPQWGDQCTDAKYLVEEFKMGVRIGTPLRRDSVRDAVEDVVAGPDAGAMLEKARAWCAAARTAVAAGGSSDRHVQAFVDQVVAGTIGARADKDIVAAEQQGFDSSSLRGN

SEQ ID NO: 65426 - DNA, 1619 bp, Triticum aestivum
  misc_feature (1)..(1619): Ceres Seq. ID no. 13597624
agcgaaaagccgggctccaaaatccccaatctgctccaggtggtcaaaccattccaccattccccggcgcaccaccatggcagcatccccgccggcgatcctggacgagctcttcgaagagatcctcctccgcctcccgcccgacgacccagcctgcctcctccgcgcctccctcgtctgcaaggcctggggttgcgccgtctcccgcccccacttccgccgccgcctccacgagctccaccgggcgcccccggtgctcggcctcctgcacgacctggaagacgagcgcatcccacgattcatccccaccaccgcgtcgtccttctccctcaccgctccgcacaaccggtactggcggaccctcgactgccgccacggccgcgccctcttcctctccaacccccagtccccggaaacccaggagcttctcgtgtgggagccaatcacgggtgcccagcagcgcataccggtgcccgcggcgctcgagagcaacttccccatggcggccgtgttctgcgcagcggacgggtgcgaccaccgcgcctgcctcgggggccctttccgcgtgctcttcatcctctcggtcgtggtaggccaagtcactgacgacgactgctatctcacgtcggcgtgcgcatattcgtcggagactggcacctggggcgagccgacctcgttgccccgccgctcgcccatgcccatgtgctttacattttattccagtgtgctcgttggaaagtctctgctctatttcatgtctgatgatgcgttcattctcgagtgtgacttggcaaggcacagactggctgtgttcaacccaccaaaccatgagccggtctgcggccaatataccatcatgctggcggaggacggtggactgggagtttgccaaaggatggatcagcagctcaaattgtggtcaagggaggtgagtgacagtgttgaagcacgatgggtgctgagccgggtcgtctacctggaaaatttgctcccggttggtgctctcgtggatgcagagactagagtgcaagtgctgggctttgccgagggagcaaataccattttcctaaccacggttgatggcatcttcatgatcaaactgcaatcggagcgggcgaggagggtgtgcgatgaatccgatgatcatctcttttgttatttgattccggttgtcagcttctacactcctgtgcctcgaggtgagcacagggatccgtcgttgaagcatagtgaggatgcaggtggtgaggagaaaacagtatatcaggcacaacaattgatcaacaaaatgagtcaaatgttaccaggggggactttgtcaacgctttcgattgcatcaaccacgccatagagaacagggttccaccctattatgaagttgctcctgagtgtaccagcatggtttacggacattgatgcagcttgctataggaagaatccatgaagacttcagccagcaaagaagatgctaggaactcaaaagacctcaggtagcaatgttaatgatgctccaccttcagagaaaaggtgattctgaataatgtgttgtatataccactgatccttttgccccagaggcccagacctgtgtggctaaatactcaaaattttcattatcc

SEQ ID NO: 65427 - protein, 449 aa, Triticum aestivum
  peptide (1)..(449): Ceres Seq. ID no. 15222150
AKSRAPKSPICSRWSNHSTIPRRTTMAASPPAILDELFEEILLRLPPDDPACLLRASLVCKAWGCAVSRPHFRRRLHELHRAPPVLGLLHDLEDERIPRFIPTTASSFSLTAPHNRYWRTLDCRHGRALFLSNPQSPETQELLVWEPITGAQQRIPVPAALESNFPMAAVFCAADGCDHRACLGGPFRVLFILSVVVGQVTDDDCYLTSACAYSSETGTWGEPTSLPRRSPMPMCFTFYSSVLVGKSLLYFMSDDAFILECDLARHRLAVFNPPNHEPVCGQYTIMLAEDGGLGVCQRMDQQLKLWSREVSDSVEARWVLSRVVYLENLLPVGALVDAETRVQVLGFAEGANTIFLTTVDGIFMIKLQSERARRVCDESDDHLFCYLIPVVSFYTPVPRGEHRDPSLKHSEDAGGEEKTVYQAQQLINKMSQMLPGGTLSTLSIASTTP

SEQ ID NO: 65428 - protein, 424 aa, Triticum aestivum
  peptide (1)..(424): Ceres Seq. ID no. 15222151
MAASPPAILDELFEEILLRLPPDDPACLLRASLVCKAWGCAVSRPHFRRRLHELHRAPPVLGLLHDLEDERIPRFIPTTASSFSLTAPHNRYWRTLDCRHGRALFLSNPQSPETQELLVWEPITGAQQRIPVPAALESNFPMAAVFCAADGCDHRACLGGPFRVLFILSVVVGQVTDDDCYLTSACAYSSETGTWGEPTSLPRRSPMPMCFTFYSSVLVGKSLLYFMSDDAFILECDLARHRLAVFNPPNHEPVCGQYTIMLAEDGGLGVCQRMDQQLKLWSREVSDSVEARWVLSRVVYLENLLPVGALVDAETRVQVLGFAEGANTIFLTTVDGIFMIKLQSERARRVCDESDDHLFCYLIPVVSFYTPVPRGEHRDPSLKHSEDAGGEEKTVYQAQQLINKMSQMLPGGTLSTLSIASTTP

SEQ ID NO: 65429 - protein, 283 aa, Triticum aestivum
  peptide (1)..(283): Ceres Seq. ID no. 15222152
MAAVFCAADGCDHRACLGGPFRVLFILSVVVGQVTDDDCYLTSACAYSSETGTWGEPTSLPRRSPMPMCFTFYSSVLVGKSLLYFMSDDAFILECDLARHRLAVFNPPNHEPVCGQYTIMLAEDGGLGVCQRMDQQLKLWSREVSDSVEARWVLSRVVYLENLLPVGALVDAETRVQVLGFAEGANTIFLTTVDGIFMIKLQSERARRVCDESDDHLFCYLIPVVSFYTPVPRGEHRDPSLKHSEDAGGEEKTVYQAQQLINKMSQMLPGGTLSTLSIASTTP

SEQ ID NO: 65430 - DNA, 1335 bp, Triticum aestivum
  misc_feature (1)..(1335): Ceres Seq. ID no. 13597721
ctaaaaccctagctccaccaccacccacctaaaacccgccgccgccaccgccaccgccgttccccttcttccccgccaccgggagatcctggccatcgggtctccttccttcctccgaggatcaaagttcaggttggcgccaacatgtcgtcgaagaagatagagctagaccacaaggacatggttcatgattctgccattgactattatgggaagcgccttgccacagcctcctctgactccactgtgaagatcaccaacattgggagtgcatctgccccgtcccagctcgttgcgaccctcactggccactatggtcctgtgtggcgtgttggatgggcccatcccaagtatggttccattctcgcatcctgcggctatgatggccgtgtgatagtctggaaggaggctgccactgggcaatggtctcagctccatgtgtttgacaaccacaaggcctcagttaactccattgcttgggctccatatgaacttggcctttgccttgcctgtgggtcttctgacggcaccatctctgtcatctccatgcggcttgatacaggaggatgtgacgctgcaaccattgagcgggcacaccctgttggcgtgacagcagtctcctgggctccggcagcagcacttgggtccatggttggctcagatcagctcgtccacaagatcgtgtctggtggctttgactgtgtcgtcaaggtgtgggagtttgtcaatggtggctggaagctggagagtgctttggtctctgacatgcacaaagagtgcgtgagagacgtctcatgggcaccggtcctgggcctggcaaagtcaaccatcgccagtgcttcccaagacggcaaggttgtcatctggaccagtggcaaaggaggaggcaagtgggaaggaaagctcatgcgtgactttgaggctccggtgtggagggtgtcctggtccctgacgggaaacatactgtctgtggctgccggcgagggcgacattactctgtggaaggaatcgtcggacgggcagtgggagtcgctgtggaccaaggcctcagaggagccgccgcaggaggagcaggcgatcgaggaggccatgcagtaggggagtcgacgccacatctcccgtgttgattttggaccatgattcgtgtttctagcgccaacgccatgacttgctttcacctgctgccctgatactcttagagatactcgttgccatcttttttgccgtttgtttctatatggacaatgtctgattgcactgtttaagttttatactggtcatgtactcttatgcacaccgtcagaatgtatcgcctgtttgaactgtttatatcct

SEQ ID NO: 65431 - protein, 317 aa, Triticum aestivum
  peptide (1)..(317): Ceres Seq. ID no. 13597722
MSSKKIELDHKDMVHDSAIDYYGKRLATASSDSTVKITNIGSASAPSQLVATLTGHYGPVWRVGWAHPKYGSILASCGYDGRVIVWKEAATGQWSQLHVFDNHKASVNSIAWAPYELGLCLACGSSDGTISVISMRLDTGGCDAATIERAHPVGVTAVSWAPAAALGSMVGSDQLVHKIVSGGFDCVVKVWEFVNGGWKLESALVSDMHKECVRDVSWAPVLGLAKSTIASASQDGKVVIWTSGKGGGKWEGKLMRDFEAPVWRVSWSLTGNILSVAAGEGDITLWKESSDGQWESLWTKASEEPPQEEQAIEEAMQ

SEQ ID NO: 65432 - protein, 305 aa, Triticum aestivum
  peptide (1)..(305): Ceres Seq. ID no. 13597723
MVHDSAIDYYGKRLATASSDSTVKITNIGSASAPSQLVATLTGHYGPVWRVGWAHPKYGSILASCGYDGRVIVWKEAATGQWSQLHVFDNHKASVNSIAWAPYELGLCLACGSSDGTISVISMRLDTGGCDAATIERAHPVGVTAVSWAPAAALGSMVGSDQLVHKIVSGGFDCVVKVWEFVNGGWKLESALVSDMHKECVRDVSWAPVLGLAKSTIASASQDGKVVIWTSGKGGGKWEGKLMRDFEAPVWRVSWSLTGNILSVAAGEGDITLWKESSDGQWESLWTKASEEPPQEEQAIEEAMQ

SEQ ID NO: 65433 - protein, 183 aa, Triticum aestivum
  peptide (1)..(183): Ceres Seq. ID no. 13597724
MRLDTGGCDAATIERAHPVGVTAVSWAPAAALGSMVGSDQLVHKIVSGGFDCVVKVWEFVNGGWKLESALVSDMHKECVRDVSWAPVLGLAKSTIASASQDGKVVIWTSGKGGGKWEGKLMRDFEAPVWRVSWSLTGNILSVAAGEGDITLWKESSDGQWESLWTKASEEPPQEEQAIEEAMQ

SEQ ID NO: 65434 - DNA, 1226 bp, Triticum aestivum
  misc_feature (1)..(1226): Ceres Seq. ID no. 13598570
atcaggcaccacccaagatcgatcatgaagccatacatgcccacggtactgagaccccctagggtggtggccatcctggccgtggtcctggcggcggcgctcgccacagccgtgaacgctcagcagtgcggctcccaggctggtggcgcgacgtgcgcaaactgtctctgctgcagcaaattcgggtactgcggcagcggcgacgcctactgcggtgccggctgtcagagccagtgcagcggctgcggccccacccctcccggccccagccccggcgggggcgtgtcgtccatcatctccagggacctcttcgagcggctccttcttcaccgcaatgactgccaagaggcccgcgggttctacacgtacgacgccttcctcgccgccgccgccgcgttcccgtcattcggcaccacggggagcacggagacgcggaagcgggaggtggcggccttcctggggcaaacttcccacgagaccactggcgggtggcccgcggcgcccgacggaccgtacgcctggggctactgcttcaagcaggagcagggctcgccgggaagctactgcgagccaaagccggagtggccgtgcgcgtcgggcaagaaatactacggtcgcggccccatccagctctcatggaactacaactatggccccgcggggcgtgccatcggggtggacctgctcaacaacccggacctggtcgccgcggacgcgacggtgtcgtttaagacggcgttatggttttggatgacggctcaggcgaacaagccgtcgtcccatgccgtgatcacaggccaatggaccccgtcgggcacggacaacgctgctggtcgggtgcctgggtacggtgtcatcaccaacataatcaacggcgggctcgagtgcggtagggggcaagatgaccgtgttgctaaccggatcgggttctacaagcgctactgcgatgtcctcggcgttggctatggtaacaacctcgactgctacaaccagaggccgtttaacagtgggctctcgatggggcttgccactgagtgacaacatactaagactgtgagcgagtcctccatgcatggatgtatgaatgtgatcacccataaataagcttgagaagtactgtttgggtaaatttcccattgttgtgtgagtatctctcgactcggtgtagaggttgagaatgttgcatctttattaaaaggactttgctacacctacgtaatttagct

SEQ ID NO: 65435 - protein, 345 aa, Triticum aestivum
  peptide (1)..(345): Ceres Seq. ID no. 13598571
IRHHPRSIMKPYMPTVLRPPRVVAILAVVLAAALATAVNAQQCGSQAGGATCANCLCCSKFGYCGSGDAYCGAGCQSQCSGCGPTPPGPSPGGGVSSIISRDLFERLLLHRNDCQEARGFYTYDAFLAAAAAFPSFGTTGSTETRKREVAAFLGQTSHETTGGWPAAPDGPYAWGYCFKQEQGSPGSYCEPKPEWPCASGKKYYGRGPIQLSWNYNYGPAGRAIGVDLLNNPDLVAADATVSFKTALWFWMTAQANKPSSHAVITGQWTPSGTDNAAGRVPGYGVITNIINGGLECGRGQDDRVANRIGFYKRYCDVLGVGYGNNLDCYNQRPFNSGLSMGLATE

SEQ ID NO: 65436 - protein, 337 aa, Triticum aestivum
  peptide (1)..(337): Ceres Seq. ID no. 13598572
MKPYMPTVLRPPRVVAILAVVLAAALATAVNAQQCGSQAGGATCANCLCCSKFGYCGSGDAYCGAGCQSQCSGCGPTPPGPSPGGGVSSIISRDLFERLLLHRNDCQEARGFYTYDAFLAAAAAFPSFGTTGSTETRKREVAAFLGQTSHETTGGWPAAPDGPYAWGYCFKQEQGSPGSYCEPKPEWPCASGKKYYGRGPIQLSWNYNYGPAGRAIGVDLLNNPDLVAADATVSFKTALWFWMTAQANKPSSHAVITGQWTPSGTDNAAGRVPGYGVITNIINGGLECGRGQDDRVANRIGFYKRYCDVLGVGYGNNLDCYNQRPFNSGLSMGLATE

SEQ ID NO: 65437 - protein, 333 aa, Triticum aestivum
  peptide (1)..(333): Ceres Seq. ID no. 13598573
MPTVLRPPRVVAILAVVLAAALATAVNAQQCGSQAGGATCANCLCCSKFGYCGSGDAYCGAGCQSQCSGCGPTPPGPSPGGGVSSIISRDLFERLLLHRNDCQEARGFYTYDAFLAAAAAFPSFGTTGSTETRKREVAAFLGQTSHETTGGWPAAPDGPYAWGYCFKQEQGSPGSYCEPKPEWPCASGKKYYGRGPIQLSWNYNYGPAGRAIGVDLLNNPDLVAADATVSFKTALWFWMTAQANKPSSHAVITGQWTPSGTDNAAGRVPGYGVITNIINGGLECGRGQDDRVANRIGFYKRYCDVLGVGYGNNLDCYNQRPFNSGLSMGLATE

SEQ ID NO: 65438 - DNA, 1517 bp, Triticum aestivum
  misc_feature (1)..(1517): Ceres Seq. ID no. 15225493
gataaaaaaaggaagaagaggatgatacgtaacggcgtgacggaaagaaaaagcgggagcgaatagacagagagggggcccggccgtcacgtcgtcttcctcctcgctccattagagccgagctctcgggtctccgcctctgctcgcctcccactgttatcggaggcgctgcggacgaagcagcggcactatgcgtccgtccctctgtcatgttccttttcttcttctgctactattacatgtggtcattgctagaccattctttccactgccaagtaagaccagtaatgaagagaagaagcccatacagacatttcgaccgtataacattgctcaccgtggctcaaacggggaaatcccagaggaaacaagtgctgcttacctgagggctattgaagaaggtgcagattttatagagactgacatccttgctagcaaagatggtgcattgatctgctttcatgatgtaacacttgatgatacaactgatatttccggccgtaaggaattcgccaatcgaaggagaacctatgaggtggaatgggccaacgttactggctggtttgtagtggatttcacgcttgaggaacttaaaacacttaaagtgaagcagcgatactcattcagagatcaacaatataatgatgcaagcagaaccgttggaatatatccagagataaaagatccagtttttatcaacaagcatgtaaagtgggcagatggaaagaagtttgaggacaaatttgtggataccttactaaagtatggatacaggggtcaatatatgtccgaaaattggctaaaacagccattgtttatacaatcatttgctccctcttcccttgtacatgtatcaaatttgacagactctccgaagatctttctgattgatgataccacagtgagaactcaagacacaaaccagtcatactgggaaatcacttcagatgactaccttgcatatattagtaactatgttgtcggcctcggtccatggaaagatactattgttccagttgcaaaaaactatttgctggaaccaactgatcttgttgcaagagcgcatgctcataatctccaggtacacccttacacatacaggaacgagaaccagtttctgcacttcgactttcatcaggatccctatgccgagttcgatttctggataaatacgatgggggttgacggattattcacagatttcgctggaagcgtacacaagtaccaagaactgaaatctccacacccgaaggacgcaaccgcgaacagcctcctagtaaaaattgctcagttgatcgcggcatacgaaggccactgaataagtctgttccagcaaaatcactgccattttcagtgatgatgcgcaagacccaaatgagttgacatttgacgacccgcagtgacctggaaaggtcactaatagatgttggtttacgctgttatatagtgttaacacgagttcatgtatacctcttcattgaacccctgaatctcaagggggagatctttattatcgc

SEQ ID NO: 65439 - protein, 375 aa, Triticum aestivum
  peptide (1)..(375): Ceres Seq. ID no. 15225494
MRPSLCHVPFLLLLLLHVVIARPFFPLPSKTSNEEKKPIQTFRPYNIAHRGSNGEIPEETSAAYLRAIEEGADFIETDILASKDGALICFHDVTLDDTTDISGRKEFANRRRTYEVEWANVTGWFVVDFTLEELKTLKVKQRYSFRDQQYNDASRTVGIYPEIKDPVFINKHVKWADGKKFEDKFVDTLLKYGYRGQYMSENWLKQPLFIQSFAPSSLVHVSNLTDSPKIFLIDDTTVRTQDTNQSYWEITSDDYLAYISNYVVGLGPWKDTIVPVAKNYLLEPTDLVARAHAHNLQVHPYTYRNENQFLHFDFHQDPYAEFDFWINTMGVDGLFTDFAGSVHKYQELKSPHPKDATANSLLVKIAQLIAAYEGH

SEQ ID NO: 65440 - DNA, 1253 bp, Triticum aestivum
  misc_feature (1)..(1253): Ceres Seq. ID no. 13598630
aatccaaccgcggctttggcacctcctcgcccgccgccgccgccgccgtcgccgaccagatcccgcgccgccgcagccgcagccgcctccggccatggcgccgccatcctccgaagagccggccgccgcctccggggccggcgccatctccaaggtcctcgtcgtcatagcgatgcagacggaggcgctcccgctcgtcacccggttccagctcgtcgaggcggccgccgatgattccatatttcctaaaggtgccccttggactcggtaccatggcgactacaaaggcctccacatcgatctcgtctggcctggaaaagaccctgtgcttggggttgacagtgttggtacagtatccgcagctcttgtgacttatgcttcthtacaattgttgaagccagaccttattgtgywtmacatcamcgctggtactgctggtggttttaaggccagaggagcaggtattggggatgtcttcttagcttcagatgttgctttccatgacaggagaatacccattcctgtctttgacagttatggaattggagcacgaaaaacatttgaaaccccgaatatagtgaaggaactcaatttgaaggttgggaaactgtcaactggtgattctctggatatgtccccccatgatgagacagcaatactgagcaatgaagctacagtcaaggatatggagggagcagcggtggcatatgttgctgacttgttctcgacacctgctatctttgtcaaagctgtgactgacattgttgatggggagaagccaacagccgaggagtttctgcaaaacctgatctccgtgacgatggcgcttgaccaggcagtcatgcaagtggtagacttcatcagcggcaaatgtatctctgatctctgaacgccgaacactccgccatgctgttctggggtccacaaactgagggagcctgaatatatattgttggatgtataatgtttcctggggggtttcacacacgattttacattatcgtaacccctatgtaaaaaattcttggcgattactcggagccattgtatgggattttgtagaattttacaaactgtgcagcttagtgaagctcggcttaataaggtggtgtattgttacactggaataaatgatgggcactggaactcccatggattcagtacaatggttgatggacgcaccttggcagcttcatcacatggcagctgaatactttccaaatggagtaagaagtaaaggctctcatgtttgc

SEQ ID NO: 65441 - protein, 295 aa, Triticum aestivum
  peptide (1)..(295): Ceres Seq. ID no. 15222386
  misc_feature (128)..(128): Xaa is any aa, unknown or other
  misc_feature (138)..(138): Xaa is any aa, unknown or other
  misc_feature (139)..(139): Xaa is any aa, unknown or other
  misc_feature (141)..(141): Xaa is any aa, unknown or other
IQPRLWHLLARRRRRRRRPDPAPPQPQPPPAMAPPSSEEPAAASGAGAISKVLVVIAMQTEALPLVTRFQLVEAAADDSIFPKGAPWTRYHGDYKGLHIDLVWPGKDPVLGVDSVGTVSAALVTYASXQLLKPDLIVXXIXAGTAGGFKARGAGIGDVFLASDVAFHDRRIPIPVFDSYGIGARKTFETPNIVKELNLKVGKLSTGDSLDMSPHDETAILSNEATVKDMEGAAVAYVADLFSTPAIFVKAVTDIVDGEKPTAEEFLQNLISVTMALDQAVMQVVDFISGKCISDL

SEQ ID NO: 65442 - protein, 264 aa, Triticum aestivum
  peptide (1)..(264): Ceres Seq. ID no. 15222387
  misc_feature (97)..(97): Xaa is any aa, unknown or other
  misc_feature (107)..(107): Xaa is any aa, unknown or other
  misc_feature (108)..(108): Xaa is any aa, unknown or other
  misc_feature (110)..(110): Xaa is any aa, unknown or other
MAPPSSEEPAAASGAGAISKVLVVIAMQTEALPLVTRFQLVEAAADDSIFPKGAPWTRYHGDYKGLHIDLVWPGKDPVLGVDSVGTVSAALVTYASXQLLKPDLIVXXIXAGTAGGFKARGAGIGDVFLASDVAFHDRRIPIPVFDSYGIGARKTFETPNIVKELNLKVGKLSTGDSLDMSPHDETAILSNEATVKDMEGAAVAYVADLFSTPAIFVKAVTDIVDGEKPTAEEFLQNLISVTMALDQAVMQVVDFISGKCISDL

SEQ ID NO: 65443 - protein, 238 aa, Triticum aestivum
  peptide (1)..(238): Ceres Seq. ID no. 15222388
  misc_feature (71)..(71): Xaa is any aa, unknown or other
  misc_feature (81)..(81): Xaa is any aa, unknown or other
  misc_feature (82)..(82): Xaa is any aa, unknown or other
  misc_feature (84)..(84): Xaa is any aa, unknown or other
MQTEALPLVTRFQLVEAAADDSIFPKGAPWTRYHGDYKGLHIDLVWPGKDPVLGVDSVGTVSAALVTYASXQLLKPDLIVXXIXAGTAGGFKARGAGIGDVFLASDVAFHDRRIPIPVFDSYGIGARKTFETPNIVKELNLKVGKLSTGDSLDMSPHDETAILSNEATVKDMEGAAVAYVADLFSTPAIFVKAVTDIVDGEKPTAEEFLQNLISVTMALDQAVMQVVDFISGKCISDL

SEQ ID NO: 65444 - DNA, 1326 bp, Triticum aestivum
  misc_feature (1)..(1326): Ceres Seq. ID no. 13597633
acatcctaatcgaaaaaaaaaaccccaagcaaaagaagcccctttcctcctccgccgccgccgccgcttctgccgccatggccgacgagctggacgagctcatcgagttcctctccaacggctcccctcaggtgcgcggcgccgcggcggacatcgtgcgggggctcacgggggacagcgacgggctgcggtccctcgcggcgcgcgccgaccgcgcgctgccggcgctgctccggctgctcgcatccgtgggggccggctgcgcgggcgaggcggcggctgactcgctcgtcaacctcagccaggacggcgaccttgccgcgcgcctcgtggtgctcggagccgtcgcggccgccatggacgtgatggtcaagcgcggcggcgagcagcccaagctcgcgcgcagccttgtcatgctgctcgtcaacctcacccaggtcgagtccggcatctcggccctcctccaggttggtgatgaaaaggtgcaagggttgtatgttgcaaagcttgtgcgctcattctgcaggtcatcctgtgactctgaagatgaagatatatttgaacacattgcctctatacttgtgaatatctcaaaggtcgaagctggacggagaatactgatggaacctaagagaggtcttctaaagcagattataggacaatttgattcaacaaatcaacttagaaagaaaggggttgctggcaccatccgtaactgttgctttgaagctgatacccagatacaaaatttgctttctatagcagaatatctttggccagctctacttttgccagtagctggaaagaagatctatagcgaagaagatagatcgaaaatgcctcccgagcttgcaaatgcactttctcatgaacgggaagctgttgatgattccgagattcgtgaacgggcactagaggctatttatatgatcgtgatgcaggatgatggacgaaaggccttttggtcagtcaatgggccacggatactgcaggttggttatgaagacgaagaggacttgaaagtgatgggcgcatatgagttgattggttctttgcttgtcggcaagggtgaaattgaacaagatcaagagcaaggagaagataagcctcaatgatgggctcaactatgtacaatttgtaatctgtcttatctacttgctgcaagaaaatagggctgcatcgcttccaatcttaagaatgtcctgtcgtattgatccaaatttcttgcaataactggcttgttctacctcctggtttcagtttgttgtccacagtatttaatacaactatgtaagagcattaagaacatcgtccagtttttgcctc

SEQ ID NO: 65445 - protein, 370 aa, Triticum aestivum
  peptide (1)..(370): Ceres Seq. ID no. 13597634
ILIEKKNPKQKKPLSSSAAAAASAAMADELDELIEFLSNGSPQVRGAAADIVRGLTGDSDGLRSLAARADRALPALLRLLASVGAGCAGEAAADSLVNLSQDGDLAARLVVLGAVAAAMDVMVKRGGEQPKLARSLVMLLVNLTQVESGISALLQVGDEKVQGLYVAKLVRSFCRSSCDSEDEDIFEHIASILVNISKVEAGRRILMEPKRGLLKQIIGQFDSTNQLRKKGVAGTIRNCCFEADTQIQNLLSIAEYLWPALLLPVAGKKIYSEEDRSKMPPELANALSHEREAVDDSEIRERALEAIYMIVMQDDGRKAFWSVNGPRILQVGYEDEEDLKVMGAYELIGSLLVGKGEIEQDQEQGEDKPQ

SEQ ID NO: 65446 - protein, 345 aa, Triticum aestivum
  peptide (1)..(345): Ceres Seq. ID no. 13597635
MADELDELIEFLSNGSPQVRGAAADIVRGLTGDSDGLRSLAARADRALPALLRLLASVGAGCAGEAAADSLVNLSQDGDLAARLVVLGAVAAAMDVMVKRGGEQPKLARSLVMLLVNLTQVESGISALLQVGDEKVQGLYVAKLVRSFCRSSCDSEDEDIFEHIASILVNISKVEAGRRILMEPKRGLLKQIIGQFDSTNQLRKKGVAGTIRNCCFEADTQIQNLLSIAEYLWPALLLPVAGKKIYSEEDRSKMPPELANALSHEREAVDDSEIRERALEAIYMIVMQDDGRKAFWSVNGPRILQVGYEDEEDLKVMGAYELIGSLLVGKGEIEQDQEQGEDKPQ

SEQ ID NO: 65447 - protein, 252 aa, Triticum aestivum
  peptide (1)..(252): Ceres Seq. ID no. 13597636
MDVMVKRGGEQPKLARSLVMLLVNLTQVESGISALLQVGDEKVQGLYVAKLVRSFCRSSCDSEDEDIFEHIASILVNISKVEAGRRILMEPKRGLLKQIIGQFDSTNQLRKKGVAGTIRNCCFEADTQIQNLLSIAEYLWPALLLPVAGKKIYSEEDRSKMPPELANALSHEREAVDDSEIRERALEAIYMIVMQDDGRKAFWSVNGPRILQVGYEDEEDLKVMGAYELIGSLLVGKGEIEQDQEQGEDKPQ

SEQ ID NO: 65448 - DNA, 1436 bp, Triticum aestivum
  misc_feature (1)..(1436): Ceres Seq. ID no. 13597638
acacaagcacacagacacacactccagagaacaccaggccaagaaaccacagaaaagcaaccagccatgggggtggagatcctgagctccacgggggaaccctcctcccagtactcttccggggccgtgtccacagccacgacggagtcaggcatcggcggacggccgccgactgcgccgagcctgccagtggccatcgccgacgagtccgtgacctcgcggtcggcaccggcgcagtcggcgtcgtcgcggttcaagggggttgtgtcgcagcccaacgggcggtggggcgcccagatctacgagcgccacgctcgcgtctggctcggcacgttcccggacgaggactctgcggcgcgcgcctacgacgtggcagcgctccggtaccggggccgcgaggccgccaccaacttcccctgcgcggscgcagagggcggagctcgctttcctgggggcacactccaaggccgagatcgtcgacatgctccggaagcacacctacgccgacgagctccgccagggcttgcggcgcggccgcggcatgggggcccgcgcgcagccgacgccgtcgtgggcgcgggagcccctcttcgagaaggccgtgaccccgagcgacgtcggcaagctcaaccgcctcgtggtgccgaagcagcacgccgagaagcacttccccctgaagcgcacgccggaaacgacgaccaccaccggcaagggggtgctgctcaactttcgaggacggcgaggggaaagtgtggaggttccggtactcgtactggaacagcagccagagctacgtcctcaccaagggtkggagccgcttcgtccgggagaagggcctcggtgccggcgattccatcgtgttctcgtgctcggcgtacggtcaagagaagcagttcttcatcgactgcaagaagaacaagacgatggcgagctgccccgctgacggcggcgctgcaacggcgtcgccgcctgtggcggaggcagctaatggagaacaagtccgtgtcgtgaggctgtttggcgtcgacatcgccggagagaagagggggagagctgcgccggcggagcaggagttgttcaagaggcaatgcgtggcacacagccagcactctcctgccctaggtgccatcgtcttatagcatctgcacatacagctctatattcctctccggttctcctccctcttgcttctggttgttacatgcatgatatatgttgatctgtttgtggattagaataattttattcctgaattttgcgtagaactcgtccttaagtccgattgcagaatgagttgtatgtaattatgtgtgtgtacaccactagaaattctagctagacagatcataataatcctacgatgttgttgcatatatatatatatctatatatgtactatcatcttgacacatcaataaattccattctgccatctg

SEQ ID NO: 65449 - protein, 336 aa, Triticum aestivum
  peptide (1)..(336): Ceres Seq. ID no. 15222153
  misc_feature (142)..(142): Xaa is any aa, unknown or other
  misc_feature (270)..(270): Xaa is any aa, unknown or other
TQAHRHTLQRTPGQETTEKQPAMGVEILSSTGEPSSQYSSGAVSTATTESGIGGRPPTAPSLPVAIADESVTSRSAPAQSASSRFKGVVSQPNGRWGAQIYERHARVWLGTFPDEDSAARAYDVAALRYRGREAATNFPCAXAEGGARFPGGTLQGRDRRHAPEAHLRRRAPPGLAARPRHGGPRAADAVVGAGAPLREGRDPERRRQAQPPRGAEAARREALPPEAHAGNDDHHRQGGAAQLSRTARGKCGGSGTRTGTAARATSSPRXGAASSGRRASVPAIPSCSRARRTVKRSSSSSTARRTRRWRAAPLTAALQRRRRLWRRQLMENKSVS

SEQ ID NO: 65450 - protein, 314 aa, Triticum aestivum
  peptide (1)..(314): Ceres Seq. ID no. 15222154
  misc_feature (120)..(120): Xaa is any aa, unknown or other
  misc_feature (248)..(248): Xaa is any aa, unknown or other
MGVEILSSTGEPSSQYSSGAVSTATTESGIGGRPPTAPSLPVAIADESVTSRSAPAQSASSRFKGVVSQPNGRWGAQIYERHARVWLGTFPDEDSAARAYDVAALRYRGREAATNFPCAXAEGGARFPGGTLQGRDRRHAPEAHLRRRAPPGLAARPRHGGPRAADAVVGAGAPLREGRDPERRRQAQPPRGAEAARREALPPEAHAGNDDHHRQGGAAQLSRTARGKCGGSGTRTGTAARATSSPRXGAASSGRRASVPAIPSCSRARRTVKRSSSSSTARRTRRWRAAPLTAALQRRRRLWRRQLMENKSVS

SEQ ID NO: 65451 - protein, 200 aa, Triticum aestivum
  peptide (1)..(200): Ceres Seq. ID no. 15222155
  misc_feature (141)..(141): Xaa is any aa, unknown or other
TSTQTHTPENTRPRNHRKATSHGGGDPELHGGTLLPVLFRGRVHSHDGVRHRRTAADCAEPASGHRRRVRDLAVGTGAVGVVAVQGGCVAAQRAVGRPDLRAPRSRLARHVPGRGLCGARLRRGSAPVPGPRGRHQLPLRXRRGRSSLSWGHTPRPRSSTCSGSTPTPTSSARACGAAAAWGPARSRRRRGRGSPSSRRP

SEQ ID NO: 65452 - DNA, 1128 bp, Triticum aestivum
  misc_feature (1)..(1128): Ceres Seq. ID no. 13597743
aaaaccgcagacctcaccatccccctcccccctcccctccccagcagccagcctcccccgcgaacgaaccctagccaggcacggcggcggatccctcgggcggcccggagccacaggccgccgcgatgatggacggcggcggcggcgtcggagacccggtcgaggagttcctcatcgggggcgccggcgacggcggggaggactccctcgccgccttctgcgacggaggacttgggattgaggatgtgcgcggaggtgactctggtctcgggcactctaatttggggaaaaggggcagagatgaaccatctccatctggtccaaagtcaaaggcttgccgcgagaaaatgcggagggataaactgaatgacaggtttcttgaattatgctcggttatgaattctggcaagcacactggtgttgaagaatgttcggctagcaatcctgggaagaacgctaagttggataaagcaagtatcttgagtgatgcaactcgtatgttgacacaactcagaggcgagaccgaaaagctgaaggaatcaaatgtgaatcttcgagagacaatcaaggaccttaaggcggagaagaatgagctccgagatgagaagttgagcctgaaggcagaaaaggaaaggctggaacaacaactcaaagcagcaagtgctgctcctacaggatttgctcctcatatgccttatccagctgcgttccaccccgcagtattccctccatttgcaccaccttatcaagtcccagccaacaaaggcgctccggtccccgctgcattccctggaatggcgatgtggcactggttgcccccaactgccatggacacaactcaagacccaaagctttggccgccgaatgcttaggcgtgccgaccccgggatgctgacttgcgctgccattcgcccattggcaagtcagaacgtttgtcaggtccctgagatgaaaggaagctcgcgattgcagttattgtgtttagcctgttgttttggggtcacttgtcccatagagaggtgatacctgtaattaatctggatcttaaccctcttgcttggaaaatatattcagtgctaccatacctcttgtatgagtgttatgtatggaattgcactggtttgtttc

SEQ ID NO: 65453 - protein, 248 aa, Triticum aestivum
  peptide (1)..(248): Ceres Seq. ID no. 13597744
MMDGGGGVGDPVEEFLIGGAGDGGEDSLAAFCDGGLGIEDVRGGDSGLGHSNLGKRGRDEPSPSGPKSKACREKMRRDKLNDRFLELCSVMNSGKHTGVEECSASNPGKNAKLDKASILSDATRMLTQLRGETEKLKESNVNLRETIKDLKAEKNELRDEKLSLKAEKERLEQQLKAASAAPTGFAPHMPYPAAFHPAVFPPFAPPYQVPANKGAPVPAAFPGMAMWHWLPPTAMDTTQDPKLWPPNA

SEQ ID NO: 65454 - protein, 247 aa, Triticum aestivum
  peptide (1)..(247): Ceres Seq. ID no. 13597745
MDGGGGVGDPVEEFLIGGAGDGGEDSLAAFCDGGLGIEDVRGGDSGLGHSNLGKRGRDEPSPSGPKSKACREKMRRDKLNDRFLELCSVMNSGKHTGVEECSASNPGKNAKLDKASILSDATRMLTQLRGETEKLKESNVNLRETIKDLKAEKNELRDEKLSLKAEKERLEQQLKAASAAPTGFAPHMPYPAAFHPAVFPPFAPPYQVPANKGAPVPAAFPGMAMWHWLPPTAMDTTQDPKLWPPNA

SEQ ID NO: 65455 - protein, 174 aa, Triticum aestivum
  peptide (1)..(174): Ceres Seq. ID no. 13597746
MRRDKLNDRFLELCSVMNSGKHTGVEECSASNPGKNAKLDKASILSDATRMLTQLRGETEKLKESNVNLRETIKDLKAEKNELRDEKLSLKAEKERLEQQLKAASAAPTGFAPHMPYPAAFHPAVFPPFAPPYQVPANKGAPVPAAFPGMAMWHWLPPTAMDTTQDPKLWPPNA

SEQ ID NO: 65456 - DNA, 1196 bp, Triticum aestivum
  misc_feature (1)..(1196): Ceres Seq. ID no. 13655958
agaacatcctaatcgaaaactcgatcacatcacatcctcgtgggtgcacgcagcctctgtcggcaggcacagcgggggaacccgcgagcgagctctccaccggccatctgccatgtcagagcccggcgcgaacggcgcccgtcggcggcagcgcaggaggtggcgcctgtactggtgctacgtgtgccgccgcgcgctgcgcacggtgtcgtccccgacctccgacgtcttctgcccgcgctgcctcggccgcttcctccacgagatcgaactccccgtgccgcgcgagcccgtgcacgcgccgaccgagcggctcttccagccgccgccgttgttcccgtacgagggcgccccccgccactgggtcatatacaggggcgaggacgacgacgacgcggccgacacgccaggcccacgtctccgccgcgtcccgtccccgccgccggccccgggaacgcacggcggcttgggcggtgccgatgccggtccaccggcaaccggcatcgacccggcggggttcttcaccggccccaacctgaacgcgctcatcgatggtctgacgcagaacgaccgccccggcccgccgcccgcgccggcgtcggcgatcgactcgctccccacggtgcacgtctcgccggagcacatggcggacggctcgcagtgccccgtgtgcaaggatgagttcgagctcggcgagaccgcgcgcgagctgccgtgcaagcacgcctaccactccgactgcatcgtgccgtggctccggctccacaactcctgccctgtctgccggcaggagctgccaatgccggccggtgatgaatctcccgatggcgcgggcgcaggcgacggaggcgaggagacggttccgccgtggcagctgcttgccggctgggggccactggcttggctgctaacgctgggggaaccggacgtgggcggctgggataatggatctcggcagcgtgggacggaagccgacgccgatgacaccggcggcaatgtcagtcgtggcgccacgattcttcagtcgtttgttctcgtcgctgcgtgctttttctttgtctcctttctcgtttgagaaatggcacattggagactgtcacgtgtgcatatcatttattcggaaaagaaaacccaggtttcacgtgcaccacgcatgatcagacaaaaaaaaaaaaaaaaaagcttatcgataccgt

SEQ ID NO: 65457 - protein, 357 aa, Triticum aestivum
  peptide (1)..(357): Ceres Seq. ID no. 13655959
EHPNRKLDHITSSWVHAASVGRHSGGTRERALHRPSAMSEPGANGARRRQRRRWRLYWCYVCRRALRTVSSPTSDVFCPRCLGRFLHEIELPVPREPVHAPTERLFQPPPLFPYEGAPRHWVIYRGEDDDDAADTPGPRLRRVPSPPPAPGTHGGLGGADAGPPATGIDPAGFFTGPNLNALIDGLTQNDRPGPPPAPASAIDSLPTVHVSPEHMADGSQCPVCKDEFELGETARELPCKHAYHSDCIVPWLRLHNSCPVCRQELPMPAGDESPDGAGAGDGGEETVPPWQLLAGWGPLAWLLTLGEPDVGGWDNGSRQRGTEADADDTGGNVSRGATILQSFVLVAACFFFVSFLV

SEQ ID NO: 65458 - protein, 320 aa, Triticum aestivum
  peptide (1)..(320): Ceres Seq. ID no. 13655960
MSEPGANGARRRQRRRWRLYWCYVCRRALRTVSSPTSDVFCPRCLGRFLHEIELPVPREPVHAPTERLFQPPPLFPYEGAPRHWVIYRGEDDDDAADTPGPRLRRVPSPPPAPGTHGGLGGADAGPPATGIDPAGFFTGPNLNALIDGLTQNDRPGPPPAPASAIDSLPTVHVSPEHMADGSQCPVCKDEFELGETARELPCKHAYHSDCIVPWLRLHNSCPVCRQELPMPAGDESPDGAGAGDGGEETVPPWQLLAGWGPLAWLLTLGEPDVGGWDNGSRQRGTEADADDTGGNVSRGATILQSFVLVAACFFFVSFLV

SEQ ID NO: 65459 - protein, 178 aa, Triticum aestivum
  peptide (1)..(178): Ceres Seq. ID no. 13655961
NILIENSITSHPRGCTQPLSAGTAGEPASELSTGHLPCQSPARTAPVGGSAGGGACTGATCAAARCARCRPRPPTSSARAASAASSTRSNSPCRASPCTRRPSGSSSRRRCSRTRAPPATGSYTGARTTTTRPTRQAHVSAASRPRRRPRERTAAWAVPMPVHRQPASTRRGSSPAPT

SEQ ID NO: 65460 - DNA, 1517 bp, Triticum aestivum
  misc_feature (1)..(1517): Ceres Seq. ID no. 13597753
gaccactgactgaccgccggccgctttctcctctacggcgacgcccggccgcccagctgctcaccgccggcgctctcgccgacggcgatgtcgtcttcggagccgcggccgcgccccgccgcctccttctccggcgacctgcccgaggacgcgctgtacgaggtcctcctccgcatcccggccaaggagctctgccgcctccgcgccgtctgcccggcctggcacgccctcacctccgatccgcccttcgtcgcggctcacaagtccacccaccgcacggcgcccccgctcctcgccattgcctaccgcgacgacagtgaggtcaacggcgttgcgatttcggatctgtcgggcaacgtcgtgaggcggattccagtcaccgggtatgagattgttatggtgaacgagtcgggcgatgccgttcaccggagctcaagcaaggaggagcatgatagcatctgtgttgtgcgcagccggctagacctcgtgtgcttccactggaatgtgtactctaggaccttctgcgtgctgaacccggtcactggagctactctcgacttaccgatgggccactcaaaggaattggagcatgagctggaggtacagggaagaaaatggggctgccatgtcgagtggtgcgcttttgggaaggtctcctctaccagagagtacaaggcgctccgcatctgtagcattcgtgaccggcaggtatgtgaggttatcacctttgatgacaccaaccatggaagctggaggaggaagcaggaccctccgccccgtatctgtaccggtcgtcagatgagatgcgtggtcgtcgatggggtggtgtacttcttgatggattttcactacacatactttgaaaccggggttataaccattgagcctggtagcatagcttcattcaacctcgaggcggaggagtggggtgttctacctggtcccggacaggtcaagaggtttgtgcaagagaacaagaaatacagttactcacagcttgagctccagttatcattggctgagttgaacggctgcttagttctggttcataatattcataaggtatctatggacttgtggtttttgacagattttgagaaaggtatctgggtcaagaaatacagcttgccttcacatgttgctaggcttttttggtatccttttctcatgttagatgatgggagaattttcttcagtgggatggattgtctggaaggtatattaagtggtggagagcaaggagagggattcctgcaaagttatgatccaagaaatgacacttatgctgatgcactagaactgagagatcccagatcaatttgcatttacacaggaagcgtgctgagtttatagcatagctgtcactgatgaggtcaggaatgatacatcgtactggctgttcaccttatgttctaaatgtgaacaattagtgagataatgttctgatgcatgcatctttgaaaaagtacctttgtgccttcaaagtatattatgttaatctccaatacattttgcgc

SEQ ID NO: 65461 - protein, 421 aa, Triticum aestivum
  peptide (1)..(421): Ceres Seq. ID no. 13597754
MSSSEPRPRPAASFSGDLPEDALYEVLLRIPAKELCRLRAVCPAWHALTSDPPFVAAHKSTHRTAPPLLAIAYRDDSEVNGVAISDLSGNVVRRIPVTGYEIVMVNESGDAVHRSSSKEEHDSICVVRSRLDLVCFHWNVYSRTFCVLNPVTGATLDLPMGHSKELEHELEVQGRKWGCHVEWCAFGKVSSTREYKALRICSIRDRQVCEVITFDDTNHGSWRRKQDPPPRICTGRQMRCVVVDGVVYFLMDFHYTYFETGVITIEPGSIASFNLEAEEWGVLPGPGQVKRFVQENKKYSYSQLELQLSLAELNGCLVLVHNIHKVSMDLWFLTDFEKGIWVKKYSLPSHVARLFWYPFLMLDDGRIFFSGMDCLEGILSGGEQGEGFLQSYDPRNDTYADALELRDPRSICIYTGSVLSL

SEQ ID NO: 65462 - protein, 318 aa, Triticum aestivum
  peptide (1)..(318): Ceres Seq. ID no. 13597755
MVNESGDAVHRSSSKEEHDSICVVRSRLDLVCFHWNVYSRTFCVLNPVTGATLDLPMGHSKELEHELEVQGRKWGCHVEWCAFGKVSSTREYKALRICSIRDRQVCEVITFDDTNHGSWRRKQDPPPRICTGRQMRCVVVDGVVYFLMDFHYTYFETGVITIEPGSIASFNLEAEEWGVLPGPGQVKRFVQENKKYSYSQLELQLSLAELNGCLVLVHNIHKVSMDLWFLTDFEKGIWVKKYSLPSHVARLFWYPFLMLDDGRIFFSGMDCLEGILSGGEQGEGFLQSYDPRNDTYADALELRDPRSICIYTGSVLSL

SEQ ID NO: 65463 - protein, 262 aa, Triticum aestivum
  peptide (1)..(262): Ceres Seq. ID no. 13597756
MGHSKELEHELEVQGRKWGCHVEWCAFGKVSSTREYKALRICSIRDRQVCEVITFDDTNHGSWRRKQDPPPRICTGRQMRCVVVDGVVYFLMDFHYTYFETGVITIEPGSIASFNLEAEEWGVLPGPGQVKRFVQENKKYSYSQLELQLSLAELNGCLVLVHNIHKVSMDLWFLTDFEKGIWVKKYSLPSHVARLFWYPFLMLDDGRIFFSGMDCLEGILSGGEQGEGFLQSYDPRNDTYADALELRDPRSICIYTGSVLSL

SEQ ID NO: 65464 - DNA, 1368 bp, Triticum aestivum
  misc_feature (1)..(1368): Ceres Seq. ID no. 12617911
cccccgagcgcgccccgcctcgccgaccggtcgccggagatgtcccgcacgctggtgcagccggtggggcagaagcggctgaccaacgtggccgtggtgcggctgcgcaagggcggccagcggttcgagatcgcctgcttccccaacaaggtggtcaactggcgcgaccgcgtcgagaaggacctcgacgaggtgctccagtcccacaacgtctactccaacgtctccaagggcgtcctcgccaagtccaaggacctcatcaggatcttcggcaccgacgacctcgtcgaaatctgcgtcgagattttggagaaaggggagctccaggtttctggcaaggagagggaggcgcagctgtccgcgcagttcagggacatcgccaccatcgtgatggagaagactatcagtactgagacccggcgcccctacaccatgaacatgatcgagcgcatcatgcacgagatacactttgccgtcgatccaaaccttacctccaaggaacaggcactgagagttattaagaagctaatcgagaaccctaaatacaagataaagcgtgcaccattgacagtgcggttcattgcacctaagtccaatcttgctggccttatggagaagcttgatgggtggaatgcaattgttctttcaaaggatgagtctgccgatcagtcttccgttgtatgtgagattgagccatctattctgcactcgtgtgaagagaaactgaaggacgtgcaagggagggtggaagtactctcggtgtcggcacacacagaaggtggctcttctacagaccaatatgacaatgtcgaggacaatgtggagaaggcacagcccgtgcctgcgaaggagtctggtgctgttgctcagctaagtgaaaccatgcagaaacagagcctttcaagtgaagtggaaagccagggtcaggcaccaggcaagccgcagaaaagatgcagagaatgtgacgtattcatggaggacaagctgtacagagaccactgcaagtccgggtggcacaagcacaactacacacgccacaagaatgggcttcccccactcagccaagaggagtgcttgatggaaatggagatggcagattcccagaggggtctgaaggactacgatttctgaggtgggttttgtctagcactccctctcaccacgccttcaaggccgagagatggtatgcacaaggcatgaattttgcagtcttgttgtttccgtggacatagtcatcatttggtaaatgctggtatgaagtggggaactagttttgcggtacgctagcaagtttataaaatgtaatcaggttacgttgtgtgaatgtgaactgtgtgtagttggctgagtaaacttgtggcagtactc

SEQ ID NO: 65465 - protein, 376 aa, Triticum aestivum
  peptide (1)..(376): Ceres Seq. ID no. 12617912
PPSAPRLADRSPEMSRTLVQPVGQKRLTNVAVVRLRKGGQRFEIACFPNKVVNWRDRVEKDLDEVLQSHNVYSNVSKGVLAKSKDLIRIFGTDDLVEICVEILEKGELQVSGKEREAQLSAQFRDIATIVMEKTISTETRRPYTMNMIERIMHEIHFAVDPNLTSKEQALRVIKKLIENPKYKIKRAPLTVRFIAPKSNLAGLMEKLDGWNAIVLSKDESADQSSVVCEIEPSILHSCEEKLKDVQGRVEVLSVSAHTEGGSSTDQYDNVEDNVEKAQPVPAKESGAVAQLSETMQKQSLSSEVESQGQAPGKPQKRCRECDVFMEDKLYRDHCKSGWHKHNYTRHKNGLPPLSQEECLMEMEMADSQRGLKDYDF

SEQ ID NO: 65466 - protein, 363 aa, Triticum aestivum
  peptide (1)..(363): Ceres Seq. ID no. 12617913
MSRTLVQPVGQKRLTNVAVVRLRKGGQRFEIACFPNKVVNWRDRVEKDLDEVLQSHNVYSNVSKGVLAKSKDLIRIFGTDDLVEICVEILEKGELQVSGKEREAQLSAQFRDIATIVMEKTISTETRRPYTMNMIERIMHEIHFAVDPNLTSKEQALRVIKKLIENPKYKIKRAPLTVRFIAPKSNLAGLMEKLDGWNAIVLSKDESADQSSVVCEIEPSILHSCEEKLKDVQGRVEVLSVSAHTEGGSSTDQYDNVEDNVEKAQPVPAKESGAVAQLSETMQKQSLSSEVESQGQAPGKPQKRCRECDVFMEDKLYRDHCKSGWHKHNYTRHKNGLPPLSQEECLMEMEMADSQRGLKDYDF

SEQ ID NO: 65467 - protein, 246 aa, Triticum aestivum
  peptide (1)..(246): Ceres Seq. ID no. 12617914
MEKTISTETRRPYTMNMIERIMHEIHFAVDPNLTSKEQALRVIKKLIENPKYKIKRAPLTVRFIAPKSNLAGLMEKLDGWNAIVLSKDESADQSSVVCEIEPSILHSCEEKLKDVQGRVEVLSVSAHTEGGSSTDQYDNVEDNVEKAQPVPAKESGAVAQLSETMQKQSLSSEVESQGQAPGKPQKRCRECDVFMEDKLYRDHCKSGWHKHNYTRHKNGLPPLSQEECLMEMEMADSQRGLKDYDF

SEQ ID NO: 65468 - DNA, 1257 bp, Triticum aestivum
  misc_feature (1)..(1257): Ceres Seq. ID no. 13597668
accgcaaagaaccacgcgaaccgaacccacgcaccatcagcgaagaggagagggggcggccaaagacaagagaaaacgcagccgccgccgggaggagagcgcagcgtgggagcaaggagcggcagccggcaggcaatgggcaacagcatcggcggccggcgcaagggcgccaaggtgatgcagctggacggcaccgccttcagggtgaagccgccggcgtacgcgggcgccgtgctgcgcgaccacccgggcttccagctgctcgagtcggagcaggtcaagctgctcggcgtccgcgcgcgcccgctcgagcaggacgcgctgctccgcccgggccagctctacttcctcgtcgcgctgccccgccccaccgtgcccccgcgccgcgcctggtccggcgcgctccacgtcggcgcgcgcgagaggctcgagtcgctcatgctcacgcgccgctccacctccgacctcaccttcccgacctcgggcaccgcgccggcctccccgatgtccaccgcctccgagggcgggccggtccagctcaggatgcgcctgcccaaggcgcaggtcgccaagcttatgggcgagagccgggacgccgccgaggcggccgctaagatcatgcagctctgcgccgccaacggcgctgtgacgccggagcggagcccgcggttcctgccgacggcggactggggcactggtgggttcgcgcagacgccagagcggagcccgcggttcgtgccgacgccggactggggcgccggcaggttcgcgcaaaccccagagcggagtcccaggttcgccgtcacgcccgagtggggtgccaggttcatgatgccgacgacgccggagaggggcgtagagacggcgaagacgccggataggtggcccgctttaccccgcacgccggagtatgcatcagcggacgtcaaggccagccggaaggagaagcgaacgcggttcctggccttgccggatgagatcatagcatgatggcttctcgtccacctgaagtgatagatcgatcgaccacagattgccggagctggggacgagaggccgccgacggtttcctgcctcgcgcctcgcccgcttcttcttcttctccttctccttcttcttcttcatacggcatggagcgtcgttttcctctcttgtttacctttttagcctcggcctgcgataacattgctgcgagctgtggtgctctcagtagttagcttaggggagatgtatatggacctctatgtataaacttac

SEQ ID NO: 65469 - protein, 329 aa, Triticum aestivum
  peptide (1)..(329): Ceres Seq. ID no. 13597669
TAKNHANRTHAPSAKRRGGGQRQEKTQPPPGGERSVGARSGSRQAMGNSIGGRRKGAKVMQLDGTAFRVKPPAYAGAVLRDHPGFQLLESEQVKLLGVRARPLEQDALLRPGQLYFLVALPRPTVPPRRAWSGALHVGARERLESLMLTRRSTSDLTFPTSGTAPASPMSTASEGGPVQLRMRLPKAQVAKLMGESRDAAEAAAKIMQLCAANGAVTPERSPRFLPTADWGTGGFAQTPERSPRFVPTPDWGAGRFAQTPERSPRFAVTPEWGARFMMPTTPERGVETAKTPDRWPALPRTPEYASADVKASRKEKRTRFLALPDEIIA

SEQ ID NO: 65470 - protein, 284 aa, Triticum aestivum
  peptide (1)..(284): Ceres Seq. ID no. 13597670
MGNSIGGRRKGAKVMQLDGTAFRVKPPAYAGAVLRDHPGFQLLESEQVKLLGVRARPLEQDALLRPGQLYFLVALPRPTVPPRRAWSGALHVGARERLESLMLTRRSTSDLTFPTSGTAPASPMSTASEGGPVQLRMRLPKAQVAKLMGESRDAAEAAAKIMQLCAANGAVTPERSPRFLPTADWGTGGFAQTPERSPRFVPTPDWGAGRFAQTPERSPRFAVTPEWGARFMMPTTPERGVETAKTPDRWPALPRTPEYASADVKASRKEKRTRFLALPDEIIA

SEQ ID NO: 65471 - protein, 270 aa, Triticum aestivum
  peptide (1)..(270): Ceres Seq. ID no. 13597671
MQLDGTAFRVKPPAYAGAVLRDHPGFQLLESEQVKLLGVRARPLEQDALLRPGQLYFLVALPRPTVPPRRAWSGALHVGARERLESLMLTRRSTSDLTFPTSGTAPASPMSTASEGGPVQLRMRLPKAQVAKLMGESRDAAEAAAKIMQLCAANGAVTPERSPRFLPTADWGTGGFAQTPERSPRFVPTPDWGAGRFAQTPERSPRFAVTPEWGARFMMPTTPERGVETAKTPDRWPALPRTPEYASADVKASRKEKRTRFLALPDEIIA

SEQ ID NO: 65472 - DNA, 1220 bp, Triticum aestivum
  misc_feature (1)..(1220): Ceres Seq. ID no. 13597757
atcgaaaacccttcgacccaacccatacaaactcaaacccccacgaaaacccctctctcctctccgcttctccctggccgccgaaaccctaacctagccgcgcgtcgccgccgccgccggcgcaccagtcaccatgtcgaaccccaaggggtcgaagatgctccagttcgtcaactaccggatgcgcgtgacgatccaggacggccgccaactcgtggggaagttcatggccttcgatcgccacatgaacctcgtcctcggcgactgcgaggagttccgcaagctcccgccctcaaaatcttccaagaccacaggcgagcgcgaggagcggaggacgctcggcctgctgcttcttcgtggcgaggaagtcgtctccatgaccgtcgagggcccgcccccgcccgacgagtcccgggccaaggcctccgctggtgttgccgcgctttccggcactggcgtcggtcgcgctgccggccgtggggtggccaccggcccgctgctccaggcgcagcccggcctctccggccctgttcggggcgtgggcggtccggcccccggcatgatgcagccccagatctcgcgtcccccaatgccgaacctctcagcgccgccggtggcgtacccacaggtcgtccgcccgccaccgatgggtatgccgcccatgcgacctggtggcccgccaccgatgcagatgcagtttcagcgcccgccgggtcccccgcctgcgccataccctggggccccgccgcagcagttcatgaggggaccgccaccgatggggcctccaccagggaggccggggatgccaagcatgccaccaccgccagggatgaggccgatgccaccaacgcagtttggacaaccacccaggcatggaatgccgccaccaccgcctggtccacagcagcctggacagaacccccagcagtagaaaaacctttctggtttggtccttgcagtcccacctgtggaagattcatcttcggaagagagaaaagtcttgtcggtgcagcactcttgcttttgatgggaggagacggactgttttccaacgcaatgtacgtaaaagaggctgaagcttgtttaactgttggttgttaagctagggacatggatagactgtttcgttgtgtcagtaccttgttgctggatgtgcttgcacttgtattgagatattatttcgcactattaacttcagatcataaattgctttgcttgcg

SEQ ID NO: 65473 - protein, 366 aa, Triticum aestivum
  peptide (1)..(366): Ceres Seq. ID no. 13597758
IENPSTQPIQTQTPTKTPLSSPLLPGRRNPNLAARRRRRRRTSHHVEPQGVEDAPVRQLPDARDDPGRPPTRGEVHGLRSPHEPRPRRLRGVPQAPALKIFQDHRRARGAEDARPAASSWRGSRLHDRRGPAPARRVPGQGLRWCCRAFRHWRRSRCRPWGGHRPAAPGAARPLRPCSGRGRSGPRHDAAPDLASPNAEPLSAAGGVPTGRPPATDGYAAHATWWPATDADAVSAPAGSPACAIPWGPAAAVHEGTATDGASTREAGDAKHATTARDEADATNAVWTTTQAWNAATTAWSTAAWTEPPAVEKPFWFGPCSPTCGRFIFGREKSLVGAALLLLMGGDGLFSNAMYVKEAEACLTVGC

SEQ ID NO: 65474 - protein, 265 aa, Triticum aestivum
  peptide (1)..(265): Ceres Seq. ID no. 13597759
MSNPKGSKMLQFVNYRMRVTIQDGRQLVGKFMAFDRHMNLVLGDCEEFRKLPPSKSSKTTGEREERRTLGLLLLRGEEVVSMTVEGPPPPDESRAKASAGVAALSGTGVGRAAGRGVATGPLLQAQPGLSGPVRGVGGPAPGMMQPQISRPPMPNLSAPPVAYPQVVRPPPMGMPPMRPGGPPPMQMQFQRPPGPPPAPYPGAPPQQFMRGPPPMGPPPGRPGMPSMPPPPGMRPMPPTQFGQPPRHGMPPPPPGPQQPGQNPQQ

SEQ ID NO: 65475 - protein, 257 aa, Triticum aestivum
  peptide (1)..(257): Ceres Seq. ID no. 13597760
MLQFVNYRMRVTIQDGRQLVGKFMAFDRHMNLVLGDCEEFRKLPPSKSSKTTGEREERRTLGLLLLRGEEVVSMTVEGPPPPDESRAKASAGVAALSGTGVGRAAGRGVATGPLLQAQPGLSGPVRGVGGPAPGMMQPQISRPPMPNLSAPPVAYPQVVRPPPMGMPPMRPGGPPPMQMQFQRPPGPPPAPYPGAPPQQFMRGPPPMGPPPGRPGMPSMPPPPGMRPMPPTQFGQPPRHGMPPPPPGPQQPGQNPQQ

SEQ ID NO: 65476 - DNA, 1760 bp, Triticum aestivum
  misc_feature (1)..(1760): Ceres Seq. ID no. 13597661
atcctaattgaaaaaacacccaaattccagttactcttttggtctttccatcgtcttccttagccggcgacttgcgcgcaggttttcctcccttcctcggcgacttgaggagtgtccagatctagcaattttactccggtgatgaaaacaagtgcccccgtggtttgtgggcagggaccaaggattgatcgtcgttccataaaaccttttaagatgacaagatccaaggatattcagcttcaccatctacctacagatgtactgcgtcgtatactatcacaattgacaatgaaagaagccatgcgaatgagcatactatctaagaagtggagaaggctttggaaatgctacccaaagttagtattcaccagagccatgatgtgtcgcagtaacgccacgacaggccctgcaaaacccttgcggacaaggtttatcaggggggtcaacagcatccagcgacagctcaagtcatccaacctgaataagtttgtggtcaagtttgcgcttcgcaaaaggcacacacctcacattgatagatgggtcaatttctgtgcctcgtcgatggcgaagcatgttgttctcgatttatgtccagggccgaaaggcagtaccgacacagatgacaagtacagtttcccgctgcatcttctcggcgcctcgggtggttcttgcgtgaagtctcttagtctggggttcgtctatttagcactgcctcctgatcaccgtggatttgcaaaccttaagaagctctctctggaaatagttcatgtcacaggggatctcgggcgcctgctcccaaaatgcgctgttcttgagtggctaagcctcaccaggtgtagactggacgagctaagcataggtgaggaactgagcaggctccgttgtttgcaggtcaagtactgtatgctgcagaagctgcatgtccgagctccaaacctcgccatgtttgtgttcgctggtcgtgtgatacctatattgcttggtgaatctgtgaagatttcagaggcgacggtcgacttggtcacatcctcggactgcttcaattacgtcttcactgatcttgtcgatgctctttcgcatgttccgtccctctccataggcttccgaattgaaaccaaggtgataaattttgtgaaaaatcggaccatgctcacaaatctgagacgtctggtcctgaaaatcgatattgttgggtcgccggaagtcactggtgggattcttcgtttggcctatctgttggagttagcccctgctttggaagagttagtactccatatgcattgttttgactcggcaatctatggtgaaccaagagaagatgcctaccagccacatcctcaccgtcatctcaagactatcaaaatgacggggttctatggattacttggtcaggttgagctagcactctaccttcttcggaatgcgacttctctcgagcgtatgatcatagatccggtggtgaggaataattggcctattccacccatgggtggagcaaagcaagatatagaccggggcacgtcgattgccctcaataaactttcgaggcaagagttcagaaaggtccttgacattctgtattaaggggatatgaaactatgttgcaggtgtattctagattatttgttttaaggaaggagagatgccaatagatgttttttttaaaggagatgccaatagatgtttgtttgaaggaaggagctcaggaaatgccgtccttaccatctgtcagagaaataggaaactgaatcacagctgtc

SEQ ID NO: 65477 - protein, 480 aa, Triticum aestivum
  peptide (1)..(480): Ceres Seq. ID no. 15222162
MKTSAPVVCGQGPRIDRRSIKPFKMTRSKDIQLHHLPTDVLRRILSQLTMKEAMRMSILSKKWRRLWKCYPKLVFTRAMMCRSNATTGPAKPLRTRFIRGVNSIQRQLKSSNLNKFVVKFALRKRHTPHIDRWVNFCASSMAKHVVLDLCPGPKGSTDTDDKYSFPLHLLGASGGSCVKSLSLGFVYLALPPDHRGFANLKKLSLEIVHVTGDLGRLLPKCAVLEWLSLTRCRLDELSIGEELSRLRCLQVKYCMLQKLHVRAPNLAMFVFAGRVIPILLGESVKISEATVDLVTSSDCFNYVFTDLVDALSHVPSLSIGFRIETKVINFVKNRTMLTNLRRLVLKIDIVGSPEVTGGILRLAYLLELAPALEELVLHMHCFDSAIYGEPREDAYQPHPHRHLKTIKMTGFYGLLGQVELALYLLRNATSLERMIIDPVVRNNWPIPPMGGAKQDIDRGTSIALNKLSRQEFRKVLDILY

SEQ ID NO: 65478 - protein, 456 aa, Triticum aestivum
  peptide (1)..(456): Ceres Seq. ID no. 15222163
MTRSKDIQLHHLPTDVLRRILSQLTMKEAMRMSILSKKWRRLWKCYPKLVFTRAMMCRSNATTGPAKPLRTRFIRGVNSIQRQLKSSNLNKFVVKFALRKRHTPHIDRWVNFCASSMAKHVVLDLCPGPKGSTDTDDKYSFPLHLLGASGGSCVKSLSLGFVYLALPPDHRGFANLKKLSLEIVHVTGDLGRLLPKCAVLEWLSLTRCRLDELSIGEELSRLRCLQVKYCMLQKLHVRAPNLAMFVFAGRVIPILLGESVKISEATVDLVTSSDCFNYVFTDLVDALSHVPSLSIGFRIETKVINFVKNRTMLTNLRRLVLKIDIVGSPEVTGGILRLAYLLELAPALEELVLHMHCFDSAIYGEPREDAYQPHPHRHLKTIKMTGFYGLLGQVELALYLLRNATSLERMIIDPVVRNNWPIPPMGGAKQDIDRGTSIALNKLSRQEFRKVLDILY

SEQ ID NO: 65479 - protein, 431 aa, Triticum aestivum
  peptide (1)..(431): Ceres Seq. ID no. 15222164
MKEAMRMSILSKKWRRLWKCYPKLVFTRAMMCRSNATTGPAKPLRTRFIRGVNSIQRQLKSSNLNKFVVKFALRKRHTPHIDRWVNFCASSMAKHVVLDLCPGPKGSTDTDDKYSFPLHLLGASGGSCVKSLSLGFVYLALPPDHRGFANLKKLSLEIVHVTGDLGRLLPKCAVLEWLSLTRCRLDELSIGEELSRLRCLQVKYCMLQKLHVRAPNLAMFVFAGRVIPILLGESVKISEATVDLVTSSDCFNYVFTDLVDALSHVPSLSIGFRIETKVINFVKNRTMLTNLRRLVLKIDIVGSPEVTGGILRLAYLLELAPALEELVLHMHCFDSAIYGEPREDAYQPHPHRHLKTIKMTGFYGLLGQVELALYLLRNATSLERMIIDPVVRNNWPIPPMGGAKQDIDRGTSIALNKLSRQEFRKVLDILY

SEQ ID NO: 65480 - DNA, 1408 bp, Triticum aestivum
  misc_feature (1)..(1408): Ceres Seq. ID no. 12617920
agaacatcctaatcgaaaactcccgccgctggcccggcaatttccccacttttccctccctccctccgctcaaccccaccccagcgctatggccgcctcctcctccgccgccgcccccgccgacacgtacgacatcccgtgggtggagaagtaccgccccagccgcgtcgccgatgtcgtcggcaacgccgacgccgtcagccgcctcgaggtcatcgcccgcgacggcaacatgcccaacctcatcctctccgggcctccggggaccgggaagacgacgagcatcctggcgctggcccacgagatgctcgggcccagctaccgcgagggagtgctcgagctcaacgcctcggacgacagggggcttgatgtggtgaggaacaagatcaagatgttcgcgcagaagaaggtcacactgccgcccggacggcacaagatcgtcatactggacgaggctgacagcatgacaacaggggcacagcaagcactgagaagaaccatggagatttattccaacaccacaagatttgctcttgcctgcaatacttcatctaaaatcattgaacccatccaaagtcgctgcgctattgtccggttctcgaggctttcagatcaggagatccttggccgccttatgatcgtggttgctgctgagaaggtcccttatgtgccagaaggtcttgaagccatcatttttactgctgatggtgacatgagacaagctttgaacaatttgcaagctacagtcagtgggttccgttttgttaatcaagaaaatgtgttcaaggtttgcgatcaaccacatcccttgcatgtcaagagtatggtgaaaaatgtactagatgggaagtttgatgaggcctgctctggcctaaagcaactctatgatttgggctactctcctactgacataatcactactctcttccgtgtcatcaagaactatgacatggctgaatttctgaagctggagttgctgaaggaaaccggatttgcgcacatgaggatctgtgacggcgtcgggtcattccttcagctttctggccttctggccaagtttgctctggtgagagaaacagcaaaggcctaacgctgtgcagctgctctgacatcagttaacagtgttgtcatgcatagcctgttttatcgctactctgtcgtggtatctcagtgtgtaagatagttcttcgctgaagtgaactatttatgcttgtttagcatcggagatatagttgtagcctgtagtgactagtgaggagactgagtcctcttagttcgagtgcttttagcccagccatccgtggttcacgcgctgctgtatttcggaactaatctgggtatttttcgggtcattttgtagtctattgagctgtcgtgccagcatcatgaaggaaccgtcagttatccg

SEQ ID NO: 65481 - protein, 362 aa, Triticum aestivum
  peptide (1)..(362): Ceres Seq. ID no. 12617921
EHPNRKLPPLARQFPHFSLPPSAQPHPSAMAASSSAAAPADTYDIPWVEKYRPSRVADVVGNADAVSRLEVIARDGNMPNLILSGPPGTGKTTSILALAHEMLGPSYREGVLELNASDDRGLDVVRNKIKMFAQKKVTLPPGRHKIVILDEADSMTTGAQQALRRTMEIYSNTTRFALACNTSSKIIEPIQSRCAIVRFSRLSDQEILGRLMIVVAAEKVPYVPEGLEAIIFTADGDMRQALNNLQATVSGFRFVNQENVFKVCDQPHPLHVKSMVKNVLDGKFDEACSGLKQLYDLGYSPTDIITTLFRVIKNYDMAEFLKLELLKETGFAHMRICDGVGSFLQLSGLLAKFALVRETAKA

SEQ ID NO: 65482 - protein, 333 aa, Triticum aestivum
  peptide (1)..(333): Ceres Seq. ID no. 12617922
MAASSSAAAPADTYDIPWVEKYRPSRVADVVGNADAVSRLEVIARDGNMPNLILSGPPGTGKTTSILALAHEMLGPSYREGVLELNASDDRGLDVVRNKIKMFAQKKVTLPPGRHKIVILDEADSMTTGAQQALRRTMEIYSNTTRFALACNTSSKIIEPIQSRCAIVRFSRLSDQEILGRLMIVVAAEKVPYVPEGLEAIIFTADGDMRQALNNLQATVSGFRFVNQENVFKVCDQPHPLHVKSMVKNVLDGKFDEACSGLKQLYDLGYSPTDIITTLFRVIKNYDMAEFLKLELLKETGFAHMRICDGVGSFLQLSGLLAKFALVRETAKA

SEQ ID NO: 65483 - protein, 285 aa, Triticum aestivum
  peptide (1)..(285): Ceres Seq. ID no. 12617923
MPNLILSGPPGTGKTTSILALAHEMLGPSYREGVLELNASDDRGLDVVRNKIKMFAQKKVTLPPGRHKIVILDEADSMTTGAQQALRRTMEIYSNTTRFALACNTSSKIIEPIQSRCAIVRFSRLSDQEILGRLMIVVAAEKVPYVPEGLEAIIFTADGDMRQALNNLQATVSGFRFVNQENVFKVCDQPHPLHVKSMVKNVLDGKFDEACSGLKQLYDLGYSPTDIITTLFRVIKNYDMAEFLKLELLKETGFAHMRICDGVGSFLQLSGLLAKFALVRETAKA

SEQ ID NO: 65484 - DNA, 1339 bp, Triticum aestivum
  misc_feature (1)..(1339): Ceres Seq. ID no. 13584722
agtccagatcgccgtgtccgccgaccaccacttcaacccctccactgcagcctgtaggaagctaaagctagaactagaacaatctgcctacacctagccatggtgaagctagccacggcgcgggactgccgcgcgtacagcctcggcgccacgggcggcgagacgtcgcgcaaccggcggtgggagtacatcaacgccggggtgtacgtcttcgccgccgtcctcctcctcgccggcttcctggcgcagctgtggccgtgggcggtgtccaccaaggccggcctcgccgtggccgtcgtcgggctgctgggcgtgctggcagtgaacgcgcacgacctgctggcgcacgtcgccggcgtcgattacaaccttggcctggccgggctcgacacccagttcgtgctcgtcgagctcgccgcccccgccgtgcagctcgccggcgccgcgctcaccttggtcgcgctcatcttgttcgaaatccaggtatgaagttggagttcatccatccgagctagtagtactagtatcagtaataagttcagagttcagactggagttgcatgctgttcttttttttatctgaatccatggaacaaacgtcgcagatggagagagggcaccggcgtggcctggagaagcacggcctgaacctgctcatcgccgggccagcgctgtggtgcctcgggtccatacacaacatgtgccaagtctacgagcgagccaacgggcacgtccagatcctccagaagagcgtgcacatcccgtttctgctcggcagcaccctcttcttcatcggcggcgtcgtcaaccggaacgacgtccacggccactcctcccacagcttcaccctactggggaggagctgggcgtggtactgcctgttcgggagcttgctgttcttggcgggagggctgctgaacctgctcaaggtgttcaagatgcagcagatgggcgggcgggggctcgagaagctgcgcggcggcgcgcaggagcggcttagcagggagagggagggcaaggtgcctctcatcctggaggagggccggagggggaagcacggaggcaatgtaggggatacctgggcgccgccggcgccgcggtacgagccgagggctccgcccgttccgccgccgccggagggttcttacaaggacgctgtcgtgagcggcggcaactagtgtgattttgcagtgcaccgcggtaacgaataataagagaggacgtgccatggcagctggtagaggagaagcattggcttagggcgacgccatcctgtatttccgtatctgtacacgatgtcatgtactgtaaattatatggacttgctgcctacgattct

SEQ ID NO: 65485 - protein, 205 aa, Triticum aestivum
  peptide (1)..(205): Ceres Seq. ID no. 13584723
MLFFFLSESMEQTSQMERGHRRGLEKHGLNLLIAGPALWCLGSIHNMCQVYERANGHVQILQKSVHIPFLLGSTLFFIGGVVNRNDVHGHSSHSFTLLGRSWAWYCLFGSLLFLAGGLLNLLKVFKMQQMGGRGLEKLRGGAQERLSREREGKVPLILEEGRRGKHGGNVGDTWAPPAPRYEPRAPPVPPPPEGSYKDAVVSGGN

SEQ ID NO: 65486 - protein, 196 aa, Triticum aestivum
  peptide (1)..(196): Ceres Seq. ID no. 13584724
MEQTSQMERGHRRGLEKHGLNLLIAGPALWCLGSIHNMCQVYERANGHVQILQKSVHIPFLLGSTLFFIGGVVNRNDVHGHSSHSFTLLGRSWAWYCLFGSLLFLAGGLLNLLKVFKMQQMGGRGLEKLRGGAQERLSREREGKVPLILEEGRRGKHGGNVGDTWAPPAPRYEPRAPPVPPPPEGSYKDAVVSGGN

SEQ ID NO: 65487 - protein, 190 aa, Triticum aestivum
  peptide (1)..(190): Ceres Seq. ID no. 13584725
MERGHRRGLEKHGLNLLIAGPALWCLGSIHNMCQVYERANGHVQILQKSVHIPFLLGSTLFFIGGVVNRNDVHGHSSHSFTLLGRSWAWYCLFGSLLFLAGGLLNLLKVFKMQQMGGRGLEKLRGGAQERLSREREGKVPLILEEGRRGKHGGNVGDTWAPPAPRYEPRAPPVPPPPEGSYKDAVVSGGN

SEQ ID NO: 65488 - DNA, 1448 bp, Triticum aestivum
  misc_feature (1)..(1448): Ceres Seq. ID no. 13584805
gtggactcctagccagccccttcacctcttcgggcttctgtggcgagccgagttttccggcggaggcgagccatggccgcagcggaggaaacggccgtgggaaccgctgcggaggggagcgacctgcgctccttcttctcgacgcgcggcgtcgccgccgatcttgctgcgttggacgaccagaccctcaaggcgctggacgagaagtacattatcgccagggacctcgacgccgccacggtgctctccaagatccaccacttggtggggcacagcgaagccagcatcgtcccctacgaagggctgtcctaccagcttccgtgccgtgacccggggcagcacgagtacgaccccacactccggcagctttgcctgcgccgcggcaaggtcgaaacttgcacggtcggcgaccccaggacctcgcgcaaggccgagatcatcacggccacgctatccttggtcaagaagaccgtcctgagtggccatcgctcgtttagcgacggtctgcgctacggcgatgaagtcttcaagcaggacaagaagaccgtggatgatgccctgctggacatctgctgcctactcgagtgcccaagggcatctctcaaaatgcttgaacttggtccgggcacggtcgttgggccactgatattcacaatggaagatggggcagagaaccattgcaggtcattcggtccgagtggagcccgggtacatgaggggatctctaatattactgtcgaacaaggcgcaacggtcaatttcatcctactagtccagagggatgatgttttttgggattttgctcggtcgcaactccgccacgaattgaattgtgtggtcatgacaggcggcgatggggaaccaaatgtcatgacacgggctttcttgcgcaaactcaaggattgtctgtctgtccctgtgtatgctctcaccgattcagatccagagggaatttcgatcttttgtacctacaagtttggatcagcagagatgccatttgacaatgtgggtcttaccattcctgatatcaagttgattgcgtatataggtgatgatgcccttcatttgagtcaccttcaaccgctggccaagcgcgacagatcgattcttaagggattgtgtgcccaaaagcatgtaataggtgatgaacaattgagggagaacatacatttcatgatgaacaggggcttaaaatgcaaaatcgaagctttatattatcttcagtaccctcctactgactacatccgcaaagcagtaggcaatctggaggacatctaagtagctcgttgtgtttaactttggtagagagacatctatgtagtttgccatgttgactttagaggataatcttctaagttagttcatgttgggtgtgcaaactatggttactactagattgtgcatgcacttatgttgtcacaatctaggttattaatgctccagattcc

SEQ ID NO: 65489 - protein, 401 aa, Triticum aestivum
  peptide (1)..(401): Ceres Seq. ID no. 13584806
MAAAEETAVGTAAEGSDLRSFFSTRGVAADLAALDDQTLKALDEKYIIARDLDAATVLSKIHHLVGHSEASIVPYEGLSYQLPCRDPGQHEYDPTLRQLCLRRGKVETCTVGDPRTSRKAEIITATLSLVKKTVLSGHRSFSDGLRYGDEVFKQDKKTVDDALLDICCLLECPRASLKMLELGPGTVVGPLIFTMEDGAENHCRSFGPSGARVHEGISNITVEQGATVNFILLVQRDDVFWDFARSQLRHELNCVVMTGGDGEPNVMTRAFLRKLKDCLSVPVYALTDSDPEGISIFCTYKFGSAEMPFDNVGLTIPDIKLIAYIGDDALHLSHLQPLAKRDRSILKGLCAQKHVIGDEQLRENIHFMMNRGLKCKIEALYYLQYPPTDYIRKAVGNLEDI

SEQ ID NO: 65490 - protein, 223 aa, Triticum aestivum
  peptide (1)..(223): Ceres Seq. ID no. 13584807
MLELGPGTVVGPLIFTMEDGAENHCRSFGPSGARVHEGISNITVEQGATVNFILLVQRDDVFWDFARSQLRHELNCVVMTGGDGEPNVMTRAFLRKLKDCLSVPVYALTDSDPEGISIFCTYKFGSAEMPFDNVGLTIPDIKLIAYIGDDALHLSHLQPLAKRDRSILKGLCAQKHVIGDEQLRENIHFMMNRGLKCKIEALYYLQYPPTDYIRKAVGNLEDI

SEQ ID NO: 65491 - protein, 207 aa, Triticum aestivum
  peptide (1)..(207): Ceres Seq. ID no. 13584808
MEDGAENHCRSFGPSGARVHEGISNITVEQGATVNFILLVQRDDVFWDFARSQLRHELNCVVMTGGDGEPNVMTRAFLRKLKDCLSVPVYALTDSDPEGISIFCTYKFGSAEMPFDNVGLTIPDIKLIAYIGDDALHLSHLQPLAKRDRSILKGLCAQKHVIGDEQLRENIHFMMNRGLKCKIEALYYLQYPPTDYIRKAVGNLEDI

SEQ ID NO: 65492 - DNA, 2135 bp, Triticum aestivum
  misc_feature (1)..(2135): Ceres Seq. ID no. 13656138
aaaccctaaagccccctcgtcccgtcctcctcctccgcatctcaaccctaaccaaacccactcaaccctcgcgccgccgcctccggatccatccgcatcgccgccgccgccgccgccgccgcgagcatgggcttcgacgtgggcgtcgtccccttcaacccggacggctggggccctcccgacttgccgggcgcggcgccgctgctgggcggggccgtcgcgacggcctcgatccccttcgcgcccttctcccgctccgacaagctgggccgcatcgccgactggacgcgcaacccgggccacccgggcgcgcacggccaccacggcgcggccgccgcctcccgcgactcggtcttcgacttctcctcggccgacgactcgctcgccgccgccgccgaggactcgtccttcagcctcgtcgacgccaagccgccgcccaagcacccgcgcttcgggcccaagtggcgcttcaaccagcggccccagctcccccagcgccgcgacgaggaggtcgaggccaagcgccgcgaggccgagaaggagcgcgcccgccgcgagcgccactaccagaaccaccgctcccaccaccaccagggcttccgcggcaaccagcagaacaccgccaagccctcggtcgacatccagcccgactggaccatcctcgagcagatccccttcgccaacttcaccaagctctccttcgccgtcgccgaccagcccgaggacctgctcgtctgcggcgccgtcgactcgtacgaccgcgcctacgaccgcgtcaaccccaagacggcccgccgcctcgagcgcttcaagaaccgccagttcttcaagatcaccaccaccgacgaccccatcatccgccgcctcgccgaggaggacaaggccaccgtcttcgccaccgacgccatcctcgccgccctcatgtgcacgccccgcagcatcctctcctgggacattgtcgtgcagcgcgtcggcaacaagctcttcttcgacaagcgcgagggctcccagctcgatctgctcactgtcaacgagactgcgcaggagcagctccctgagaacaaggatgacatcaattccgcgccggcccttgctgtcgaggccacctacatcaaccagaacttctcgcagcaggtgctggtgcgtgatggcgagaaggttacctttgatgagcctaacccgtttgcctctgagaatgaggaggcggcgcctgtttgctaccgttatcgccgctggaagctggatgatgatattagcatcattgcccgctgtgaagtgcatgctgctggtgttgatcccagtggtgctcgccagttcctcacgcttaatgcactcaatgagtttgatcctaagattactggtgttgactggaagcagaagctcgagtcccagcgtggtgctgtgcttgctacagagctcaagaacaatgccaacaagctcgctcgctggactgcccaggctttactttctggtgctgacatgatgaagttgggttatgtgtcacgtgtgcacccccgcgaccacttcaaccactccatactcactgtgatgggctacaagccaagggattttgctacccagatcaacctcaacactgcaaacatgtggggcattgtcaagtcgattgtggacatctgcatgaagtttgaagagggaaagtatgtgcttgtgaaagatcctgccaagccacagatgaggatttatcaggttcctaatgatgcatttgagaatgattatgttgaagagccacttccagaggaggagcagattcgtccggctacagatgatgtcgatgctactgcacaggagatggatgctgctgccgaggcagaggctaataaagcaactactcagggtggtgagggtgagaagagtgcagatgctgctgctgcttgaagggtataatgggccatctttgctttatctagataatgtgtcttttctgttttatgacctgtttttgtggattaaagagttgaactgccttgtcttgatacagtggtcttgttttggtccatgagaaaacttggtactcttaaatttcatgcttagatgtgctaagcttagcacctaccgttttggattaatgactattctggtagttgaatattgattatatgtgattgatctgctgt

SEQ ID NO: 65493 - protein, 589 aa, Triticum aestivum
  peptide (1)..(589): Ceres Seq. ID no. 15219799
MGFDVGVVPFNPDGWGPPDLPGAAPLLGGAVATASIPFAPFSRSDKLGRIADWTRNPGHPGAHGHHGAAAASRDSVFDFSSADDSLAAAAEDSSFSLVDAKPPPKHPRFGPKWRFNQRPQLPQRRDEEVEAKRREAEKERARRERHYQNHRSHHHQGFRGNQQNTAKPSVDIQPDWTILEQIPFANFTKLSFAVADQPEDLLVCGAVDSYDRAYDRVNPKTARRLERFKNRQFFKITTTDDPIIRRLAEEDKATVFATDAILAALMCTPRSILSWDIVVQRVGNKLFFDKREGSQLDLLTVNETAQEQLPENKDDINSAPALAVEATYINQNFSQQVLVRDGEKVTFDEPNPFASENEEAAPVCYRYRRWKLDDDISIIARCEVHAAGVDPSGARQFLTLNALNEFDPKITGVDWKQKLESQRGAVLATELKNNANKLARWTAQALLSGADMMKLGYVSRVHPRDHFNHSILTVMGYKPRDFATQINLNTANMWGIVKSIVDICMKFEEGKYVLVKDPAKPQMRIYQVPNDAFENDYVEEPLPEEEQIRPATDDVDATAQEMDAAAEAEANKATTQGGEGEKSADAAAA

SEQ ID NO: 65494 - protein, 493 aa, Triticum aestivum
  peptide (1)..(493): Ceres Seq. ID no. 15219800
NPKAPSSRPPPPHLNPNQTHSTLAPPPPDPSASPPPPPPPRAWASTWASSPSTRTAGALPTCRARRRCWAGPSRRPRSPSRPSPAPTSWAASPTGRATRATRARTATTARPPPPATRSSTSPRPTTRSPPPPRTRPSASSTPSRRPSTRASGPSGASTSGPSSPSAATRRSRPSAARPRRSAPAASATTRTTAPTTTRASAATSRTPPSPRSTSSPTGPSSSRSPSPTSPSSPSPSPTSPRTCSSAAPSTRTTAPTTASTPRRPAASSASRTASSSRSPPPTTPSSAASPRRTRPPSSPPTPSSPPSCARPAASSPGTLSCSASATSSSSTSARAPSSICSLSTRLRRSSSLRTRMTSIPRRPLLSRPPTSTRTSRSRCWCVMARRLPLMSLTRLPLRMRRRRLFATVIAAGSWMMILASLPAVKCMLLVLIPVVLASSSRLMHSMSLILRLLVLTGSRSSSPSVVLCLLQSSRTMPTSSLAGLPRLYFLVLT

SEQ ID NO: 65495 - protein, 351 aa, Triticum aestivum
  peptide (1)..(351): Ceres Seq. ID no. 15219801
TLKPPRPVLLLRISTLTKPTQPSRRRLRIHPHRRRRRRRREHGLRRGRRPLQPGRLGPSRLAGRGAAAGRGRRDGLDPLRALLPLRQAGPHRRLDAQPGPPGRARPPRRGRRLPRLGLRLLLGRRLARRRRRGLVLQPRRRQAAAQAPALRAQVALQPAAPAPPAPRRGGRGQAPRGREGARPPRAPLPEPPLPPPPGLPRQPAEHRQALGRHPARLDHPRADPLRQLHQALLRRRRPARGPARLRRRRLVRPRLRPRQPQDGPPPRALQEPPVLQDHHHRRPHHPPPRRGGQGHRLRHRRHPRRPHVHAPQHPLLGHCRAARRQQALLRQARGLPARSAHCQRDCAGAAP

SEQ ID NO: 65496 - DNA, 1420 bp, Triticum aestivum
  misc_feature (1)..(1420): Ceres Seq. ID no. 13598597
agtacacacctcggtttggaacttggaagtcgagacacatacacacacacatactagatacatatccatacttctgttgctcattgcatctcctagttcagcaaattgccaaactgagacatgggaattgatcgtgtcaacacggcagccactggccgcggacgcaccgtctgtgtgaccggcgccggcggtttcatcgcgtcctggctagtgaagctcctcctggagaagggctacgccgtccacggcaccgtccggaaccctgatgacgtggcaaggaatgcgcacctgagagccttggaaggggcgacggagcgactgaccctcttccaggtggacctgcttgacaaggagagcctcgtcgctgctttccaaggatgcgaaggcgtattccacaccgcatgccccgtcaccgatgacccggaaaaaatgatcgagccggcagtgaacggaacgagaaacgtgttcaacgccgcggcagaggtgggcggcatccggcgtgtggtaatgacgtcgtcgatcggctccgtgtacatggatcctcgtcgtagcatcgatggggaggccgatgagacatgttggagcgacctcgagttctgcaagaacacaaagaattggtactgctatgcgaagacggtggcggagcaggccgcatgggagctcgccaaggagaggaagcttgaccttgtggtgatcaacccgtctctagtgttgggccctctgctacagatggcggtgaacgccagtacgtggcatattgccaagtatctggacggctcggtgcagacgtatgccaacgcggcacaggcgtacgtgcacgtccaggacgtcgcggacgcgcacgcgcgtgcgtacgagacgcccgatgcgcatggccggtacctctgcgcggggcgcacgctgcaccgtgccgaggtgtgtcgcatccttgccaagttcttcccggagtaccccgtgcccacgaggtgcaaggaaggggcgggcgagatgaagaagggttgtcggttcagcagtcggaggatcatggatctcggcgtcggcatcacgccggcgagccagtgtctctacgacacggtcaccagccttcaggacaagggcatcttaccacgtcgcgacgctgatatgtcctgacaactccatggtcaccttggtcaagttagcagcatgcatgcccgcttgatgattacaaagtcatggcatttaattctttatttacttcttagttgttcaaatataaggccctgtccagagcacctccaccccacaactccactccccaagttgatggagttacagttgaaaactgtggagcagctatttcctggctccacagctcccagaatttcgtggagctggtggatttccgaacaggccctaagtgtccattgtaaaagaatatgttatgatatgatgtttatcc

SEQ ID NO: 65497 - protein, 336 aa, Triticum aestivum
  peptide (1)..(336): Ceres Seq. ID no. 13598598
MGIDRVNTAATGRGRTVCVTGAGGFIASWLVKLLLEKGYAVHGTVRNPDDVARNAHLRALEGATERLTLFQVDLLDKESLVAAFQGCEGVFHTACPVTDDPEKMIEPAVNGTRNVFNAAAEVGGIRRVVMTSSIGSVYMDPRRSIDGEADETCWSDLEFCKNTKNWYCYAKTVAEQAAWELAKERKLDLVVINPSLVLGPLLQMAVNASTWHIAKYLDGSVQTYANAAQAYVHVQDVADAHARAYETPDAHGRYLCAGRTLHRAEVCRILAKFFPEYPVPTRCKEGAGEMKKGCRFSSRRIMDLGVGITPASQCLYDTVTSLQDKGILPRRDADMS

SEQ ID NO: 65498 - protein, 233 aa, Triticum aestivum
  peptide (1)..(233): Ceres Seq. ID no. 13598599
MIEPAVNGTRNVFNAAAEVGGIRRVVMTSSIGSVYMDPRRSIDGEADETCWSDLEFCKNTKNWYCYAKTVAEQAAWELAKERKLDLVVINPSLVLGPLLQMAVNASTWHIAKYLDGSVQTYANAAQAYVHVQDVADAHARAYETPDAHGRYLCAGRTLHRAEVCRILAKFFPEYPVPTRCKEGAGEMKKGCRFSSRRIMDLGVGITPASQCLYDTVTSLQDKGILPRRDADMS

SEQ ID NO: 65499 - protein, 207 aa, Triticum aestivum
  peptide (1)..(207): Ceres Seq. ID no. 13598600
MTSSIGSVYMDPRRSIDGEADETCWSDLEFCKNTKNWYCYAKTVAEQAAWELAKERKLDLVVINPSLVLGPLLQMAVNASTWHIAKYLDGSVQTYANAAQAYVHVQDVADAHARAYETPDAHGRYLCAGRTLHRAEVCRILAKFFPEYPVPTRCKEGAGEMKKGCRFSSRRIMDLGVGITPASQCLYDTVTSLQDKGILPRRDADMS

SEQ ID NO: 65500 - DNA, 1493 bp, Triticum aestivum
  misc_feature (1)..(1493): Ceres Seq. ID no. 15226223
tccgatgcatgccatggcggagcccggcggcgcgctcgacccccctcctcccccctctccggctgcgccgaccccgccggtccagtggcccaaggacggctcgctcgacccgcctccttccccctctccggtcgcgcagcccccgccggtcgagtggcccgaggacggcgtgctgacgcgggactgggtggccagcttcaccgcggcgctggactggtgctcgcggagcatcccgccggaccagctcccctcggtgctctccgcggatttcgtgcggcggctcgtcgtcgccgcggccgtcatcctccaccgcgagcccaacatcgtccgcgtcgacccgcggcccgaccagtccgtcgtcgtcgtgggggacgtccacggccagctccacgatgtcatgttcctgctccgggacgccgggttcccctcggaggagcgaatctttgtctttaacggggattacgtggatcgcggcgcttggggcctcgagaccttgctcctcctcctggcttggaaggtattccttccaaattgtgtgtttcttctccgaggaaatcatgaatccaagtactgcacgtcagtatatggtttcgaacaggaggtaatggttaaatataaaggtcaaggcactcaagtttatcggaagtttttaagatgttttgaagatctccctctagcatcaataatagcaggatgtgtgtatactgctcatggagggatttttcgtggggcggttgtactaccgttgaaaaggtcgaaaagggcaaagaaaggtcacaaatataaggcgggtcctactgatgactctactactttgaagcttggatccctggacgaattgttaaaagcaaggagaactgttcttgacaccccgtatgagggttcaaacttgattcctggagatgtgctttggtctgatccttccttagataagggtctttccctgaataatgaaaggggcattggtttgctttggggtctagatatcactcaacagtttctatatacaaataatctgaagttaatcatcagatcacatgaaggcccagatgcaagagataagcggcatgatctattagcaatggacagtggatatacaatcgaccatcatgtcgcatgcggaaagttaataactctcttcagtgccccagactatccacaatttcaggcctcagtggaccgttacaacaattctggagcatatattgtcctcagtccccctgattttgctacccctgatttccatacttttcaagctgtaaagcctcggcctaaggcgcatccctactatgattttgaagacgtaattgattctgatgaagagttaaatctaggcgccatggacactggcacgtcgagcagttgatcacaacctgtattgtaattgtacttagcatgcgaattgtcaccgcgaactggagaagtggtaacgagtagttcttttgattggtactaacattgcagacttcgtaactaatattttgtcacgtcct

SEQ ID NO: 65501 - protein, 454 aa, Triticum aestivum
  peptide (1)..(454): Ceres Seq. ID no. 15226224
PMHAMAEPGGALDPPPPPSPAAPTPPVQWPKDGSLDPPPSPSPVAQPPPVEWPEDGVLTRDWVASFTAALDWCSRSIPPDQLPSVLSADFVRRLVVAAAVILHREPNIVRVDPRPDQSVVVVGDVHGQLHDVMFLLRDAGFPSEERIFVFNGDYVDRGAWGLETLLLLLAWKVFLPNCVFLLRGNHESKYCTSVYGFEQEVMVKYKGQGTQVYRKFLRCFEDLPLASIIAGCVYTAHGGIFRGAVVLPLKRSKRAKKGHKYKAGPTDDSTTLKLGSLDELLKARRTVLDTPYEGSNLIPGDVLWSDPSLDKGLSLNNERGIGLLWGLDITQQFLYTNNLKLIIRSHEGPDARDKRHDLLAMDSGYTIDHHVACGKLITLFSAPDYPQFQASVDRYNNSGAYIVLSPPDFATPDFHTFQAVKPRPKAHPYYDFEDVIDSDEELNLGAMDTGTSSS

SEQ ID NO: 65502 - protein, 453 aa, Triticum aestivum
  peptide (1)..(453): Ceres Seq. ID no. 15226225
MHAMAEPGGALDPPPPPSPAAPTPPVQWPKDGSLDPPPSPSPVAQPPPVEWPEDGVLTRDWVASFTAALDWCSRSIPPDQLPSVLSADFVRRLVVAAAVILHREPNIVRVDPRPDQSVVVVGDVHGQLHDVMFLLRDAGFPSEERIFVFNGDYVDRGAWGLETLLLLLAWKVFLPNCVFLLRGNHESKYCTSVYGFEQEVMVKYKGQGTQVYRKFLRCFEDLPLASIIAGCVYTAHGGIFRGAVVLPLKRSKRAKKGHKYKAGPTDDSTTLKLGSLDELLKARRTVLDTPYEGSNLIPGDVLWSDPSLDKGLSLNNERGIGLLWGLDITQQFLYTNNLKLIIRSHEGPDARDKRHDLLAMDSGYTIDHHVACGKLITLFSAPDYPQFQASVDRYNNSGAYIVLSPPDFATPDFHTFQAVKPRPKAHPYYDFEDVIDSDEELNLGAMDTGTSSS

SEQ ID NO: 65503 - protein, 450 aa, Triticum aestivum
  peptide (1)..(450): Ceres Seq. ID no. 15226226
MAEPGGALDPPPPPSPAAPTPPVQWPKDGSLDPPPSPSPVAQPPPVEWPEDGVLTRDWVASFTAALDWCSRSIPPDQLPSVLSADFVRRLVVAAAVILHREPNIVRVDPRPDQSVVVVGDVHGQLHDVMFLLRDAGFPSEERIFVFNGDYVDRGAWGLETLLLLLAWKVFLPNCVFLLRGNHESKYCTSVYGFEQEVMVKYKGQGTQVYRKFLRCFEDLPLASIIAGCVYTAHGGIFRGAVVLPLKRSKRAKKGHKYKAGPTDDSTTLKLGSLDELLKARRTVLDTPYEGSNLIPGDVLWSDPSLDKGLSLNNERGIGLLWGLDITQQFLYTNNLKLIIRSHEGPDARDKRHDLLAMDSGYTIDHHVACGKLITLFSAPDYPQFQASVDRYNNSGAYIVLSPPDFATPDFHTFQAVKPRPKAHPYYDFEDVIDSDEELNLGAMDTGTSSS

SEQ ID NO: 65504 - DNA, 1358 bp, Triticum aestivum
  misc_feature (1)..(1358): Ceres Seq. ID no. 13655992
atcctaatcaaaaacccatcaaacagccctcgcgaactcaacgggaagcgactcacgcccccctccgccccccgcagatcgcccgctccgccacgcgccgccgacgccgccgccaatggccgccgccgccgacgccgggcccgagctgcggcggagctccagcatcgaccgcatcccggcggaggcgcgccgcatcctgcaccgcctcgccggcgagctctggggcgccgacgtcgaccccgccgcgctcgtcgtgtcccagctcaagggcgccctcaccaacgaggtcttccgcatcacctggcccggcggcgagggcgacccgcgcaaggtgctcgtgcgcatctacggccagggcgtcgaggtcttcttcgaccgcgccgacgaggtccgcaccttcgagtgcatgtcccgccacggccagggcccccgcctcctcggccgcttcccccagggccgcgtcgaggagttcatcaacgccaggacgctctcggcgccggatctgcgcgacccggagatttccggcctgattgccaggaagctgcgggagtttcacgagctcgacatgcctggacccaaggacatctcactctggcagaggctgaggcgttggcttgaggaagctcgcagcaggtgctcgactgaggaggccagggaattgcggttggagacgctcggcgatgagattgcggagctggagaatgtattgtccggggtcgatcagagagtagtattttgccataatgatttgcagtatggcaacattatgatatacgaagagaccagacaagtgaccttaatcgactatgaatacgccagttttaaccctgttgcgttcgacattgcgaatcacttctgtgagatggctgctgattatcatagtgatacaccgcacgtgatggactttacaaaatatcctgacgtggatgaacagcggagatttcttgaggcttaccttagttcttcaggagaaaacacatccgatgtagaagtcgaaacattgcttggcttgattgcaaagtacagtctcacaagccatctcttctggggtctctggggaatagtctcggcgcatgtgaacaagaacatcgactttgagtacaaggagtacgcgaggcatcggttcgaccagtactgggacacgaagcctagaatactgcaagcctgcaacccaaccagctgatcacgcgcatggctcattctttttcttattatagcacccatcgcctctcgagtagctctgtagagtcctgtgactgaatcttgttcatcagccaatttggttgcaaatcgtttaggctagtagttgaccgtgtcgtgtaattaaacctgcgcagaatagtcgattctacggtttt

SEQ ID NO: 65505 - protein, 355 aa, Triticum aestivum
  peptide (1)..(355): Ceres Seq. ID no. 13655993
MAAAADAGPELRRSSSIDRIPAEARRILHRLAGELWGADVDPAALVVSQLKGALTNEVFRITWPGGEGDPRKVLVRIYGQGVEVFFDRADEVRTFECMSRHGQGPRLLGRFPQGRVEEFINARTLSAPDLRDPEISGLIARKLREFHELDMPGPKDISLWQRLRRWLEEARSRCSTEEARELRLETLGDEIAELENVLSGVDQRVVFCHNDLQYGNIMIYEETRQVTLIDYEYASFNPVAFDIANHFCEMAADYHSDTPHVMDFTKYPDVDEQRRFLEAYLSSSGENTSDVEVETLLGLIAKYSLTSHLFWGLWGIVSAHVNKNIDFEYKEYARHRFDQYWDTKPRILQACNPTS

SEQ ID NO: 65506 - protein, 258 aa, Triticum aestivum
  peptide (1)..(258): Ceres Seq. ID no. 13655994
MSRHGQGPRLLGRFPQGRVEEFINARTLSAPDLRDPEISGLIARKLREFHELDMPGPKDISLWQRLRRWLEEARSRCSTEEARELRLETLGDEIAELENVLSGVDQRVVFCHNDLQYGNIMIYEETRQVTLIDYEYASFNPVAFDIANHFCEMAADYHSDTPHVMDFTKYPDVDEQRRFLEAYLSSSGENTSDVEVETLLGLIAKYSLTSHLFWGLWGIVSAHVNKNIDFEYKEYARHRFDQYWDTKPRILQACNPTS

SEQ ID NO: 65507 - protein, 205 aa, Triticum aestivum
  peptide (1)..(205): Ceres Seq. ID no. 13655995
MPGPKDISLWQRLRRWLEEARSRCSTEEARELRLETLGDEIAELENVLSGVDQRVVFCHNDLQYGNIMIYEETRQVTLIDYEYASFNPVAFDIANHFCEMAADYHSDTPHVMDFTKYPDVDEQRRFLEAYLSSSGENTSDVEVETLLGLIAKYSLTSHLFWGLWGIVSAHVNKNIDFEYKEYARHRFDQYWDTKPRILQACNPTS

SEQ ID NO: 65508 - DNA, 1289 bp, Triticum aestivum
  misc_feature (1)..(1289): Ceres Seq. ID no. 13597662
gaactgaacccggaagtccaaagccaacccgtcgcgcagaataacctctcgactctcgagcgcctcctccccgaaccccgaccgtccgctccgcccaccctgcgccaaaatcaaacccccgctcgtccgctccggtgatccgccgctccgggaggcgaagccccacgacccgaccgcgcggagcctctgcccgccatgaccgagtattgggtgagccaaggaaacaaatggtgcgacttgtgcaaaatcttcatatccaacaatcccttcagcatcagaacacatgaactcggcaaacgccacaaggacaatgtcacccaaagattgtctacgatgcaaaaggatggtgctgctaaggaaaaggagcagcaacaagcagcaaaagctctccaactgatagaggctaaagctaaaaagagttaccagaaagatttagagaataaccagagaaacactgatggtgacagttctgcagcacctggagaaggatgggtatttgactcaacttcaggatattattatgataaagccactggactttattacgactcgaactctggtttctattattccgacggattaggcaaatgggtaacccaggaagaggcatacaagtgggcggaaacctcaaaaaccaatgttgcgcaatcctcgacctcgcaaccaaaaccggctggtggaggcgggcctgtcgccggtattaaaggagggccagccccaggtgtggttgtcacgaaaccactgaatccgatgagagctgtgaagggtgctccttcagctcttgctgctaataagagaaaaagagaggacaccaagaagcccaaggtggtctcgaaggaggaggaggcagcactcagagcacgggaagcagctcggaaaagagtggaggacagggagaagcctctcatgggattgtacaagacgtactgagttgtcaatgttcccaagctcaaggggcgcgcccatcagttgcgctaaaacagtggagatgctaatggatggaattgttctgaaagaaaagacggggagaccagcactgagtcccgagctcttgagcgtcagtggcacatgtatgcattgtacaatacctcgtcaaaagttcctaaatcagccacaggttccctttgtgcgaaacatgtaaatgatcagctcatcgattatcatctctcgtgttgtgttttcccaatggattgcatgcatgatataatgccgtcaactgtggccgatgtgagcgctgctggagatagattgtactgccatctctacatcatcagttcatttaagttgtg

SEQ ID NO: 65509 - protein, 244 aa, Triticum aestivum
  peptide (1)..(244): Ceres Seq. ID no. 13597663
MTEYWVSQGNKWCDLCKIFISNNPFSIRTHELGKRHKDNVTQRLSTMQKDGAAKEKEQQQAAKALQLIEAKAKKSYQKDLENNQRNTDGDSSAAPGEGWVFDSTSGYYYDKATGLYYDSNSGFYYSDGLGKWVTQEEAYKWAETSKTNVAQSSTSQPKPAGGGGPVAGIKGGPAPGVVVTKPLNPMRAVKGAPSALAANKRKREDTKKPKVVSKEEEAALRAREAARKRVEDREKPLMGLYKTY

SEQ ID NO: 65510 - protein, 198 aa, Triticum aestivum
  peptide (1)..(198): Ceres Seq. ID no. 13597664
MQKDGAAKEKEQQQAAKALQLIEAKAKKSYQKDLENNQRNTDGDSSAAPGEGWVFDSTSGYYYDKATGLYYDSNSGFYYSDGLGKWVTQEEAYKWAETSKTNVAQSSTSQPKPAGGGGPVAGIKGGPAPGVVVTKPLNPMRAVKGAPSALAANKRKREDTKKPKVVSKEEEAALRAREAARKRVEDREKPLMGLYKTY

SEQ ID NO: 65511 - DNA, 550 bp, Triticum aestivum
  misc_feature (1)..(550): Ceres Seq. ID no. 13656096
aaaccacacccaaacacgtagtgcacctcctccactaaaagatcatcagccttcagcagagctacactagctccaagccaccgagagaaaaatggccggcttctcgtgcacgagcacgagccatgctgcagttgcactggtttcggcgctgctgctgagcctcgcgcacggcttgctgggggctcatggagccaggaggctcatggagctgtacaagccggaccccagcgagctcctcacttaccacaacggcgccgtgctgcagggcgccatcccggtcaccgtgctctggtacggccgcttcacgccggtccagaaggccgtcgtctccgacttcctcctctcgctcaccgccgcctccccggcgccgaccccgtccgtctcgcagtggtggggcaccatcgcccagctctacctctccaaggccaagggcgccaacgccaagcgcgcgacgcaggtagcgctcgccgggcaggtctccgaagagcgctgctcgctcgggaagagcctcgcgctgcccccaagctcgcggcgctggccgccagggcca

SEQ ID NO: 65512 - protein, 153 aa, Triticum aestivum
  peptide (1)..(153): Ceres Seq. ID no. 13656097
MAGFSCTSTSHAAVALVSALLLSLAHGLLGAHGARRLMELYKPDPSELLTYHNGAVLQGAIPVTVLWYGRFTPVQKAVVSDFLLSLTAASPAPTPSVSQWWGTIAQLYLSKAKGANAKRATQVALAGQVSEERCSLGKSLALPPSSRRWPPGP

SEQ ID NO: 65513 - protein, 116 aa, Triticum aestivum
  peptide (1)..(116): Ceres Seq. ID no. 13656098
MELYKPDPSELLTYHNGAVLQGAIPVTVLWYGRFTPVQKAVVSDFLLSLTAASPAPTPSVSQWWGTIAQLYLSKAKGANAKRATQVALAGQVSEERCSLGKSLALPPSSRRWPPGP

SEQ ID NO: 65514 - protein, 91 aa, Triticum aestivum
  peptide (1)..(91): Ceres Seq. ID no. 13656099
MEPGGSWSCTSRTPASSSLTTTAPCCRAPSRSPCSGTAASRRSRRPSSPTSSSRSPPPPRRRPRPSRSGGAPSPSSTSPRPRAPTPSARRR

SEQ ID NO: 65515 - DNA, 1993 bp, Triticum aestivum
  misc_feature (1)..(1993): Ceres Seq. ID no. 13585587
ttcagactcctccctctttcggtctctacgacacgtttctttctctctccctctcccctcggctaccaaggcgtctctctcttctccaaggaggctctcgatttgcatggacaagggccacctcggtggtggcggaggaggaggaggactgctagccctggacgcctcgccgcggcagctcggcttcttgaacttgctgtcgccggcgccgttccataggagcatggaggcggacgacggcggaggcggtggcggcggcggcagggggaggaggtccatcgaggttgacttcttttccgacgagaagaagaacatgaagaagagccgggcttcgtccggggccgacgcggaggaccacaaggatcaagcctccgccgccggactcgccatcaagaaggaggacctcaccattaacctccttcccgggaacaacacgaggagcgaccggtccatggtggtcgacgacgacggagcgtcccgggccgaccaagacaggaacggcaggaacaccggcgagctggcggtgatacaggccgagctgagccgcatgaacgaggagaaccagcggctgcgagggatgttgacccaggtcaacaacagctaccatgcgctgcagatgcatctcgtcgcgctcatgcagcaaaggacccagatgcctccggtccagccgcaacaacctccgacccacgaggatggcaagaacgagagtgccatcgtgccgaggcagttcctgggtctgggcccgtcgggagccagcgctgacgtggcggaagagccctccaactcgtccacggaggtcgggagcccgcggcggtcgtcgtccaacggaaacgaggaccctgagcgcggcgaaaaccctgacggcccgtccaccgcggggtggttgcccggacgcgggatgagccagcagcagcagcagcagctgggggcggcggcgaagggccacgaccagcaagcgcaggaggccaccatgaggaaggcccgtgtctccgttcgcgcccgatccgaagccccgattatcgccgatggatgccaatggaggaagtacggtcagaagatggccaagggaaacccttgcccacccgcctactaccggtgcaccatggccaccggctgcccggtgcgcaagcaggtgcaacgatgcgccgaggaccggaccatcctcatcaccacgtacgagggcacgcacaaccacccgctcccgccggccgccatggccatggcgtctaccacgtcggccgctgcgtccatgctgctctccggctccatgcccagcgccgacggcgcggggctcatgagctccaacttcctcgcgcgcaccgtgcttccgtgctcgtccagcatggccaccatctcggcgtccgcgccgttcccgacggtcacgctcgacctcacccacgccccgcccggggcgcccaacgccatgccgctaaacgtcgcccgaccgcatgcaccggggcagttccatgttccgatgcccggcggtgggatggccccggccttcgcgatgccgccgcacatgctgtacaaccagtccaagttctctgggctgcagatgtcctccgactcggtggacgccgggcagttcgcgcagcctaggccgccgatgggcctgccaggccagctgtcagacaccgtcagcgcagcggcggctgcgatcaccgcggacccgaacttcaccgtggcgctcgcggcggccatctcgtcgatcatggccggccagcacgccgccggcaacagcaacgctaacaacagcaataataacaccagtaacaacaacgtgacgacgaccagtaacaacacgacgagcaacaacaccaacagcgagactcaatgaacggcttcgtcaagttcggaaagagttgagaaaccagatagctaggttgcaagttatacacggatggtgttccattcttctttggtcaggattagcttctcgagacgtttctttggttttgataccaagcattatatacgatcaccctttttcttt

SEQ ID NO: 65516 - protein, 611 aa, Triticum aestivum
  peptide (1)..(611): Ceres Seq. ID no. 13585588
SDSSLFRSLRHVSFSLPLPSATKASLSSPRRLSICMDKGHLGGGGGGGGLLALDASPRQLGFLNLLSPAPFHRSMEADDGGGGGGGGRGRRSIEVDFFSDEKKNMKKSRASSGADAEDHKDQASAAGLAIKKEDLTINLLPGNNTRSDRSMVVDDDGASRADQDRNGRNTGELAVIQAELSRMNEENQRLRGMLTQVNNSYHALQMHLVALMQQRTQMPPVQPQQPPTHEDGKNESAIVPRQFLGLGPSGASADVAEEPSNSSTEVGSPRRSSSNGNEDPERGENPDGPSTAGWLPGRGMSQQQQQQLGAAAKGHDQQAQEATMRKARVSVRARSEAPIIADGCQWRKYGQKMAKGNPCPPAYYRCTMATGCPVRKQVQRCAEDRTILITTYEGTHNHPLPPAAMAMASTTSAAASMLLSGSMPSADGAGLMSSNFLARTVLPCSSSMATISASAPFPTVTLDLTHAPPGAPNAMPLNVARPHAPGQFHVPMPGGGMAPAFAMPPHMLYNQSKFSGLQMSSDSVDAGQFAQPRPPMGLPGQLSDTVSAAAAAITADPNFTVALAAAISSIMAGQHAAGNSNANNSNNNTSNNNVTTTSNNTTSNNTNSETQ

SEQ ID NO: 65517 - protein, 576 aa, Triticum aestivum
  peptide (1)..(576): Ceres Seq. ID no. 13585589
MDKGHLGGGGGGGGLLALDASPRQLGFLNLLSPAPFHRSMEADDGGGGGGGGRGRRSIEVDFFSDEKKNMKKSRASSGADAEDHKDQASAAGLAIKKEDLTINLLPGNNTRSDRSMVVDDDGASRADQDRNGRNTGELAVIQAELSRMNEENQRLRGMLTQVNNSYHALQMHLVALMQQRTQMPPVQPQQPPTHEDGKNESAIVPRQFLGLGPSGASADVAEEPSNSSTEVGSPRRSSSNGNEDPERGENPDGPSTAGWLPGRGMSQQQQQQLGAAAKGHDQQAQEATMRKARVSVRARSEAPIIADGCQWRKYGQKMAKGNPCPPAYYRCTMATGCPVRKQVQRCAEDRTILITTYEGTHNHPLPPAAMAMASTTSAAASMLLSGSMPSADGAGLMSSNFLARTVLPCSSSMATISASAPFPTVTLDLTHAPPGAPNAMPLNVARPHAPGQFHVPMPGGGMAPAFAMPPHMLYNQSKFSGLQMSSDSVDAGQFAQPRPPMGLPGQLSDTVSAAAAAITADPNFTVALAAAISSIMAGQHAAGNSNANNSNNNTSNNNVTTTSNNTTSNNTNSETQ

SEQ ID NO: 65518 - protein, 537 aa, Triticum aestivum
  peptide (1)..(537): Ceres Seq. ID no. 13585590
MEADDGGGGGGGGRGRRSIEVDFFSDEKKNMKKSRASSGADAEDHKDQASAAGLAIKKEDLTINLLPGNNTRSDRSMVVDDDGASRADQDRNGRNTGELAVIQAELSRMNEENQRLRGMLTQVNNSYHALQMHLVALMQQRTQMPPVQPQQPPTHEDGKNESAIVPRQFLGLGPSGASADVAEEPSNSSTEVGSPRRSSSNGNEDPERGENPDGPSTAGWLPGRGMSQQQQQQLGAAAKGHDQQAQEATMRKARVSVRARSEAPIIADGCQWRKYGQKMAKGNPCPPAYYRCTMATGCPVRKQVQRCAEDRTILITTYEGTHNHPLPPAAMAMASTTSAAASMLLSGSMPSADGAGLMSSNFLARTVLPCSSSMATISASAPFPTVTLDLTHAPPGAPNAMPLNVARPHAPGQFHVPMPGGGMAPAFAMPPHMLYNQSKFSGLQMSSDSVDAGQFAQPRPPMGLPGQLSDTVSAAAAAITADPNFTVALAAAISSIMAGQHAAGNSNANNSNNNTSNNNVTTTSNNTTSNNTNSETQ

SEQ ID NO: 65519 - DNA, 1402 bp, Triticum aestivum
  misc_feature (1)..(1402): Ceres Seq. ID no. 13662846
atccttcttctcactctcaggtctcagcgcgcccatcctctgccccttgggcgtctggtctggatccaagagccggccgccaactgcaatgccgtccctcctggagatcttcctgggatcctgttcctcctcggcgccgccggtggactgggaggcggaggcctacccggagtacgccgactacgccgtcctccccctgctcctcgccttcttccccgccctgcgcctcctcctcaaccagttcctcttcgaggtgttagcaagacgacttatatttggaaagggatatgacaagcttgctgaaacagatgaaaggagaaagaaaatcaataaatttaaggaatcggcatggaaatttgtttattatctttctgcagaactcttttcactatctgtaacatacaatgaatcgtggtttacaaatacaagatacttttgggtagggcctggcgagcagctgtggcccgaccaaaagatgaagctgaagcttaaggctgtatacatgtatgccgctggattttacgtatattctatctttgatcttctgttctgggaaacaagacgcaaggacttcggagtcatgatgtctcaccatgtggcaactattgttctgattgttgtgtcctatatttgcagattatctcgtcctggctcggtcattttacccctccatgatgcaagtgatatattcctagagattggaaagatggccaagtacagtagctgtgagtggctagctgttgtagcatttctactttttgtggcttcatggatccttcttcggctaatagtgtttcctttctggatcctaagaagcacaagttatgaaatagctatgatcgtggacaacgagaacagaaaaatctacagaacttcgtactactatcttttcaacactctcttgttttcacttctggtctttcacatatattggtgggtactgatttatcggatgctcgtcaaacaaattcaatccagaggtcatgttggtgaggatgtccgatccgattctgaaggcgaaaacaaccatgaagattaagctgaaggttgttggatgcttaactgaagaactgtatagttcgcagttgggaatgagaatggtgcaagcgggttgtataaagaatgagaatgtcaaggaggagctagttagcatatccattagtaggaaattcaggcacaaaacgaaaactgaaaaggctcgaatctcggtgccactggaacaagcctccttgatatgtatcttttttgtatattgaatgtataaggtgaggctatcattcagggtcttgaggcatcaatcatacatcgtgatattaatctccatatgtatgtgaagatgtcttttcagaaatactgagcctccgagttataaaaattctcttttatatatgtggtttgcttg

SEQ ID NO: 65520 - protein, 345 aa, Triticum aestivum
  peptide (1)..(345): Ceres Seq. ID no. 13662847
SFFSLSGLSAPILCPLGVWSGSKSRPPTAMPSLLEIFLGSCSSSAPPVDWEAEAYPEYADYAVLPLLLAFFPALRLLLNQFLFEVLARRLIFGKGYDKLAETDERRKKINKFKESAWKFVYYLSAELFSLSVTYNESWFTNTRYFWVGPGEQLWPDQKMKLKLKAVYMYAAGFYVYSIFDLLFWETRRKDFGVMMSHHVATIVLIVVSYICRLSRPGSVILPLHDASDIFLEIGKMAKYSSCEWLAVVAFLLFVASWILLRLIVFPFWILRSTSYEIAMIVDNENRKIYRTSYYYLFNTLLFSLLVFHIYWWVLIYRMLVKQIQSRGHVGEDVRSDSEGENNHED

SEQ ID NO: 65521 - protein, 316 aa, Triticum aestivum
  peptide (1)..(316): Ceres Seq. ID no. 13662848
MPSLLEIFLGSCSSSAPPVDWEAEAYPEYADYAVLPLLLAFFPALRLLLNQFLFEVLARRLIFGKGYDKLAETDERRKKINKFKESAWKFVYYLSAELFSLSVTYNESWFTNTRYFWVGPGEQLWPDQKMKLKLKAVYMYAAGFYVYSIFDLLFWETRRKDFGVMMSHHVATIVLIVVSYICRLSRPGSVILPLHDASDIFLEIGKMAKYSSCEWLAVVAFLLFVASWILLRLIVFPFWILRSTSYEIAMIVDNENRKIYRTSYYYLFNTLLFSLLVFHIYWWVLIYRMLVKQIQSRGHVGEDVRSDSEGENNHED

SEQ ID NO: 65522 - protein, 187 aa, Triticum aestivum
  peptide (1)..(187): Ceres Seq. ID no. 13662849
MKLKLKAVYMYAAGFYVYSIFDLLFWETRRKDFGVMMSHHVATIVLIVVSYICRLSRPGSVILPLHDASDIFLEIGKMAKYSSCEWLAVVAFLLFVASWILLRLIVFPFWILRSTSYEIAMIVDNENRKIYRTSYYYLFNTLLFSLLVFHIYWWVLIYRMLVKQIQSRGHVGEDVRSDSEGENNHED

SEQ ID NO: 65523 - DNA, 798 bp, Triticum aestivum
  misc_feature (1)..(798): Ceres Seq. ID no. 13598579
cctaattcgctagctcgctctcgctcccgctgccgctctcaagctacctggcttctagctagctagggttcgtctacggaagctgaccgcgagctggctggccggagagaccgagcagctccgcgcgccgcagcgggcctggagctgcctagctagcaaagctcggtggagttcttgtgaagctagctagcggacgatcgaaagccgatcgacgatgcgcctcgtcgtcggaggtcacgtgagatgatgagcggcaacaaccagcaccagcagtcggcggcggcggcggcggcggaggaggagcaggagctagcgcggaagcacgcggccgcggtggctacgtcgcggcaatggtcgtcgcagacggagtcacggatagtgcgcgtgtcgcgcgtcttcggcggcaaggaccgccacagcaaggtgaagaccgtcaagggtctccgcgaccggcgcgtgcggctgtccgtgcagacggcgatccagctctacgacctgcaggaccggctgggccttaaccagcccagcaaggtcgtcgactggctgctcaacgcggcccgccacgagatcgacaagctgccgccgctccagttcccgccgcaccaggtcgacctcatggaccacatgatgacctcctcctccatgccactcatgccgcacgtcgatgacaagttctgccactttgcgtccacgctcgcccgagatggtggcgtcaaggccggggccgacgctgacggcggtggagctcaccacaacattgggaggttcggctaccaccggttcatggggctcaacaac

SEQ ID NO: 65524 - protein, 185 aa, Triticum aestivum
  peptide (1)..(185): Ceres Seq. ID no. 13598580
MMSGNNQHQQSAAAAAAEEEQELARKHAAAVATSRQWSSQTESRIVRVSRVFGGKDRHSKVKTVKGLRDRRVRLSVQTAIQLYDLQDRLGLNQPSKVVDWLLNAARHEIDKLPPLQFPPHQVDLMDHMMTSSSMPLMPHVDDKFCHFASTLARDGGVKAGADADGGGAHHNIGRFGYHRFMGLNN

SEQ ID NO: 65525 - protein, 184 aa, Triticum aestivum
  peptide (1)..(184): Ceres Seq. ID no. 13598581
MSGNNQHQQSAAAAAAEEEQELARKHAAAVATSRQWSSQTESRIVRVSRVFGGKDRHSKVKTVKGLRDRRVRLSVQTAIQLYDLQDRLGLNQPSKVVDWLLNAARHEIDKLPPLQFPPHQVDLMDHMMTSSSMPLMPHVDDKFCHFASTLARDGGVKAGADADGGGAHHNIGRFGYHRFMGLNN

SEQ ID NO: 65526 - DNA, 1664 bp, Triticum aestivum
  misc_feature (1)..(1664): Ceres Seq. ID no. 12617887
gacaaccgcaccgcaccgcgcccacacacgccacgcagcgcctcggtaccatcgcgttcctgctcgtagcttcgtgtcccgtcccacccccggcggcccgcaggatccgtccggctgcggtgatttgatttgatttgtgatttcggttcgtgcggcggcgatggggatgctgtcgcggccggaggaggtgccggcgctgctcaggctcaagctggcggcggggcggatcaggcgccagatcccgccgcaggagcactgggccttcgcctacgacatgctgcagcgggtctcccgcagcttcgcgctcctcatccagcagctaggccccgagctccgcaatgccgtctgcgtcttctacctcgtgctccgggccctggacaccgtcgaggacgacaccgccatccctaacgaggtcaagctgcccatccttcgggacttctaccgccacatctacaacccggactggctcttttcatgtggagcaaacgactacagagtgctcatggataattttaggcaagtctccacggctttcctggagctaggcgaaggataccaaaaggctattgaagaaatcactaggcgaatgggagaaggaatggctaaatttatatgcacggaggttgaaaccattgatgactatgatgagtactgccactatgtagcagggctagtaggctatggactttctaggctctttcatgctactggcacagaagatctggctccggatcatctttcaaattcaatgggtttatttctacagaaaaccaatataataagggattatttggaggacataaatgagataccaaggtgccgtatgttctggcctcgggaaatatggagtaaatatgtcgataaacttgaggatttaaaatatgaggaaaattcagaaaaggccgtgcagtgcttgaatgatatggtgaccaatgctttgatccatgcccaagattgccttcaatacatgtcagcattgaaggacaactccaattttcgattttgtgcaatacctcagataatggcaattgggacatgtgctatttgctacaataatgtgaaagtctttagaggagttgttaagatgaggcgtgggctcactgcacgggtgattgatgagacaaaatcgatatctgatgtctattctgctttctatgagttctcttcattgctagagtcgaagattgatgataacgacccaaatgctgcgctgacacggaggcgtgtggatgcaataaagaaaacttgcaagtcatccggcctgctgaagagaaggggttacgatctggagaaatcaaagtacagaatgcctatgctgatcatgatcatgcttctgttggtggctattatcttgggtgtactgtatggcaagtgatccggtcaagatggtcctcttatgttcttagtggcaccgcctcccctatgtggttttgcacgtgtacttcctgactgcagatggatggctggtttgcatgtagtattgtgctatgtaccctgctggtgccatgcatgctagttctttttgttctttgtttctgtcgtcccgtatgttgtttcagcttgtaatttgtttgaatctaggagagacttccttagtgacatgtatcctatgaatttggcgtggcgccttggttgtcaatgattctacattttgtttatttgtg

SEQ ID NO: 65527 - protein, 404 aa, Triticum aestivum
  peptide (1)..(404): Ceres Seq. ID no. 12617888
MGMLSRPEEVPALLRLKLAAGRIRRQIPPQEHWAFAYDMLQRVSRSFALLIQQLGPELRNAVCVFYLVLRALDTVEDDTAIPNEVKLPILRDFYRHIYNPDWLFSCGANDYRVLMDNFRQVSTAFLELGEGYQKAIEEITRRMGEGMAKFICTEVETIDDYDEYCHYVAGLVGYGLSRLFHATGTEDLAPDHLSNSMGLFLQKTNIIRDYLEDINEIPRCRMFWPREIWSKYVDKLEDLKYEENSEKAVQCLNDMVTNALIHAQDCLQYMSALKDNSNFRFCAIPQIMAIGTCAICYNNVKVFRGVVKMRRGLTARVIDETKSISDVYSAFYEFSSLLESKIDDNDPNAALTRRRVDAIKKTCKSSGLLKRRGYDLEKSKYRMPMLIMIMLLLVAIILGVLYGK

SEQ ID NO: 65528 - protein, 402 aa, Triticum aestivum
  peptide (1)..(402): Ceres Seq. ID no. 12617889
MLSRPEEVPALLRLKLAAGRIRRQIPPQEHWAFAYDMLQRVSRSFALLIQQLGPELRNAVCVFYLVLRALDTVEDDTAIPNEVKLPILRDFYRHIYNPDWLFSCGANDYRVLMDNFRQVSTAFLELGEGYQKAIEEITRRMGEGMAKFICTEVETIDDYDEYCHYVAGLVGYGLSRLFHATGTEDLAPDHLSNSMGLFLQKTNIIRDYLEDINEIPRCRMFWPREIWSKYVDKLEDLKYEENSEKAVQCLNDMVTNALIHAQDCLQYMSALKDNSNFRFCAIPQIMAIGTCAICYNNVKVFRGVVKMRRGLTARVIDETKSISDVYSAFYEFSSLLESKIDDNDPNAALTRRRVDAIKKTCKSSGLLKRRGYDLEKSKYRMPMLIMIMLLLVAIILGVLYGK

SEQ ID NO: 65529 - protein, 366 aa, Triticum aestivum
  peptide (1)..(366): Ceres Seq. ID no. 12617890
MLQRVSRSFALLIQQLGPELRNAVCVFYLVLRALDTVEDDTAIPNEVKLPILRDFYRHIYNPDWLFSCGANDYRVLMDNFRQVSTAFLELGEGYQKAIEEITRRMGEGMAKFICTEVETIDDYDEYCHYVAGLVGYGLSRLFHATGTEDLAPDHLSNSMGLFLQKTNIIRDYLEDINEIPRCRMFWPREIWSKYVDKLEDLKYEENSEKAVQCLNDMVTNALIHAQDCLQYMSALKDNSNFRFCAIPQIMAIGTCAICYNNVKVFRGVVKMRRGLTARVIDETKSISDVYSAFYEFSSLLESKIDDNDPNAALTRRRVDAIKKTCKSSGLLKRRGYDLEKSKYRMPMLIMIMLLLVAIILGVLYGK

SEQ ID NO: 65530 - DNA, 1752 bp, Triticum aestivum
  misc_feature (1)..(1752): Ceres Seq. ID no. 14303572
agttgtcgttccaaaggaaaaggaaaattggcagctggttgtggtgttcgctgctcgccaccgactttcccggcgccaccgcaccgtgcaccggccccaccggcggcgacgatgggtaactcacaggcctctcccttgtccgcctcctctgccagcttcgtcatggcctccagggccttctcgaagcaggcgctggacgaactgcgcgcgcacttctcctcgctcgccgcgcagtcggggacccaggggcgcgccatatcccgccccgttttccttgattatttcggggtacgtggggcgctcggcgataggctattccagttggtggcgaaggagagcagcgtggaagatggagtcaccttcgagggtttgattatcaccaaagcaacatatgaaaggggaactaaagatgaagccgatgagttcatttttcaactgtgcgatgtgatgggagatagtatcttaacaaggtctgatctggaagctgtatttgtgtccattcatgaaaccatatttgcagataataatgaagccaaggaaggttctaacaagagtacatttgaagcatttctcaactctgcggtattttcgaaggatgctgaaggggtctctgagaagtctatgtcattatcagactttagaaactggtgtattgtcatgccaaaactgaggaaattccttggaagtttgttgatgccccctgactcaggcagagccggcttccagatacctctacttcattatccagaaaacatctcctccgagttgctactcttaaataaagagtatgcttggcatataggaggtggcttctctcaacatgatgtgcaagagtggaagcttctatatcacagttctcttcatggacaaagcttcaacactttcttaggcaatgtgacgaatggagatgtacagactgttttggttattaaagatgcagaaggttccatttatggtgcatatgcatcacaaccatgggaaaggcacagtgatttttatggtgacatgaagacattccttttcaagttatatcccgaagcgtccatattttgccctacaggagcaaacaaaagtttgcaatggtgtgctgtaaacttcacctctgagaacattccaaatggcatcggctttggaggcaagccacatcactttggcctcttcctctctgcgggtttcgatcaagggcactcatttacctccagcacattcaccaatcctcccctttccaacacgagcaggttcagaccagaagttattgaatgttgggggatacaagtgaagggatcaaatgatgaaaagccggagcttgtcaaggggacggtccttgagagattcaaggaggatcggaacatgctgaagctgattggtatggcgagtgcgagtgactgagcactgaaaaaaatcacaatagcagatatttggaggttgtgtacagcactctttttatgggaaataataccttacttgtatctggttgctactcttgagttttatttagctcttggagcttttttgtttcacatccagagtgatacaaggttagctgcatggagttgttggtttatactgtatggatccaggacgtcattttctgcccagttcgagagcagggagtaactgtctgttcatttgtcaagatggatcttcgaaagctggctgctgattaaaggatgtatgaaatgtgttctaaaactaaatcagtgtagcatgtattggggtggataaagtaatgagtggatacagttcagttcg

SEQ ID NO: 65531 - protein, 462 aa, Triticum aestivum
  peptide (1)..(462): Ceres Seq. ID no. 14303573
SCRSKGKGKLAAGCGVRCSPPTFPAPPHRAPAPPAATMGNSQASPLSASSASFVMASRAFSKQALDELRAHFSSLAAQSGTQGRAISRPVFLDYFGVRGALGDRLFQLVAKESSVEDGVTFEGLIITKATYERGTKDEADEFIFQLCDVMGDSILTRSDLEAVFVSIHETIFADNNEAKEGSNKSTFEAFLNSAVFSKDAEGVSEKSMSLSDFRNWCIVMPKLRKFLGSLLMPPDSGRAGFQIPLLHYPENISSELLLLNKEYAWHIGGGFSQHDVQEWKLLYHSSLHGQSFNTFLGNVTNGDVQTVLVIKDAEGSIYGAYASQPWERHSDFYGDMKTFLFKLYPEASIFCPTGANKSLQWCAVNFTSENIPNGIGFGGKPHHFGLFLSAGFDQGHSFTSSTFTNPPLSNTSRFRPEVIECWGIQVKGSNDEKPELVKGTVLERFKEDRNMLKLIGMASASD

SEQ ID NO: 65532 - protein, 425 aa, Triticum aestivum
  peptide (1)..(425): Ceres Seq. ID no. 14303574
MGNSQASPLSASSASFVMASRAFSKQALDELRAHFSSLAAQSGTQGRAISRPVFLDYFGVRGALGDRLFQLVAKESSVEDGVTFEGLIITKATYERGTKDEADEFIFQLCDVMGDSILTRSDLEAVFVSIHETIFADNNEAKEGSNKSTFEAFLNSAVFSKDAEGVSEKSMSLSDFRNWCIVMPKLRKFLGSLLMPPDSGRAGFQIPLLHYPENISSELLLLNKEYAWHIGGGFSQHDVQEWKLLYHSSLHGQSFNTFLGNVTNGDVQTVLVIKDAEGSIYGAYASQPWERHSDFYGDMKTFLFKLYPEASIFCPTGANKSLQWCAVNFTSENIPNGIGFGGKPHHFGLFLSAGFDQGHSFTSSTFTNPPLSNTSRFRPEVIECWGIQVKGSNDEKPELVKGTVLERFKEDRNMLKLIGMASASD

SEQ ID NO: 65533 - protein, 408 aa, Triticum aestivum
  peptide (1)..(408): Ceres Seq. ID no. 14303575
MASRAFSKQALDELRAHFSSLAAQSGTQGRAISRPVFLDYFGVRGALGDRLFQLVAKESSVEDGVTFEGLIITKATYERGTKDEADEFIFQLCDVMGDSILTRSDLEAVFVSIHETIFADNNEAKEGSNKSTFEAFLNSAVFSKDAEGVSEKSMSLSDFRNWCIVMPKLRKFLGSLLMPPDSGRAGFQIPLLHYPENISSELLLLNKEYAWHIGGGFSQHDVQEWKLLYHSSLHGQSFNTFLGNVTNGDVQTVLVIKDAEGSIYGAYASQPWERHSDFYGDMKTFLFKLYPEASIFCPTGANKSLQWCAVNFTSENIPNGIGFGGKPHHFGLFLSAGFDQGHSFTSSTFTNPPLSNTSRFRPEVIECWGIQVKGSNDEKPELVKGTVLERFKEDRNMLKLIGMASASD

SEQ ID NO: 65534 - DNA, 761 bp, Triticum aestivum
  misc_feature (1)..(761): Ceres Seq. ID no. 12586642
aacacaagcagtcgatcgattcatccaaaccagagttgagcaatacgtactagcagtgagatttggcccttccaatcgagtgatttcagttcgtgtttgttggtgagagagaagagaagagaagagaggagaagatggcctccaaccagaaccaggcgagctacgcggccggcgagaccaaagcccgcaccgaggagaagaccgggcagatgatgggcgccaccaaggacaaggcggggcaggccacggaggaaaccaagcagaaggccggcgagacggccgaggccaccaagcagaaggcatcggagacggcgcagtacgcgcaggagaggtcctccgacgccgcacagtacagcaaggagtccgccgtcgccggcaaggacaagactggcaacgtgctccagcaggccggcgagacggtggcgaacgccgtggcgaacacgctaggcatgggcggtgacaacaccaacaccaccactggcgccacaaaggacagcacccccgagaagatcaccagggatccctggacgcatgcatacgtccaatctttgctgatttgcttcctttattactcgtttggtccttttacatatctgtatgtttccctcttgtgatttcagctcgtttagtgtaaatttgccttcgatttgaggtactcgatcgtgtccggttctgtaatgagttataatccatgtactttggtgtaaatggatatgtaacgaggacagtcgaaggtggcaataatattagttttcggagag

SEQ ID NO: 65535 - protein, 159 aa, Triticum aestivum
  peptide (1)..(159): Ceres Seq. ID no. 12586643
MASNQNQASYAAGETKARTEEKTGQMMGATKDKAGQATEETKQKAGETAEATKQKASETAQYAQERSSDAAQYSKESAVAGKDKTGNVLQQAGETVANAVANTLGMGGDNTNTTTGATKDSTPEKITRDPWTHAYVQSLLICFLYYSFGPFTYLYVSLL

SEQ ID NO: 65536 - protein, 134 aa, Triticum aestivum
  peptide (1)..(134): Ceres Seq. ID no. 12586644
MMGATKDKAGQATEETKQKAGETAEATKQKASETAQYAQERSSDAAQYSKESAVAGKDKTGNVLQQAGETVANAVANTLGMGGDNTNTTTGATKDSTPEKITRDPWTHAYVQSLLICFLYYSFGPFTYLYVSLL

SEQ ID NO: 65537 - protein, 133 aa, Triticum aestivum
  peptide (1)..(133): Ceres Seq. ID no. 12586645
MGATKDKAGQATEETKQKAGETAEATKQKASETAQYAQERSSDAAQYSKESAVAGKDKTGNVLQQAGETVANAVANTLGMGGDNTNTTTGATKDSTPEKITRDPWTHAYVQSLLICFLYYSFGPFTYLYVSLL

SEQ ID NO: 65538 - DNA, 1470 bp, Triticum aestivum
  misc_feature (1)..(1470): Ceres Seq. ID no. 12618306
tccgtccccagatccgaccacccccctcgcctcgccgccggccccccctccacgcaaccgtactctccggggcccgcgcgccggaatggaggcggcgcgcgccaaggacaccaaggagcgcctggccggggtggagcgcctgcacgaggcgctcgacgcggcggcgcgccgcggcctctccccggccgaggtcacctcgctggtggacacctgcgtggatctgacgcgggacgccaacttccgcgtcgcgcagggggggctgcaggcgctctccgccgccgccgtgctcgccggggaccacttcaagatccacctcaacgcgctcgtccccgccgccgtcgagcgcctcggcgacggcaagcagcccgtccgcgaggccgcgcgccagctcctcgtcacgctcatggaggtttcttcaccaacaatcattctcgaaagggccggaaattatgcatggactcataagagttggagggttcgggaagagtttgtacttacagtggcaactgcagttgggcttttcgcttctacggagcttctcatgcaacgagttttactctcacccgtcctacagttgatgaatgattcgaaccaaagtgtcagagaagctgctatatcttgtattgaggaaatgtacaagaacatgggatctcagttccacgaagagttgcagcgccataatctgcctacatacatgctaaaagaaataaattcaagattgaatagaattgaaccaaaggttcccgcatctgatggtactgcaacacagcataaagttgcagcatctagatccgttagtgttaacccaaaaagaggcagcccacggacaaaaaacacaccgagggaaagcacattatttggaggtaatctgattggtgaagtgcaggattcactggcaaaggaagctgagaaagataaacaaattgcttcggaggaggaggaggaagaagagtatgtcttgctagagttagatgatgttcattattcctgcatacaaccaaatgccccttatatactctctggtttggatacattgactcctaccttggtagtaggtgatagcctgaagatgattggagaatatgaagaaacggttggcccatgctatttattttcagaaagtgatgctccaccaaagcccgttcatgaagagccggcacctcccaaagaaaacaaggacaagcaaggcagaaacatcaaggaggtgaaacatgtgacgagcgttcacaagatgctcaaattccggtcgaccggtgagggtcgtcaggagcacagagcataccgttacagggacaaggagttttgaaacacaatgctttgtctgatgcttgtgatgcacacacacagcatgcaatcctttgacccttcaaatggaatgcaaggatggtagtacttgttaaatcttaattacccactagctagcattctctatctcgaggtgaattttgtgtcctctctttctgaattatc

SEQ ID NO: 65539 - protein, 434 aa, Triticum aestivum
  peptide (1)..(434): Ceres Seq. ID no. 12618307
PSPDPTTPLASPPAPPPRNRTLRGPRAGMEAARAKDTKERLAGVERLHEALDAAARRGLSPAEVTSLVDTCVDLTRDANFRVAQGGLQALSAAAVLAGDHFKIHLNALVPAAVERLGDGKQPVREAARQLLVTLMEVSSPTIILERAGNYAWTHKSWRVREEFVLTVATAVGLFASTELLMQRVLLSPVLQLMNDSNQSVREAAISCIEEMYKNMGSQFHEELQRHNLPTYMLKEINSRLNRIEPKVPASDGTATQHKVAASRSVSVNPKRGSPRTKNTPRESTLFGGNLIGEVQDSLAKEAEKDKQIASEEEEEEEYVLLELDDVHYSCIQPNAPYILSGLDTLTPTLVVGDSLKMIGEYEETVGPCYLFSESDAPPKPVHEEPAPPKENKDKQGRNIKEVKHVTSVHKMLKFRSTGEGRQEHRAYRYRDKEF

SEQ ID NO: 65540 - protein, 406 aa, Triticum aestivum
  peptide (1)..(406): Ceres Seq. ID no. 12618308
MEAARAKDTKERLAGVERLHEALDAAARRGLSPAEVTSLVDTCVDLTRDANFRVAQGGLQALSAAAVLAGDHFKIHLNALVPAAVERLGDGKQPVREAARQLLVTLMEVSSPTIILERAGNYAWTHKSWRVREEFVLTVATAVGLFASTELLMQRVLLSPVLQLMNDSNQSVREAAISCIEEMYKNMGSQFHEELQRHNLPTYMLKEINSRLNRIEPKVPASDGTATQHKVAASRSVSVNPKRGSPRTKNTPRESTLFGGNLIGEVQDSLAKEAEKDKQIASEEEEEEEYVLLELDDVHYSCIQPNAPYILSGLDTLTPTLVVGDSLKMIGEYEETVGPCYLFSESDAPPKPVHEEPAPPKENKDKQGRNIKEVKHVTSVHKMLKFRSTGEGRQEHRAYRYRDKEF

SEQ ID NO: 65541 - protein, 300 aa, Triticum aestivum
  peptide (1)..(300): Ceres Seq. ID no. 12618309
MEVSSPTIILERAGNYAWTHKSWRVREEFVLTVATAVGLFASTELLMQRVLLSPVLQLMNDSNQSVREAAISCIEEMYKNMGSQFHEELQRHNLPTYMLKEINSRLNRIEPKVPASDGTATQHKVAASRSVSVNPKRGSPRTKNTPRESTLFGGNLIGEVQDSLAKEAEKDKQIASEEEEEEEYVLLELDDVHYSCIQPNAPYILSGLDTLTPTLVVGDSLKMIGEYEETVGPCYLFSESDAPPKPVHEEPAPPKENKDKQGRNIKEVKHVTSVHKMLKFRSTGEGRQEHRAYRYRDKEF

SEQ ID NO: 65542 - DNA, 1165 bp, Triticum aestivum
  misc_feature (1)..(1165): Ceres Seq. ID no. 14302761
attttctagaaccctagcacgattcccaaaacccaaagctcctcctcatcctcttccatggcgatggcgttcgcgctcccgctcctcctcgtgccccgccccatcgtctctccgagacccgctgcagcgggccgcttcctttccctctccgctcccctgtccaccgccgctcccgcccctgcccccgtcgagcccctgaagggcggcggccgcctcgcgcggctccagactctccacgcagcctcctgctgcaactccgcccccgcagcagcatctggaggagtggaggcggcccgggcgaagggcttgcagctcgtggcctggtaccttctgtctcttgacaagcatccggtggcgaccaaggctgtcacttctgctgtgctgactctggccggggacctcatctgccagcttgtaattgataaagtgccagagctagacctgaagagaacatttgtgttcacgttattgggacttgtcctggtggggccaacgttgcatttctggtacttgtatttgagtaaattagtgacgatcagcgggacatctggtgtcatttctcgcctgttacttgaccagttcatcttctctcctgttttcattggtgtcttcatgagcttactcgtaaccttggagggaaagccatctcttgtagtgccaaagcttaagcaggagtggttctcttcattgatcgcgaattggcaattgtggataccgttccagttttttaatttctattttgtcccacagaagctccaggttcttgctgctaattttgtagcccttgcatggaacgtgattttgtcatataaagctcataagaaggttatcgcggagtagtcaaataggtgagagagtagactctagggcggggtatctaagccggttgcaacatgtggcgatgtaaggctggaagaataaacctattatcagttatcctggcgtctcgtctgtgttacccaaccgatgaaacgcctgcctagtattgtaaattaacgtccatcttgtctgtcgagtgcagcccgcgatgccagttaatcatgcgttgtacaatctgtataaccgtttgtgatgggaggttgttcttggtttccgaagaattacataatgtaaaattctggggttcctagcaaatcaaaactcaggccccgggggtgttattggc

SEQ ID NO: 65543 - protein, 260 aa, Triticum aestivum
  peptide (1)..(260): Ceres Seq. ID no. 14302762
MAMAFALPLLLVPRPIVSPRPAAAGRFLSLSAPLSTAAPAPAPVEPLKGGGRLARLQTLHAASCCNSAPAAASGGVEAARAKGLQLVAWYLLSLDKHPVATKAVTSAVLTLAGDLICQLVIDKVPELDLKRTFVFTLLGLVLVGPTLHFWYLYLSKLVTISGTSGVISRLLLDQFIFSPVFIGVFMSLLVTLEGKPSLVVPKLKQEWFSSLIANWQLWIPFQFFNFYFVPQKLQVLAANFVALAWNVILSYKAHKKVIAE

SEQ ID NO: 65544 - protein, 258 aa, Triticum aestivum
  peptide (1)..(258): Ceres Seq. ID no. 14302763
MAFALPLLLVPRPIVSPRPAAAGRFLSLSAPLSTAAPAPAPVEPLKGGGRLARLQTLHAASCCNSAPAAASGGVEAARAKGLQLVAWYLLSLDKHPVATKAVTSAVLTLAGDLICQLVIDKVPELDLKRTFVFTLLGLVLVGPTLHFWYLYLSKLVTISGTSGVISRLLLDQFIFSPVFIGVFMSLLVTLEGKPSLVVPKLKQEWFSSLIANWQLWIPFQFFNFYFVPQKLQVLAANFVALAWNVILSYKAHKKVIAE

SEQ ID NO: 65545 - DNA, 1417 bp, Triticum aestivum
  misc_feature (1)..(1417): Ceres Seq. ID no. 13584665
aacggtggaccagacaccgcagcaccaacgcaaatcctcaccactctctcctccgcctcgcaccatcccctcgccgccgccgccgccgccgccatgttctggctccgtcgcggcgtcctcgctcaggtcctcccttcttcctccgcctctcccgtatcccctctccaccgcctcatctccgccgccgcgcccgccatctctccaaacatcagattcgccgtggaggagtacctcgtctccacctgcggcctcacgcgaccacaggccctaaaggcctccgccaagctttcccacctcaagtcccccgccaatcccgacgccgtgctcgccttcctcgccggcctcggcctctccgacgccgatgtcgccgccctcgtcgccaaggacccgcagttcctctgcgccagcgtggagagaaccctggcacccgtcgtcgccgggctctctggcctcggcttatcacgttccgacatcgcgcgcctcgcctcgctctcccgttacagattccgctgtagatccatcgtctccaagctgcagtactacatgcctttctttgggtcctttgagaatctcctccgagccctcaagaggaacttctaccttcactcggctgacctcgatgatgtggtcaagcccaacgtcgcgatgctgcgggagtgcgggctaggtgcttgtgatattgtcaagctatgcatcagtcaaccatggcttctcaccgccaacctggagcgtgtccaggcgatggtggaatgcgctgaaaacataggtgtgccccgtgcctctgggatgttcaggcatgcactgcacgctgttgcatttctcagcgaggacaagatcgcagccagggtgaagtacttgaagaacaccttcaggtggacggatgctgaggtaggcatggctgtttctaaggctccaatggtgctggcgaggtccaaggagtcgctgcagcgcaggtctgagttcctcatctccgaggtgggcttggaaccggtgtacattgctcaacggtcggaaataatcgggcacagcctagagggccggctcaggccccggtactatgctgtgaagtttctcaaggaaaatggattgctcaagcgtgacccaaactacagtaccgttttcaagattagtgagaaggcattcaggaagaagttcatattccctcacaaggaggctgcactccacctcacagaagactacgatgccgcttgcaagggggacgtgccgactaatttcagattcacataaagacgggctatgatgtaattgggtgctggttgtctgctgttgtatgactgttagatgctgggttggtcattgctaacgtgtgatggaattgataatttgatccccaaatactggtatgtaatgctatcactcagcagagaagaaaccattgattggttatgaacttctc

SEQ ID NO: 65546 - protein, 415 aa, Triticum aestivum
  peptide (1)..(415): Ceres Seq. ID no. 13584666
NGGPDTAAPTQILTTLSSASHHPLAAAAAAAMFWLRRGVLAQVLPSSSASPVSPLHRLISAAAPAISPNIRFAVEEYLVSTCGLTRPQALKASAKLSHLKSPANPDAVLAFLAGLGLSDADVAALVAKDPQFLCASVERTLAPVVAGLSGLGLSRSDIARLASLSRYRFRCRSIVSKLQYYMPFFGSFENLLRALKRNFYLHSADLDDVVKPNVAMLRECGLGACDIVKLCISQPWLLTANLERVQAMVECAENIGVPRASGMFRHALHAVAFLSEDKIAARVKYLKNTFRWTDAEVGMAVSKAPMVLARSKESLQRRSEFLISEVGLEPVYIAQRSEIIGHSLEGRLRPRYYAVKFLKENGLLKRDPNYSTVFKISEKAFRKKFIFPHKEAALHLTEDYDAACKGDVPTNFRFT

SEQ ID NO: 65547 - protein, 384 aa, Triticum aestivum
  peptide (1)..(384): Ceres Seq. ID no. 13584667
MFWLRRGVLAQVLPSSSASPVSPLHRLISAAAPAISPNIRFAVEEYLVSTCGLTRPQALKASAKLSHLKSPANPDAVLAFLAGLGLSDADVAALVAKDPQFLCASVERTLAPVVAGLSGLGLSRSDIARLASLSRYRFRCRSIVSKLQYYMPFFGSFENLLRALKRNFYLHSADLDDVVKPNVAMLRECGLGACDIVKLCISQPWLLTANLERVQAMVECAENIGVPRASGMFRHALHAVAFLSEDKIAARVKYLKNTFRWTDAEVGMAVSKAPMVLARSKESLQRRSEFLISEVGLEPVYIAQRSEIIGHSLEGRLRPRYYAVKFLKENGLLKRDPNYSTVFKISEKAFRKKFIFPHKEAALHLTEDYDAACKGDVPTNFRFT

SEQ ID NO: 65548 - protein, 234 aa, Triticum aestivum
  peptide (1)..(234): Ceres Seq. ID no. 13584668
MPFFGSFENLLRALKRNFYLHSADLDDVVKPNVAMLRECGLGACDIVKLCISQPWLLTANLERVQAMVECAENIGVPRASGMFRHALHAVAFLSEDKIAARVKYLKNTFRWTDAEVGMAVSKAPMVLARSKESLQRRSEFLISEVGLEPVYIAQRSEIIGHSLEGRLRPRYYAVKFLKENGLLKRDPNYSTVFKISEKAFRKKFIFPHKEAALHLTEDYDAACKGDVPTNFRFT

SEQ ID NO: 65549 - DNA, 1506 bp, Triticum aestivum
  misc_feature (1)..(1506): Ceres Seq. ID no. 14302828
aaactcgagtctcggtcaacagacgtcgaagcatcacgaactaccgccgataactccggcggtcgccgccgatggactcctcttcgtcctccgtccctgcggctgcggagggggcgcttccggcgggggagaatctggctgtgttctggcacgagggcatgctggcccacgacgccggccgcggcgtgttcgactcgggccgcgacccgggcttcctcgacgtgctcgaccaccacccggagaacgccgaccgcgtccgcaacatggtatccatcctccgccgcgggcccatcgcgcccttcctctcttggcactccggcacccccgcccacgccagcgacctcctctccttccactccccagaatacattgaggagctcgtgcaggcgaatgccagtggacccaagaagttatgtgagggtactttcttgaactctggttcatggggcgctgcgcttctggctgccggaacaaccttatcagctgtgaggcacatactagacgggcatgggaagatagcctacgcattggtccgcccccctggccatcacgcgcagccggaccatgccgacggttactgctttctgaacaacgccgggcttgctgtgcagctggctctggattctggccgcgcaaaggttgccgttgttgacatagatgtgcactatggaaatggtaccgcagagggcttctatcgcacggacaacgtgttggcaatctctcttcacatgaagcatggtacttggggtccttcgcatctgcagagtggctcggctgatgagattggggaaggcaaggggcttgggtacaatctcaatatacctttgcctaatggcagtggggataaaggctatgagtatgcaatgaatgaattggttgtcccggcgattgacaagtttcaacctcagcttttggtttttgtcattggccaagattctagcatgtttgatccaaatggaagacagtgcttgaccatggatggttacaggaaaattggacaaataatgaggggcgtggctaatcgacatagcgatgggcaaatgttgattgtccaggaagggggttaccacatcagttattcagcatattgtctgcatgcgacactagaaggcgttctgaatcttgaggccccattgctggacgacccaatcgcatactatcccgaggatgagaagtacaccatggaagctgtcgacgtcacgaagaaacgctggaaagaatccattcccttcttgaaggacatttaaggacgcgttacgtctcttcttcgacgcagcggcaaacgacgaacctcggtctcgaatcatgtcatggtttgtattctcggaattaaatcgcactgtcaagaaaagagtgacgcagctcatgtagatgagcattaagagttttttttttcctttgtcgtttaagagaatgaatgaaaccagacattttcttgagcagtttgttgaactgagaatatgtttgttgcatcccgtccgttggattaataaagagatcatatat

SEQ ID NO: 65550 - protein, 391 aa, Triticum aestivum
  peptide (1)..(391): Ceres Seq. ID no. 14302829
MDSSSSSVPAAAEGALPAGENLAVFWHEGMLAHDAGRGVFDSGRDPGFLDVLDHHPENADRVRNMVSILRRGPIAPFLSWHSGTPAHASDLLSFHSPEYIEELVQANASGPKKLCEGTFLNSGSWGAALLAAGTTLSAVRHILDGHGKIAYALVRPPGHHAQPDHADGYCFLNNAGLAVQLALDSGRAKVAVVDIDVHYGNGTAEGFYRTDNVLAISLHMKHGTWGPSHLQSGSADEIGEGKGLGYNLNIPLPNGSGDKGYEYAMNELVVPAIDKFQPQLLVFVIGQDSSMFDPNGRQCLTMDGYRKIGQIMRGVANRHSDGQMLIVQEGGYHISYSAYCLHATLEGVLNLEAPLLDDPIAYYPEDEKYTMEAVDVTKKRWKESIPFLKDI

SEQ ID NO: 65551 - protein, 362 aa, Triticum aestivum
  peptide (1)..(362): Ceres Seq. ID no. 14302830
MLAHDAGRGVFDSGRDPGFLDVLDHHPENADRVRNMVSILRRGPIAPFLSWHSGTPAHASDLLSFHSPEYIEELVQANASGPKKLCEGTFLNSGSWGAALLAAGTTLSAVRHILDGHGKIAYALVRPPGHHAQPDHADGYCFLNNAGLAVQLALDSGRAKVAVVDIDVHYGNGTAEGFYRTDNVLAISLHMKHGTWGPSHLQSGSADEIGEGKGLGYNLNIPLPNGSGDKGYEYAMNELVVPAIDKFQPQLLVFVIGQDSSMFDPNGRQCLTMDGYRKIGQIMRGVANRHSDGQMLIVQEGGYHISYSAYCLHATLEGVLNLEAPLLDDPIAYYPEDEKYTMEAVDVTKKRWKESIPFLKDI

SEQ ID NO: 65552 - protein, 327 aa, Triticum aestivum
  peptide (1)..(327): Ceres Seq. ID no. 14302831
MVSILRRGPIAPFLSWHSGTPAHASDLLSFHSPEYIEELVQANASGPKKLCEGTFLNSGSWGAALLAAGTTLSAVRHILDGHGKIAYALVRPPGHHAQPDHADGYCFLNNAGLAVQLALDSGRAKVAVVDIDVHYGNGTAEGFYRTDNVLAISLHMKHGTWGPSHLQSGSADEIGEGKGLGYNLNIPLPNGSGDKGYEYAMNELVVPAIDKFQPQLLVFVIGQDSSMFDPNGRQCLTMDGYRKIGQIMRGVANRHSDGQMLIVQEGGYHISYSAYCLHATLEGVLNLEAPLLDDPIAYYPEDEKYTMEAVDVTKKRWKESIPFLKDI

SEQ ID NO: 65553 - DNA, 1190 bp, Triticum aestivum
  misc_feature (1)..(1190): Ceres Seq. ID no. 13590967
attacctagaacatcctaatcgaaaaaacaccaaaccgcagcacacagcgccaccgcgactgcgccactccttgcgttccgagtgacagaggccatggcgctcgccacctcccaccaccgccacctcgtccgccccgccgccgcggcccctcgcgtgccgctgcgtcccctccgcttcgccgccccccgatctctcccgaggatttgttgccaatctatcaactcagctaacgtcttgggagcttcctcaatgacagctgacgacgcagttccacaaccagttgtactgatagaccaagactcagaccgtgatgcaaccattgtgcagctgagttttggagatcgtttgggggcactacttgatacgatgaaggcactcaaggacctgggccttgatgtgacgaaaggaagtgtggcaactgattcatctgtcacacaaacaaagttccacatcatgcgattagggcgtaaggttgaggaccctgacatgttggaaacaatacgactgaccatcattaacaaccttctgcagtatcatcccgaatcaagcgagaagctagctatgggtgaattttttggaattaaagcccctgagaagaaggttgatgttgacgttgcaacacatgtaattgtgcaagatgatggaccgaaaagaagcatgctttacatagagacagctgatcgaccaggcttactcttggaagtaatcaagatcattactgacgtaaacgttgatgtgggatcagctgagattgatactgagggcttggttgccaaggacaagtttcatgtgagttacagaggcgcaaaacttaacagctcgttatctcaggtgctggttaattgtttgcgctattacctccggaggcccgagacagatgaagacagctattgatgattgttctgtggcggctcgtttcgagttcctgcctatgaagccttttgcactgcaatttctgttgtaagcaaaacaaaatatggcacatgtgttccgaaaatgcattaaaactggggcgtctgatgcagttatgttctatggtcggacatgtggcccttgggagctttagcagccccatcccactggtttcctagaggaatcacattggaaagcattcacgcgtgtcgagtgtggtctgtaagttcatagtactataattcatgtgcatgtaaaaaaccaggttacgtatgtg

SEQ ID NO: 65554 - protein, 266 aa, Triticum aestivum
  peptide (1)..(266): Ceres Seq. ID no. 13590968
MALATSHHRHLVRPAAAAPRVPLRPLRFAAPRSLPRICCQSINSANVLGASSMTADDAVPQPVVLIDQDSDRDATIVQLSFGDRLGALLDTMKALKDLGLDVTKGSVATDSSVTQTKFHIMRLGRKVEDPDMLETIRLTIINNLLQYHPESSEKLAMGEFFGIKAPEKKVDVDVATHVIVQDDGPKRSMLYIETADRPGLLLEVIKIITDVNVDVGSAEIDTEGLVAKDKFHVSYRGAKLNSSLSQVLVNCLRYYLRRPETDEDSY

SEQ ID NO: 65555 - protein, 214 aa, Triticum aestivum
  peptide (1)..(214): Ceres Seq. ID no. 13590969
MTADDAVPQPVVLIDQDSDRDATIVQLSFGDRLGALLDTMKALKDLGLDVTKGSVATDSSVTQTKFHIMRLGRKVEDPDMLETIRLTIINNLLQYHPESSEKLAMGEFFGIKAPEKKVDVDVATHVIVQDDGPKRSMLYIETADRPGLLLEVIKIITDVNVDVGSAEIDTEGLVAKDKFHVSYRGAKLNSSLSQVLVNCLRYYLRRPETDEDSY

SEQ ID NO: 65556 - protein, 175 aa, Triticum aestivum
  peptide (1)..(175): Ceres Seq. ID no. 13590970
MKALKDLGLDVTKGSVATDSSVTQTKFHIMRLGRKVEDPDMLETIRLTIINNLLQYHPESSEKLAMGEFFGIKAPEKKVDVDVATHVIVQDDGPKRSMLYIETADRPGLLLEVIKIITDVNVDVGSAEIDTEGLVAKDKFHVSYRGAKLNSSLSQVLVNCLRYYLRRPETDEDSY

SEQ ID NO: 65557 - DNA, 1880 bp, Triticum aestivum
  misc_feature (1)..(1880): Ceres Seq. ID no. 13655988
acccgacccatccatcctcctaccagtccgcctcctcaaccccgccgacgcccgcgcgtgaagatcgcccgctccccggccggccgccggcgtccagagcagatacatacagatggacagccataattctacgtcgccccatgttcctgaagtaaccatggacatctcatccgcttctggagcagctgggaacaaagcttgcagaggtgctgcttgcgacttctctgacgccagtaacacctcgaaagattcaaaggagaggtctgcatccatgaagaagctcctaattgctgtgatcctttgtgttatattcatggcggttgaagtggttggaggcatcaaagcaaacagtcttgcaatcttgactgatgctgcccatctcctttcggatgttgcagcctttgccatatctttgttctccctatgggcagctggttgggaagcgacacctcagcagtcatatggatttttccgcatagagattcttggggcactggtttccattcagcttatatggctcctcgctggcatacttgtctacgaagctattatgaggctcattaatgaaagtggcgaggtacagggctccctcatgtttgctgtatcagcttttggtttgtttgttaacatcataatggcagtgttgcttggtcatgaccatgggcacggtggacatggacacagccatggtcatggccatggacattcacatgaccacgatcatggtaactcagaggatgaccattcccatcatggagatcatgagcaggggcatgtacatcaccatgagcacagccatggtacttctattaccgttacaactaatcaccactctcattcgagcactggacaacatcaggatgttgagcaaccattgcttaaacatgatggtgattgtgagagtgcccagcctggagccaagcctgctaagaagcctcgccgcaacatcaatgttcacagtgcctatctgcatgtaattggggactccatccagagcatcggcgtaatgattggaggggctctcatctggtacaagcccgaatggaaggttattgatctcatatgcaccctcatcttctctgtgattgtactgttcaccacaatcaagatgattcggaacatacttgaggtccttatggagagcacgccccgcgagatcgacgccaccaggcttgaaagtggtctccgtgagatggaaggtgtgattgctgtccatgagctgcacatctgggctatcacagtggggaaggtgctcttggcatgccatgtgacgatcacgcaggatgctgatgctgataaaatgcttgacaaggtcattgggtacatcaaggcagagtacaacatcagtcatgtgaccattcagattgagcgagagtaaggcacatgtcaggtagttggggataaaggtgtgtgcctgttaacggtctatcatcttaatgcagttaatgttagacttgcacttgcaaaggcgttgcaggttcatctagctgttgcctttggtgctggagaaatattatatgtacgcgttttcgttagcccattagttgaatgaactattcgggtggtcctagtcgtttgtattcacatggatgcaatttccagacaaattttgagccccttgtgagtttatcaacctgcatgtgtagtttcagtgacaccctttcttagcactcttatgtaaagatctgctacggtatggacagtactgggtatggatgtttattcagtttctgttagctttactaagcttgcttccagcagtttttatgtgcgaatttgcaccttgtgccattgtgtgctttctgtcagggatgtaggtcatctggtgcctaaaatgaagtgcactgctgccagttttaatgcatccattccactattgc

SEQ ID NO: 65558 - protein, 421 aa, Triticum aestivum
  peptide (1)..(421): Ceres Seq. ID no. 13655989
MDSHNSTSPHVPEVTMDISSASGAAGNKACRGAACDFSDASNTSKDSKERSASMKKLLIAVILCVIFMAVEVVGGIKANSLAILTDAAHLLSDVAAFAISLFSLWAAGWEATPQQSYGFFRIEILGALVSIQLIWLLAGILVYEAIMRLINESGEVQGSLMFAVSAFGLFVNIIMAVLLGHDHGHGGHGHSHGHGHGHSHDHDHGNSEDDHSHHGDHEQGHVHHHEHSHGTSITVTTNHHSHSSTGQHQDVEQPLLKHDGDCESAQPGAKPAKKPRRNINVHSAYLHVIGDSIQSIGVMIGGALIWYKPEWKVIDLICTLIFSVIVLFTTIKMIRNILEVLMESTPREIDATRLESGLREMEGVIAVHELHIWAITVGKVLLACHVTITQDADADKMLDKVIGYIKAEYNISHVTIQIERE

SEQ ID NO: 65559 - protein, 406 aa, Triticum aestivum
  peptide (1)..(406): Ceres Seq. ID no. 13655990
MDISSASGAAGNKACRGAACDFSDASNTSKDSKERSASMKKLLIAVILCVIFMAVEVVGGIKANSLAILTDAAHLLSDVAAFAISLFSLWAAGWEATPQQSYGFFRIEILGALVSIQLIWLLAGILVYEAIMRLINESGEVQGSLMFAVSAFGLFVNIIMAVLLGHDHGHGGHGHSHGHGHGHSHDHDHGNSEDDHSHHGDHEQGHVHHHEHSHGTSITVTTNHHSHSSTGQHQDVEQPLLKHDGDCESAQPGAKPAKKPRRNINVHSAYLHVIGDSIQSIGVMIGGALIWYKPEWKVIDLICTLIFSVIVLFTTIKMIRNILEVLMESTPREIDATRLESGLREMEGVIAVHELHIWAITVGKVLLACHVTITQDADADKMLDKVIGYIKAEYNISHVTIQIERE

SEQ ID NO: 65560 - protein, 368 aa, Triticum aestivum
  peptide (1)..(368): Ceres Seq. ID no. 13655991
MKKLLIAVILCVIFMAVEVVGGIKANSLAILTDAAHLLSDVAAFAISLFSLWAAGWEATPQQSYGFFRIEILGALVSIQLIWLLAGILVYEAIMRLINESGEVQGSLMFAVSAFGLFVNIIMAVLLGHDHGHGGHGHSHGHGHGHSHDHDHGNSEDDHSHHGDHEQGHVHHHEHSHGTSITVTTNHHSHSSTGQHQDVEQPLLKHDGDCESAQPGAKPAKKPRRNINVHSAYLHVIGDSIQSIGVMIGGALIWYKPEWKVIDLICTLIFSVIVLFTTIKMIRNILEVLMESTPREIDATRLESGLREMEGVIAVHELHIWAITVGKVLLACHVTITQDADADKMLDKVIGYIKAEYNISHVTIQIERE

SEQ ID NO: 65561 - DNA, 1621 bp, Triticum aestivum
  misc_feature (1)..(1621): Ceres Seq. ID no. 13597656
atacctctcccgtgccagccagtctcccccctccctccctccacccgccgccgccgccacccacaaaccctagaaaccctagctctcatcccctcgcccgagacagccatggcggagcacgacctgacggcgagcgtggcggcgtggatggacccccacctggtgctcccggtgctggagttcctccaggagcgcggggtctacgccgacgaggagatcctgcggggcaagatccgcctcctcggcggcaccaacatggtcgactacgccatggacatccacaagtcgctccacggcaccgacgacgtccccgccgacatggtcgcccgccgctccgaggtcgtcgagaggctccgggccctccaggaggccgtcgcgcccatagtcgccttcctctccagcccgcagctcgtgcaggagctccacgccgacaagcagtacaacctccacatgctccaggagcgccaccagatcggcccggaccagatcgaggccctctaccagtacgccaagttccagtacgagtgcgggatgtactccgacgccgccgatttcctgtcccagtaccgcgctctgtgcaccaacagcgagaggagcctgagtgccctgtgggggaagctggcggcggagatactgatgcagaactgggatgtcgcgcaggaggagctcaacaggctcaaggagatgattgattccagcagcttcacctcgtcgcctgtgaaccagctccacagcaggatatggctgatgcactggagcctcttcatcttcttcaaccatgagaatggaaggaacgggatcatcgacctcttcttccaggacaggtacctcaatgctatccagaccaacgctccccatcttctgaggtaccttgctgctgcagttgttgtcaacaagaggagaaggaacatgcttaaggaactcatcaaggtcatccagcaggagcagaacagctacaaggatcccatcattgagttcctggagtgcctgtatgtcaagtatgattttgatggcgctcagcagaagctcgtcgagtgcgagcaggttatactgaatgatcctttcctgggcaagcgcgttgaagagaggaatggcatcgctgttcctctgagagacgagttccttgaaaatgctcgcctgttcatttttgagacttactgccgtatacatcgctgcatcgatattggtgtgcttgcggagaagctgaacatgacctatgatgaagccgagttgtggataatgaacatggtcaagagttccaagctagatgccaagattgattcagtgacgggaactctcatcatgacgaccaatcgtgttgatgtccatgagcagattattgagagcatgaagaacctcaatgccaggacctacatgctagcaaagagcgtcgtggatccagggcatgcagcagcacagcaggctgctcggtgagaccaacagatgatctgcagctttgaggcggtaaaaattactttgggaactttgttgttaggcagtgacttcgttgctagtatttgaatcatattgctacagcttatgctgatgttttaaatgctttgtactccttttactcaagtttatcgtcctatgaattaatactgcaaaagacgtttaacgc

SEQ ID NO: 65562 - protein, 477 aa, Triticum aestivum
  peptide (1)..(477): Ceres Seq. ID no. 13597657
IPLPCQPVSPLPPSTRRRRHPQTLETLALIPSPETAMAEHDLTASVAAWMDPHLVLPVLEFLQERGVYADEEILRGKIRLLGGTNMVDYAMDIHKSLHGTDDVPADMVARRSEVVERLRALQEAVAPIVAFLSSPQLVQELHADKQYNLHMLQERHQIGPDQIEALYQYAKFQYECGMYSDAADFLSQYRALCTNSERSLSALWGKLAAEILMQNWDVAQEELNRLKEMIDSSSFTSSPVNQLHSRIWLMHWSLFIFFNHENGRNGIIDLFFQDRYLNAIQTNAPHLLRYLAAAVVVNKRRRNMLKELIKVIQQEQNSYKDPIIEFLECLYVKYDFDGAQQKLVECEQVILNDPFLGKRVEERNGIAVPLRDEFLENARLFIFETYCRIHRCIDIGVLAEKLNMTYDEAELWIMNMVKSSKLDAKIDSVTGTLIMTTNRVDVHEQIIESMKNLNARTYMLAKSVVDPGHAAAQQAAR

SEQ ID NO: 65563 - protein, 441 aa, Triticum aestivum
  peptide (1)..(441): Ceres Seq. ID no. 13597658
MAEHDLTASVAAWMDPHLVLPVLEFLQERGVYADEEILRGKIRLLGGTNMVDYAMDIHKSLHGTDDVPADMVARRSEVVERLRALQEAVAPIVAFLSSPQLVQELHADKQYNLHMLQERHQIGPDQIEALYQYAKFQYECGMYSDAADFLSQYRALCTNSERSLSALWGKLAAEILMQNWDVAQEELNRLKEMIDSSSFTSSPVNQLHSRIWLMHWSLFIFFNHENGRNGIIDLFFQDRYLNAIQTNAPHLLRYLAAAVVVNKRRRNMLKELIKVIQQEQNSYKDPIIEFLECLYVKYDFDGAQQKLVECEQVILNDPFLGKRVEERNGIAVPLRDEFLENARLFIFETYCRIHRCIDIGVLAEKLNMTYDEAELWIMNMVKSSKLDAKIDSVTGTLIMTTNRVDVHEQIIESMKNLNARTYMLAKSVVDPGHAAAQQAAR

SEQ ID NO: 65564 - protein, 428 aa, Triticum aestivum
  peptide (1)..(428): Ceres Seq. ID no. 13597659
MDPHLVLPVLEFLQERGVYADEEILRGKIRLLGGTNMVDYAMDIHKSLHGTDDVPADMVARRSEVVERLRALQEAVAPIVAFLSSPQLVQELHADKQYNLHMLQERHQIGPDQIEALYQYAKFQYECGMYSDAADFLSQYRALCTNSERSLSALWGKLAAEILMQNWDVAQEELNRLKEMIDSSSFTSSPVNQLHSRIWLMHWSLFIFFNHENGRNGIIDLFFQDRYLNAIQTNAPHLLRYLAAAVVVNKRRRNMLKELIKVIQQEQNSYKDPIIEFLECLYVKYDFDGAQQKLVECEQVILNDPFLGKRVEERNGIAVPLRDEFLENARLFIFETYCRIHRCIDIGVLAEKLNMTYDEAELWIMNMVKSSKLDAKIDSVTGTLIMTTNRVDVHEQIIESMKNLNARTYMLAKSVVDPGHAAAQQAAR

SEQ ID NO: 65565 - DNA, 1358 bp, Triticum aestivum
  misc_feature (1)..(1358): Ceres Seq. ID no. 13584730
ggtctcctcctccgccctcccacacccaaaaagctctagggaaacccccacgcgcgcgcctggtgccggatcggatcggggatgtgggagtcggtggcgctcacgctggccggcgccgccggcaacagcatcggcaaggtcctccagaagaagggcacccacatcctcccgcccctctccttcaagctcaaggtcatacggggctacgcgctcaacaggctctggatcagcggcttcctcctggacatgtgcggcgccgccctcatgctcactgcgctctcgcaggcgtcggtctctgtcgtgcagccgattgccggctgcggcctcgccatactctgcgtcttctcccatttttacctcaaggaggtcatgaatggccttgattggcttgccatcacaatggccggtctcggcaccataggagtcggtgtaggaggggaggagcagaaagtggaagagattccccttttcagtataccttggctggtgctcaccgttctcatcttgtttgttctgctcaacacttggcttcatatctacaaaaagcaaaggcgcgaacaagagttgactggacctgaagtgatcgaggaggtcatatacggcttagaatcaggcattttgtttgggatttcatcagtgatctctaagatgggatttgtgatgtctgaaatgggctttccgaagattgttgtgccagctgccatttcttgtagtgtggcctgcagtgctgtgggatttgtttaccagactcgaggtctcaagcatgggagggcaattgttgtgtccacgtgtacatcggtggcatctattgtgtctggtgttgtggctggtatggttgcacttgacgaacatctgccgacagctcctgcaggacgtttttttctcctgcttggatggttcttcattattacgggggtgatacttcttgttacttcaacccgattgattgcgcgcctacctaagcctgtgcagaagtttttgaagagtaatatggagcgttcacacagcatcaggaggcctggaccagcccgagggaaggatcccaaccaaagcacaacaatccatgcatcgacattacatatactaacctctacaggaaaagagaaggcctagaacagctgctggtagagcaagattgtcttaacacctttgatgggtcatgttgtcgtttaaatcattatgtggatgtacaagtctagagtagcatcttaaaagtttgggccggttgctcatatactgactgcccttgttataggtctaacagaagtttggaaaatctcctgtgaattttggtcaagttacatatcatcctgtggtgagttgtaagtggtatattcatttgttctcttccctttcgg

SEQ ID NO: 65566 - protein, 343 aa, Triticum aestivum
  peptide (1)..(343): Ceres Seq. ID no. 13584731
MWESVALTLAGAAGNSIGKVLQKKGTHILPPLSFKLKVIRGYALNRLWISGFLLDMCGAALMLTALSQASVSVVQPIAGCGLAILCVFSHFYLKEVMNGLDWLAITMAGLGTIGVGVGGEEQKVEEIPLFSIPWLVLTVLILFVLLNTWLHIYKKQRREQELTGPEVIEEVIYGLESGILFGISSVISKMGFVMSEMGFPKIVVPAAISCSVACSAVGFVYQTRGLKHGRAIVVSTCTSVASIVSGVVAGMVALDEHLPTAPAGRFFLLLGWFFIITGVILLVTSTRLIARLPKPVQKFLKSNMERSHSIRRPGPARGKDPNQSTTIHASTLHILTSTGKEKA

SEQ ID NO: 65567 - protein, 288 aa, Triticum aestivum
  peptide (1)..(288): Ceres Seq. ID no. 13584732
MCGAALMLTALSQASVSVVQPIAGCGLAILCVFSHFYLKEVMNGLDWLAITMAGLGTIGVGVGGEEQKVEEIPLFSIPWLVLTVLILFVLLNTWLHIYKKQRREQELTGPEVIEEVIYGLESGILFGISSVISKMGFVMSEMGFPKIVVPAAISCSVACSAVGFVYQTRGLKHGRAIVVSTCTSVASIVSGVVAGMVALDEHLPTAPAGRFFLLLGWFFIITGVILLVTSTRLIARLPKPVQKFLKSNMERSHSIRRPGPARGKDPNQSTTIHASTLHILTSTGKEKA

SEQ ID NO: 65568 - protein, 282 aa, Triticum aestivum
  peptide (1)..(282): Ceres Seq. ID no. 13584733
MLTALSQASVSVVQPIAGCGLAILCVFSHFYLKEVMNGLDWLAITMAGLGTIGVGVGGEEQKVEEIPLFSIPWLVLTVLILFVLLNTWLHIYKKQRREQELTGPEVIEEVIYGLESGILFGISSVISKMGFVMSEMGFPKIVVPAAISCSVACSAVGFVYQTRGLKHGRAIVVSTCTSVASIVSGVVAGMVALDEHLPTAPAGRFFLLLGWFFIITGVILLVTSTRLIARLPKPVQKFLKSNMERSHSIRRPGPARGKDPNQSTTIHASTLHILTSTGKEKA

SEQ ID NO: 65569 - DNA, 1722 bp, Triticum aestivum
  misc_feature (1)..(1722): Ceres Seq. ID no. 13598609
cccactttattgtgtttaaaaaaaacccaatccatactccagaagtccagatcgatcccaatggcgtcgtcggcgcttcgctgccttccaggcgacatcccgccgacgacgctgctcaccctaccaaacgagatgctcgaggaaatcctcctctgcctctccgacgccggcgacctcgtccgcgcctccatggcccgagtctccatccgccgcctcgtcacgaatcaccgcttcctccgccggttccgcactcgctacccgccgtctctactgggcatcgtctctccccttccccggccccgctgggaccggccgctgctgcaactggcccagccgccgcacccctccgcggccgccgcggccgctttctccgggcttgacgacgccgccgccgccgacttctcatgcgccttcctccccaaccccgcgcgctggcgtaggcgcgacttgcgggacggccgcgccctcttttccggcgtcccagagggcaccaatttcgactgccacgtctttgtcagggacctggctgtctgtgaccccctgtcccggcgctacatcctgctaccttccatccccgacgacctagccgccttggtgcagccacccgacgtgctgcgtttcgagcccttccttgctcctccggcggccgaggatgaggacggcttgtctttcagagttatttgcttggtgcagtgcaaaaccaagctggtcctcctcatcttctcttcaggttcaggtgctgaacaatggcgtgctgttacatttgacaattggatcagtttgctcacaggatcaggtaaccagccagagtcataccggcggtcagtaatacgccactatgcacacggctacttctgttgggtgctttctccggcaagcaagttgctcatgctcgacacacgcagcatgggtttctcagttgtggacctcccagatggcaccggtgaaaatgaagcacaggttgccattttggaggcagcgaatggaaggattaagatgtttattaatgagcatttcacaactgaactcaggtattatgtgttgcaaaatgatggagttggtgcaaaccagtggctgtcagaggcaacgttcaatttacccgtaaataatggcggctatatattcatgggcgtagcggggggatacttactcctacaagggcttggagaagacgaccaatatccattccatttggtttcgttgaatctgaagactttacagcttgagttgttccttgcatcaaagcgcaataacaagggtgctcatctgtttgccggtttcccaccatccttgtctttaccaactcttcgacatgatatgactgatgcctgcatttctaattcagatatctgatattgatgccgctgggagatgaaaccttgacgtctggaggtatggagcagcaacttggagcattatgtactggatggaatcatcaggctttccttttgagacggacgcaggcttgtttgcggtgctgactgttgtgcggctcggtgcttattttcagatatgtcatgggtgaatagttgtgataatctaccaaattagattcacaaatcaaatattactagataatttctatttttggaacctttgtttttatcagatatgcaatgtgactagaagcagggtgatatataccatcttctttgtttttgtttttgtgtaagtggtacaaatcggagatatacaaattggttctaccatcttctttgtttt

SEQ ID NO: 65570 - protein, 450 aa, Triticum aestivum
  peptide (1)..(450): Ceres Seq. ID no. 13598610
PTLLCLKKTQSILQKSRSIPMASSALRCLPGDIPPTTLLTLPNEMLEEILLCLSDAGDLVRASMARVSIRRLVTNHRFLRRFRTRYPPSLLGIVSPLPRPRWDRPLLQLAQPPHPSAAAAAAFSGLDDAAAADFSCAFLPNPARWRRRDLRDGRALFSGVPEGTNFDCHVFVRDLAVCDPLSRRYILLPSIPDDLAALVQPPDVLRFEPFLAPPAAEDEDGLSFRVICLVQCKTKLVLLIFSSGSGAEQWRAVTFDNWISLLTGSGNQPESYRRSVIRHYAHGYFCWVLSPASKLLMLDTRSMGFSVVDLPDGTGENEAQVAILEAANGRIKMFINEHFTTELRYYVLQNDGVGANQWLSEATFNLPVNNGGYIFMGVAGGYLLLQGLGEDDQYPFHLVSLNLKTLQLELFLASKRNNKGAHLFAGFPPSLSLPTLRHDMTDACISNSDI

SEQ ID NO: 65571 - protein, 430 aa, Triticum aestivum
  peptide (1)..(430): Ceres Seq. ID no. 13598611
MASSALRCLPGDIPPTTLLTLPNEMLEEILLCLSDAGDLVRASMARVSIRRLVTNHRFLRRFRTRYPPSLLGIVSPLPRPRWDRPLLQLAQPPHPSAAAAAAFSGLDDAAAADFSCAFLPNPARWRRRDLRDGRALFSGVPEGTNFDCHVFVRDLAVCDPLSRRYILLPSIPDDLAALVQPPDVLRFEPFLAPPAAEDEDGLSFRVICLVQCKTKLVLLIFSSGSGAEQWRAVTFDNWISLLTGSGNQPESYRRSVIRHYAHGYFCWVLSPASKLLMLDTRSMGFSVVDLPDGTGENEAQVAILEAANGRIKMFINEHFTTELRYYVLQNDGVGANQWLSEATFNLPVNNGGYIFMGVAGGYLLLQGLGEDDQYPFHLVSLNLKTLQLELFLASKRNNKGAHLFAGFPPSLSLPTLRHDMTDACISNSDI

SEQ ID NO: 65572 - protein, 406 aa, Triticum aestivum
  peptide (1)..(406): Ceres Seq. ID no. 13598612
MLEEILLCLSDAGDLVRASMARVSIRRLVTNHRFLRRFRTRYPPSLLGIVSPLPRPRWDRPLLQLAQPPHPSAAAAAAFSGLDDAAAADFSCAFLPNPARWRRRDLRDGRALFSGVPEGTNFDCHVFVRDLAVCDPLSRRYILLPSIPDDLAALVQPPDVLRFEPFLAPPAAEDEDGLSFRVICLVQCKTKLVLLIFSSGSGAEQWRAVTFDNWISLLTGSGNQPESYRRSVIRHYAHGYFCWVLSPASKLLMLDTRSMGFSVVDLPDGTGENEAQVAILEAANGRIKMFINEHFTTELRYYVLQNDGVGANQWLSEATFNLPVNNGGYIFMGVAGGYLLLQGLGEDDQYPFHLVSLNLKTLQLELFLASKRNNKGAHLFAGFPPSLSLPTLRHDMTDACISNSDI

SEQ ID NO: 65573 - DNA, 1045 bp, Triticum aestivum
  misc_feature (1)..(1045): Ceres Seq. ID no. 13584734
atgtgccattgctgcagttgcgtgacacgctcgcctaactcccgcacgcaccccctccaccctccgctgcccgtggccggctgtaccgcaccattcccacacaccctcacttagctagctgctcccattattctcacctgtccccatttgatccatcttctgatcgtctacccgctcgccttctctttccctgcgagcagcccaggccggaggcatgtcggccaagaagatcgtggtgaagctggagctccatgacaacaaggacaagcagaaggccatgaaggccgtctccgtcctcgtcggcatcgatgccatatccatggacctggcgtcgcgcaagatgacggtgatcggcacggtggacccggtgcacgtggtgagcaagctgcgcaagggctgggcggcctacatcgagtccgtcggcccggccaaggagcccgagaagaaagaggagaagaaggaggaggccaagaaggagggagacggggccaagaaggaaggcggcgacggcggcgacgccaagaaggagggcgacgggaagaaggagggcgacgggaagaaggacggcgacaagaaggaggagggtgacggcaagaaggacggcgacgggaagaaggacggcgacaagaaggaggagggcgatggcaagaaggacgaccagaagaagcccgccgccgtggccccgctgccgttcccgcaccacatgccgctgccgcaccacatgccgccgccctacatgtacaacgcggactacatgatgaaccagtaccggccggcgccgccggcctacccgccgccgtacgtgccgccgcagcactactacgtgcggaacatgagcatggaggagaacccaaactcgtgcgtcatctgctaagtcaaagtcgatccctcgatcgcgcgcgtacgtcccgagaggcgaccatgcatgcatctgtgtatagtagtattttctcgaccgtttttacgagaccagcaaagtttgcaagatgaaactgtacaactagtagtctactatagcactacgtacgtacatacgtacatttgt

SEQ ID NO: 65574 - protein, 219 aa, Triticum aestivum
  peptide (1)..(219): Ceres Seq. ID no. 13584735
MSAKKIVVKLELHDNKDKQKAMKAVSVLVGIDAISMDLASRKMTVIGTVDPVHVVSKLRKGWAAYIESVGPAKEPEKKEEKKEEAKKEGDGAKKEGGDGGDAKKEGDGKKEGDGKKDGDKKEEGDGKKDGDGKKDGDKKEEGDGKKDDQKKPAAVAPLPFPHHMPLPHHMPPPYMYNADYMMNQYRPAPPAYPPPYVPPQHYYVRNMSMEENPNSCVIC

SEQ ID NO: 65575 - protein, 198 aa, Triticum aestivum
  peptide (1)..(198): Ceres Seq. ID no. 13584736
MKAVSVLVGIDAISMDLASRKMTVIGTVDPVHVVSKLRKGWAAYIESVGPAKEPEKKEEKKEEAKKEGDGAKKEGGDGGDAKKEGDGKKEGDGKKDGDKKEEGDGKKDGDGKKDGDKKEEGDGKKDDQKKPAAVAPLPFPHHMPLPHHMPPPYMYNADYMMNQYRPAPPAYPPPYVPPQHYYVRNMSMEENPNSCVIC

SEQ ID NO: 65576 - protein, 184 aa, Triticum aestivum
  peptide (1)..(184): Ceres Seq. ID no. 13584737
MDLASRKMTVIGTVDPVHVVSKLRKGWAAYIESVGPAKEPEKKEEKKEEAKKEGDGAKKEGGDGGDAKKEGDGKKEGDGKKDGDKKEEGDGKKDGDGKKDGDKKEEGDGKKDDQKKPAAVAPLPFPHHMPLPHHMPPPYMYNADYMMNQYRPAPPAYPPPYVPPQHYYVRNMSMEENPNSCVIC

SEQ ID NO: 65577 - DNA, 1249 bp, Triticum aestivum
  misc_feature (1)..(1249): Ceres Seq. ID no. 13597715
agggtttttctcactgccagcacgccactccccctccccaccccccttcagcagcgcaacacaccaacgccgccgccgcgccgccagcccaccgggagcaccgccggagaaaccagccatggatcggtaccagcgggtcgagaagccgcggcccgaggccgccgccatcagcgagaacgagatccgtatcaccacacagggcctcatccgcaactacgtcacctacgccacctccctcctccaggaaaaacgggtgaaagaaattgtgttgaaggccatgggacaagctatcagcaagacagtggctattactgagatcataaagaaaaggatccctgggttgcatcaagatacaacaatcagttcagtcagtattactgatgtatgggaacccattgaggaaggccttgtaccattggagatgactcgtcatgtttcaatgatctcaatctccttgtcacctaaggagctcgacacaagttcacccggatatcaagctccattgcatgcagagccacttaaaccaaggtaccagcaagttcagcgatatcaacaacagcaccagccaagacaaaatcaaggtcaaacagattcatatgtacgtggaagaggcagagggagaggaaggggctggggtggtaggggaggatatggtggaggttatggtgggtatgataataaccaaggaggttatggtggatatagcaaccagggaggatatggccacaaccaaggtgggtatggcaatcatggaggttacggccacaaccaaggtgggtatggcaaccagggaggttacggcaaccagggagggtacggccaaaaccaaggtggatatggagggggttatggttatgaccaaggtggatatgggggatatgataatggtggctggaattacaaccagaacagaggccgtggtggcggtggacgaggaagaggcaactggggatacagtggtccaggatacgagcgcggtggacgaggtgcaggcggcccaggtggcccaggcggcaggggatacgtgcggggccgtggtcggatgggtcctggccgcgggcggggcaaccagaactattaggtcacatagtgctgtattgttgcaaaaaaagagagaaaaaggtacgcgttctgtgaatcggaaccgaaccttgcgctgtttcattgtgaaccatcgactaggcttcccagtttttagctataattgccaatggtatctgtaccattgcttccattctgtgggattttg

SEQ ID NO: 65578 - protein, 359 aa, Triticum aestivum
  peptide (1)..(359): Ceres Seq. ID no. 13597716
GFFSLPARHSPSPPPFSSATHQRRRRAASPPGAPPEKPAMDRYQRVEKPRPEAAAISENEIRITTQGLIRNYVTYATSLLQEKRVKEIVLKAMGQAISKTVAITEIIKKRIPGLHQDTTISSVSITDVWEPIEEGLVPLEMTRHVSMISISLSPKELDTSSPGYQAPLHAEPLKPRYQQVQRYQQQHQPRQNQGQTDSYVRGRGRGRGRGWGGRGGYGGGYGGYDNNQGGYGGYSNQGGYGHNQGGYGNHGGYGHNQGGYGNQGGYGNQGGYGQNQGGYGGGYGYDQGGYGGYDNGGWNYNQNRGRGGGGRGRGNWGYSGPGYERGGRGAGGPGGPGGRGYVRGRGRMGPGRGRGNQNY

SEQ ID NO: 65579 - protein, 320 aa, Triticum aestivum
  peptide (1)..(320): Ceres Seq. ID no. 13597717
MDRYQRVEKPRPEAAAISENEIRITTQGLIRNYVTYATSLLQEKRVKEIVLKAMGQAISKTVAITEIIKKRIPGLHQDTTISSVSITDVWEPIEEGLVPLEMTRHVSMISISLSPKELDTSSPGYQAPLHAEPLKPRYQQVQRYQQQHQPRQNQGQTDSYVRGRGRGRGRGWGGRGGYGGGYGGYDNNQGGYGGYSNQGGYGHNQGGYGNHGGYGHNQGGYGNQGGYGNQGGYGQNQGGYGGGYGYDQGGYGGYDNGGWNYNQNRGRGGGGRGRGNWGYSGPGYERGGRGAGGPGGPGGRGYVRGRGRMGPGRGRGNQNY

SEQ ID NO: 65580 - protein, 267 aa, Triticum aestivum
  peptide (1)..(267): Ceres Seq. ID no. 13597718
MGQAISKTVAITEIIKKRIPGLHQDTTISSVSITDVWEPIEEGLVPLEMTRHVSMISISLSPKELDTSSPGYQAPLHAEPLKPRYQQVQRYQQQHQPRQNQGQTDSYVRGRGRGRGRGWGGRGGYGGGYGGYDNNQGGYGGYSNQGGYGHNQGGYGNHGGYGHNQGGYGNQGGYGNQGGYGQNQGGYGGGYGYDQGGYGGYDNGGWNYNQNRGRGGGGRGRGNWGYSGPGYERGGRGAGGPGGPGGRGYVRGRGRMGPGRGRGNQNY

SEQ ID NO: 65581 - protein, 247 aa, Triticum aestivum
  peptide (1)..(247): Ceres Seq. ID no. 13597719
MQSHLNQGTSKFSDINNSTSQDKIKVKQIHMYVEEAEGEEGAGVVGEDMVEVMVGMIITKEVMVDIATREDMATTKVGMAIMEVTATTKVGMATREVTATREGTAKTKVDMEGVMVMTKVDMGDMIMVAGITTRTEAVVAVDEEEATGDTVVQDTSAVDEVQAAQVAQAAGDTCGAVVGWVLAAGGATRTIRSHSAVLLQKKREKGTRSVNRNRTLRCFIVNHRLGFPVFSYNCQWYLYHCFHSVGF

SEQ ID NO: 65582 - DNA, 1227 bp, Triticum aestivum
  misc_feature (1)..(1227): Ceres Seq. ID no. 13598613
acctagaacatcctaatcgaaaagtttttgcttttatttggagcgtctcctccgtgctcagcgggctactgccctgcagcagatcccgcggccccgatgcctcctcccgccgccccgacgcctcctcccgccgagccgctgccaaattcgccagattctacctcccccacggaggaggctgaggcggatgcgggaggcacgccgtcgagggccgggccggtggggacagtaagctggggaactgggaccctcgtcggcgtattcaccgggcttctctacggcggggccaaggaggccaacgccaacgtcagcaaagatgctgaagtgatgttgaagatgggaagcaccacagacaagcgcgaacaatataggttgatgagagatgccatggagaaaaggttcattcgggttgccaaaggctcactagttggtggtgctcgccttgggatgttcactgcaactttctttggcatacagaaccttcttattgagaaccgtggggtgcatgatgtattcaatattgttggagctggctcggctaccgcagctgcttttgggcttatattgcctggttcaccaatgtggcgtgcaaggaatgtattggttggatctgctctcggtgccggaatttgctttccacttggttgggtacagttgaagctggcagagaaggccaatcttgagattgaaaattcaaaatcgccatcggatttacaaggcaatcaaagtcgtgtgggggctgctatagacagactagagaacagcctgaggaagtaacagtttgtacccatgcaaggagccaaggatctgttgtcaacacccatggctatttcgcttttgttttgttcatgtactttccataggaatgcggttacttttgaagtggtaatggcagcaagggaaactgtctcttgtatgaagataaatttggatacaaatacttacttgctggagctgggatatttctagttaaggtacctgtttgggtgtttgtgccattatgacctctatgatcagcattgtgcatagtattagtattcgtgacttctcgttagcttgacaatacctcggaaggatgctgccatctcttattttcttggaaagtttgtatcggtgatccatcacaaactatgcttgtttggtttgatgctcatgtatgctaaattttgccttggcagaattttgtcaaaaaaaaaaaaaaaaaagcttatcgataccgtcgacctc

SEQ ID NO: 65583 - protein, 226 aa, Triticum aestivum
  peptide (1)..(226): Ceres Seq. ID no. 13598614
MPPPAAPTPPPAEPLPNSPDSTSPTEEAEADAGGTPSRAGPVGTVSWGTGTLVGVFTGLLYGGAKEANANVSKDAEVMLKMGSTTDKREQYRLMRDAMEKRFIRVAKGSLVGGARLGMFTATFFGIQNLLIENRGVHDVFNIVGAGSATAAAFGLILPGSPMWRARNVLVGSALGAGICFPLGWVQLKLAEKANLEIENSKSPSDLQGNQSRVGAAIDRLENSLRK

SEQ ID NO: 65584 - protein, 149 aa, Triticum aestivum
  peptide (1)..(149): Ceres Seq. ID no. 13598615
MLKMGSTTDKREQYRLMRDAMEKRFIRVAKGSLVGGARLGMFTATFFGIQNLLIENRGVHDVFNIVGAGSATAAAFGLILPGSPMWRARNVLVGSALGAGICFPLGWVQLKLAEKANLEIENSKSPSDLQGNQSRVGAAIDRLENSLRK

SEQ ID NO: 65585 - protein, 146 aa, Triticum aestivum
  peptide (1)..(146): Ceres Seq. ID no. 13598616
MGSTTDKREQYRLMRDAMEKRFIRVAKGSLVGGARLGMFTATFFGIQNLLIENRGVHDVFNIVGAGSATAAAFGLILPGSPMWRARNVLVGSALGAGICFPLGWVQLKLAEKANLEIENSKSPSDLQGNQSRVGAAIDRLENSLRK

SEQ ID NO: 65586 - DNA, 1325 bp, Triticum aestivum
  misc_feature (1)..(1325): Ceres Seq. ID no. 12625980
ttccattgcttgcttgctcctctgttctcttctccttgcattattatttccctccgtctccttcctcgcatccagccgcaactctccccctcctttgacttgcttccaagaaagccgatcgccatgcgcgtgcagtgcgacgtctgcggcctcgagccggccgccgtgctctgctgcgccgacgaggccgcgctctgctccccctgcaaccgccgcgtccaccgcgccaacaagctcgccggcaagcaccgccgcctcaccctcctccagccctccccggccgccaacgacgccgccgcgccgctctgcgacgtctgcaaggagcggagggggctcgtgttctgcgtggaggaccgggcgatcctgtgcgccgactgcgacgagcccattcacagcgccaacgagctcacggccaagcacagccgcttcctcctcgtcggtgccaagctctccgccgaccccgtggaccaggagatcccctccccggacgggagctccgtcgagcaggacgactgctcggcctcggccgccgaggaagcccctgcagttcatgacgccagccacgccggaggaggaggaggaggaagcagcatctcagactacctcaccaacatctgccccggctggcaagtcgacgaactcctcttcgacgacgccgccttcgtcgccaagcagaaggggcgcgacgagcaggtgccgttcctggacgccgacctgttcgacgtggtcgccgccgagcgtccggggaagcgcggcgcgtgggcgccccacgtgccgcatacgccggttccggcctggggcctgcaggagtttccggccgctttggtggccccggcggcggcggcgaaggccaagcaggggcacgtgcgggagtggtaccacagcgacagcgacagcgacgtgttcgccgtgccggagatcacgtcgccgccggccaagcgggcgcggccgtcgtcgttctggtgcctgtgaaccagctagcgcggcggccaaccacccacgccgccgcagcaaccgggcgagctacgtacccgtgactcgatcgatccatcactagtgtaatctttgctcgttgtagcttggtgtgaccgaagtagtaccgaactctagtagcgcatctatggtagtagagtacgctgttttatgcatataagaatgttgctgtcgtatcataaataagtagcgaacgaatcgtgatctccttcaactcttcaactctatcagacattcagacctgaaaactaaattgcacgcatctccaagcaagtaatgtgtatgggactgcattttcgagagaaaaagtaatgtatgcttctgttctactc

SEQ ID NO: 65587 - protein, 351 aa, Triticum aestivum
  peptide (1)..(351): Ceres Seq. ID no. 12625981
SIACLLLCSLLLALLFPSVSFLASSRNSPPPLTCFQESRSPCACSATSAASSRPPCSAAPTRPRSAPPATAASTAPTSSPASTAASPSSSPPRPPTTPPRRSATSARSGGGSCSAWRTGRSCAPTATSPFTAPTSSRPSTAASSSSVPSSPPTPWTRRSPPRTGAPSSRTTARPRPPRKPLQFMTPATPEEEEEEAASQTTSPTSAPAGKSTNSSSTTPPSSPSRRGATSRCRSWTPTCSTWSPPSVRGSAARGRPTCRIRRFRPGACRSFRPLWWPRRRRRRPSRGTCGSGTTATATATCSPCRRSRRRRPSGRGRRRSGACEPASAAANHPRRRSNRASYVPVTRSIHH

SEQ ID NO: 65588 - protein, 323 aa, Triticum aestivum
  peptide (1)..(323): Ceres Seq. ID no. 12625982
FHCLLAPLFSSPCIIISLRLLPRIQPQLSPSFDLLPRKPIAMRVQCDVCGLEPAAVLCCADEAALCSPCNRRVHRANKLAGKHRRLTLLQPSPAANDAAAPLCDVCKERRGLVFCVEDRAILCADCDEPIHSANELTAKHSRFLLVGAKLSADPVDQEIPSPDGSSVEQDDCSASAAEEAPAVHDASHAGGGGGGSSISDYLTNICPGWQVDELLFDDAAFVAKQKGRDEQVPFLDADLFDVVAAERPGKRGAWAPHVPHTPVPAWGLQEFPAALVAPAAAAKAKQGHVREWYHSDSDSDVFAVPEITSPPAKRARPSSFWCL

SEQ ID NO: 65589 - protein, 282 aa, Triticum aestivum
  peptide (1)..(282): Ceres Seq. ID no. 12625983
MRVQCDVCGLEPAAVLCCADEAALCSPCNRRVHRANKLAGKHRRLTLLQPSPAANDAAAPLCDVCKERRGLVFCVEDRAILCADCDEPIHSANELTAKHSRFLLVGAKLSADPVDQEIPSPDGSSVEQDDCSASAAEEAPAVHDASHAGGGGGGSSISDYLTNICPGWQVDELLFDDAAFVAKQKGRDEQVPFLDADLFDVVAAERPGKRGAWAPHVPHTPVPAWGLQEFPAALVAPAAAAKAKQGHVREWYHSDSDSDVFAVPEITSPPAKRARPSSFWCL

SEQ ID NO: 65590 - DNA, 1642 bp, Triticum aestivum
  misc_feature (1)..(1642): Ceres Seq. ID no. 15176783
aacagccaagcttcttctactgctagtctgaaggcagtagttactgctagtatcactatcgtgagttgccgactatttgtcaatggcggccttcgcaaagatcgccatggagtgcgtgcacgatcccctcatctggctacttattgcgtcggtggccttggtcatcctgcgaagacggcggctgaacccgccgctccctccgggccccaagccgctgccgatcatcggcaacatgatgatggcggaccagctgactcaccgtggcctggcggcgctggcgaagcagtacggcgggttgctgcacctccgcctgggctcgctccgcgtcttcgcggtgtcgaccccggagtacgcgcgcgaggtgctccaggcgcaggacggcgacttctggcaccgcccagcctccatcgccgtccgctacctcacctacggctgctccgacatggcgttcgcgcgcgacgggccctactggcgccagatgcgcaagctgtgcgtcacgaggctcttcagccgccggcgcgccgagacgtggctcgccgtgcgcgacgggtacggggagctcgcccgggccgtcggcaggtccggcggcgaggccgtgaacctcggcgagctcatcttcaagcacaccgtgagcgtcatcttccgggccgccttcggcgtccgcgacgtccaaggactggacgagttcatccccatgttcaaggagttctccaagctcttagaagcgttccacgtcggtgacttcttcccttggcttagctggatgggccgacggggcttcgaccgccgcctccgcaccgtgcgcgccgctctcgggacgtttgtggacaagatcattgacgagcacgtgaggaggggcaagaaccccgacgacgccgacgccgacatggtagacggcctactcgcgttactcgctgatgcgaaccaagccagcggggaggacgacctccgcttcacccgcgacaacgtcagggccatgatgatggacatgttgtttggcggaccagacacagtggggttcaccatcgagtgggcgatggcagagatgatccattgccctcacatcctcctgcggctgcagcaggagctcgccgacgttgtggggctcgaccggattgttaccgaatcggacctcggcaagctccccttcctcaagtgcgtcgtcaaggagacgctccgactgcacccgccgatcccgatccacctccacgggacgaccaaagattgcgtcctcggtggctactcggtgcccaggggctcccgtgtcttcatcaacgcgtgggcgatcaaccgcgacggcgaggcgtggaaggaccctgacacgttccggccgtcgaggttcatgccagacggggaagccgccgggctggatctcaagggcggttgctatgagttgttgtcgttcgggtcgggtcgacgctcgtgcccggcacaggggcttggtcagcacgccgtggagttcgccgtcgcgcagcttgtgcatgggttcgactggaagctacccggcgacatgaaaccgacggagctcgacatgagcgacatgaacggtgtcaccgtgtcccgcgccacacggctctacgcggttcccacgccccggctcacttgtcctttgtgatattaattgaaacatcgctcttgttgt

SEQ ID NO: 65591 - protein, 510 aa, Triticum aestivum
  peptide (1)..(510): Ceres Seq. ID no. 15176784
MAAFAKIAMECVHDPLIWLLIASVALVILRRRRLNPPLPPGPKPLPIIGNMMMADQLTHRGLAALAKQYGGLLHLRLGSLRVFAVSTPEYAREVLQAQDGDFWHRPASIAVRYLTYGCSDMAFARDGPYWRQMRKLCVTRLFSRRRAETWLAVRDGYGELARAVGRSGGEAVNLGELIFKHTVSVIFRAAFGVRDVQGLDEFIPMFKEFSKLLEAFHVGDFFPWLSWMGRRGFDRRLRTVRAALGTFVDKIIDEHVRRGKNPDDADADMVDGLLALLADANQASGEDDLRFTRDNVRAMMMDMLFGGPDTVGFTIEWAMAEMIHCPHILLRLQQELADVVGLDRIVTESDLGKLPFLKCVVKETLRLHPPIPIHLHGTTKDCVLGGYSVPRGSRVFINAWAINRDGEAWKDPDTFRPSRFMPDGEAAGLDLKGGCYELLSFGSGRRSCPAQGLGQHAVEFAVAQLVHGFDWKLPGDMKPTELDMSDMNGVTVSRATRLYAVPTPRLTCPL

SEQ ID NO: 65592 - protein, 502 aa, Triticum aestivum
  peptide (1)..(502): Ceres Seq. ID no. 15176785
MECVHDPLIWLLIASVALVILRRRRLNPPLPPGPKPLPIIGNMMMADQLTHRGLAALAKQYGGLLHLRLGSLRVFAVSTPEYAREVLQAQDGDFWHRPASIAVRYLTYGCSDMAFARDGPYWRQMRKLCVTRLFSRRRAETWLAVRDGYGELARAVGRSGGEAVNLGELIFKHTVSVIFRAAFGVRDVQGLDEFIPMFKEFSKLLEAFHVGDFFPWLSWMGRRGFDRRLRTVRAALGTFVDKIIDEHVRRGKNPDDADADMVDGLLALLADANQASGEDDLRFTRDNVRAMMMDMLFGGPDTVGFTIEWAMAEMIHCPHILLRLQQELADVVGLDRIVTESDLGKLPFLKCVVKETLRLHPPIPIHLHGTTKDCVLGGYSVPRGSRVFINAWAINRDGEAWKDPDTFRPSRFMPDGEAAGLDLKGGCYELLSFGSGRRSCPAQGLGQHAVEFAVAQLVHGFDWKLPGDMKPTELDMSDMNGVTVSRATRLYAVPTPRLTCPL

SEQ ID NO: 65593 - protein, 460 aa, Triticum aestivum
  peptide (1)..(460): Ceres Seq. ID no. 15176786
MMMADQLTHRGLAALAKQYGGLLHLRLGSLRVFAVSTPEYAREVLQAQDGDFWHRPASIAVRYLTYGCSDMAFARDGPYWRQMRKLCVTRLFSRRRAETWLAVRDGYGELARAVGRSGGEAVNLGELIFKHTVSVIFRAAFGVRDVQGLDEFIPMFKEFSKLLEAFHVGDFFPWLSWMGRRGFDRRLRTVRAALGTFVDKIIDEHVRRGKNPDDADADMVDGLLALLADANQASGEDDLRFTRDNVRAMMMDMLFGGPDTVGFTIEWAMAEMIHCPHILLRLQQELADVVGLDRIVTESDLGKLPFLKCVVKETLRLHPPIPIHLHGTTKDCVLGGYSVPRGSRVFINAWAINRDGEAWKDPDTFRPSRFMPDGEAAGLDLKGGCYELLSFGSGRRSCPAQGLGQHAVEFAVAQLVHGFDWKLPGDMKPTELDMSDMNGVTVSRATRLYAVPTPRLTCPL

SEQ ID NO: 65594 - DNA, 1270 bp, Triticum aestivum
  misc_feature (1)..(1270): Ceres Seq. ID no. 13656662
ccaaggccaggcgcggcaccgccactcccgcgcctccctcccctatggcacgtcctccctcccaggcctcggctgtcttctccgtcggcggcgagggcgccgcactcttcctctccgtcgccggcgagggcgccgcgccctaaactccgaggctactgagaacttcacagtatataacttgattgggagaggaagctgcggttcagtgtacagagcaaagctaaaccaaaaacagatggttgtggcagtgaaagtttttgaccttgacatgcaaggcgcggataaaagtttcatctcagaatgtaaagcactgagaaacattcggcaccgtaatcttcttccaattctgactgcatgctcaacaattgataaccaaggccgggatttcaaagctctagtctaccagttcatgcccaacggcaacctggacacttggctgcacccggcaggagatggaaaagccccaaagcaactggacctctctcaaagaatgaaaatagctgttgatatagccgatgcattgcaatatatacaccatgactgtgagaatcctattgttcactgtgatttgaagcccagcaatatcctcctagattatgatatgacagctcgtttgggggactttggcatcgcaaggttgtacatcaaatccaaatcagcggcagctggaggttcgagttcaatgggtacaataactctgaggggcacgattggatatattgctccagagtatgcgggaggtggctacctatcgacgtctggagacgcgtacagttttgggatagtgctgctggagatgctgacaggaagaaggccgaccgaccctatgttctgcgaggggcttgacatcgtgaactttgtcaagaggaactttccggatcagatacttgatatccttgacgcttctctccgagaagaatgtcaagactgttctcaggataatctggaaggagaaaacgaagtccaccggtgcctgctgtccttgctgaaagtggcactttcttgcgcaagccaggatcctaacgaacgaatgaacatgagagaagcagctactgaattgcacgcgatcgacacattgtatgtgtcttgaagcggatgctatgtgctagagctgtatcatacatacataccagctgatgtgaagcgtgtaactagagctgtatcgtacgttcgtactatagtggccgtgtagaacttttgtactcgaaaaatttatttgttgggctgtggctttgttcctagcctttgaaatgctcatctttttgcaaag

SEQ ID NO: 65595 - protein, 362 aa, Triticum aestivum
  peptide (1)..(362): Ceres Seq. ID no. 13656663
QGQARHRHSRASLPYGTSSLPGLGCLLRRRRGRRTLPLRRRRGRRALNSEATENFTVYNLIGRGSCGSVYRAKLNQKQMVVAVKVFDLDMQGADKSFISECKALRNIRHRNLLPILTACSTIDNQGRDFKALVYQFMPNGNLDTWLHPAGDGKAPKQLDLSQRMKIAVDIADALQYIHHDCENPIVHCDLKPSNILLDYDMTARLGDFGIARLYIKSKSAAAGGSSSMGTITLRGTIGYIAPEYAGGGYLSTSGDAYSFGIVLLEMLTGRRPTDPMFCEGLDIVNFVKRNFPDQILDILDASLREECQDCSQDNLEGENEVHRCLLSLLKVALSCASQDPNERMNMREAATELHAIDTLYVS

SEQ ID NO: 65596 - protein, 284 aa, Triticum aestivum
  peptide (1)..(284): Ceres Seq. ID no. 13656664
MVVAVKVFDLDMQGADKSFISECKALRNIRHRNLLPILTACSTIDNQGRDFKALVYQFMPNGNLDTWLHPAGDGKAPKQLDLSQRMKIAVDIADALQYIHHDCENPIVHCDLKPSNILLDYDMTARLGDFGIARLYIKSKSAAAGGSSSMGTITLRGTIGYIAPEYAGGGYLSTSGDAYSFGIVLLEMLTGRRPTDPMFCEGLDIVNFVKRNFPDQILDILDASLREECQDCSQDNLEGENEVHRCLLSLLKVALSCASQDPNERMNMREAATELHAIDTLYVS

SEQ ID NO: 65597 - protein, 273 aa, Triticum aestivum
  peptide (1)..(273): Ceres Seq. ID no. 13656665
MQGADKSFISECKALRNIRHRNLLPILTACSTIDNQGRDFKALVYQFMPNGNLDTWLHPAGDGKAPKQLDLSQRMKIAVDIADALQYIHHDCENPIVHCDLKPSNILLDYDMTARLGDFGIARLYIKSKSAAAGGSSSMGTITLRGTIGYIAPEYAGGGYLSTSGDAYSFGIVLLEMLTGRRPTDPMFCEGLDIVNFVKRNFPDQILDILDASLREECQDCSQDNLEGENEVHRCLLSLLKVALSCASQDPNERMNMREAATELHAIDTLYVS

SEQ ID NO: 65598 - DNA, 1024 bp, Triticum aestivum
  misc_feature (1)..(1024): Ceres Seq. ID no. 15179804
agaaccagtaacccgcactgcgcccactccgatctccccagtcccctccaaatccctcgccggaaccctagccccgcgccgccgccatgcctccgcgccgctctaagggaggggccgggggcaagcccgaccccgaagccaccgacgccgagcccgtagacgagaccacggtcgacgccatgtccgaagacgaggccgacgacgacaactccaaggaggagtccgctgagagcggagctgaggatacggacggcgaggactccaaggaggaagccgccgagaccaaggccgagcagatggatgcggagcatcaaagagggaagccgccgagaccaaggccgaggagacggtcgccgaacctgaagccaatggtgcagatgcggagaccaaagtcgaggcggcggatgccaaagtcgaagaggaagccgccgagagcgactctgagcgcgaggcggatgccggggaagccgatccagaagcggaagcagaggaaaccgacggcgagaatgacaagcaagccgctcgggccgacggcgagagtggagaggaagctgctgggtctggtggcgaggatgaagaagaagccgccggcacagacggcgacaacgccgctgatgttggtggcgagaaggtagatgcggattctcaagccgaaggtgagggtactgatgccgagcctgatgctctcgaggaatcccctcctccctcccctccagcccgtagccgccgccgcaagcgagtggtcaaacctgacccgcccactgaggatgacgaggaagaggagacccctctgcccccacgccggcgccgacgtcgcaaagcaggggaacgtggcgactctccaccgccactgccggacaacctccggtgccgcagaagtgatggtaagaagtggcgctgctcagctcgtgcactccccactgtcagcttttgcgagtatcactatgccaaggctagcaagggcaagaaaccgccagccgatggggaggtccttgccgtggctctccaacggcaaaagaagaac

SEQ ID NO: 65599 - protein, 182 aa, Triticum aestivum
  peptide (1)..(182): Ceres Seq. ID no. 15179805
MPPRRSKGGAGGKPDPEATDAEPVDETTVDAMSEDEADDDNSKEESAESGAEDTDGEDSKEEAAETKAEQMDAEHQRGKPPRPRPRRRSPNLKPMVQMRRPKSRRRMPKSKRKPPRATLSARRMPGKPIQKRKQRKPTARMTSKPLGPTARVERKLLGLVARMKKKPPAQTATTPLMLVARR

SEQ ID NO: 65600 - protein, 151 aa, Triticum aestivum
  peptide (1)..(151): Ceres Seq. ID no. 15179806
MSEDEADDDNSKEESAESGAEDTDGEDSKEEAAETKAEQMDAEHQRGKPPRPRPRRRSPNLKPMVQMRRPKSRRRMPKSKRKPPRATLSARRMPGKPIQKRKQRKPTARMTSKPLGPTARVERKLLGLVARMKKKPPAQTATTPLMLVARR

SEQ ID NO: 65601 - protein, 129 aa, Triticum aestivum
  peptide (1)..(129): Ceres Seq. ID no. 15179807
MRILKPKVRVLMPSLMLSRNPLLPPLQPVAAAASEWSNLTRPLRMTRKRRPLCPHAGADVAKQGNVATLHRHCRTTSGAAEVMVRSGAAQLVHSPLSAFASITMPRLARARNRQPMGRSLPWLSNGKRR

SEQ ID NO: 65602 - DNA, 713 bp, Triticum aestivum
  misc_feature (1)..(713): Ceres Seq. ID no. 12618682
ctctctctcgtttatctctctgttcgatccagatcgagatggtcggcgcccgcaaccacctcgcttggcctcgccggccaccacctcgccgccggtcatccactttccccttcggctcgccgttaccggacccggcaccgtcgcccccacaggcccgctggcgcacgccacctcgtcgccttcgccctttgccccgggcgccgttggccccatcgcctcgggcccacgccggcctctacttcgcccatggcgtcgccggccacgtctcccttcgcccacctctgcttcgcccatggcgccgccagctctgtcgccccccgccgacctctgcttcgcccatggcgcagctggccccgtcgccccccgccagcctctgcttcgcccatggcaccgccggccccgtcgccccctccggcttctgccggccccggccacgtcgccctcgcgtgcctccgctaccctcgacgctgcaccgcctcacacctcgaggagcggcagcagctcctcgggcatcagtgtgctgcggaagggggagggagagtggtgcggctgctccggcgagcacgggcacagggggtggttgcaggttggcgcaggcgtgcagatcgagctcaatatggatgcgcatgctggatcttgggctgctatactctttgtaatattttcatgtgtaatccgttcatctaattaatagagcagttttgccttggatc

SEQ ID NO: 65603 - protein, 229 aa, Triticum aestivum
  peptide (1)..(229): Ceres Seq. ID no. 12618683
SLSFISLFDPDRDGRRPQPPRLASPATTSPPVIHFPLRLAVTGPGTVAPTGPLAHATSSPSPFAPGAVGPIASGPRRPLLRPWRRRPRLPSPTSASPMAPPALSPPADLCFAHGAAGPVAPRQPLLRPWHRRPRRPLRLLPAPATSPSRASATLDAAPPHTSRSGSSSSGISVLRKGEGEWCGCSGEHGHRGWLQVGAGVQIELNMDAHAGSWAAILFVIFSCVIRSSN

SEQ ID NO: 65604 - protein, 228 aa, Triticum aestivum
  peptide (1)..(228): Ceres Seq. ID no. 12618684
LSLVYLSVRSRSRWSAPATTSLGLAGHHLAAGHPLSPSARRYRTRHRRPHRPAGARHLVAFALCPGRRWPHRLGPTPASTSPMASPATSPFAHLCFAHGAASSVAPRRPLLRPWRSWPRRPPPASASPMAPPAPSPPPASAGPGHVALACLRYPRRCTASHLEERQQLLGHQCAAEGGGRVVRLLRRARAQGVVAGWRRRADRAQYGCACWILGCYTLCNIFMCNPFI

SEQ ID NO: 65605 - protein, 218 aa, Triticum aestivum
  peptide (1)..(218): Ceres Seq. ID no. 12618685
LSRLSLCSIQIEMVGARNHLAWPRRPPPRRRSSTFPFGSPLPDPAPSPPQARWRTPPRRLRPLPRAPLAPSPRAHAGLYFAHGVAGHVSLRPPLLRPWRRQLCRPPPTSASPMAQLAPSPPASLCFAHGTAGPVAPSGFCRPRPRRPRVPPLPSTLHRLTPRGAAAAPRASVCCGRGRESGAAAPASTGTGGGCRLAQACRSSSIWMRMLDLGLLYSL

SEQ ID NO: 65606 - protein, 132 aa, Triticum aestivum
  peptide (1)..(132): Ceres Seq. ID no. 12618686
MAPPALSPPADLCFAHGAAGPVAPRQPLLRPWHRRPRRPLRLLPAPATSPSRASATLDAAPPHTSRSGSSSSGISVLRKGEGEWCGCSGEHGHRGWLQVGAGVQIELNMDAHAGSWAAILFVIFSCVIRSSN

SEQ ID NO: 65607 - DNA, 818 bp, Triticum aestivum
  misc_feature (1)..(818): Ceres Seq. ID no. 12625567
agttgcttcatcgtgacgagcagcccggacagcaattagggcaatcaatcagtccatttctttccctctccctccagcagctcggctctctctggtctctgcccgccatggcggccaagctgacccaggagcaggcggacgagtgcaaggaggtgttcgacctgttcgacggcgacgaggacggccgcatcgccgccggcgagctggtcacggcgctccactcgctgggccagaacgtggacgaggccgaggcgcggggcttcctcgaggacgccggcgcgggcggcgccggcgccgtcgccatcgacctccccacgttcctggccgtggccgcgcgcaaggccaacgccggcgtatcggccaagggactggcccagtgcctcgacgcgttcgacgacgacgggagcggcgtcatccccgcggagcagctgcggcaggtgatgctcacccacggcgaccggctcacggaggaggaggccgacgagctggtccgcaaggccgacccccgcggcgagggccgcgtccagtgcaaggagctcgtcaaggtgctcatgaacaacaagtgatcggcgagcttctctgatctgatgcgtcgatcgatcggccgatctggggaccggtgaagtgttgtcctccggtgaggaaatggtgccatgtttcttgatttggtgatgtactcctactggttttgctgtaatattggattggatgcgaatgctctgcatacgcgaagtcctggctgcaatatgtatgctgcgtttgtttcgttgtatgtatgtattgtatgcatacacaaattgctttaacgacgattttgc

SEQ ID NO: 65608 - protein, 187 aa, Triticum aestivum
  peptide (1)..(187): Ceres Seq. ID no. 12625568
LLHRDEQPGQQLGQSISPFLSLSLQQLGSLWSLPAMAAKLTQEQADECKEVFDLFDGDEDGRIAAGELVTALHSLGQNVDEAEARGFLEDAGAGGAGAVAIDLPTFLAVAARKANAGVSAKGLAQCLDAFDDDGSGVIPAEQLRQVMLTHGDRLTEEEADELVRKADPRGEGRVQCKELVKVLMNNK

SEQ ID NO: 65609 - protein, 152 aa, Triticum aestivum
  peptide (1)..(152): Ceres Seq. ID no. 12625569
MAAKLTQEQADECKEVFDLFDGDEDGRIAAGELVTALHSLGQNVDEAEARGFLEDAGAGGAGAVAIDLPTFLAVAARKANAGVSAKGLAQCLDAFDDDGSGVIPAEQLRQVMLTHGDRLTEEEADELVRKADPRGEGRVQCKELVKVLMNNK

SEQ ID NO: 65610 - DNA, 723 bp, Triticum aestivum
  misc_feature (1)..(723): Ceres Seq. ID no. 13597990
caaggaaatctcttcatgtcatccgcgatggctggaagtccacaacatggagcatggcaatacccgttggtttgcaggagcgctggaaccgtgactgtgtatttgatgttaaagacatcagcttggagccatgcctttctgatcgcatggctatgctgagcagcaagaccatgaaggaacttcaagtgggacaccccatcctaagcatggatgatgacatcgtttacttgctttctgaaaccacacccaagcacatggacaagttggcactgatgtttgctattgatgtgaagaagtcaacactgcgaggattggctgagcttgatgtcaagaagttcgattacctgtccagcttctgcactagtgagatctgcaggggtacctgagcaatattaaggtaacttctttatgctggtagaagcgagctctatcgaataaacaaactgaagagggtaaaccatctgaggttcctgcgaagaactggctaggacaaagaaatttcaaccatgtttgttgaaacttgggagctggatgtgaccttggagattgaatttctttagttgatttatcatgtattacatgtaatgcaactatctgggttatattgcttgcttatgtacttgtcccggtcaaaaaaaagtgctagtgaacttgtgtgggctaaatgtcttggttgaaccatgtttttatgtgttttgatttggttttaattgttctgtatgc

SEQ ID NO: 65611 - protein, 127 aa, Triticum aestivum
  peptide (1)..(127): Ceres Seq. ID no. 13597991
RKSLHVIRDGWKSTTWSMAIPVGLQERWNRDCVFDVKDISLEPCLSDRMAMLSSKTMKELQVGHPILSMDDDIVYLLSETTPKHMDKLALMFAIDVKKSTLRGLAELDVKKFDYLSSFCTSEICRGT

SEQ ID NO: 65612 - protein, 110 aa, Triticum aestivum
  peptide (1)..(110): Ceres Seq. ID no. 13597992
MAIPVGLQERWNRDCVFDVKDISLEPCLSDRMAMLSSKTMKELQVGHPILSMDDDIVYLLSETTPKHMDKLALMFAIDVKKSTLRGLAELDVKKFDYLSSFCTSEICRGT

SEQ ID NO: 65613 - protein, 79 aa, Triticum aestivum
  peptide (1)..(79): Ceres Seq. ID no. 13597993
MAMLSSKTMKELQVGHPILSMDDDIVYLLSETTPKHMDKLALMFAIDVKKSTLRGLAELDVKKFDYLSSFCTSEICRGT

SEQ ID NO: 65614 - DNA, 612 bp, Triticum aestivum
  misc_feature (1)..(612): Ceres Seq. ID no. 13657000
attgctttctgtaatctcaaaatcgattaaccgtatccgtctccacctttaagctttccaatggcggaaccctaagctaattccacgcctcccacctcgcgcagcgcgcatggaccagccggcgtcggacgccggcggctttctcgaggtccgcctcttctacgtgcgcctatcgccccgcggctccggagctgccgccccgccacggctctcgctggccatccaccacgccggggccgaggcctccccctcctcgctccctctccgcctcgaccgccgcgacccagtctctggcgaggccacctacgtctccaccgcggccgcgcgcctccccccacccgacgcctccttcgaggttgcagaccaccgcgacgccgccctcctccgaggcacccttcgacggtgccctgacgccaaggccgattcccctgcctgggcgatcgactgcgtccccgccgatgcagcggtggcctcagcctcggcctttgaggtctatgttgccgggtactgtgcaggcgaacccgccgttctcacgcgagccctgcggctggccaccccggaagaggctgctggcgggttggttcgccggcgatgtttaaacacaataaagtg

SEQ ID NO: 65615 - protein, 167 aa, Triticum aestivum
  peptide (1)..(167): Ceres Seq. ID no. 13657001
MDQPASDAGGFLEVRLFYVRLSPRGSGAAAPPRLSLAIHHAGAEASPSSLPLRLDRRDPVSGEATYVSTAAARLPPPDASFEVADHRDAALLRGTLRRCPDAKADSPAWAIDCVPADAAVASASAFEVYVAGYCAGEPAVLTRALRLATPEEAAGGLVRRRCLNTIK

SEQ ID NO: 65616 - DNA, 644 bp, Triticum aestivum
  misc_feature (1)..(644): Ceres Seq. ID no. 13656267
ttcacacatgggtgcttatagttatttttgttttatgtatttttatcaacccttctcatagatgaatctgtaatatcttatggtggtcagttataggatttggataattatctgcatttgcctatctgggatgtgatgctagaatatatattatgctaagtctgatttaacaatgtttaagatcttggaggcagccgacaccatgttctatctcctgggatcatgctaatgcttaaatgaactgcagtagaatagcggaagttgaagcaagtaaagaaaaaatcatgctaatgcttatagattctagaaacagtaacgtgatgaaatatgcaccttagtagtcttcacctttcttgttaactactactttcttctttggtctgtgctaattatttactttttggaaaatctttgccatgtttcatcttgctcttctcaacttattacagttggatgatggcttggagttctccttcactgataagaggcgttttgcaaaaatacgattgcttgacaatccagaagctgtccctccaatttctgaacttggaccagatgccctatgcgaaccaatgcagcttgatgattttgtacaatcttttggtagaaagaatgctccaataaatgtttaaacacaataaagt

SEQ ID NO: 65617 - protein, 71 aa, Triticum aestivum
  peptide (1)..(71): Ceres Seq. ID no. 13656268
MFHLALLNLLQLDDGLEFSFTDKRRFAKIRLLDNPEAVPPISELGPDALCEPMQLDDFVQSFGRKNAPINV

SEQ ID NO: 65618 - protein, 56 aa, Triticum aestivum
  peptide (1)..(56): Ceres Seq. ID no. 13656269
MMAWSSPSLIRGVLQKYDCLTIQKLSLQFLNLDQMPYANQCSLMILYNLLVERMLQ

SEQ ID NO: 65619 - protein, 55 aa, Triticum aestivum
  peptide (1)..(55): Ceres Seq. ID no. 13656270
MAWSSPSLIRGVLQKYDCLTIQKLSLQFLNLDQMPYANQCSLMILYNLLVERMLQ

SEQ ID NO: 65620 - DNA, 1533 bp, Triticum aestivum
  misc_feature (1)..(1533): Ceres Seq. ID no. 13656285
aacacacaacatccatcccccgcccggccgcgctcaatccccacccccactgtttccaggtccgattttctgccccggatccttgctcagttgctccgtcgatcaccatgaagatgccaagttcatcgtgctgagagcgggacgctgacaggtggtgggcgtggtgagcgcgctgcgggaggccaagttcgtcccgcagatcgtcagcgtcggaccggatcaggccgagaagaaacctgaccgcatcgcctccgtctggcagcccgacgggtctactctattgttctggttgcagagagatcgacatggatctgctgctaccgccgatcagtgcttctcttggtgccatgggctcccttgcacacaagctggatgcgctcctcgatacagaacacaaggatgagatggggaaactcggaacccggctgctggagctctccaaggcacgagaccctcccgttacagcgaggatctggatgaaggatgtgcgtgaactatcctatgatatggagaactttgtcgacactgaagaagattggatccacaacatgtcaccattcatgggccgtgtgaaggaagcaaatgcacggtacgagaggtacaggcttgagagcatccccagccacacagatgtctttccaatcatccaccaccgtggccgggagacaggtctagtcgtcggccttcatgacaagggtggcccggttgataggctctgccaattgctgaccgatggagatgagcagctcaaggtgttatccattgtcggtgttggagggatcgggaagaccacgcttgccaaacagctatggcgtgagcacaaactcagggactacttccactgccgggcttttgtccggacggccaagaaaccagacatgaggaggatcctaaggagcatactcgcacaagttcgtccgcaccaaccacctgatgctagcgaggtggacgacctcattcacgatctcaccgagcatctacaggataaaaggagaagtgatggcaagaaacaagcaagtgtggagctaccgaatgacccgcgatcatcggtgcaggtgatcgtaatcaagatagtggacattacagacaagcggtggaagtccagtgccttcaaagtcctttcgaagctccataggaccaattcggtagcggcaaacgaggaggaggggacgctaactgtggtgggggacctggacccggtggtcgtagtgctggcattacagaaggccaaactcaatgtgcagatcgtcagaacggggttgatgaacaaacccgagggacgcaaaatgcctggacgtaacccgcccgagggacaacagaagcctgaatctaacccaccccagctgccgcacagtctcatcaccccgtactcccctccctaccggccacccccctaccgtcaacaccgccacgaggtccaccagtcccgggaggaccccaactcatgtgtcatccagtgatttttttgcaggggtattgtggattgtattcatcwtaaayaatgttagagcatctactgggaggggggaaagg

SEQ ID NO: 65621 - protein, 384 aa, Triticum aestivum
  peptide (1)..(384): Ceres Seq. ID no. 15219816
MDLLLPPISASLGAMGSLAHKLDALLDTEHKDEMGKLGTRLLELSKARDPPVTARIWMKDVRELSYDMENFVDTEEDWIHNMSPFMGRVKEANARYERYRLESIPSHTDVFPIIHHRGRETGLVVGLHDKGGPVDRLCQLLTDGDEQLKVLSIVGVGGIGKTTLAKQLWREHKLRDYFHCRAFVRTAKKPDMRRILRSILAQVRPHQPPDASEVDDLIHDLTEHLQDKRRSDGKKQASVELPNDPRSSVQVIVIKIVDITDKRWKSSAFKVLSKLHRTNSVAANEEEGTLTVVGDLDPVVVVLALQKAKLNVQIVRTGLMNKPEGRKMPGRNPPEGQQKPESNPPQLPHSLITPYSPPYRPPPYRQHRHEVHQSREDPNSCVIQ

SEQ ID NO: 65622 - protein, 370 aa, Triticum aestivum
  peptide (1)..(370): Ceres Seq. ID no. 15219817
MGSLAHKLDALLDTEHKDEMGKLGTRLLELSKARDPPVTARIWMKDVRELSYDMENFVDTEEDWIHNMSPFMGRVKEANARYERYRLESIPSHTDVFPIIHHRGRETGLVVGLHDKGGPVDRLCQLLTDGDEQLKVLSIVGVGGIGKTTLAKQLWREHKLRDYFHCRAFVRTAKKPDMRRILRSILAQVRPHQPPDASEVDDLIHDLTEHLQDKRRSDGKKQASVELPNDPRSSVQVIVIKIVDITDKRWKSSAFKVLSKLHRTNSVAANEEEGTLTVVGDLDPVVVVLALQKAKLNVQIVRTGLMNKPEGRKMPGRNPPEGQQKPESNPPQLPHSLITPYSPPYRPPPYRQHRHEVHQSREDPNSCVIQ

SEQ ID NO: 65623 - protein, 351 aa, Triticum aestivum
  peptide (1)..(351): Ceres Seq. ID no. 15219818
MGKLGTRLLELSKARDPPVTARIWMKDVRELSYDMENFVDTEEDWIHNMSPFMGRVKEANARYERYRLESIPSHTDVFPIIHHRGRETGLVVGLHDKGGPVDRLCQLLTDGDEQLKVLSIVGVGGIGKTTLAKQLWREHKLRDYFHCRAFVRTAKKPDMRRILRSILAQVRPHQPPDASEVDDLIHDLTEHLQDKRRSDGKKQASVELPNDPRSSVQVIVIKIVDITDKRWKSSAFKVLSKLHRTNSVAANEEEGTLTVVGDLDPVVVVLALQKAKLNVQIVRTGLMNKPEGRKMPGRNPPEGQQKPESNPPQLPHSLITPYSPPYRPPPYRQHRHEVHQSREDPNSCVIQ

SEQ ID NO: 65624 - DNA, 1545 bp, Triticum aestivum
  misc_feature (1)..(1545): Ceres Seq. ID no. 12780574
cactccagcatccagacccgagccattccccgagcagccaagccacacgcacacgcacgcgcacccgcacggaaaccctagctcccgcggcgcacctaccgcaggcgtacagtcagtcggtcggccgcgagagtctgccggcggatggtgtcgatgagcacgacgcccaagccgctcgaggccggggcggcggcggccgccgtggggggaggcggaggggacggagggggagggggaggcgggaaggggaaggagcagcagcaggtggtgccggtggccgcggggccgccgatggccgtgccggcggacgcggcggcggcggcggaggacgccaggatgaaggtcaggaagccctacaccatcaccaagtcccgggagagctggaccgagcccgagcacgacaagttcctcgaggccctgcagctgtttgatcgtgattggaaaaagatagaagcatttgttggctcaaaaactgtgatacagataaggagccatgcacagaagtactttttgaaggttcaaaagaacggtacaggcgaacatttaccaccgcctcggccgaagcgtaaagcagcacatccatatccgcagaaggcctctaaaactgcccctgtagcaccccaagctgttttatcacaacaacctgctcctcctccccctcctccgagggagcaagatggtgttgatgtgtctatggatgcatctatggttgtaccaaacacaaatgcaaatgcggtggtgccttcctgggacaatgctcttgttcaacctacacaagttacaagtgccattgccacaaataactgctctagtagtatagagagccaatctggaacatggccaacctctgaagcagttgaacaagaaaatgtgctgccacaaatgcgggctatgccagatttttcacaagtatacaacttcctgggaagtgtattcgatccagatacaactggacatttgcagaggttaaaggcaatggatcctattgatgtggaaacggtactactgctcatgcgaaatctatcggtgaacttgattaacccagaatttgaggcccataggcagttgctctcgtcgtatggttctggtggagacgaaaataaacctgaaggcatggaaaatttcgggtcccagagtagccatctcccatccatggtaacgagtgagtgagcgaacatcagccattcaccatggcagcttcagttgtttccgagagacgcttgtgttctccttgtattggtcctgtcggcgtctagtctggctatttatgaatgttggttggggcagtgacatttgtacagcttccgaaatggtgctctaaccctaggctagggttgcttaccaagttggtgtagatagccagttttgcgtgctcaagcaattcttttccctagggcggggcatagctcaagatggttcttgtatgtatacaccgataagtatgtgcttgtggatgtacatatgtgttattgtgtaaacgtttgagatactgcgagtatcctatcaaggcaaataataagctgaataataaatccagcttggcgt

SEQ ID NO: 65625 - protein, 341 aa, Triticum aestivum
  peptide (1)..(341): Ceres Seq. ID no. 12780575
MVSMSTTPKPLEAGAAAAAVGGGGGDGGGGGGGKGKEQQQVVPVAAGPPMAVPADAAAAAEDARMKVRKPYTITKSRESWTEPEHDKFLEALQLFDRDWKKIEAFVGSKTVIQIRSHAQKYFLKVQKNGTGEHLPPPRPKRKAAHPYPQKASKTAPVAPQAVLSQQPAPPPPPPREQDGVDVSMDASMVVPNTNANAVVPSWDNALVQPTQVTSAIATNNCSSSIESQSGTWPTSEAVEQENVLPQMRAMPDFSQVYNFLGSVFDPDTTGHLQRLKAMDPIDVETVLLLMRNLSVNLINPEFEAHRQLLSSYGSGGDENKPEGMENFGSQSSHLPSMVTSE

SEQ ID NO: 65626 - protein, 338 aa, Triticum aestivum
  peptide (1)..(338): Ceres Seq. ID no. 12780576
MSTTPKPLEAGAAAAAVGGGGGDGGGGGGGKGKEQQQVVPVAAGPPMAVPADAAAAAEDARMKVRKPYTITKSRESWTEPEHDKFLEALQLFDRDWKKIEAFVGSKTVIQIRSHAQKYFLKVQKNGTGEHLPPPRPKRKAAHPYPQKASKTAPVAPQAVLSQQPAPPPPPPREQDGVDVSMDASMVVPNTNANAVVPSWDNALVQPTQVTSAIATNNCSSSIESQSGTWPTSEAVEQENVLPQMRAMPDFSQVYNFLGSVFDPDTTGHLQRLKAMDPIDVETVLLLMRNLSVNLINPEFEAHRQLLSSYGSGGDENKPEGMENFGSQSSHLPSMVTSE

SEQ ID NO: 65627 - protein, 292 aa, Triticum aestivum
  peptide (1)..(292): Ceres Seq. ID no. 12780577
MAVPADAAAAAEDARMKVRKPYTITKSRESWTEPEHDKFLEALQLFDRDWKKIEAFVGSKTVIQIRSHAQKYFLKVQKNGTGEHLPPPRPKRKAAHPYPQKASKTAPVAPQAVLSQQPAPPPPPPREQDGVDVSMDASMVVPNTNANAVVPSWDNALVQPTQVTSAIATNNCSSSIESQSGTWPTSEAVEQENVLPQMRAMPDFSQVYNFLGSVFDPDTTGHLQRLKAMDPIDVETVLLLMRNLSVNLINPEFEAHRQLLSSYGSGGDENKPEGMENFGSQSSHLPSMVTSE

SEQ ID NO: 65628 - DNA, 1257 bp, Triticum aestivum
  misc_feature (1)..(1257): Ceres Seq. ID no. 15178472
actgctgctgcgaacacaggctttttcccagccccacggttggggggtcgcttgcatcacacccacgccgcctccgaaaagcgccgcaaatccgtcccagctgcgcggcttccatggctgccgcggcggctgcaggggactccggcgagcagccgctgctccacctcaagctcgccttcctcgccctggagccccccgcctgcgtcctcaccctcgccagaaaggctggtggaggttctgtcacgccacatgttcaaaattttattttggagaactgtgttggcactaatgtagggggaggtccagattgtacatatgtgaaaactattcttaaaaaggttatagctgaggcggaattatcgtcagatattgtgattgatgaactctatgaggaatttggccgttgtatgtcgtcaagggcaaataacccagagcttagcctggccaagatctacaaggagatatcttttctttctcctgcatatgagaatgtatcctcgaatccagtaagtttggttgctcgattattatgttctactaacatgctcgaaggggatacagggtgctgtctttggccatcaagtttattcttatctgagtttattctttcattcccagaacttttcgccaaaaaatgctgctttgagctaggttctggtgttggtttggttggtgtatgtctaaaccatgttggtgcttccaaggtagagtgcaaatatctttcctgggaagaagcgtgtgaaagcgatttaagagactaccagagagacatagttcttggtgcagacattatatacaacccgtcctgcgtgccccacctggtacgagtactttgtatgctacttagaggcgatgatggacgacatgaaagtgtcaatgcggcaaccaacggagaaattggtgacgaagtatctgggaccaccgcaaccggaggtcctgtggcctatattgccacggtcattcggaatgcagacactttcaattgctttgccaaggcagctgctgatgcgaagttgtctgttgtcaacattaccagcagcgcagctccatccagttttcttccttacatgatctcatatgatagatcgagcgtgcaacttcttaagattacactattatcctaagttgctggtgagtgcagctcctgtcagtctgttttgacgttgctacttaaacgtttattgcagagacatcaatcttatcggaatatcagtcgttcgtatcaagtctgtcctaaagtgtttccttcctgtgtcc

SEQ ID NO: 65629 - protein, 373 aa, Triticum aestivum
  peptide (1)..(373): Ceres Seq. ID no. 15178473
CCCEHRLFPSPTVGGSLASHPRRLRKAPQIRPSCAASMAAAAAAGDSGEQPLLHLKLAFLALEPPACVLTLARKAGGGSVTPHVQNFILENCVGTNVGGGPDCTYVKTILKKVIAEAELSSDIVIDELYEEFGRCMSSRANNPELSLAKIYKEISFLSPAYENVSSNPVSLVARLLCSTNMLEGDTGCCLWPSSLFLSEFILSFPELFAKKCCFELGSGVGLVGVCLNHVGASKVECKYLSWEEACESDLRDYQRDIVLGADIIYNPSCVPHLVRVLCMLLRGDDGRHESVNAATNGEIGDEVSGTTATGGPVAYIATVIRNADTFNCFAKAAADAKLSVVNITSSAAPSSFLPYMISYDRSSVQLLKITLLS

SEQ ID NO: 65630 - protein, 336 aa, Triticum aestivum
  peptide (1)..(336): Ceres Seq. ID no. 15178474
MAAAAAAGDSGEQPLLHLKLAFLALEPPACVLTLARKAGGGSVTPHVQNFILENCVGTNVGGGPDCTYVKTILKKVIAEAELSSDIVIDELYEEFGRCMSSRANNPELSLAKIYKEISFLSPAYENVSSNPVSLVARLLCSTNMLEGDTGCCLWPSSLFLSEFILSFPELFAKKCCFELGSGVGLVGVCLNHVGASKVECKYLSWEEACESDLRDYQRDIVLGADIIYNPSCVPHLVRVLCMLLRGDDGRHESVNAATNGEIGDEVSGTTATGGPVAYIATVIRNADTFNCFAKAAADAKLSVVNITSSAAPSSFLPYMISYDRSSVQLLKITLLS

SEQ ID NO: 65631 - protein, 238 aa, Triticum aestivum
  peptide (1)..(238): Ceres Seq. ID no. 15178475
MSSRANNPELSLAKIYKEISFLSPAYENVSSNPVSLVARLLCSTNMLEGDTGCCLWPSSLFLSEFILSFPELFAKKCCFELGSGVGLVGVCLNHVGASKVECKYLSWEEACESDLRDYQRDIVLGADIIYNPSCVPHLVRVLCMLLRGDDGRHESVNAATNGEIGDEVSGTTATGGPVAYIATVIRNADTFNCFAKAAADAKLSVVNITSSAAPSSFLPYMISYDRSSVQLLKITLLS

SEQ ID NO: 65632 - DNA, 640 bp, Triticum aestivum
  misc_feature (1)..(640): Ceres Seq. ID no. 13663039
acaccaaaacaaccagatctcaggctcatagctcagacaatggagaagtccccagccacagcaggataccatcatgcaccacttttccaagagccacttggtattctcatccttttcatcctcacctggtgcatctcgaagcttcaaagtctccttcccacttcttgttgccaatcctgcacttgtactgtctccccgacaacctcgacgccggtcctcgccgagacgaagatatcgaaggcaccaaataagagtgaatatgatgagatgaatgcgacgcagtcagatgccgaggtagccatgagaaagatgggacttgattttgatcaagagaaaagctgcgaatatatttctacgcttttcgatgaagacgagccaagcttcaaggaagtgaaaatggcattcttggtttttgatgagaacaatgatgggtacatcgatgcattggatttgcgacgagtcctccacaacttagggttaggcgaccgggtaggggtcaatgagtctgagcagatgattgctagatatgacatgaacaataacaagaggttagatttgatggagttcactaaggttttggaggacagcttttgctagacccctttatttctgtatttttttcctatatctgtagatgcat

SEQ ID NO: 65633 - protein, 198 aa, Triticum aestivum
  peptide (1)..(198): Ceres Seq. ID no. 13663040
TPKQPDLRLIAQTMEKSPATAGYHHAPLFQEPLGILILFILTWCISKLQSLLPTSCCQSCTCTVSPTTSTPVLAETKISKAPNKSEYDEMNATQSDAEVAMRKMGLDFDQEKSCEYISTLFDEDEPSFKEVKMAFLVFDENNDGYIDALDLRRVLHNLGLGDRVGVNESEQMIARYDMNNNKRLDLMEFTKVLEDSFC

SEQ ID NO: 65634 - protein, 185 aa, Triticum aestivum
  peptide (1)..(185): Ceres Seq. ID no. 13663041
MEKSPATAGYHHAPLFQEPLGILILFILTWCISKLQSLLPTSCCQSCTCTVSPTTSTPVLAETKISKAPNKSEYDEMNATQSDAEVAMRKMGLDFDQEKSCEYISTLFDEDEPSFKEVKMAFLVFDENNDGYIDALDLRRVLHNLGLGDRVGVNESEQMIARYDMNNNKRLDLMEFTKVLEDSFC

SEQ ID NO: 65635 - protein, 109 aa, Triticum aestivum
  peptide (1)..(109): Ceres Seq. ID no. 13663042
MNATQSDAEVAMRKMGLDFDQEKSCEYISTLFDEDEPSFKEVKMAFLVFDENNDGYIDALDLRRVLHNLGLGDRVGVNESEQMIARYDMNNNKRLDLMEFTKVLEDSFC

SEQ ID NO: 65636 - DNA, 860 bp, Triticum aestivum
  misc_feature (1)..(860): Ceres Seq. ID no. 13663127
ctctctctctctttccgtgccactccccaatccgttctccaatcccactcccctatgccggcgtccgggacgcgctcccggggccgcccgccgcagccggtggaggagggggcgcgcgacgaagaagcgccggtggaggaggcgggcgagctcggcgccgacggcgatgcggcggttcgtgcgttaccggctcacccggtgagctctaccagctcgggtgatgaggatggggaggaggcgggggatggggatgatgaggacgcggaggggacgctcctccccagctgccccgtgtgtatgaatccgtggaccgccgatggcgagcatcgcgtaagttgcattccttgtgggcatgtctatggcagatcttgcttagaaaaatggttagcacagtgtggaaagaaaagtgccatgtgtcctcagtgcggcaagatgtttagacaaaagaacattatcaacctctatgcaccagagattgttgttccaaataatgatcttgaaaagcaagtattgtcactgagagataaaaatgaatttcttgagaatcaacaacaaaaattaattgaggagattgcattggagcagcaaaaggagaaagaggcgctggaggagggaggcgatgcagctcaagagtgacgtggtactggtgccggtccaaatgtttgtgtagaacagaggaagcagctagcggaagtcaaacattgatgtgtttgtaatgcacggtgtcggctgaggactaatgtacggagattgtagtcatgtgctcacctgatacatggataatgattttcagttcagtacccagaattttgagttctagtgatggttagtgtcttatgtctaagtgatcaaattgaata

SEQ ID NO: 65637 - protein, 211 aa, Triticum aestivum
  peptide (1)..(211): Ceres Seq. ID no. 13663128
LSLSFRATPQSVLQSHSPMPASGTRSRGRPPQPVEEGARDEEAPVEEAGELGADGDAAVRALPAHPVSSTSSGDEDGEEAGDGDDEDAEGTLLPSCPVCMNPWTADGEHRVSCIPCGHVYGRSCLEKWLAQCGKKSAMCPQCGKMFRQKNIINLYAPEIVVPNNDLEKQVLSLRDKNEFLENQQQKLIEEIALEQQKEKEALEEGGDAAQE

SEQ ID NO: 65638 - protein, 193 aa, Triticum aestivum
  peptide (1)..(193): Ceres Seq. ID no. 13663129
MPASGTRSRGRPPQPVEEGARDEEAPVEEAGELGADGDAAVRALPAHPVSSTSSGDEDGEEAGDGDDEDAEGTLLPSCPVCMNPWTADGEHRVSCIPCGHVYGRSCLEKWLAQCGKKSAMCPQCGKMFRQKNIINLYAPEIVVPNNDLEKQVLSLRDKNEFLENQQQKLIEEIALEQQKEKEALEEGGDAAQE

SEQ ID NO: 65639 - protein, 112 aa, Triticum aestivum
  peptide (1)..(112): Ceres Seq. ID no. 13663130
MNPWTADGEHRVSCIPCGHVYGRSCLEKWLAQCGKKSAMCPQCGKMFRQKNIINLYAPEIVVPNNDLEKQVLSLRDKNEFLENQQQKLIEEIALEQQKEKEALEEGGDAAQE

SEQ ID NO: 65640 - DNA, 811 bp, Triticum aestivum
  misc_feature (1)..(811): Ceres Seq. ID no. 12626276
acaaaagccctccctaaaagcctctccctcatttttcttagctgccaaagctttcttctgttgctatttcttcactccattgctgtcttctcagcagctcaatttgctcatcacactcaaaaacaagctagctaagcgagccaggtccatttcccgcgctcatggggttgcaagagatggcgaagctgcagctgcaccgccatggcggcatgcgagtggaagcccacgcccccgtcgacgacgaccaggcggcggtccgcgggaggaggaagaaggcgacggcggcagcggtctggattgcagtgccgctcaggcccgtcaaggtcggccgccgaagacacggcggcggcgacagcagcggcgaggcaggggaggtggaggagaaggaagtggaagaggaggaggaggtgacgacgccgagaggggaagggtgcaggataccctgggaggcggcgacgtgcccgccggcgcccaagaaggcgaggacggcggtggcgatcttcgccgaccgccggtgcaaccgcgacgacggggaggcgacggagtacttccgcgtgccggcggacctggactccgtgttcgccgtcagccgggtcgccgaggccaactgaatgattcgtccatgctcgcgcgcgtgtagagctgcaagtgcgagcgatcaagtccagttaaaagacaagagacagaggagatgatccaataatgcagctgtaaaaatttcgcattgtcgatgcaatggatttatcttagttaattacttctctttcagtgtaaatgtaaattaatcgaggtcgaggagtgcatctgtact

SEQ ID NO: 65641 - protein, 212 aa, Triticum aestivum
  peptide (1)..(212): Ceres Seq. ID no. 12626277
QKPSLKASPSFFLAAKAFFCCYFFTPLLSSQQLNLLITLKNKLAKRARSISRAHGVARDGEAAAAPPWRHASGSPRPRRRRPGGGPREEEEGDGGSGLDCSAAQARQGRPPKTRRRRQQRRGRGGGGEGSGRGGGGDDAERGRVQDTLGGGDVPAGAQEGEDGGGDLRRPPVQPRRRGGDGVLPRAGGPGLRVRRQPGRRGQLNDSSMLARV

SEQ ID NO: 65642 - protein, 149 aa, Triticum aestivum
  peptide (1)..(149): Ceres Seq. ID no. 12626278
MGLQEMAKLQLHRHGGMRVEAHAPVDDDQAAVRGRRKKATAAAVWIAVPLRPVKVGRRRHGGGDSSGEAGEVEEKEVEEEEEVTTPRGEGCRIPWEAATCPPAPKKARTAVAIFADRRCNRDDGEATEYFRVPADLDSVFAVSRVAEAN

SEQ ID NO: 65643 - protein, 144 aa, Triticum aestivum
  peptide (1)..(144): Ceres Seq. ID no. 12626279
MAKLQLHRHGGMRVEAHAPVDDDQAAVRGRRKKATAAAVWIAVPLRPVKVGRRRHGGGDSSGEAGEVEEKEVEEEEEVTTPRGEGCRIPWEAATCPPAPKKARTAVAIFADRRCNRDDGEATEYFRVPADLDSVFAVSRVAEAN

SEQ ID NO: 65644 - DNA, 1434 bp, Triticum aestivum
  misc_feature (1)..(1434): Ceres Seq. ID no. 13657014
cccttctgacctacccaagctccagtccaccgccgctgtgccctagaactgccgccgcgcccgccctcgtcgctggcgccctccctgtctcgtagcgtccctgctctcttccccccacgcgcaatcttgaacttcggttttgagatccgcccctgctgtcggttgcaggtttgcagagggctcgtcgacatgtcttgggcgccaatcgagaatgaccctggtgtttttacggagctgttgcaacagttgcaattgaagggtctccaagttgatgaactctactcacttgatcttgatgccctcaatgatcttcagccaatttatgggcttatagttctgtacaaatggcgacctccagaaaaagatgagcgccctgttatcaaggatgcagtcccaaatctgttctttgctaatcagataattaacagtgcatgtgcaacccaagctattgtttctgttctgttgaactcttctggcatcacccttagcgaggacctaaaaaagctcaaggagtttgcaaaggacatgccgccagagctcaaaggattggctatagtgaattgtgaaagcattcgtatgaccagtaactcatttgcaaagtcagatgactactctgaggaacagaaatccaaggatgatgatgtctaccatttcattagctatgttcctgttgacggcgtcctgtatgagcttgatggactaaaggaaggaccgattagcctgggaaaatgcccaggtggtattggggagatggggtggctgaagatggtgcagcctgtcatccaggaacgcgttgataagttctctcagaatgagataaggttcagtgtcatggctatcacaaagaaccggaaggaaattttcatcatggagctcaaggaacttcagaggaagagggagaacctcttatcacaaatgggtgatccttctgccaatcggcaaaggccatccattgagcggtcactcgcagaggttgctgctcagattgaggctgtgaccgagaagatcataatggaggaagagaaggcaaagaagtggaagacagagaacatcaggaggaagcacaactacgtgcctttcttgttcaatttcctcaagatcctcgaggagaagcagcaactgaagcccctgatagagaaggcgaaacagaattctcacagccgtaaccctaagtgaaacctgcgttgtaaattttttatcgtcttggttgttttggttttgtgtagagatggctgactgactttgtttcctagctgaatgggccttgtagttctagtcctagacaggccatatatcgataccgtcctggtttattcaggcagatcttaaaccattcatgtaggggggacactctgactccttatcagaattatatgtgcatcagagggttttttccctgtctaattcttcccaagctttaactgaaagtttgac

SEQ ID NO: 65645 - protein, 328 aa, Triticum aestivum
  peptide (1)..(328): Ceres Seq. ID no. 13657015
MSWAPIENDPGVFTELLQQLQLKGLQVDELYSLDLDALNDLQPIYGLIVLYKWRPPEKDERPVIKDAVPNLFFANQIINSACATQAIVSVLLNSSGITLSEDLKKLKEFAKDMPPELKGLAIVNCESIRMTSNSFAKSDDYSEEQKSKDDDVYHFISYVPVDGVLYELDGLKEGPISLGKCPGGIGEMGWLKMVQPVIQERVDKFSQNEIRFSVMAITKNRKEIFIMELKELQRKRENLLSQMGDPSANRQRPSIERSLAEVAAQIEAVTEKIIMEEEKAKKWKTENIRRKHNYVPFLFNFLKILEEKQQLKPLIEKAKQNSHSRNPK

SEQ ID NO: 65646 - protein, 216 aa, Triticum aestivum
  peptide (1)..(216): Ceres Seq. ID no. 13657016
MPPELKGLAIVNCESIRMTSNSFAKSDDYSEEQKSKDDDVYHFISYVPVDGVLYELDGLKEGPISLGKCPGGIGEMGWLKMVQPVIQERVDKFSQNEIRFSVMAITKNRKEIFIMELKELQRKRENLLSQMGDPSANRQRPSIERSLAEVAAQIEAVTEKIIMEEEKAKKWKTENIRRKHNYVPFLFNFLKILEEKQQLKPLIEKAKQNSHSRNPK

SEQ ID NO: 65647 - protein, 199 aa, Triticum aestivum
  peptide (1)..(199): Ceres Seq. ID no. 13657017
MTSNSFAKSDDYSEEQKSKDDDVYHFISYVPVDGVLYELDGLKEGPISLGKCPGGIGEMGWLKMVQPVIQERVDKFSQNEIRFSVMAITKNRKEIFIMELKELQRKRENLLSQMGDPSANRQRPSIERSLAEVAAQIEAVTEKIIMEEEKAKKWKTENIRRKHNYVPFLFNFLKILEEKQQLKPLIEKAKQNSHSRNPK

SEQ ID NO: 65648 - DNA, 568 bp, Triticum aestivum
  misc_feature (1)..(568): Ceres Seq. ID no. 13656228
gaggctcggcgtggctcggctggcatttgcttgtcctgtttctcgtggccgcctacttgtaatccgctgccagccaaatcgctagctcactccctccctcgtcagcctccggcagatcctcctccataccgctcgaagctccgccctcctcctcccgacacctcgagatctccgccccggacccatttcttccccaccaaggtccagcgccgtccggccggccctccctgttgcaggcaggcgacgccgccgccgccatgtccaagtcgggagccctggatctcgcgtccggccttggcgggaagatcgacaaggaacaggtcaaatccgcggtcgacgagtatgagaaatatcatggatattacggagggaaggaggaatcgaggaaatccaactacaccgatatggttaataaatactatgatcttgctactagcttctatgagtatggctggggtgaatccttccactttgctcacaggtggaatggggaatctttaagggaaagcatcaaacgacacgagcactttctggccttacagcttgagttgaaaccaggcatgaaggt

SEQ ID NO: 65649 - protein, 166 aa, Triticum aestivum
  peptide (1)..(166): Ceres Seq. ID no. 13656229
EARRGSAGICLSCFSWPPTCNPLPAKSLAHSLPRQPPADPPPYRSKLRPPPPDTSRSPPRTHFFPTKVQRRPAGPPCCRQATPPPPCPSREPWISRPALAGRSTRNRSNPRSTSMRNIMDITEGRRNRGNPTTPIWLINTMILLLASMSMAGVNPSTLLTGGMGNL

SEQ ID NO: 65650 - protein, 103 aa, Triticum aestivum
  peptide (1)..(103): Ceres Seq. ID no. 13656230
MSKSGALDLASGLGGKIDKEQVKSAVDEYEKYHGYYGGKEESRKSNYTDMVNKYYDLATSFYEYGWGESFHFAHRWNGESLRESIKRHEHFLALQLELKPGMK

SEQ ID NO: 65651 - DNA, 1510 bp, Triticum aestivum
  misc_feature (1)..(1510): Ceres Seq. ID no. 13657170
acgcactaccaattaccaaataccaatccacgcatcagagctcagaagctaggccagcgccatgggagaagctgcagctgttgtcgccgcctcgcgcgacggcttcttcggcctgggcgagtgcaagggccaggtggtgatcgacggcgagcaggtgccactggtcctgacgccgggcagcgaggaggtgagcggccacgaccacaaggcgctggtggcggccctggtggccaaccgagagtgggtggaggagaaggtggtggccaacagcggcgtgctgctgcgcggcttcggcgtccgcgacgccgtggagttcgacgccatcgtggacgcgctcgggtggccggacatccggtacgtcggccccgccccgcgcacccacgtccacggccgcatctggaccgccaacgagggccccctcgaggagttcatctactaccaccacgagatggtcctcatcaaggagttcccggggaaggtgatcctgttctgcgaggtgccgccgccggagggcggggagacgccgttcgtgccgagcttccgggtgacggagcgcgcgctgcaggagttcccggacatggtggaggagctggacgccaaggggctccgctacaccttcaccgcgctgagcaaggacgacaccaagtccatgcgggggcgagggtgggaggacgccttcgccaccaccgacaaggccgtggccgagcagagagcccgcgcgctggggatggacgtggagtggctgccggaggaaggcggcgtgaggaccatcctcgggccgaggcagctgacgcgggtgttcccgggccggaagggccggcggatgtggttcaacacggtggtggggatgcacggcaaggagctcagctccgccacgttcgccgacggctccgagataccggcggacttcgtgcgccggtgcggcgagatcatcgaggaggagagcatccagttccggtgggagaagggcgacgtgctcatcctcgacaacctcgcaacgctccacggccgccggccgtcgctggcgcccaggagggtcctcgtcgccacatgcaagtgatctcatttcatgcatcacccaccttaactaattggttagttaattaagcttgagggtggacctggcttgattaactaattaatcttagttggtgctggggatgctgcatttggctcttctataataagctgccttgagttactacggtaaaatggctttgtgcattgtgatgcagaagctgggtactcccttttcagaaaaaaaaaagttactacggtaaaataagagctgaaggtttgattaagtcagtcggcttaatacttattacagccaaagaggggtgcggtagtttctcccttataattagtaattttgcatccatcattatgctttttcttttatatttcatccatcattatgctgggtgacatgcattacgacatgtaaggcttatttccttcgagtgatatattaagagatgcatgcagcagtgttatgcatcttctcttt

SEQ ID NO: 65652 - protein, 368 aa, Triticum aestivum
  peptide (1)..(368): Ceres Seq. ID no. 13657171
THYQLPNTNPRIRAQKLGQRHGRSCSCCRRLARRLLRPGRVQGPGGDRRRAGATGPDAGQRGGERPRPQGAGGGPGGQPRVGGGEGGGQQRRAAARLRRPRRRGVRRHRGRARVAGHPVRRPRPAHPRPRPHLDRQRGPPRGVHLLPPRDGPHQGVPGEGDPVLRGAAAGGRGDAVRAELPGDGARAAGVPGHGGGAGRQGAPLHLHRAEQGRHQVHAGARVGGRLRHHRQGRGRAESPRAGDGRGVAAGGRRREDHPRAEAADAGVPGPEGPADVVQHGGGDARQGAQLRHVRRRLRDTGGLRAPVRRDHRGGEHPVPVGEGRRAHPRQPRNAPRPPAVAGAQEGPRRHMQVISFHASPTLTNWLVN

SEQ ID NO: 65653 - protein, 332 aa, Triticum aestivum
  peptide (1)..(332): Ceres Seq. ID no. 13657172
MGEAAAVVAASRDGFFGLGECKGQVVIDGEQVPLVLTPGSEEVSGHDHKALVAALVANREWVEEKVVANSGVLLRGFGVRDAVEFDAIVDALGWPDIRYVGPAPRTHVHGRIWTANEGPLEEFIYYHHEMVLIKEFPGKVILFCEVPPPEGGETPFVPSFRVTERALQEFPDMVEELDAKGLRYTFTALSKDDTKSMRGRGWEDAFATTDKAVAEQRARALGMDVEWLPEEGGVRTILGPRQLTRVFPGRKGRRMWFNTVVGMHGKELSSATFADGSEIPADFVRRCGEIIEEESIQFRWEKGDVLILDNLATLHGRRPSLAPRRVLVATCK

SEQ ID NO: 65654 - protein, 203 aa, Triticum aestivum
  peptide (1)..(203): Ceres Seq. ID no. 13657173
MVLIKEFPGKVILFCEVPPPEGGETPFVPSFRVTERALQEFPDMVEELDAKGLRYTFTALSKDDTKSMRGRGWEDAFATTDKAVAEQRARALGMDVEWLPEEGGVRTILGPRQLTRVFPGRKGRRMWFNTVVGMHGKELSSATFADGSEIPADFVRRCGEIIEEESIQFRWEKGDVLILDNLATLHGRRPSLAPRRVLVATCK

SEQ ID NO: 65655 - DNA, 1498 bp, Triticum aestivum
  misc_feature (1)..(1498): Ceres Seq. ID no. 14302388
gtacgctgccacgccagagcagagcagagcagaatccggtagccagatcgaacgccccaccctctctccctccctccctcgcccccttccgatcgagcccgtcgccatggcgccgccccgcgtcggcctgctcctcgccctcgccttgtgcctcgcgttcgcgcgcgcggacgcggccgtgagggagctcagggtcgggtactacgcgcagacgtgcccccgcgcggaggagatcgtgcggcgcgtcatggcccgcgcgctcgcgcgcgaggcccgcagcgtcgcctccgtcatgcgcctccagttccacgactgcttcgtcaacggatgcgacgggtcggtgctgatggacgcgacgccgacgatggcgggggagaaggaggcgctctccaacatcaactccctccgctccttcgaggtcgtggacgaggtcaagagcgccctggaggagcagtgccccggcgtcgtctcctgcgccgacatcatcatcatggccgcccgcgacgccgtcgtgctgactggtggacccaactgggacgtgaggctcgggcgcgaggacagtctgacggcgagccaggaggactcggacaacatcatgccgagcccgcgcgccaacgcgagcgcgctcatccgcctcttcgccggctacaagctcaccgtcaccgacctcgtcgcgctctccggctcgcactccatcggcgaggcccgctgcttctccatcgtcttccgcctctacaaccagtcgggctccggccgccccgacccccacatggacccggcctaccgccaggcgctcgacgcgctctgccccctcaccggcgaccagaacgtcaccggcggcctggacgctaccccggtcgtcttcgacaaccagtacttcaaggacctggtccacctccgcggattcctcaactccgaccagacgctcttctccgacaacgaggggacccggcgggtggtgacgcagttcagccagaaccaggacgccttcttcagggccttcatcgaggggatggtcaagctgggcgagctccagaaccccaggaagggggagatccggcgcaactgccgcgtcgccaacggcgggcggccgccgctggagaagcaggtcgcgccgttccgggtgctggacttctgaacctggttctacggtaggcctgtaggtgtctcacgggagctctggtgtgggagcgatccatatgcttgacataggtttggtcgtgtcgcagttctgtgcctacccaagaatggtttcaggtctggctactgcttattgctaattgttgaggaataatagagaaattgatgcctctggtactttgattgccaaaggctgcattaaggtttgcttctttgttgattctccaaagattagctagcgatagtgcaagatgcttacttagagagatggttacaagaacaaataatgattttaagagtcatagaactagcgcttaatgtttagtttggttttaaaactttgaaaatatgaaattgc

SEQ ID NO: 65656 - protein, 378 aa, Triticum aestivum
  peptide (1)..(378): Ceres Seq. ID no. 14302389
YAATPEQSRAESGSQIERPTLSPSLPRPLPIEPVAMAPPRVGLLLALALCLAFARADAAVRELRVGYYAQTCPRAEEIVRRVMARALAREARSVASVMRLQFHDCFVNGCDGSVLMDATPTMAGEKEALSNINSLRSFEVVDEVKSALEEQCPGVVSCADIIIMAARDAVVLTGGPNWDVRLGREDSLTASQEDSDNIMPSPRANASALIRLFAGYKLTVTDLVALSGSHSIGEARCFSIVFRLYNQSGSGRPDPHMDPAYRQALDALCPLTGDQNVTGGLDATPVVFDNQYFKDLVHLRGFLNSDQTLFSDNEGTRRVVTQFSQNQDAFFRAFIEGMVKLGELQNPRKGEIRRNCRVANGGRPPLEKQVAPFRVLDF

SEQ ID NO: 65657 - protein, 343 aa, Triticum aestivum
  peptide (1)..(343): Ceres Seq. ID no. 14302390
MAPPRVGLLLALALCLAFARADAAVRELRVGYYAQTCPRAEEIVRRVMARALAREARSVASVMRLQFHDCFVNGCDGSVLMDATPTMAGEKEALSNINSLRSFEVVDEVKSALEEQCPGVVSCADIIIMAARDAVVLTGGPNWDVRLGREDSLTASQEDSDNIMPSPRANASALIRLFAGYKLTVTDLVALSGSHSIGEARCFSIVFRLYNQSGSGRPDPHMDPAYRQALDALCPLTGDQNVTGGLDATPVVFDNQYFKDLVHLRGFLNSDQTLFSDNEGTRRVVTQFSQNQDAFFRAFIEGMVKLGELQNPRKGEIRRNCRVANGGRPPLEKQVAPFRVLDF

SEQ ID NO: 65658 - protein, 296 aa, Triticum aestivum
  peptide (1)..(296): Ceres Seq. ID no. 14302391
MARALAREARSVASVMRLQFHDCFVNGCDGSVLMDATPTMAGEKEALSNINSLRSFEVVDEVKSALEEQCPGVVSCADIIIMAARDAVVLTGGPNWDVRLGREDSLTASQEDSDNIMPSPRANASALIRLFAGYKLTVTDLVALSGSHSIGEARCFSIVFRLYNQSGSGRPDPHMDPAYRQALDALCPLTGDQNVTGGLDATPVVFDNQYFKDLVHLRGFLNSDQTLFSDNEGTRRVVTQFSQNQDAFFRAFIEGMVKLGELQNPRKGEIRRNCRVANGGRPPLEKQVAPFRVLDF

SEQ ID NO: 65659 - DNA, 981 bp, Triticum aestivum
  misc_feature (1)..(981): Ceres Seq. ID no. 13546266
tatctcataatatggcactgttcaatggcaatcacatccgtgttgacatggcgtgtccacctcgtaaaaagctaagaggagaaggacctctttatgacagaaagaggacagtgtttgttggtaaccttccattcgatgtaaaggatgaggagctctaccagctgttctgcggtcccagtggaccacaaggtgatgttgaagctatacgagttgtcagagatccagattcaagcctaggaaagggtatcgcctatgttctattcaaaacaagggaaggcgctaactctgttgtcaaaaaacgtggccttaagatcagagatcgcgttttgaggctcacccatgcaaaggcagccgatgcgacgccgaagaaggcagattctgggaaaaagcgcggcactccaaaacagacacctttcacgccaggcagcaagtcccgcgaaggcagcgacagcaacaaacgcaaggcgccggcaagcctgtcttaccaaggcctgaagtcgaccaaatctggcgtcgtgaagaaggtgaaggtggcccggcgccccgtcaaccaaggcaagcagcaaggcaggcctagcgagacgggacaaagcgagagcgcccgcaaagccaagcggcccgccgtggcagccaggaaggcgaagcagctgaacaagaaacgcaagcaggacggctcgacgcccgagaacacgcaccggagcaagaaggcgaggaagtagccgtccgtccctgtcgtggatcgttcgcttcactttgtaatgggagtgttgagagttttggacaagatgaggtcctggtgatagctgccttgggttgaacgaggaagaaaatacgaggttgatgttgctgatgtaatgctgggaagtgtcgagtgtagtcatttggtacttgcctttggagtcgtagcccctgtactaatgtcaaaatgatgctcatctatgcaacatcatgtactgacaccatttttgcgttgcttgttct

SEQ ID NO: 65660 - protein, 238 aa, Triticum aestivum
  peptide (1)..(238): Ceres Seq. ID no. 13546267
SHNMALFNGNHIRVDMACPPRKKLRGEGPLYDRKRTVFVGNLPFDVKDEELYQLFCGPSGPQGDVEAIRVVRDPDSSLGKGIAYVLFKTREGANSVVKKRGLKIRDRVLRLTHAKAADATPKKADSGKKRGTPKQTPFTPGSKSREGSDSNKRKAPASLSYQGLKSTKSGVVKKVKVARRPVNQGKQQGRPSETGQSESARKAKRPAVAARKAKQLNKKRKQDGSTPENTHRSKKARK

SEQ ID NO: 65661 - protein, 235 aa, Triticum aestivum
  peptide (1)..(235): Ceres Seq. ID no. 13546268
MALFNGNHIRVDMACPPRKKLRGEGPLYDRKRTVFVGNLPFDVKDEELYQLFCGPSGPQGDVEAIRVVRDPDSSLGKGIAYVLFKTREGANSVVKKRGLKIRDRVLRLTHAKAADATPKKADSGKKRGTPKQTPFTPGSKSREGSDSNKRKAPASLSYQGLKSTKSGVVKKVKVARRPVNQGKQQGRPSETGQSESARKAKRPAVAARKAKQLNKKRKQDGSTPENTHRSKKARK

SEQ ID NO: 65662 - protein, 223 aa, Triticum aestivum
  peptide (1)..(223): Ceres Seq. ID no. 13546269
MACPPRKKLRGEGPLYDRKRTVFVGNLPFDVKDEELYQLFCGPSGPQGDVEAIRVVRDPDSSLGKGIAYVLFKTREGANSVVKKRGLKIRDRVLRLTHAKAADATPKKADSGKKRGTPKQTPFTPGSKSREGSDSNKRKAPASLSYQGLKSTKSGVVKKVKVARRPVNQGKQQGRPSETGQSESARKAKRPAVAARKAKQLNKKRKQDGSTPENTHRSKKARK

SEQ ID NO: 65663 - DNA, 1396 bp, Triticum aestivum
  misc_feature (1)..(1396): Ceres Seq. ID no. 14301514
gttgattaccaaagactagtcctggtgttgccgcttttcactttccccctcccccctctcatcggatctggactctggagaggagacgagattcgccggcgatggcagaggagtcgtgggaggagggtcgggggttggacttcctcgagagcctgggcccggacatctccgccaccgtcttcagcctgctcgacgaccccgccgacctcgcgcgcgccaccaccgtctcccgctcctggcgccgattcgttattgcaaaccagttcagcaagatcctgtgcctgcgggtttatccggaggtgtccaacttcacacgtgttgagttgagcagcatcagcagtgcacaccgaaatgctggatcaagtgcttgtgctgggctggagaagctcgggagggatcatagggtgtatatgcatcttagccatggccttctctcgccgtacgaccccaaggattgcatcagtcactgcatgggcgcatccagcactgatcgtttccctgaggaggccatagaaaataccattgaaccggttgatcgtcaggagagtaaactgtcttattggtcgagtggtggccagaaagatcctgctgtgccagaatgcctgatatatagccttcagtcagagctgtgtcttgttgatgaaatcaggatacggccattaaaagcattttttcgatatggtcatccgatatattcagcaaaacacgtccggttccgcttgggctatctaaaaccaccccactggtctgaaacacatgtatatgttgaaagtgatgcggagctgattgatgatagcaactatatctggacgtacacatctccagaatttccaatgctacaggaaaatgtgatgcagtcttttaagctaccacactcagttctatgtattggtggagtggtgaagattgagcttcttggcagggtccacaaggacacgtttgatggtcggtactacatatgtgtgtctcatgtccaactagtcgggaagccactgtcagaagattttggggtcgccccgagcaaaaatgatgtagttctcagttactatctggattatcgtagattcgggggacgatcacagcaaagtacatgactttgcgatgaggatctggcacttcggtatgtcttgagggataggagaactgaaccatgagtgttagcacgctgtcctgtgggtacataaaagagatgcaacagaggagaagcttccatacaagtgaagcatatctcgtcgagctcgtgtctatcggtttcgaataaaagaagtcctttgtgatcccgtgggaaactgaaaatgtatttgtttgtgtaactgacaaggacgaaagagacgcatgattgactcgcttgttataaaatcactgctaatattattaagatcgagtgagtccatct

SEQ ID NO: 65664 - protein, 330 aa, Triticum aestivum
  peptide (1)..(330): Ceres Seq. ID no. 14301515
MAEESWEEGRGLDFLESLGPDISATVFSLLDDPADLARATTVSRSWRRFVIANQFSKILCLRVYPEVSNFTRVELSSISSAHRNAGSSACAGLEKLGRDHRVYMHLSHGLLSPYDPKDCISHCMGASSTDRFPEEAIENTIEPVDRQESKLSYWSSGGQKDPAVPECLIYSLQSELCLVDEIRIRPLKAFFRYGHPIYSAKHVRFRLGYLKPPHWSETHVYVESDAELIDDSNYIWTYTSPEFPMLQENVMQSFKLPHSVLCIGGVVKIELLGRVHKDTFDGRYYICVSHVQLVGKPLSEDFGVAPSKNDVVLSYYLDYRRFGGRSQQST

SEQ ID NO: 65665 - protein, 227 aa, Triticum aestivum
  peptide (1)..(227): Ceres Seq. ID no. 14301516
MHLSHGLLSPYDPKDCISHCMGASSTDRFPEEAIENTIEPVDRQESKLSYWSSGGQKDPAVPECLIYSLQSELCLVDEIRIRPLKAFFRYGHPIYSAKHVRFRLGYLKPPHWSETHVYVESDAELIDDSNYIWTYTSPEFPMLQENVMQSFKLPHSVLCIGGVVKIELLGRVHKDTFDGRYYICVSHVQLVGKPLSEDFGVAPSKNDVVLSYYLDYRRFGGRSQQST

SEQ ID NO: 65666 - protein, 207 aa, Triticum aestivum
  peptide (1)..(207): Ceres Seq. ID no. 14301517
MGASSTDRFPEEAIENTIEPVDRQESKLSYWSSGGQKDPAVPECLIYSLQSELCLVDEIRIRPLKAFFRYGHPIYSAKHVRFRLGYLKPPHWSETHVYVESDAELIDDSNYIWTYTSPEFPMLQENVMQSFKLPHSVLCIGGVVKIELLGRVHKDTFDGRYYICVSHVQLVGKPLSEDFGVAPSKNDVVLSYYLDYRRFGGRSQQST

SEQ ID NO: 65667 - DNA, 1311 bp, Triticum aestivum
  misc_feature (1)..(1311): Ceres Seq. ID no. 15170183
aacatccaaatcgaaaaacagtagagagtatggctcgtggcgcccctctgcttgcagcagcagtggtagctgttgtggcacttgggtctgtaggggcgacagagcaggaggccgccggcttgaggcagcctccggtggcgcagggcctgtcgttcgagttctaccggcagagctgccccagggcagagtccatcgtgcgtgacttcgtccgggacgccgtccgcaaggacatcggcctcgccgccggcctgctccgcctccacttccacgattgcttcgtgcagggctgcgacgcgtcggtgcttctggacgggtcggccacggggccgggggagcagcaggcgccacccaacctcacgctccgcccgtccgccttcaaggccgtcaacgacatccgggaccggctggagcgtgagtgccgcggcgccgtcgtctcctgctccgacatcctggccctcgccgcccgcgactcggtggtcgcctcgggcgggccggagtaccgcgtgcccctcggccgccgcgacagccccaggttcgccacggcacaggacgtgctgtccggtcttcccccgccgtcctcgaacgtgccgtccctcctcgatgtgctccgggagatcggcctcgacgccaccgacctcgtcgcgctctccggcggccacaccgtggggctcgggcactgcacctccttcgacgaccgcctcttccctcgcccggaccccaccatgagcccggacttccttggcaggctgaaacgaacgtgtccatccaagggcaccgacgcgcgcacagtgctggacgtgcgcaccccaaacgtgttcgacaacaagtactacgtgaacctggtgaaccgggaggggctcttcgtgtccgaccaggacctcttcacgaacgccaccacccggcccatcgtggagcgcttcgcgcgcagccagcgtgacttcttcgaccagttcggcgtatccatggtcaagatgggccagatcaaggtgctcactggcgaccagggccaggttcgccgcaactgctccgctcgcaaccccgggactgctgacgggctccagtggtcgtccctggtgcagaccgtcgtcgacgccacccggagagcctcggtttgtaaatctatggtcgacaagtctatgtagtgtgtactgtacctggactagtagctgttagccatgcatgtggtaataaaaactgagcagggcaacccatggtcgacgaggctgtgtacgtacctgtgtaatgtaccttgtcgtgactcaaacgtgtgctaggctgctagctagcagacctacggtgaccagttagttt

SEQ ID NO: 65668 - protein, 379 aa, Triticum aestivum
  peptide (1)..(379): Ceres Seq. ID no. 15170184
HPNRKTVESMARGAPLLAAAVVAVVALGSVGATEQEAAGLRQPPVAQGLSFEFYRQSCPRAESIVRDFVRDAVRKDIGLAAGLLRLHFHDCFVQGCDASVLLDGSATGPGEQQAPPNLTLRPSAFKAVNDIRDRLERECRGAVVSCSDILALAARDSVVASGGPEYRVPLGRRDSPRFATAQDVLSGLPPPSSNVPSLLDVLREIGLDATDLVALSGGHTVGLGHCTSFDDRLFPRPDPTMSPDFLGRLKRTCPSKGTDARTVLDVRTPNVFDNKYYVNLVNREGLFVSDQDLFTNATTRPIVERFARSQRDFFDQFGVSMVKMGQIKVLTGDQGQVRRNCSARNPGTADGLQWSSLVQTVVDATRRASVCKSMVDKSM

SEQ ID NO: 65669 - protein, 370 aa, Triticum aestivum
  peptide (1)..(370): Ceres Seq. ID no. 15170185
MARGAPLLAAAVVAVVALGSVGATEQEAAGLRQPPVAQGLSFEFYRQSCPRAESIVRDFVRDAVRKDIGLAAGLLRLHFHDCFVQGCDASVLLDGSATGPGEQQAPPNLTLRPSAFKAVNDIRDRLERECRGAVVSCSDILALAARDSVVASGGPEYRVPLGRRDSPRFATAQDVLSGLPPPSSNVPSLLDVLREIGLDATDLVALSGGHTVGLGHCTSFDDRLFPRPDPTMSPDFLGRLKRTCPSKGTDARTVLDVRTPNVFDNKYYVNLVNREGLFVSDQDLFTNATTRPIVERFARSQRDFFDQFGVSMVKMGQIKVLTGDQGQVRRNCSARNPGTADGLQWSSLVQTVVDATRRASVCKSMVDKSM

SEQ ID NO: 65670 - DNA, 1346 bp, Triticum aestivum
  misc_feature (1)..(1346): Ceres Seq. ID no. 12780534
gcacgctttcccctcctccaagctttcccccaccggcctcccccgtctcctgcccccacccattcgccgctgaccccccttccagaaccttccagaagcgaacgagagagcccgcaggggcggcgcaggggcatggcgatggcgacgcacacgggggtcgccgcctccaaggtcctcatcctcgtcggcgcaggcctgacgggatcgatcgtgctccggaatggccgcttgtcggatgtattggcggagctccaggagctcatgaagggcgtaaatcaaggagaaggctcgagcgcctatgacatggctcttatccaagctcagattcggcatttagcccaagaagtcagagatttaactttgtcaaagcccattaccatattgagtggcaaatcggactcgggaggcagtttatcgtcctacatactgccagcagctgcagttggagcattaggttattgctatatgtggtgtaagggatggtccttgtcagatgtcatgtttgtcacaaaacgcaatatggccagtgctgtcgacagcatgtcgaagcaattggagcaagtttcatcagcactagcagcaaccaaaagacatttaacaaaacgccttgagaatttggatggcaaaatggacgaacaagtggaagtctccaaacaaatccggaatgaggtcactgatgttaaaactgacctgtcccaaattggctttgatgttgaagcaattcaacagatggtagctggactggaagagaagattgagttgcttgacaataaacaggatgcggctaatgctggtatatggtatctctgccgaatggcaggaggtataaaagagggaataaatgccaagtttttccaagaagcggatgaaaaactcaagctcttagaccttgctcaaactgaaaagaagccagtgaagggtctcgaattgtttctggagagcaccaaggaggtaaaggcactcgactccaagccaaagaccatcatgcagaacgacgtcaagaaaccgacgaaaacgttcgacgtgcccataaaaagcgctgcggtgcacaggtcaaacaggttcttaattcgtaaagaaggcctcgcgctgtgattgacgcggatcgcctcgtggtgtacattgcgttcttggttgctttgtttgatagaaaaaatatagaagaagaataacctgcatcccatgtggtgattttccaggatagacaggttgatacgtctgaaggcaatttgtattcgtttctttgtatttttgcgtcatttcatgtttggtctgaagttgttcgcttgtaaacaagtgacataaaggaataaataattaaaacacgtttcgcattcttacatcct

SEQ ID NO: 65671 - protein, 364 aa, Triticum aestivum
  peptide (1)..(364): Ceres Seq. ID no. 12780535
ARFPLLQAFPHRPPPSPAPTHSPLTPLPEPSRSERESPQGRRRGMAMATHTGVAASKVLILVGAGLTGSIVLRNGRLSDVLAELQELMKGVNQGEGSSAYDMALIQAQIRHLAQEVRDLTLSKPITILSGKSDSGGSLSSYILPAAAVGALGYCYMWCKGWSLSDVMFVTKRNMASAVDSMSKQLEQVSSALAATKRHLTKRLENLDGKMDEQVEVSKQIRNEVTDVKTDLSQIGFDVEAIQQMVAGLEEKIELLDNKQDAANAGIWYLCRMAGGIKEGINAKFFQEADEKLKLLDLAQTEKKPVKGLELFLESTKEVKALDSKPKTIMQNDVKKPTKTFDVPIKSAAVHRSNRFLIRKEGLAL

SEQ ID NO: 65672 - protein, 320 aa, Triticum aestivum
  peptide (1)..(320): Ceres Seq. ID no. 12780536
MAMATHTGVAASKVLILVGAGLTGSIVLRNGRLSDVLAELQELMKGVNQGEGSSAYDMALIQAQIRHLAQEVRDLTLSKPITILSGKSDSGGSLSSYILPAAAVGALGYCYMWCKGWSLSDVMFVTKRNMASAVDSMSKQLEQVSSALAATKRHLTKRLENLDGKMDEQVEVSKQIRNEVTDVKTDLSQIGFDVEAIQQMVAGLEEKIELLDNKQDAANAGIWYLCRMAGGIKEGINAKFFQEADEKLKLLDLAQTEKKPVKGLELFLESTKEVKALDSKPKTIMQNDVKKPTKTFDVPIKSAAVHRSNRFLIRKEGLAL

SEQ ID NO: 65673 - protein, 318 aa, Triticum aestivum
  peptide (1)..(318): Ceres Seq. ID no. 12780537
MATHTGVAASKVLILVGAGLTGSIVLRNGRLSDVLAELQELMKGVNQGEGSSAYDMALIQAQIRHLAQEVRDLTLSKPITILSGKSDSGGSLSSYILPAAAVGALGYCYMWCKGWSLSDVMFVTKRNMASAVDSMSKQLEQVSSALAATKRHLTKRLENLDGKMDEQVEVSKQIRNEVTDVKTDLSQIGFDVEAIQQMVAGLEEKIELLDNKQDAANAGIWYLCRMAGGIKEGINAKFFQEADEKLKLLDLAQTEKKPVKGLELFLESTKEVKALDSKPKTIMQNDVKKPTKTFDVPIKSAAVHRSNRFLIRKEGLAL

SEQ ID NO: 65674 - DNA, 1263 bp, Triticum aestivum
  misc_feature (1)..(1263): Ceres Seq. ID no. 12780542
gaagaatcgctcctcccttcacgccgtcacgccgccactcacctgccgccgacagcccgccactcgcctcgacggccgtcgcccgtcgcgggtccccgaccgtactccccgccgccccctctccccctcctacatcgtcgccgccgtttcctcagttgctccccccgaccccccacacccccaaagccccctctgtactaccccgcccctcctctccattccttcgggtagcccaacgccgaccatgggtttcgcgcagctcgtcatcggccccgccggcagcggcaagtcgacctactgctctggtctgtatcaacattgcgagacggtgggcaggaggattcatatggtcaacctggatccagctgcagagcacttcagctatcccgtatctactgacattagagagctcatatcactggatgatgtcatggaggagcttgggatgggaccaaatggcggcctcatctattgcatggagcaccttgaagacaatttggatgattggttggatgaacaattggagaactacttggatgatgactatcttgtgtttgattgtccaggccagattgaactcttcactcatgttccagttctgcgtaactttgttgagtatctgaaacggaaaaatttcactgtttgcgctgtgtaccttttggattcgcagtttgtcagtgatgtcacaaaatacattagcggttgcatggcttctctttctgctatgattcaacttgagcttcctcatatcaacatcctttcaaagatggacctggtttccaataaaaaagatgtagaagactatctgaaccctgaggcacaggttcttctgtcacagctgaatcggcagatggcacctcggtttcacaagttaaacaaggctttagctgaactggttgatgattacaacatggtgaatttcataccacttgatttgaggaaggagagcagcattcagtatgtgctgtcaaacatcgacaactgcatccagtacggggaagacgccgatgtgaaggttagggacttcattcccgaggaggatgattaaccattttgatcgagcagaagcaacaaattagccagtatcatgtagaatgggtccatgggaggaggaattcaccgcacatggtagtatctgtttcaatcaatcattggtcgaaaaaacaagacataatgcatctgcgaagagtgtgtgggtcaccttctttcttatgcgtgtggttgactagcaattgcttgtgtaaacaaaccatcatcctcttc

SEQ ID NO: 65675 - protein, 348 aa, Triticum aestivum
  peptide (1)..(348): Ceres Seq. ID no. 12780543
KNRSSLHAVTPPLTCRRQPATRLDGRRPSRVPDRTPRRPLSPSYIVAAVSSVAPPDPPHPQSPLCTTPPLLSIPSGSPTPTMGFAQLVIGPAGSGKSTYCSGLYQHCETVGRRIHMVNLDPAAEHFSYPVSTDIRELISLDDVMEELGMGPNGGLIYCMEHLEDNLDDWLDEQLENYLDDDYLVFDCPGQIELFTHVPVLRNFVEYLKRKNFTVCAVYLLDSQFVSDVTKYISGCMASLSAMIQLELPHINILSKMDLVSNKKDVEDYLNPEAQVLLSQLNRQMAPRFHKLNKALAELVDDYNMVNFIPLDLRKESSIQYVLSNIDNCIQYGEDADVKVRDFIPEEDD

SEQ ID NO: 65676 - protein, 267 aa, Triticum aestivum
  peptide (1)..(267): Ceres Seq. ID no. 12780544
MGFAQLVIGPAGSGKSTYCSGLYQHCETVGRRIHMVNLDPAAEHFSYPVSTDIRELISLDDVMEELGMGPNGGLIYCMEHLEDNLDDWLDEQLENYLDDDYLVFDCPGQIELFTHVPVLRNFVEYLKRKNFTVCAVYLLDSQFVSDVTKYISGCMASLSAMIQLELPHINILSKMDLVSNKKDVEDYLNPEAQVLLSQLNRQMAPRFHKLNKALAELVDDYNMVNFIPLDLRKESSIQYVLSNIDNCIQYGEDADVKVRDFIPEEDD

SEQ ID NO: 65677 - protein, 233 aa, Triticum aestivum
  peptide (1)..(233): Ceres Seq. ID no. 12780545
MVNLDPAAEHFSYPVSTDIRELISLDDVMEELGMGPNGGLIYCMEHLEDNLDDWLDEQLENYLDDDYLVFDCPGQIELFTHVPVLRNFVEYLKRKNFTVCAVYLLDSQFVSDVTKYISGCMASLSAMIQLELPHINILSKMDLVSNKKDVEDYLNPEAQVLLSQLNRQMAPRFHKLNKALAELVDDYNMVNFIPLDLRKESSIQYVLSNIDNCIQYGEDADVKVRDFIPEEDD

SEQ ID NO: 65678 - DNA, 1168 bp, Triticum aestivum
  misc_feature (1)..(1168): Ceres Seq. ID no. 14302462
acagcggtcgtgccactcaacattattgccagatccattcctcccgtgcgagagcgacaggcagacagcggccgtgccgtgccggtggcgcgcggcaagcggcgacggccatggagctcctgcgggacagcatccccatggtgtccctggccgccgcggccgccgcgctgtacgcgcgcatggcctcgtcgctcctccgccccggcctcccgcgcctcgtctcgctgctcccgctcttcccattcctcgccgccgctcccctggccctcacttcctccgccatcgtccggggcaccgccgccttcttcctgacctggctctgcacgttcaagctcgccctcctcgccgccggccgcgggccgctcgaccccgcgctccccgtgctgccgttcctcttcaccacgctgctccccgtcaagctccgcccctccggtgcgggagcatccaaagccaagccgctgccgtcgctcgtctcttgcgcggccaaggtcgccgccatagccgccatcctcggcatctaccagtacaacgctcggctgcacccctacgcgcgccggacgctgtacggcgtccacatatactgcttcctggacctcttcttcccctgcatcgcggcggccgccggcgcgctcggcatggagacggagccgcagttcgaccgcccctacctggcctcctcgctgcgggacttctggggccgccggtggaacctcatggtgtcggccatcctccggccgtcggtgtacatccccgtgcttgcgcgcgccgggagccccgccggcgtgctggccaccttcctggtgtccgggctgatgcacgagggcatggtgtactacctcagcttccggcggccggacggccggatgaccgccttcttcctgctccatggcgtctgctgcgtcgccgaggggtggtgcgcccggcggtgggcggcgagggggtggccgtcgccgtcgcgggccgtggcgacggtgattgtggtggtgttcgtcgcccgcacgtcgttctggctcttcttcccgccgttgtgcagggacggaggcgaggagaagctgctggcggagtgggctgccctggcggccttcttcctcgacgccggcagaaagattaatggcattgtacgttcaaccgactaacgaaggaaaataaacactctcaaaagtttaac

SEQ ID NO: 65679 - protein, 377 aa, Triticum aestivum
  peptide (1)..(377): Ceres Seq. ID no. 14302463
SGRATQHYCQIHSSRARATGRQRPCRAGGARQAATAMELLRDSIPMVSLAAAAAALYARMASSLLRPGLPRLVSLLPLFPFLAAAPLALTSSAIVRGTAAFFLTWLCTFKLALLAAGRGPLDPALPVLPFLFTTLLPVKLRPSGAGASKAKPLPSLVSCAAKVAAIAAILGIYQYNARLHPYARRTLYGVHIYCFLDLFFPCIAAAAGALGMETEPQFDRPYLASSLRDFWGRRWNLMVSAILRPSVYIPVLARAGSPAGVLATFLVSGLMHEGMVYYLSFRRPDGRMTAFFLLHGVCCVAEGWCARRWAARGWPSPSRAVATVIVVVFVARTSFWLFFPPLCRDGGEEKLLAEWAALAAFFLDAGRKINGIVRSTD

SEQ ID NO: 65680 - protein, 369 aa, Triticum aestivum
  peptide (1)..(369): Ceres Seq. ID no. 14302464
QRSCHSTLLPDPFLPCESDRQTAAVPCRWRAASGDGHGAPAGQHPHGVPGRRGRRAVRAHGLVAPPPRPPAPRLAAPALPIPRRRSPGPHFLRHRPGHRRLLPDLALHVQARPPRRRPRAARPRAPRAAVPLHHAAPRQAPPLRCGSIQSQAAAVARLLRGQGRRHSRHPRHLPVQRSAAPLRAPDAVRRPHILLPGPLLPLHRGGRRRARHGDGAAVRPPLPGLLAAGLLGPPVEPHGVGHPPAVGVHPRACARREPRRRAGHLPGVRADARGHGVLPQLPAAGRPDDRLLPAPWRLLRRRGVVRPAVGGEGVAVAVAGRGDGDCGGVRRPHVVLALLPAVVQGRRRGEAAGGVGCPGGLLPRRRQKD

SEQ ID NO: 65681 - protein, 341 aa, Triticum aestivum
  peptide (1)..(341): Ceres Seq. ID no. 14302465
MELLRDSIPMVSLAAAAAALYARMASSLLRPGLPRLVSLLPLFPFLAAAPLALTSSAIVRGTAAFFLTWLCTFKLALLAAGRGPLDPALPVLPFLFTTLLPVKLRPSGAGASKAKPLPSLVSCAAKVAAIAAILGIYQYNARLHPYARRTLYGVHIYCFLDLFFPCIAAAAGALGMETEPQFDRPYLASSLRDFWGRRWNLMVSAILRPSVYIPVLARAGSPAGVLATFLVSGLMHEGMVYYLSFRRPDGRMTAFFLLHGVCCVAEGWCARRWAARGWPSPSRAVATVIVVVFVARTSFWLFFPPLCRDGGEEKLLAEWAALAAFFLDAGRKINGIVRSTD

SEQ ID NO: 65682 - DNA, 527 bp, Triticum aestivum
  misc_feature (1)..(527): Ceres Seq. ID no. 12626214
atcaacccaagcagtcagttcttcacttacacaacagattctacactccactactgcccaatcttcaggaacctcaaagttttgcaaaagaaagaagagagagatcatggcgggtgcggcgaaggcgtcatggacggtggcgatgagtgtgggcgcggtggaggcgctcaaggaccaggcggggctctgccgctggaactatgcgctcaagtccatccaccgagctgccaaggccaaggccaccatccgcggtggcgtctcgcagggcagcaagcagcttcaggcctccgcgtcggccgtggcggagaggcggcgagcagagaaagcagaggaggggctgaggacggcgatgtacctcagttgctggggtcccagttagtggtagctagcatgaggtgtttctgcagttctgctagctctatcctccagcaacaactatgccgtgtggcttggctggttaattccttcccggttgtaaatatgtctcaccatgatgatgatgatgatgatgatgatgaaatctttcc

SEQ ID NO: 65683 - protein, 175 aa, Triticum aestivum
  peptide (1)..(175): Ceres Seq. ID no. 12626215
INPSSQFFTYTTDSTLHYCPIFRNLKVLQKKEERDHGGCGEGVMDGGDECGRGGGAQGPGGALPLELCAQVHPPSCQGQGHHPRWRLAGQQAASGLRVGRGGEAASRESRGGAEDGDVPQLLGSQLVVASMRCFCSSASSILQQQLCRVAWLVNSFPVVNMSHHDDDDDDDDEIF

SEQ ID NO: 65684 - protein, 132 aa, Triticum aestivum
  peptide (1)..(132): Ceres Seq. ID no. 12626216
MDGGDECGRGGGAQGPGGALPLELCAQVHPPSCQGQGHHPRWRLAGQQAASGLRVGRGGEAASRESRGGAEDGDVPQLLGSQLVVASMRCFCSSASSILQQQLCRVAWLVNSFPVVNMSHHDDDDDDDDEIF

SEQ ID NO: 65685 - protein, 125 aa, Triticum aestivum
  peptide (1)..(125): Ceres Seq. ID no. 12626217
STQAVSSSLTQQILHSTTAQSSGTSKFCKRKKREIMAGAAKASWTVAMSVGAVEALKDQAGLCRWNYALKSIHRAAKAKATIRGGVSQGSKQLQASASAVAERRRAEKAEEGLRTAMYLSCWGPS

SEQ ID NO: 65686 - protein, 90 aa, Triticum aestivum
  peptide (1)..(90): Ceres Seq. ID no. 12626218
MAGAAKASWTVAMSVGAVEALKDQAGLCRWNYALKSIHRAAKAKATIRGGVSQGSKQLQASASAVAERRRAEKAEEGLRTAMYLSCWGPS

SEQ ID NO: 65687 - DNA, 825 bp, Triticum aestivum
  misc_feature (1)..(825): Ceres Seq. ID no. 12619024
atgaacctaaagctgatgagaaaatggaggaagaagatcctgaatatgaagaagatcccgatgaagtagaatatgaaggcgacgaggacatggatgatgccactgctgaagagccggcagaagcacagaatgaggataactcaaacgaaagagaaaccaagccagaagaggtaactgcagaagatgatggaaagaggacaacggagaatcttaagttggaaaaagcagaagaggacaagcagtctgtagcagagaaaggagatttgaaagaagttgaagagaaatctgttggtaaggagggaaagatatctggttcacaaaaaggagattcagcgaaacatgatgtggttgataaggacctgttgcaggcttttaggtacttcgaccaaaacagagttggttatataaaggtggatgatttaaggtgcatccttcacaacttggggaaatttttatccaacagggatgtgaaggacatggttcaaattgctcttgctgagagcaattctgcaagggatggtcgcattatctatacaaagcttgtcaagaaagctgacctctgatctggacctggttttggccctagcagctagttgagttatggaacttgtttgttggagattcttgacagtgaatcgatgatcaatggaaagtcacccgagtagtgtacttccatgtagctgggagctagtttttgtttctttgaatgaatatttgttaatgaactgatatcgtttgtatgttgacctactaggaaaatttcattagatttttttcacacagcaaacataatggcctaataataataacatttcctggtgtggt

SEQ ID NO: 65688 - protein, 186 aa, Triticum aestivum
  peptide (1)..(186): Ceres Seq. ID no. 12619025
EPKADEKMEEEDPEYEEDPDEVEYEGDEDMDDATAEEPAEAQNEDNSNERETKPEEVTAEDDGKRTTENLKLEKAEEDKQSVAEKGDLKEVEEKSVGKEGKISGSQKGDSAKHDVVDKDLLQAFRYFDQNRVGYIKVDDLRCILHNLGKFLSNRDVKDMVQIALAESNSARDGRIIYTKLVKKADL

SEQ ID NO: 65689 - protein, 179 aa, Triticum aestivum
  peptide (1)..(179): Ceres Seq. ID no. 12619026
MEEEDPEYEEDPDEVEYEGDEDMDDATAEEPAEAQNEDNSNERETKPEEVTAEDDGKRTTENLKLEKAEEDKQSVAEKGDLKEVEEKSVGKEGKISGSQKGDSAKHDVVDKDLLQAFRYFDQNRVGYIKVDDLRCILHNLGKFLSNRDVKDMVQIALAESNSARDGRIIYTKLVKKADL

SEQ ID NO: 65690 - protein, 157 aa, Triticum aestivum
  peptide (1)..(157): Ceres Seq. ID no. 12619027
MDDATAEEPAEAQNEDNSNERETKPEEVTAEDDGKRTTENLKLEKAEEDKQSVAEKGDLKEVEEKSVGKEGKISGSQKGDSAKHDVVDKDLLQAFRYFDQNRVGYIKVDDLRCILHNLGKFLSNRDVKDMVQIALAESNSARDGRIIYTKLVKKADL

SEQ ID NO: 65691 - DNA, 1686 bp, Triticum aestivum
  misc_feature (1)..(1686): Ceres Seq. ID no. 13656635
atcgcgtcgcatatcccctccctcccctctcatcacccacacccacgcggcagccggcttcaatttttccatctgctccccgtgctcttaatgggctttccctccctccgacatggccggcgacccccgcacccgcgccgccggtgaccactccctctccccctcctcccccgccgccgtcctcgtgcccgggggcggcctccgcctggggccctccaggctcttcctccacctgctcctcctccactcgctcttataaccccgcgcccccccgccgccaggccatggccgccgtcttctaccaccacgtcgtcggcgacctcaccgtcggcaagcccgagatcgccgagctcagcgacgcggacacgcttgacgacgcggcgcgggccatcgccggcagccccgagggcgccgtgcccgtctggcgcgcgcgggccgcccccgacgacccgccctccggggcccggttcctcggcatgatctccgccgtcgacatcgccgccttcctcgccggcgccggcgccggcgaccgcgccatgcgcgccgccgtcggcgaggtcgtgcagcccaaccaggacctgctccgggaggtcgatcccggcaccaggttgattgatgcgctggagttgatgaggaatggagtgaagcgcttccttgtccgcaagaacggctcctggacaggcatcaccaagcggttttctatgctttacaatgggaaatggatgaagaactcggaatcgggatccccaagctcagctggcagcagcagcatgcagttgtccccatttatcagttgcgcggagaggttttgctgcctgtcaagggaagacatcctccggttcctgatcgggtgcctcggcgccctcgcgcccatcccactgtctccaatctgtaccctcggagctatcaacccgcactactgccacgtcgaggcgtctgcgccagccatggaggcgatccagaagatccctggggacccctgcggcgtggccgtggttgagacgacatcggacggggtccgcaagatcatcggggacatctctgcctacaagctgtggaagtgtgactacgtggcggccgcgtgggcgctggcgaacctgtcggcggggcagtttgtcatcggcgccgacgagaacgggtcgacccccatctccgccttcccgctgccttccatcagctcgtcgttgtcggaggaggccaccgagcccgggcgctctcccaggctgcttaagaagttcagcagcaggaacatcgggttcctgaacagccaggcgaaccaggtgcggagcatgtaccggggccggagctcgccgctgatgtgccggagcacgagctccctggccgccgtcatggcgcagatgctgtcccaccgggcgactcacgtgtgggtgacggacgcggaggctgaggaggatgacgtcctcgttggcgtggtcgggtacacggacatctttgccgccgtcacccggagcagcgcctgaccgtcgacgacgtcctgatggcggtggcgtgtgtttgggtggtgtactataatttggggttagtttggtggttgtccagagctgagaactttgttttgggtgtgtgggcgtgtgagactgaatgggttgtgtattgttggatgtgcattcgttgttgatggtcctataataaggtagactcgggcctatttatgcctgggagtcc

SEQ ID NO: 65692 - protein, 492 aa, Triticum aestivum
  peptide (1)..(492): Ceres Seq. ID no. 13656636
RVAYPLPPLSSPTPTRQPASIFPSAPRALNGLSLPPTWPATPAPAPPVTTPSPPPPPPPSSCPGAASAWGPPGSSSTCSSSTRSYNPAPPRRQAMAAVFYHHVVGDLTVGKPEIAELSDADTLDDAARAIAGSPEGAVPVWRARAAPDDPPSGARFLGMISAVDIAAFLAGAGAGDRAMRAAVGEVVQPNQDLLREVDPGTRLIDALELMRNGVKRFLVRKNGSWTGITKRFSMLYNGKWMKNSESGSPSSAGSSSMQLSPFISCAERFCCLSREDILRFLIGCLGALAPIPLSPICTLGAINPHYCHVEASAPAMEAIQKIPGDPCGVAVVETTSDGVRKIIGDISAYKLWKCDYVAAAWALANLSAGQFVIGADENGSTPISAFPLPSISSSLSEEATEPGRSPRLLKKFSSRNIGFLNSQANQVRSMYRGRSSPLMCRSTSSLAAVMAQMLSHRATHVWVTDAEAEEDDVLVGVVGYTDIFAAVTRSSA

SEQ ID NO: 65693 - protein, 398 aa, Triticum aestivum
  peptide (1)..(398): Ceres Seq. ID no. 13656637
MAAVFYHHVVGDLTVGKPEIAELSDADTLDDAARAIAGSPEGAVPVWRARAAPDDPPSGARFLGMISAVDIAAFLAGAGAGDRAMRAAVGEVVQPNQDLLREVDPGTRLIDALELMRNGVKRFLVRKNGSWTGITKRFSMLYNGKWMKNSESGSPSSAGSSSMQLSPFISCAERFCCLSREDILRFLIGCLGALAPIPLSPICTLGAINPHYCHVEASAPAMEAIQKIPGDPCGVAVVETTSDGVRKIIGDISAYKLWKCDYVAAAWALANLSAGQFVIGADENGSTPISAFPLPSISSSLSEEATEPGRSPRLLKKFSSRNIGFLNSQANQVRSMYRGRSSPLMCRSTSSLAAVMAQMLSHRATHVWVTDAEAEEDDVLVGVVGYTDIFAAVTRSSA

SEQ ID NO: 65694 - protein, 334 aa, Triticum aestivum
  peptide (1)..(334): Ceres Seq. ID no. 13656638
MISAVDIAAFLAGAGAGDRAMRAAVGEVVQPNQDLLREVDPGTRLIDALELMRNGVKRFLVRKNGSWTGITKRFSMLYNGKWMKNSESGSPSSAGSSSMQLSPFISCAERFCCLSREDILRFLIGCLGALAPIPLSPICTLGAINPHYCHVEASAPAMEAIQKIPGDPCGVAVVETTSDGVRKIIGDISAYKLWKCDYVAAAWALANLSAGQFVIGADENGSTPISAFPLPSISSSLSEEATEPGRSPRLLKKFSSRNIGFLNSQANQVRSMYRGRSSPLMCRSTSSLAAVMAQMLSHRATHVWVTDAEAEEDDVLVGVVGYTDIFAAVTRSSA

SEQ ID NO: 65695 - DNA, 1099 bp, Triticum aestivum
  misc_feature (1)..(1099): Ceres Seq. ID no. 12780602
atcctaatcgaaaaatccctcccttcctcacggtctccgccccccaaatcgcattcctctcctcgccgccgtccgccgccgctcgctcgccatggacgccgccaagcccgccccggcccccgcccgccccgccggccccgggctctacgccgacatcggcaagaaggccagagatctcctcaacagggactacaccacgggccagaagttcaccttcaccaccaccgccgccaacggagctacaattactagttcgagcacaaagaaaaatgaagctatcgtggctgacctccagacccaggtgaagatcaagaatttcacagtggatgtgaaagcaacttcggactcaagtgttgtaactacaatcactgttcctgagctgtacacaccgggcttgaagggagttctttctcttcctttcccctaccagaagtctacccctgggaaggctgaactccagtacttgcatccccatcttggcatcaacggcagtgttggcctgaattcaaaccctcttgttaacttttctggtgtcattgggactaaggcttttgcttttggtgttgatgttgcatttgacactgcctctggtgacttcaccaagtacaatgctggactgagccacactaatcaagatcttactgcttcgttgaatctgaacaacaaggcaaacaccctggctgcttcctactaccaccaggtgcagcgcaccactgctgtgggagcagagatcgctcacagcttctcgagcaacgagaacaccatcaccgtcgggacgcagcacgagctggaccccctgacgaccgtgaaggggcgctacaacaacttcggcatcgcaagtgcgctcatccagcacgcgtggaggcccaagtctctcatcaccttctccaccgaggttgacaccaaggccattgagaagagccccaagttcgggctggccctgtcactcaagccctgatgtgggattcgtgggtgcgttaggatgctagcattttggtaccatcagctcttggtccagcgaacaaagcttggacagacagaacttgtaatgcccaactttggtgacgcgacaaacttatgtcgttttttagcctgttcc

SEQ ID NO: 65696 - protein, 288 aa, Triticum aestivum
  peptide (1)..(288): Ceres Seq. ID no. 12780603
MDAAKPAPAPARPAGPGLYADIGKKARDLLNRDYTTGQKFTFTTTAANGATITSSSTKKNEAIVADLQTQVKIKNFTVDVKATSDSSVVTTITVPELYTPGLKGVLSLPFPYQKSTPGKAELQYLHPHLGINGSVGLNSNPLVNFSGVIGTKAFAFGVDVAFDTASGDFTKYNAGLSHTNQDLTASLNLNNKANTLAASYYHQVQRTTAVGAEIAHSFSSNENTITVGTQHELDPLTTVKGRYNNFGIASALIQHAWRPKSLITFSTEVDTKAIEKSPKFGLALSLKP

SEQ ID NO: 65697 - DNA, 1575 bp, Triticum aestivum
  misc_feature (1)..(1575): Ceres Seq. ID no. 13496409
actagtactagtccgggatagtgcggctagggtttcttcgtcccacacacaccccctctcccccaacctgctccgtccccatcccctcgccgccgccgccgccgccgccgtctgagccctagactcgcgcgaatcctccccgggccgagcgatggcgatgcagaagtccggcgggagagactggtagcgagtagggcagttccccggtcaccccacacacaaatcccggcgagcgagcgcagagtgacctgactttttctgccatccatggcgaccgtgaaccccttcgacctcctcggcgacgacgagggcgacgaccccacgcagctcctggccaaggcggccgccctggcgcagaaggccgaggccaagaaggccgccgcgccgcccgccgccggcaagggcggcgcgcggacggtcgccaatctgcccaccaagccgcctccgcctggtcaggctgccaatgagtctcgtggtggtggtccactctcccgtggaggatatggtcgcggtgaacgtggctcaggcagaggtggccgaggagggtacggtcagaatcgcgactacgccagtgaagacacaaatggctacaggggaggttatggtgccagaactggaggtgaggaaggcgcccaggatagagagagggcccctcggcaaccctaccaggggggaggccgtcgtggtgggtatcgtgaaggcgagtttggtgatgattctgagaggccacctcgaaggaactatgagcgccaaagcggcacaggccgtgggtatgagataaaacgcgagggtgctggccgtgggaactggggaactacctctgatgaaattgttgcccaggaaactgaggccctgaagcaggatgagaaggcccctgcacctgagaagcagggcgcaccagaggatgcaccacaggcagatgagaacaaggccaccaaagatggcgctgcagttgtggaagaagaaaaggaagaggataatgagatgactcttgatgaatttgagaaagtaatggaggagaagaggaaagcacttgctgctttgaagaagtctgaagagaggaaggttgaaattgataaggatctgcaggctatgcaactactttccaccaagaaaggaaatgatgaagttttcatcaaactgggtgctgataaggaggctttgaagaagaaagagaatgctgaacgtgaagagcgtgctaagaagtctgtgagcatcaacgagttcctgaagcctgctgaaggagaaaggttctatggcggccgtggccgtggcggcaggggccgtggagaccgcggaggcttcagaggcggatttggtggtgggggttatcacggcccaccgcccgcaccggcaattcaggaccagaaccagttcccaaccctcggtgggaagtgagattgctgtaccatctcaagtgccacctttaccaatatcatcgacgctgtcaagtttagattttcctatcaccatatatttctgcacggatcctatattgaaacaaataactctgctgcatgtggaccattcatccctgtgtctgtcatgactttgtaaatccgatggttgtcgctt

SEQ ID NO: 65698 - protein, 376 aa, Triticum aestivum
  peptide (1)..(376): Ceres Seq. ID no. 15222989
MATVNPFDLLGDDEGDDPTQLLAKAAALAQKAEAKKAAAPPAAGKGGARTVANLPTKPPPPGQAANESRGGGPLSRGGYGRGERGSGRGGRGGYGQNRDYASEDTNGYRGGYGARTGGEEGAQDRERAPRQPYQGGGRRGGYREGEFGDDSERPPRRNYERQSGTGRGYEIKREGAGRGNWGTTSDEIVAQETEALKQDEKAPAPEKQGAPEDAPQADENKATKDGAAVVEEEKEEDNEMTLDEFEKVMEEKRKALAALKKSEERKVEIDKDLQAMQLLSTKKGNDEVFIKLGADKEALKKKENAEREERAKKSVSINEFLKPAEGERFYGGRGRGGRGRGDRGGFRGGFGGGGYHGPPPAPAIQDQNQFPTLGGK

SEQ ID NO: 65699 - DNA, 1701 bp, Triticum aestivum
  misc_feature (1)..(1701): Ceres Seq. ID no. 14301599
atataaaagcccctgtctccgtctccggttagcaggagagagagagagaggagagaggacgggtggaggccaagaacgcagcacgactgcacagcaccagctgccgaccgaccgcgggcggagctgaccccccgacccgatcagatccctcgccgcccgccccctcagatctccccgcgcgcgcccctcccagatccagctccgagcacttggattttcaacaaagaggtcctgccggcggtggtccgcgtctggaagctcgtcggctgctgcttcttgcttccagtgctctgtggcgaaggcgaccggcggagatggggctggctggggagaagttccagctggggacggtgggggcgctcagcctctccgtcgtctcctcggtctccattgtcatctgcaacaaggcgctcatgagcgccctcggcttcatcttcgccaccacgttgacaagctggcatctcttggtgacattctgttcactccatgtggcattatgcatgaagctctttgagcacaaaccttttgacgcgaggaccgtcatggggttcggagtgctcaacggcatctcgattgggcttctcaatctgagtctgggtttcaactctgttggtttctatcagatgacaaagctggccattattccctgcactgttatattggagactcttttcttcaggaagaagttcagtcgctacatccagctctcccttagtgtgctcctttttggtgttggagttgcaactgtgactgatctgcagctcaatgctatgggatctgtgctgtctttactggcaatcgtcacaacctgtattgctcaaattatgaccaatacaattcaaaagaagttcaaagtatcttcaactcagctgctgtaccaatcatgcccataccaagcattgaccctgttcattgttggtccattcctcgatgggtttctgactaacaaaaatgtctttgcttttgcatacacacctcaagttctgttcttcatcgtgctgtcgtgtctgatatcagtctcggtgaacttcagcactttccttgtgattgggaagacatctcctgtaacttaccaagtccttggccatctaaagacatgcttggttcttgccttcggctatgtcttgctgcatgatccgtttagctggagaaatatacttggaatcctgattgcagtggttgggatgggactatattcatacttctgcacccgtgaagctccaaagcccactgaagcctctccacaagtcactcaggtgaaagaaggtgaatcagaccctttgatcgcagactccttgaacgccgccgagaacggggccgctgcagccaccgacgagcctctgaaggtccccatgtggagctccaagtacgcacgggcatgaacgctcctgccccgacctctgaaggtgcccatgtggagctccaagcgctcgcgggcatgaacgccgcttcggaccttggttcatggtattatatacataattattcagtttagtaggcagatagtagggctggaaggaagccaggccagccctgagtgtaatgaacgttccttgttccatttttgggcctttttttctttccccccttttttttccttctgttttggcttaccatgcatgcctgtggtgctgttgtaaaagtggatctcacaccaaatgactccaaatggcagatctacctttgttgaagctaagatac

SEQ ID NO: 65700 - protein, 355 aa, Triticum aestivum
  peptide (1)..(355): Ceres Seq. ID no. 14301600
MGLAGEKFQLGTVGALSLSVVSSVSIVICNKALMSALGFIFATTLTSWHLLVTFCSLHVALCMKLFEHKPFDARTVMGFGVLNGISIGLLNLSLGFNSVGFYQMTKLAIIPCTVILETLFFRKKFSRYIQLSLSVLLFGVGVATVTDLQLNAMGSVLSLLAIVTTCIAQIMTNTIQKKFKVSSTQLLYQSCPYQALTLFIVGPFLDGFLTNKNVFAFAYTPQVLFFIVLSCLISVSVNFSTFLVIGKTSPVTYQVLGHLKTCLVLAFGYVLLHDPFSWRNILGILIAVVGMGLYSYFCTREAPKPTEASPQVTQVKEGESDPLIADSLNAAENGAAAATDEPLKVPMWSSKYARA

SEQ ID NO: 65701 - protein, 322 aa, Triticum aestivum
  peptide (1)..(322): Ceres Seq. ID no. 14301601
MSALGFIFATTLTSWHLLVTFCSLHVALCMKLFEHKPFDARTVMGFGVLNGISIGLLNLSLGFNSVGFYQMTKLAIIPCTVILETLFFRKKFSRYIQLSLSVLLFGVGVATVTDLQLNAMGSVLSLLAIVTTCIAQIMTNTIQKKFKVSSTQLLYQSCPYQALTLFIVGPFLDGFLTNKNVFAFAYTPQVLFFIVLSCLISVSVNFSTFLVIGKTSPVTYQVLGHLKTCLVLAFGYVLLHDPFSWRNILGILIAVVGMGLYSYFCTREAPKPTEASPQVTQVKEGESDPLIADSLNAAENGAAAATDEPLKVPMWSSKYARA

SEQ ID NO: 65702 - protein, 293 aa, Triticum aestivum
  peptide (1)..(293): Ceres Seq. ID no. 14301602
MKLFEHKPFDARTVMGFGVLNGISIGLLNLSLGFNSVGFYQMTKLAIIPCTVILETLFFRKKFSRYIQLSLSVLLFGVGVATVTDLQLNAMGSVLSLLAIVTTCIAQIMTNTIQKKFKVSSTQLLYQSCPYQALTLFIVGPFLDGFLTNKNVFAFAYTPQVLFFIVLSCLISVSVNFSTFLVIGKTSPVTYQVLGHLKTCLVLAFGYVLLHDPFSWRNILGILIAVVGMGLYSYFCTREAPKPTEASPQVTQVKEGESDPLIADSLNAAENGAAAATDEPLKVPMWSSKYARA

SEQ ID NO: 65703 - DNA, 1199 bp, Triticum aestivum
  misc_feature (1)..(1199): Ceres Seq. ID no. 13656441
attttttattagttctggacgaagcagtggctgtgtacgagtcgagcacgtcacgcacgcggccaggctgtgctgggagcttcgtccccctccactcccgtcagctccccgggcctgccccgccccgcccccactccgccgccgactgcgagagaagcctgtcatgtcaaacattgggaaatcaactaatattctatggcatgactgcccaattggacaaactgagcgacagaaattgctggggcaaaaaggatgtgtcatatggatcacaggactcagcggttcagggaaaagtaccgttgcctgtgcactgagtcgggaattacactacagaggccaccacacgtatgtccttgatggtgacaacctcagacatggcctcaatcgagatctaagcttcaaggcagaagaccgtacagaaaatatacgaagagttggtgaagtggcaaagctttttgcagatgctggtaccatatgcattgctagtttgatatctccatacaggagagaccgtgatgcatgccgagctctacttccagattctagatttattgaagtatttatggatttgccactagaattatgtgaagctcgtgatcctaaagggttatacaagcttgcacgcacaggaaagattaaagggttcaccggagttgatgatccatacgaatcaccagtgaatagtgagatagtaattaagatggaaggtggggaatgcccttcaccgaaagcaatggcccagcaagttctatcctaccttgagaagaatggatatttgcaggcttagcacacatactccagatccagaagattgatcttattcttctgtgtccataactcatggacacaggtacaatccatttggtccatccggaataaaaggtgctgttatcgaagcaacaagctgcctttttcacgaggaaagggacgcagatcgatgatcagtttgattgttcggcattgctcctctcctgtgtgttgtgctattttagctgtagtttatacttactcatttcggctgaaatggtgtgctgtgctgtgtttatctctactcctaatggacgacttggtgaatagtcttcgcgtttttaaaaaaaaaaaaaaaaaaaaaaaaaaaaaaaaaaaaaaaaaaaaaaaaaaaaaagaaaaaaaaaaaaaaaaaggtttatcaataccgtcaacctcaagggggggcccgg

SEQ ID NO: 65704 - protein, 261 aa, Triticum aestivum
  peptide (1)..(261): Ceres Seq. ID no. 13656442
FFISSGRSSGCVRVEHVTHAARLCWELRPPPLPSAPRACPAPPPLRRRLREKPVMSNIGKSTNILWHDCPIGQTERQKLLGQKGCVIWITGLSGSGKSTVACALSRELHYRGHHTYVLDGDNLRHGLNRDLSFKAEDRTENIRRVGEVAKLFADAGTICIASLISPYRRDRDACRALLPDSRFIEVFMDLPLELCEARDPKGLYKLARTGKIKGFTGVDDPYESPVNSEIVIKMEGGECPSPKAMAQQVLSYLEKNGYLQA

SEQ ID NO: 65705 - protein, 207 aa, Triticum aestivum
  peptide (1)..(207): Ceres Seq. ID no. 13656443
MSNIGKSTNILWHDCPIGQTERQKLLGQKGCVIWITGLSGSGKSTVACALSRELHYRGHHTYVLDGDNLRHGLNRDLSFKAEDRTENIRRVGEVAKLFADAGTICIASLISPYRRDRDACRALLPDSRFIEVFMDLPLELCEARDPKGLYKLARTGKIKGFTGVDDPYESPVNSEIVIKMEGGECPSPKAMAQQVLSYLEKNGYLQA

SEQ ID NO: 65706 - DNA, 702 bp, Triticum aestivum
  misc_feature (1)..(702): Ceres Seq. ID no. 12619044
aattctatcttcccatccatcttgcggctcgtgccatggcagatcggccgggaagctcgttgccggtcgttcctcgtccggcccggctccggagcggccaagcgtcctactcgtcccgccggcgcgtccatccatccaacgcccagctcctcgtctacctagccctcgccgtcaccttggccgccctcctggtcctcaccggcgtcacgctcaccgtcgcgtcagtcgtgctcgtcgtcctcgtcgtcctcgccccgctcttgctcctcaccagccctctctgggcgccggtggcagtggtggccatcgtctcggggggcgccttgctgtttggctgtagcctcacggtgttcgcgctgagagcgagcacgtgggcgcaccggcgcctgacggggcggcacccggtgggcgcgcgtcgggtgggctacgcccgtgggcgtggccggttcgccggcgcgggtggccacgcgacgggctaccacgggcagggacaagggtacgatcggatgaaggacgccgtgcccggggcctagctggcggcgaacaagcttctccttccgcgcattccgtttggtttggatacgttttacacgctgtgttttagttggaactggttcgttggcgaggtatatactgtgctgatacacgttttcatgtgtgttttgaatgcatttcttgatcctgcgggaatcaactctgctc

SEQ ID NO: 65707 - protein, 176 aa, Triticum aestivum
  peptide (1)..(176): Ceres Seq. ID no. 12619045
FYLPIHLAARAMADRPGSSLPVVPRPARLRSGQASYSSRRRVHPSNAQLLVYLALAVTLAALLVLTGVTLTVASVVLVVLVVLAPLLLLTSPLWAPVAVVAIVSGGALLFGCSLTVFALRASTWAHRRLTGRHPVGARRVGYARGRGRFAGAGGHATGYHGQGQGYDRMKDAVPGA

SEQ ID NO: 65708 - protein, 165 aa, Triticum aestivum
  peptide (1)..(165): Ceres Seq. ID no. 12619046
MADRPGSSLPVVPRPARLRSGQASYSSRRRVHPSNAQLLVYLALAVTLAALLVLTGVTLTVASVVLVVLVVLAPLLLLTSPLWAPVAVVAIVSGGALLFGCSLTVFALRASTWAHRRLTGRHPVGARRVGYARGRGRFAGAGGHATGYHGQGQGYDRMKDAVPGA

SEQ ID NO: 65709 - protein, 112 aa, Triticum aestivum
  peptide (1)..(112): Ceres Seq. ID no. 12619047
ILSSHPSCGSCHGRSAGKLVAGRSSSGPAPERPSVLLVPPARPSIQRPAPRLPSPRRHLGRPPGPHRRHAHRRVSRARRPRRPRPALAPHQPSLGAGGSGGHRLGGRLAVWL

SEQ ID NO: 65710 - DNA, 797 bp, Triticum aestivum
  misc_feature (1)..(797): Ceres Seq. ID no. 15225138
tccgcttgtatttctatttccccgtcccttccttccttctagacaccaatccttcttcctcacccgactgcccaacttccggagcaagcgaattgcatcatgcccgcagtgatgaaagctctcgccgccgcctcgccggtctcggcgccgccatcgccccgtcggagggtcgcaggctcgtcaggcgcgccgtgccaaagcctgcagtcctccttccgcggcatctccctgcggtgctgtcccaggaaaccggcccaccgctcgccgccgctacgcagctctcgggcggcggcgcaggtggtggcgatgaagccggcgatccagttcatccagggcacggacgagcagacgatcccggacgtgcggctgaccaagtcccgcgacggcaccaacggggtggccatcttcgagttcgaccagccgtcggtgttcgactcgtcggcggagctcggggacatcacggggttctacatgatcgacgaggagggcgtgctgcagacggcggacgtgagcgccaagttcgtcaacgggaagccggccagggtggaggccaagtacgtgatgcgcacggccggggactgggaccgcttcatgaggttcatggagaggtactcgcaggccaacggcctccagttcgtcaagaactaagtcacatctcctcgatgggccttgtgtgttgcccatgttcagttcagtataactgtcgagctggtaacgaaggtgaatgattgtactgaggtgtcatgtgtatctcttatgtaactttgacattgtgtgaaattttgtatacaccagcc

SEQ ID NO: 65711 - protein, 241 aa, Triticum aestivum
  peptide (1)..(241): Ceres Seq. ID no. 15225139
RLYFYFPVPSFLLDTNPSSSPDCPTSGASELHHARSDESSRRRLAGLGAAIAPSEGRRLVRRAVPKPAVLLPRHLPAVLSQETGPPLAAATQLSGGGAGGGDEAGDPVHPGHGRADDPGRAADQVPRRHQRGGHLRVRPAVGVRLVGGARGHHGVLHDRRGGRAADGGRERQVRQREAGQGGGQVRDAHGRGLGPLHEVHGEVLAGQRPPVRQELSHISSMGLVCCPCSVQYNCRAGNEGE

SEQ ID NO: 65712 - protein, 182 aa, Triticum aestivum
  peptide (1)..(182): Ceres Seq. ID no. 15225140
MPAVMKALAAASPVSAPPSPRRRVAGSSGAPCQSLQSSFRGISLRCCPRKPAHRSPPLRSSRAAAQVVAMKPAIQFIQGTDEQTIPDVRLTKSRDGTNGVAIFEFDQPSVFDSSAELGDITGFYMIDEEGVLQTADVSAKFVNGKPARVEAKYVMRTAGDWDRFMRFMERYSQANGLQFVKN

SEQ ID NO: 65713 - protein, 178 aa, Triticum aestivum
  peptide (1)..(178): Ceres Seq. ID no. 15225141
MKALAAASPVSAPPSPRRRVAGSSGAPCQSLQSSFRGISLRCCPRKPAHRSPPLRSSRAAAQVVAMKPAIQFIQGTDEQTIPDVRLTKSRDGTNGVAIFEFDQPSVFDSSAELGDITGFYMIDEEGVLQTADVSAKFVNGKPARVEAKYVMRTAGDWDRFMRFMERYSQANGLQFVKN

SEQ ID NO: 65714 - DNA, 949 bp, Triticum aestivum
  misc_feature (1)..(949): Ceres Seq. ID no. 12618747
accggcccaaaagcagagcgcaagtgcgcaccaccggccgagcgagctgagtcgattcgagcagcaggatgggcggcggcggcggcagcagcggcagcccgacggcgagcagcagcagcgacgatgacggagacgcctcgtggagggcggccatcgactctgtagctgtagggggcttcggctacccgtcgtccaacggcgcggcgaaggccgcctctggcggcggcggcggcgtcgaggaggacagcaacgggctggagcagccgccgcaggatgagaagaaggcgcaaacgcctgggctcaagctgtaccagatcaagataaataccatgtgcaactcaagagaccaaagattcttcctgggccagaggtcgacgagaaatcaaagaagttcagacatatgcttcagtctgttgttgttgatggtaacgacgtacttgtttccgcgaaagaagcatcccaaatatcattggctagaatggaagctagagaaactgcagcaaagaccaaagccaagagggaggaagaaagggtgaaccagctgaagaaggtcaggggagagaaatggcttccttccattgctagtaaaatgaagaaagaaaaatcttgggagcaatggcaggaaaaaaagctcaagagcaatggcagtaatggtggatcatttcagctgggccgcatatgctaatcttttaggccatctatgggggcacccttttccggacgccacaagcccacaattgctttgataacttctattttgccatttatccatttgacgatgatggtcgacaagaggattgaattggatgaaaagatagaatgttggactgacgattttgttctaatctagagaacgtagcttatcagtaccttctcaatttttgtagcaaaattatgttatattccaggattgatacgcttgagcagtctctgcctcgcaactggggcc

SEQ ID NO: 65715 - protein, 155 aa, Triticum aestivum
  peptide (1)..(155): Ceres Seq. ID no. 12618748
MGGGGGSSGSPTASSSSDDDGDASWRAAIDSVAVGGFGYPSSNGAAKAASGGGGGVEEDSNGLEQPPQDEKKAQTPGLKLYQIKINTMCNSRDQRFFLGQRSTRNQRSSDICFSLLLLMVTTYLFPRKKHPKYHWLEWKLEKLQQRPKPRGRKKG

SEQ ID NO: 65716 - protein, 94 aa, Triticum aestivum
  peptide (1)..(94): Ceres Seq. ID no. 12618749
MLQSVVVDGNDVLVSAKEASQISLARMEARETAAKTKAKREEERVNQLKKVRGEKWLPSIASKMKKEKSWEQWQEKKLKSNGSNGGSFQLGRIC

SEQ ID NO: 65717 - DNA, 2072 bp, Triticum aestivum
  misc_feature (1)..(2072): Ceres Seq. ID no. 13656490
gctggttaggttgtctcgcgttgagggctttgccgacgcaacacgcacccaaaaatcctaatcctcatcgccgccggcgaccatggtgtcgcagcacgacatcctcctcgccgcgggcctcatatccgaccacttcggccccctcgtagcgaaggtgtgcgactgcctcctccgccacggggcgctgcagctgacggagattgtgcgccgtctcaagctcccgcaggggcaagtgaagaactctctcctcgtcctcatccagcacaactgcgttcaggccttctcatcgcccagaggcgataggaccatcacgctctacttggccatcttcgacaatgtcctgcatcggctgcgcttctcaaagttcatctctattatccgcgcggacattccagagtcagaagctcttattgagggattgcttcagaatggtaggctaacatttgaccaacttgtgggacgcacaatctctaaagtgccagaaggcaccatccgaccagcaagggaagaaatacgaatgaacttcaacagacttgtgtatgcacgttatgtggaacgttgcccaaaagctgaaccctatttcaatccacaggaagatgaacaatctacaggtgcaaggagaagagttccaaaaactgccgaggaggttctttcacttgagcagaaagttgtcaatactgcaaccctttctgatccagaaaggttttctgagatcccatacagcatggaggatgcatcaaaaacgaatgattgtcctcataacgctgttgcgggtgctaagcggaaacacggagcctttgaggtagatgaagagctcaactcaacaattgcagagaatgaagtactttggcgggtaaattttgagaaatttatattttgtctaaagaagaagttttgtgcagaccgaaagaagccaaagctgaaggttggcacacatcctatctgggagtcattttttgaagctaacttacctgacaaagatacaaactctgtgacatcatcaataaatggtattttggagaaactaggacaaaaggaaggaggtgcggcaatgtcaattggtgacataaaaccagtcctgctggatttacagtgtactacttccgatggggaagaatttacttttgatttacgcaaaatggttgaagcatgtagaaatgaggagatagagtcgcttgtgaaaaagaaatacgggcaagaagcttttacaatctttaggctattggtcacacaaggttgtgcagttgagacagatcaaattattgacacaacaattctggacaagcagattgttcattcaactttgtacaaactatggaacgacggctacatagatacagagaaaatcgcttccgcagcaggaacagggtacgcacagttttttgtatggagagccaaaaatacatttcgtgagcagttcatcgataatctctaccatgctgctttgaacttgcgccagatggtgaattacattgctgaacttctactcgagggttcgaaggacgaaacaaagctgcggaacagaaagaacattttgatcctggccctcactagacatgatgactctctcatgctgttccatgatttttgagaatacaggctatccattcggttcgtctggccaaatgccactcgtaccggcaggcaggcaggccaccgatgattggaagcggataatcacaataattcgcaagttgcgggggcgcagatgctgcgccacttggagcggctaccattatctatctatcaatccgcgcgcgagaggtagaggtcgcaagcgcgtcgtcatgcacgtatgaccatggacttttgcgagccgtatcgcacccatgtgcgcacacacatgcatgaagcaaccctacaactaatgcgcgcgcatacggccaggtcaactgctgcagttagctggagacaaataacgattctttctttccggaagttgtagatgaaagctaaatcaaaccctgaactttgaatcccggaaattgacactctgaacttgtaatcccggtctattttggaccctatacctgtttggcacatcgggaatacaacaatcccggttgggattt

SEQ ID NO: 65718 - protein, 502 aa, Triticum aestivum
  peptide (1)..(502): Ceres Seq. ID no. 15220581
MVSQHDILLAAGLISDHFGPLVAKVCDCLLRHGALQLTEIVRRLKLPQGQVKNSLLVLIQHNCVQAFSSPRGDRTITLYLAIFDNVLHRLRFSKFISIIRADIPESEALIEGLLQNGRLTFDQLVGRTISKVPEGTIRPAREEIRMNFNRLVYARYVERCPKAEPYFNPQEDEQSTGARRRVPKTAEEVLSLEQKVVNTATLSDPERFSEIPYSMEDASKTNDCPHNAVAGAKRKHGAFEVDEELNSTIAENEVLWRVNFEKFIFCLKKKFCADRKKPKLKVGTHPIWESFFEANLPDKDTNSVTSSINGILEKLGQKEGGAAMSIGDIKPVLLDLQCTTSDGEEFTFDLRKMVEACRNEEIESLVKKKYGQEAFTIFRLLVTQGCAVETDQIIDTTILDKQIVHSTLYKLWNDGYIDTEKIASAAGTGYAQFFVWRAKNTFREQFIDNLYHAALNLRQMVNYIAELLLEGSKDETKLRNRKNILILALTRHDDSLMLFHDF

SEQ ID NO: 65719 - protein, 357 aa, Triticum aestivum
  peptide (1)..(357): Ceres Seq. ID no. 15220582
MNFNRLVYARYVERCPKAEPYFNPQEDEQSTGARRRVPKTAEEVLSLEQKVVNTATLSDPERFSEIPYSMEDASKTNDCPHNAVAGAKRKHGAFEVDEELNSTIAENEVLWRVNFEKFIFCLKKKFCADRKKPKLKVGTHPIWESFFEANLPDKDTNSVTSSINGILEKLGQKEGGAAMSIGDIKPVLLDLQCTTSDGEEFTFDLRKMVEACRNEEIESLVKKKYGQEAFTIFRLLVTQGCAVETDQIIDTTILDKQIVHSTLYKLWNDGYIDTEKIASAAGTGYAQFFVWRAKNTFREQFIDNLYHAALNLRQMVNYIAELLLEGSKDETKLRNRKNILILALTRHDDSLMLFHDF

SEQ ID NO: 65720 - protein, 288 aa, Triticum aestivum
  peptide (1)..(288): Ceres Seq. ID no. 15220583
MEDASKTNDCPHNAVAGAKRKHGAFEVDEELNSTIAENEVLWRVNFEKFIFCLKKKFCADRKKPKLKVGTHPIWESFFEANLPDKDTNSVTSSINGILEKLGQKEGGAAMSIGDIKPVLLDLQCTTSDGEEFTFDLRKMVEACRNEEIESLVKKKYGQEAFTIFRLLVTQGCAVETDQIIDTTILDKQIVHSTLYKLWNDGYIDTEKIASAAGTGYAQFFVWRAKNTFREQFIDNLYHAALNLRQMVNYIAELLLEGSKDETKLRNRKNILILALTRHDDSLMLFHDF

SEQ ID NO: 65721 - DNA, 1408 bp, Triticum aestivum
  misc_feature (1)..(1408): Ceres Seq. ID no. 13663031
gaacatcctaatcgaaaaagattggcgttcaaacagtccagttccagcccgactcgggccgcacccatgtctcgtctcatcccccggcggctccaccgcgccgtctccgccggcggcgcgacctcctcgagcccctcaaatctccgcagcagcgacgccaccaccgccgccacctcaaatgcgatcgtcagcctcgtcgcggcaggcggcgacggcggcagcctggaggcggacctggaccgcctcggcccgcccctctccgacgccgccgtgtcggcggcgctccgcgcgctcacggaccgcggcgtccccgcgttccgcttcttcgcatggctctcccggcacaggggcgtccccccgagcgcccgcgcccacaacctgctcgtccagaacgccggcaggctggccgactaccccaccatggcccgcgccctcgacctagtgtcggcgcgacggctcccccttaccgagcaggcgttcttgttcctggaggccgccgcgaggtcgtcctcatctgcgagcagcgtggatgacgcggtgagggcgactctgacggttttggatggtgccggtggcccgtgccgcgcgtccggcgtgttctcgctggtcaaggcgttggcctcgatcggcgagttcgacgcggccgtctgggtgatcgaggagacggccaggagagcgagctactacaacgtcctcttggctgccaagtgcaaggctggtgacttccggggcgcccgcgaggtgttcgacggaatgaggaaggggagctgcggcccaaatgccaactcctggaactacctcctcgggtgcctgctgaagaatggcagggccaccgaagcatgcgacctcgttgagaccatggagaggtcgggacacgacgacatcccaaactcactgtcgtacgagatcctcacataccatgcctgcaaggcggggaagatggattcggcaaggcagattctcgatcagttgttctcagaaaatctgacgccgaggattacaatccacacagccttcatcaaagggtacttctatactgggagaatcaaagatgcttgcgattatgtgagggctatgagcaccagggattcacactccaccaacaggaactacagcctgctcgccaagctgttgcacaggtcggggaggatcgtcgaggctggaagtgtcctgtatgagttgatggagaagggcctcaggcctgaccattctgcttatgttacagtgtccaaaggtttgcacaagatgggaaggggagatctgtgtgctgaattgaagtccttgtttcagaatttcattgtacagtcaggtttggaacactgatttacgtttgagctcttgttgagtcatctacttgagtgaaacttgcttgtccacataagatatttaggtgccatttatgccttcc

SEQ ID NO: 65722 - protein, 440 aa, Triticum aestivum
  peptide (1)..(440): Ceres Seq. ID no. 13663032
EHPNRKRLAFKQSSSSPTRAAPMSRLIPRRLHRAVSAGGATSSSPSNLRSSDATTAATSNAIVSLVAAGGDGGSLEADLDRLGPPLSDAAVSAALRALTDRGVPAFRFFAWLSRHRGVPPSARAHNLLVQNAGRLADYPTMARALDLVSARRLPLTEQAFLFLEAAARSSSSASSVDDAVRATLTVLDGAGGPCRASGVFSLVKALASIGEFDAAVWVIEETARRASYYNVLLAAKCKAGDFRGAREVFDGMRKGSCGPNANSWNYLLGCLLKNGRATEACDLVETMERSGHDDIPNSLSYEILTYHACKAGKMDSARQILDQLFSENLTPRITIHTAFIKGYFYTGRIKDACDYVRAMSTRDSHSTNRNYSLLAKLLHRSGRIVEAGSVLYELMEKGLRPDHSAYVTVSKGLHKMGRGDLCAELKSLFQNFIVQSGLEH

SEQ ID NO: 65723 - protein, 418 aa, Triticum aestivum
  peptide (1)..(418): Ceres Seq. ID no. 13663033
MSRLIPRRLHRAVSAGGATSSSPSNLRSSDATTAATSNAIVSLVAAGGDGGSLEADLDRLGPPLSDAAVSAALRALTDRGVPAFRFFAWLSRHRGVPPSARAHNLLVQNAGRLADYPTMARALDLVSARRLPLTEQAFLFLEAAARSSSSASSVDDAVRATLTVLDGAGGPCRASGVFSLVKALASIGEFDAAVWVIEETARRASYYNVLLAAKCKAGDFRGAREVFDGMRKGSCGPNANSWNYLLGCLLKNGRATEACDLVETMERSGHDDIPNSLSYEILTYHACKAGKMDSARQILDQLFSENLTPRITIHTAFIKGYFYTGRIKDACDYVRAMSTRDSHSTNRNYSLLAKLLHRSGRIVEAGSVLYELMEKGLRPDHSAYVTVSKGLHKMGRGDLCAELKSLFQNFIVQSGLEH

SEQ ID NO: 65724 - protein, 300 aa, Triticum aestivum
  peptide (1)..(300): Ceres Seq. ID no. 13663034
MARALDLVSARRLPLTEQAFLFLEAAARSSSSASSVDDAVRATLTVLDGAGGPCRASGVFSLVKALASIGEFDAAVWVIEETARRASYYNVLLAAKCKAGDFRGAREVFDGMRKGSCGPNANSWNYLLGCLLKNGRATEACDLVETMERSGHDDIPNSLSYEILTYHACKAGKMDSARQILDQLFSENLTPRITIHTAFIKGYFYTGRIKDACDYVRAMSTRDSHSTNRNYSLLAKLLHRSGRIVEAGSVLYELMEKGLRPDHSAYVTVSKGLHKMGRGDLCAELKSLFQNFIVQSGLEH

SEQ ID NO: 65725 - DNA, 1518 bp, Triticum aestivum
  misc_feature (1)..(1518): Ceres Seq. ID no. 13656752
agaacatcctaatcgaaaagtaccatctgggctggggaggggaaggagcagaggggatgagcggcggcggcggcggcggagtgctgggcgccggctcgtcgtaccagagcttcgtccgcaccgcgctggaacagacccgcctccgcaccgccctcacgccccacccctcgcaggaaaagttcaggctcatacgagccaacgacgatgctgctgttttggacgctctctcattcagcacccccaagatcagactgcttcgcagcttgacggttgagaagaaaaactcggttcaggttcttgactttgctgctttctctgaacctgaatatgatcttcctatattttgcgccaacgcttttacgactcctgcacagagtatcgttgtcttggacctcaatccgctatacgatataactgaagacaaggattacaaagataaatactacaggaatttgatgcctcttatacacaagtatagtgaggtgcttggatcttatccttcaccccaaatatattaccccagtcttcttctattagctttatacatagagtgctatctttatttagagaaaatgcagcttctgccatggggtggcaagattacgagcgaatctctgagattcttctctccaatcgtgatctggactatatttgagcccactgaacgtaaccatcatgttctgtattcagctttgatggattactataaggtttggcttcagttaacggatcaagcaactgaagaaaatgacacaacgaaagttgttcgtaacagagaagcgcaacatagatatctcacatggagggctgaaaaggatcctgggtttccacttctgaagaagttgattggtgaaagccatgccaaggatttggtgactgagttcctgttcgaaggagtgcattctcttggaactaaatctttcctggactattttcgcgagtacgcatgtgacgacgggacagtaaacaagaagaggagtatgatcgggaaatctttcgaagataggccttgggatgctacgggagaattcattggtggcaaggatgcaggatgagatcttttgatgcaggatgatatcttttgcagtaggatccacatgggcattcttagggttttgctgagctcctagcgattcacggcactcttgcttctcaggtttcattttaacgttcttcgttacacgctgtccgggctaatttgcatccatgtaatttcatctgagttctctgtgtagcttagaaaacatgtgtaatatttgattgaccctgataagtttttatggcaagtttagcgacgcgagaatggcaactttagttgtcaagcaagtcaacttcttttcggatggtacgttttagttttttttcgggtttgtttttttcaatttggatagcaactttaattgtaaaaaaaatatcagggccggagtgcttcgtgctacacgtgtggcacttatcatttgggtatattaaattgagtgcattatcaataataccttgcagtgatattatacactggcc

SEQ ID NO: 65726 - protein, 350 aa, Triticum aestivum
  peptide (1)..(350): Ceres Seq. ID no. 13656753
NILIEKYHLGWGGEGAEGMSGGGGGGVLGAGSSYQSFVRTALEQTRLRTALTPHPSQEKFRLIRANDDAAVLDALSFSTPKIRLLRSLTVEKKNSVQVLDFAAFSEPEYDLPIFCANAFTTPAQSIVVLDLNPLYDITEDKDYKDKYYRNLMPLIHKYSEVLGSYPSPQIYYPSLLLLALYIECYLYLEKMQLLPWGGKITSESLRFFSPIVIWTIFEPTERNHHVLYSALMDYYKVWLQLTDQATEENDTTKVVRNREAQHRYLTWRAEKDPGFPLLKKLIGESHAKDLVTEFLFEGVHSLGTKSFLDYFREYACDDGTVNKKRSMIGKSFEDRPWDATGEFIGGKDAG

SEQ ID NO: 65727 - protein, 332 aa, Triticum aestivum
  peptide (1)..(332): Ceres Seq. ID no. 13656754
MSGGGGGGVLGAGSSYQSFVRTALEQTRLRTALTPHPSQEKFRLIRANDDAAVLDALSFSTPKIRLLRSLTVEKKNSVQVLDFAAFSEPEYDLPIFCANAFTTPAQSIVVLDLNPLYDITEDKDYKDKYYRNLMPLIHKYSEVLGSYPSPQIYYPSLLLLALYIECYLYLEKMQLLPWGGKITSESLRFFSPIVIWTIFEPTERNHHVLYSALMDYYKVWLQLTDQATEENDTTKVVRNREAQHRYLTWRAEKDPGFPLLKKLIGESHAKDLVTEFLFEGVHSLGTKSFLDYFREYACDDGTVNKKRSMIGKSFEDRPWDATGEFIGGKDAG

SEQ ID NO: 65728 - protein, 199 aa, Triticum aestivum
  peptide (1)..(199): Ceres Seq. ID no. 13656755
MPLIHKYSEVLGSYPSPQIYYPSLLLLALYIECYLYLEKMQLLPWGGKITSESLRFFSPIVIWTIFEPTERNHHVLYSALMDYYKVWLQLTDQATEENDTTKVVRNREAQHRYLTWRAEKDPGFPLLKKLIGESHAKDLVTEFLFEGVHSLGTKSFLDYFREYACDDGTVNKKRSMIGKSFEDRPWDATGEFIGGKDAG

SEQ ID NO: 65729 - DNA, 1572 bp, Triticum aestivum
  misc_feature (1)..(1572): Ceres Seq. ID no. 13656546
agattcccaactggcatgtccctgatcccgcgcgctgctccggcggcgagcatggcgttcgccggacgggaccccgctgtcatctccctcctcaagatgctaccgctgctcgtgctcctcaccttctcctccgccgcggcgcccccggcggcggcgtcaccctccgccgtgcacaacaacaactgggccgtgctcgtctgtacctctcgcttctggtttaattatagacatatggccaacacgctgtctttgtacaggactgttaagagattgggaatacctgacgagaggataatacttatgttggctgatgatatggcttgtaatcctcggaacaattatcctgcccaagtgttcaacaatgagaaccaccagcttaatctttatggtgacaatgttgaggttgattaccgaggttatgaggttacagttgaaaactttttgcgagttttgactggaagacatgagagcgctgtaccaagatcaaagcgtctcttaagtgatgaaggaagccatattcttttgtacatgactggacatggcggggatgaatttttgaagttccaagataacgaagaacttcagagccatgatttagcagatgcagtaaagcaaatgaaggagaagcatagatttaaagagttgttgataatggtagatacctgccaggctgctactcttttttcacagcttcaatcacccggtgttttggcgattggtagcagcatgaagggggaaaactcttactctcaccatctcgactcagacattggtgtttctgttgtggatagatttaccttccatacacttgctttctttgagaagctgaacatgtatagcaatgcttcattgaacagtcttttcaactcatacgacccttctatgctgctgtctactgcatattatcgaatggatctttacaagcgtgcattaaacgaggtcccagtgacaaatttctttggatcagtcatgaagactatccacactgattcagcctacacaggctttctagctgcacatgacgcggaactccccctttctgcaggaaataatatacttgatcatgtcatgtcacagaatgaggctagtgcaagaagatcgaacatagaagagatgaatgaggcacaattaatgtcccatggatggacagaggtcctgctagagcagctggaagacaaaaattctgatgttgttgtgatgtatggtctgggaactatgggcatattgctggcaatttgaacctggctatcaatgtaggaactctgaagtgtgctcttaacacatcatcttcttgcagaaaaacttagtcatactaactttcacaggatgggaccaagaagaatgaaaagaagagagatactttggcggtcaacgttctgtatttcctttttacctaatcatagcatccattcagtttggaacaaattgttgtatgtagttttcgcatggtaccctctactttttggatacgtagctcgatatgtttcgtagtcatttttatgcatctgtgctcctgcatcacatattgtacctgtcagattatttcattgctacttgaaaatatttccatgt

SEQ ID NO: 65730 - protein, 412 aa, Triticum aestivum
  peptide (1)..(412): Ceres Seq. ID no. 15219828
RFPTGMSLIPRAAPAASMAFAGRDPAVISLLKMLPLLVLLTFSSAAAPPAAASPSAVHNNNWAVLVCTSRFWFNYRHMANTLSLYRTVKRLGIPDERIILMLADDMACNPRNNYPAQVFNNENHQLNLYGDNVEVDYRGYEVTVENFLRVLTGRHESAVPRSKRLLSDEGSHILLYMTGHGGDEFLKFQDNEELQSHDLADAVKQMKEKHRFKELLIMVDTCQAATLFSQLQSPGVLAIGSSMKGENSYSHHLDSDIGVSVVDRFTFHTLAFFEKLNMYSNASLNSLFNSYDPSMLLSTAYYRMDLYKRALNEVPVTNFFGSVMKTIHTDSAYTGFLAAHDAELPLSAGNNILDHVMSQNEASARRSNIEEMNEAQLMSHGWTEVLLEQLEDKNSDVVVMYGLGTMGILLAI

SEQ ID NO: 65731 - protein, 407 aa, Triticum aestivum
  peptide (1)..(407): Ceres Seq. ID no. 15219829
MSLIPRAAPAASMAFAGRDPAVISLLKMLPLLVLLTFSSAAAPPAAASPSAVHNNNWAVLVCTSRFWFNYRHMANTLSLYRTVKRLGIPDERIILMLADDMACNPRNNYPAQVFNNENHQLNLYGDNVEVDYRGYEVTVENFLRVLTGRHESAVPRSKRLLSDEGSHILLYMTGHGGDEFLKFQDNEELQSHDLADAVKQMKEKHRFKELLIMVDTCQAATLFSQLQSPGVLAIGSSMKGENSYSHHLDSDIGVSVVDRFTFHTLAFFEKLNMYSNASLNSLFNSYDPSMLLSTAYYRMDLYKRALNEVPVTNFFGSVMKTIHTDSAYTGFLAAHDAELPLSAGNNILDHVMSQNEASARRSNIEEMNEAQLMSHGWTEVLLEQLEDKNSDVVVMYGLGTMGILLAI

SEQ ID NO: 65732 - protein, 395 aa, Triticum aestivum
  peptide (1)..(395): Ceres Seq. ID no. 15219830
MAFAGRDPAVISLLKMLPLLVLLTFSSAAAPPAAASPSAVHNNNWAVLVCTSRFWFNYRHMANTLSLYRTVKRLGIPDERIILMLADDMACNPRNNYPAQVFNNENHQLNLYGDNVEVDYRGYEVTVENFLRVLTGRHESAVPRSKRLLSDEGSHILLYMTGHGGDEFLKFQDNEELQSHDLADAVKQMKEKHRFKELLIMVDTCQAATLFSQLQSPGVLAIGSSMKGENSYSHHLDSDIGVSVVDRFTFHTLAFFEKLNMYSNASLNSLFNSYDPSMLLSTAYYRMDLYKRALNEVPVTNFFGSVMKTIHTDSAYTGFLAAHDAELPLSAGNNILDHVMSQNEASARRSNIEEMNEAQLMSHGWTEVLLEQLEDKNSDVVVMYGLGTMGILLAI

SEQ ID NO: 65733 - DNA, 1791 bp, Triticum aestivum
  misc_feature (1)..(1791): Ceres Seq. ID no. 15176091
accgatagaccgataaactagcagccgtcccgtcatcaaccttgcaagttagaaaccagccccgtctccaaattaatggacgtcacggcatgggcatgggcctccttcctggccgtcgtcctcgtcgtcctaaccattctccgccgtggccgtggctcgcagccgcaggggaacaggcttccaccaggaccgaagccgtggcccgtgatcggcaacctcaatctcatcggcgcgctgccgcaccgctccatccacgagctgtccaagcagtacggcccgttgatgcagctccggttcgggtccttccccgtcgtggtgggctcctcggccgagatggccaggttcttcctcaagacccacgacacggtgttcgccgaccggccaaggaccgccgccggcaagcacaccacctacaactactccgacgtcctgtgggcgccctacaacgcccacttccgccgcgcgcgcaggctcttcgccaccgagctgttcagcgcggcgcggctcgagtcctacaagcacatccgccacgaggaggtgagcgcgctgctgcgcgacctggccgcggccgctcacggggcatctggccgtgccgtgccgctcaggggacacctctttgcggcgaccaacggcatcatctcgcgggtggtgctgggcaagaagtacgcggagaaggaggcaggaggctcggcagccatggcgctggaggatttgtcgggcttaattgaggagtttttccttctcaacggcgtgatcaacgtcggcgatttcattccgtggttcgactggctggacctgcaagggtacgtccggaggatgaagaagtacagcaagaagatggaccgctttctcgagcatgtcctggaggaacacgaggagcgccggcgtgtcaagggggagcagttcgtggcgagggacatggtggacgtgctgctgcagctcgccgacaatcctaaccggcttgaccgagacaccgtcaaggctctcactcaggaacttatcgtcgggggttcagatacctccagtgtaaccatggagtgggcgatgtcggaggttctcaggaaccctgaggtcttgggcaaggccaccaaggagctcgaccgtgtggtcggccgtgacaggatggtcatggagaaggacatcccagacctcccttacatagaggccatcgtgaaggaggcgatgcgcatgcacccggtgtcgcccatgttggcgccccacctcgcacgcgaggacgcgtccgtcgacggccacgacatccccgccggcacgctcgtcctcgtcaacgtgtgggccatcggccgtgacccgacctattgggacgcgccggaggagttccgaccagagaggtttatggggagcaagatcgacgtgaaggggcaggacatggagctgctaccgttcggggccggccgccggatgtgccccgggtatagcctgggactgaaggtggtgcagttgatcgtcgccaatcttctgcatggcttcacgtgggggctccctgacggcacaacgatggagcaactcaacatggaggagatatatgggctcaccactgcgcgcaagttcccgttagaggcagtggtggagcctaagctccaagaacacgtcttctcgtagcgccgccgccgcaaaaatgctagactcacgcatcattacggaggttctagtcattgtggtatacgacttctagtccaagtcagttttatacccctaccctaagtcggtttgtaccctcttatatactcttgtatgccgcatcaaatcatcaataagcaacagttttattct

SEQ ID NO: 65734 - protein, 514 aa, Triticum aestivum
  peptide (1)..(514): Ceres Seq. ID no. 15176092
MDVTAWAWASFLAVVLVVLTILRRGRGSQPQGNRLPPGPKPWPVIGNLNLIGALPHRSIHELSKQYGPLMQLRFGSFPVVVGSSAEMARFFLKTHDTVFADRPRTAAGKHTTYNYSDVLWAPYNAHFRRARRLFATELFSAARLESYKHIRHEEVSALLRDLAAAAHGASGRAVPLRGHLFAATNGIISRVVLGKKYAEKEAGGSAAMALEDLSGLIEEFFLLNGVINVGDFIPWFDWLDLQGYVRRMKKYSKKMDRFLEHVLEEHEERRRVKGEQFVARDMVDVLLQLADNPNRLDRDTVKALTQELIVGGSDTSSVTMEWAMSEVLRNPEVLGKATKELDRVVGRDRMVMEKDIPDLPYIEAIVKEAMRMHPVSPMLAPHLAREDASVDGHDIPAGTLVLVNVWAIGRDPTYWDAPEEFRPERFMGSKIDVKGQDMELLPFGAGRRMCPGYSLGLKVVQLIVANLLHGFTWGLPDGTTMEQLNMEEIYGLTTARKFPLEAVVEPKLQEHVFS

SEQ ID NO: 65735 - protein, 445 aa, Triticum aestivum
  peptide (1)..(445): Ceres Seq. ID no. 15176093
MQLRFGSFPVVVGSSAEMARFFLKTHDTVFADRPRTAAGKHTTYNYSDVLWAPYNAHFRRARRLFATELFSAARLESYKHIRHEEVSALLRDLAAAAHGASGRAVPLRGHLFAATNGIISRVVLGKKYAEKEAGGSAAMALEDLSGLIEEFFLLNGVINVGDFIPWFDWLDLQGYVRRMKKYSKKMDRFLEHVLEEHEERRRVKGEQFVARDMVDVLLQLADNPNRLDRDTVKALTQELIVGGSDTSSVTMEWAMSEVLRNPEVLGKATKELDRVVGRDRMVMEKDIPDLPYIEAIVKEAMRMHPVSPMLAPHLAREDASVDGHDIPAGTLVLVNVWAIGRDPTYWDAPEEFRPERFMGSKIDVKGQDMELLPFGAGRRMCPGYSLGLKVVQLIVANLLHGFTWGLPDGTTMEQLNMEEIYGLTTARKFPLEAVVEPKLQEHVFS

SEQ ID NO: 65736 - protein, 428 aa, Triticum aestivum
  peptide (1)..(428): Ceres Seq. ID no. 15176094
MARFFLKTHDTVFADRPRTAAGKHTTYNYSDVLWAPYNAHFRRARRLFATELFSAARLESYKHIRHEEVSALLRDLAAAAHGASGRAVPLRGHLFAATNGIISRVVLGKKYAEKEAGGSAAMALEDLSGLIEEFFLLNGVINVGDFIPWFDWLDLQGYVRRMKKYSKKMDRFLEHVLEEHEERRRVKGEQFVARDMVDVLLQLADNPNRLDRDTVKALTQELIVGGSDTSSVTMEWAMSEVLRNPEVLGKATKELDRVVGRDRMVMEKDIPDLPYIEAIVKEAMRMHPVSPMLAPHLAREDASVDGHDIPAGTLVLVNVWAIGRDPTYWDAPEEFRPERFMGSKIDVKGQDMELLPFGAGRRMCPGYSLGLKVVQLIVANLLHGFTWGLPDGTTMEQLNMEEIYGLTTARKFPLEAVVEPKLQEHVFS

SEQ ID NO: 65737 - DNA, 1820 bp, Triticum aestivum
  misc_feature (1)..(1820): Ceres Seq. ID no. 14307991
atatctttttcatccacttgtctccaagcaagaaagaggccacggccggataagactcaccaagcttagctaagcaacttcaacaatggagggggcgggaacagcactactgtggagccaggtgggctcgccgctggcatccttcccggcgatgctgttcacggtggcggccatggcggccggcgcattcgcagtgtacttctacgcgccgtcatggcgcctgcgcagtgtgccgggccccctcgcttacggcctcgtcggccacctgccgctgctggacaagcatggctcccaggcgttcggcgtcctcgcaaagaaatacgggcccatctacaggttctacatgggcaggcagccgctggtggtggtcgccgacccggagctgtgcagggaggccggcatcaagaagttcaagagcatcgtcgacaggagcgtgccggtcaccatcgctagctcgcccatccactacaagagcctcctcttcaccaagggctcgacatggcaggcgatgcggaacgtgatcatctccatctaccagccatcgcacctggcgagcctcatcccggccatccagccctacatcgagcaggcgggcaacctgttctgccccggcgaggagatcaccttctctgacatctccatcaggctcttcaccgacgtcatcggccaggccgcctttggcgtcgacttcgggctcaccaaggacgccgccgacgacgccgagaagatcatccacgacgcgccccgcgacttcatccagaagcacctgtacgccaccacgtccctcaagatggacctgtcgggctcgctgtccatgctcgtcggcacgttcctgccggcgctccagaagccgctgcggcagctgatgctgcgcgtgccgggctccatggaccggcggatggacgagaccaacacggcgctcagcggcgagctcgacaccatcgtggcggagcgggcggctcaggcggaccggggccagaagaacttcctctccgtgctgctcaacggcatcgacaccagcgacgccatgaggaagctcttcacgccggactacgtcagcgcgctcacgtacgagcacttgctcgcgggctccggcaccatgtccttcacgctgtcgagcctggtgtacctcgtgtcggcgcacccggaggtggaggggaagctgctccaggagatcgacgcgttcgggcccaaggacgtggtgcccgacgccgacgacctccgcaccaagttcccctacctggagcaggtcgtcaaggagaccatgcgatactttcccggctccccggtggtctcgagggaggcgaccgccgacgtcgagatcggaggctatttcctgcccaaggggacgtgggtgtggctggcgacggcggtgctggggagggacccggagcagttcccggagcccgaagcgttccggccggagcgcttcgacccggagagcgagcagtgcaagcggagacacccctacgcgtacatccccttcggcatcggcccgcgggcgtgcccggggcagaagttcgcgttccagcagctcaagctcaccgtcatccacctctaccgccgctacgtcttcaggcactcgaccagcatggagtccccactgcagctgcagttctccatcgtcaccaacttcaagaacggtgtcaagctccaggtcgttcaaaggaagaactaatatgagtgtatgacagtaagtttgtgaccgactatttatgtactagtagcagtacatgcttgctccgttcaacgtgtgcgaaatcacatttttgaaagtgtgtaatcgatttgttcaattcaataaaagttgcggttttgac

SEQ ID NO: 65738 - protein, 530 aa, Triticum aestivum
  peptide (1)..(530): Ceres Seq. ID no. 14307992
MEGAGTALLWSQVGSPLASFPAMLFTVAAMAAGAFAVYFYAPSWRLRSVPGPLAYGLVGHLPLLDKHGSQAFGVLAKKYGPIYRFYMGRQPLVVVADPELCREAGIKKFKSIVDRSVPVTIASSPIHYKSLLFTKGSTWQAMRNVIISIYQPSHLASLIPAIQPYIEQAGNLFCPGEEITFSDISIRLFTDVIGQAAFGVDFGLTKDAADDAEKIIHDAPRDFIQKHLYATTSLKMDLSGSLSMLVGTFLPALQKPLRQLMLRVPGSMDRRMDETNTALSGELDTIVAERAAQADRGQKNFLSVLLNGIDTSDAMRKLFTPDYVSALTYEHLLAGSGTMSFTLSSLVYLVSAHPEVEGKLLQEIDAFGPKDVVPDADDLRTKFPYLEQVVKETMRYFPGSPVVSREATADVEIGGYFLPKGTWVWLATAVLGRDPEQFPEPEAFRPERFDPESEQCKRRHPYAYIPFGIGPRACPGQKFAFQQLKLTVIHLYRRYVFRHSTSMESPLQLQFSIVTNFKNGVKLQVVQRKN

SEQ ID NO: 65739 - protein, 508 aa, Triticum aestivum
  peptide (1)..(508): Ceres Seq. ID no. 14307993
MLFTVAAMAAGAFAVYFYAPSWRLRSVPGPLAYGLVGHLPLLDKHGSQAFGVLAKKYGPIYRFYMGRQPLVVVADPELCREAGIKKFKSIVDRSVPVTIASSPIHYKSLLFTKGSTWQAMRNVIISIYQPSHLASLIPAIQPYIEQAGNLFCPGEEITFSDISIRLFTDVIGQAAFGVDFGLTKDAADDAEKIIHDAPRDFIQKHLYATTSLKMDLSGSLSMLVGTFLPALQKPLRQLMLRVPGSMDRRMDETNTALSGELDTIVAERAAQADRGQKNFLSVLLNGIDTSDAMRKLFTPDYVSALTYEHLLAGSGTMSFTLSSLVYLVSAHPEVEGKLLQEIDAFGPKDVVPDADDLRTKFPYLEQVVKETMRYFPGSPVVSREATADVEIGGYFLPKGTWVWLATAVLGRDPEQFPEPEAFRPERFDPESEQCKRRHPYAYIPFGIGPRACPGQKFAFQQLKLTVIHLYRRYVFRHSTSMESPLQLQFSIVTNFKNGVKLQVVQRKN

SEQ ID NO: 65740 - protein, 501 aa, Triticum aestivum
  peptide (1)..(501): Ceres Seq. ID no. 14307994
MAAGAFAVYFYAPSWRLRSVPGPLAYGLVGHLPLLDKHGSQAFGVLAKKYGPIYRFYMGRQPLVVVADPELCREAGIKKFKSIVDRSVPVTIASSPIHYKSLLFTKGSTWQAMRNVIISIYQPSHLASLIPAIQPYIEQAGNLFCPGEEITFSDISIRLFTDVIGQAAFGVDFGLTKDAADDAEKIIHDAPRDFIQKHLYATTSLKMDLSGSLSMLVGTFLPALQKPLRQLMLRVPGSMDRRMDETNTALSGELDTIVAERAAQADRGQKNFLSVLLNGIDTSDAMRKLFTPDYVSALTYEHLLAGSGTMSFTLSSLVYLVSAHPEVEGKLLQEIDAFGPKDVVPDADDLRTKFPYLEQVVKETMRYFPGSPVVSREATADVEIGGYFLPKGTWVWLATAVLGRDPEQFPEPEAFRPERFDPESEQCKRRHPYAYIPFGIGPRACPGQKFAFQQLKLTVIHLYRRYVFRHSTSMESPLQLQFSIVTNFKNGVKLQVVQRKN

SEQ ID NO: 65741 - DNA, 1789 bp, Triticum aestivum
  misc_feature (1)..(1789): Ceres Seq. ID no. 14303169
atcgacgatccatcccgtgtgcggccgcccacaccagtttcctcgtccccacaagcagcggcacggctaaaaacggggggacgcttccctttcatctcgcgactataaaaaagaacgggcggccctgcctaaagccccctctcctcgccttctccgccctccgctccattcgtttcgatctatttcggcttcttcctctccaagctacagccccggccatggcggcgacgatccagtccgtgaaggcccgccagatcttcgacagccgcggcaaccccaccgtcgaggttgatgtgtgctgctcagatggaaccttcgccagggccgctgttcccagcggtgcatcaactggtgtttatgaagctttggaactgagagacggtggatctgactacttgggaaagggtgtttccaaggctgttgacaatgtgaacttgattatcgcaccagctttgattggcaaggaccctacagctcaaactgagctcgacaactttatggttcagcagcttgatggaaccaaaaacgaatggggttggtgcaagcagaagcttggtgctaatgcaatcctggctgtgtcactagctatttgcaaagctggagccagcatcaagaagattccgctgtaccagcacattgccaaccttgctggcaacaagcaattggttttgcctgttcctgcattcaatgtcatcaatggtggatcccatgctggaaacaagcttgctatgcaggagttcatgatccttcctactggagctgcctcattcaaggaggcaatgaagatgggcgttgaagtgtaccacaacttgaagtctgttatcaagaagaagtacgggcaagatgccaccaatgttggagatgaaggtggttttgctcctaacattcaggagaataaggagggccttgagctcttgaagactgcaattgaaaaggctggatacaccggcaaggttgtcattggaatggatgttgctgcttcagagttctacaatgacaaggacaaaacatatgacctcaacttcaaggaagagaacaacgatggttcccagaagatatctggagatagcctgaagaatgtatacaagtcattcgtgagtgagtaccccattgtgtcgattgaggacccatttgaccaggatgactgggtgcactatgctaagatgactgaagaatgtggagagcaagttcagattgttggtgatgaccttctagtcaccaacccaaccagagttgcgaaggcaatcaaggagaagtcatgcaatgctcttctgctgaaggttaaccaaattggatccgtcactgaaagtatcgaggccgtgaagatgtcgaaacatgctggctggggtgtgatgaccagtcacaggagtggtgagactgaggacacattcattgctgatttggctgttggtttgtccacgggtcagatcaagactggggctccctgccgctcagagcggcttgccaagtacaaccagcttctgaggatcgaggaagagctgggcgctgccgctgtgtatgccggcctcaagttccgcgcaccggtggagccatactagatgggacctgcatccgagacatgatcactctgcacttgtttttgtgaaagtgggcgtgtcttaacttgtggaatgaactatggttgaagctcttaggactagtcgagcaataatgtaccgcatgttgctgtgaacgggacggatatgtacctacgtgctccaaacttgctccaattttggtctttgtggtgagcgagcaagcacgcctgattaccttttggatctctagc

SEQ ID NO: 65742 - protein, 518 aa, Triticum aestivum
  peptide (1)..(518): Ceres Seq. ID no. 14303170
RRSIPCAAAHTSFLVPTSSGTAKNGGTLPFHLATIKKNGRPCLKPPLLAFSALRSIRFDLFRLLPLQATAPAMAATIQSVKARQIFDSRGNPTVEVDVCCSDGTFARAAVPSGASTGVYEALELRDGGSDYLGKGVSKAVDNVNLIIAPALIGKDPTAQTELDNFMVQQLDGTKNEWGWCKQKLGANAILAVSLAICKAGASIKKIPLYQHIANLAGNKQLVLPVPAFNVINGGSHAGNKLAMQEFMILPTGAASFKEAMKMGVEVYHNLKSVIKKKYGQDATNVGDEGGFAPNIQENKEGLELLKTAIEKAGYTGKVVIGMDVAASEFYNDKDKTYDLNFKEENNDGSQKISGDSLKNVYKSFVSEYPIVSIEDPFDQDDWVHYAKMTEECGEQVQIVGDDLLVTNPTRVAKAIKEKSCNALLLKVNQIGSVTESIEAVKMSKHAGWGVMTSHRSGETEDTFIADLAVGLSTGQIKTGAPCRSERLAKYNQLLRIEEELGAAAVYAGLKFRAPVEPY

SEQ ID NO: 65743 - protein, 446 aa, Triticum aestivum
  peptide (1)..(446): Ceres Seq. ID no. 14303171
MAATIQSVKARQIFDSRGNPTVEVDVCCSDGTFARAAVPSGASTGVYEALELRDGGSDYLGKGVSKAVDNVNLIIAPALIGKDPTAQTELDNFMVQQLDGTKNEWGWCKQKLGANAILAVSLAICKAGASIKKIPLYQHIANLAGNKQLVLPVPAFNVINGGSHAGNKLAMQEFMILPTGAASFKEAMKMGVEVYHNLKSVIKKKYGQDATNVGDEGGFAPNIQENKEGLELLKTAIEKAGYTGKVVIGMDVAASEFYNDKDKTYDLNFKEENNDGSQKISGDSLKNVYKSFVSEYPIVSIEDPFDQDDWVHYAKMTEECGEQVQIVGDDLLVTNPTRVAKAIKEKSCNALLLKVNQIGSVTESIEAVKMSKHAGWGVMTSHRSGETEDTFIADLAVGLSTGQIKTGAPCRSERLAKYNQLLRIEEELGAAAVYAGLKFRAPVEPY

SEQ ID NO: 65744 - protein, 353 aa, Triticum aestivum
  peptide (1)..(353): Ceres Seq. ID no. 14303172
MVQQLDGTKNEWGWCKQKLGANAILAVSLAICKAGASIKKIPLYQHIANLAGNKQLVLPVPAFNVINGGSHAGNKLAMQEFMILPTGAASFKEAMKMGVEVYHNLKSVIKKKYGQDATNVGDEGGFAPNIQENKEGLELLKTAIEKAGYTGKVVIGMDVAASEFYNDKDKTYDLNFKEENNDGSQKISGDSLKNVYKSFVSEYPIVSIEDPFDQDDWVHYAKMTEECGEQVQIVGDDLLVTNPTRVAKAIKEKSCNALLLKVNQIGSVTESIEAVKMSKHAGWGVMTSHRSGETEDTFIADLAVGLSTGQIKTGAPCRSERLAKYNQLLRIEEELGAAAVYAGLKFRAPVEPY

SEQ ID NO: 65745 - DNA, 1026 bp, Triticum aestivum
  misc_feature (1)..(1026): Ceres Seq. ID no. 13656452
cctagaacatactaatcgaaaaatgcacagtcacctcgtaagcaagcagctgctacagcctcaacaatcaaaccttgattcgacatggcgaagtcgcccatggcgatcttggctctcgggctagcagcactagtcctatccggcgccgggctggtggccgcgcagaactgcggctgccagccgaacgagtgctgcagcaagtacggttattgcgggaccgatgccagctactgcggacaagattgtcggtcgggcccgtgcacggcgagcggcggcgggagcggcgatcccgtggagagcgtcgtcaccgacgcgttctttgacgggatcaagtcccaggccgccgacgggtgccccgggaagagcttttacacgcgccagtttttcctggacggcgcccaggcgaaccccgacttcggcaaaggcagcaccagcgacgacggcaagagggagatagccgccttcttcgcccacttcacccacgagaccggacacatgtgctccatcgaggagaacgaaggggcgagcaaggattactgcgacgagacgaacacgcaatggccgtgtaccccggggaaggcgtactacgggcgcgggccgctgcagctgtcgtggaactacaactacggggcggccggggagagcaccgggttcgacgggctcaacagcccggagacggtggcgcaggaccaggcgctaacgttcaaggcggcgttctggttctggatgaccaacgtgcaccaggccgtgcccagtgggttcggcgcgacgaccagggcaatcaacggtgacgtggagtgcgacggcaagaagccagacttggtgagcgcgcgggcgggctactacacggactactgccagcagttcggcgtcgacccagggaacaacctcacttgctaggtgcttggttctgaattgatcgacgcgcaaaaacctttctggcgatgctcctactgctctacctccctgtgtattctgggatatctatatatcctgtatacgtaataaatttacatctctgtattc

SEQ ID NO: 65746 - protein, 271 aa, Triticum aestivum; identical to SEQ ID NO: 52785
  peptide (1)..(271): Ceres Seq. ID no. 13656453

SEQ ID NO: 65747 - protein, 266 aa, Triticum aestivum; identical to SEQ ID NO: 52786
  peptide (1)..(266): Ceres Seq. ID no. 13656454

SEQ ID NO: 65748 - DNA, 1301 bp, Triticum aestivum
  misc_feature (1)..(1301): Ceres Seq. ID no. 13656794
attacatagaacatcctaatcgaaaatataattctatgttctgttttacatcgttgggtgcacaagttgatcatagtatcaatgttggaggtgctccatacgttttcaagatgaatggggtggtttaccatcgtattggttcgttgttgccggctggcggtgcaccaccaaagtttgcgcaactgtatatgatggattctgctgacgagttggactgtaggttgaatgtgtttgacagagaagaaactagctcacttgagcccgatcctgaaattgtttcttcattgatagacatgcttaatatgcatcaccgtctggtgcacaaatttagaattgcacgacagagtctgtgtactcctggtgtttctgatgtctcaattcgtttcttgagcagcgatggcggtgctcatggtacgcgtttctccggtcctaccacttctgaagtggctgcgcttatagttggtgatctcatggatagtgcaagcatccagccctgaaatttaatcatggaaatggaaatagttcgcaggaaaatcttatgatttatatctcaagacggccaatgcttgaaaagttagtgaaacaattgggttgaaagtacaaggatatacatattggtacgtccatcaaggtatgatgcaagcatctgtactaattggcctaccacgccaagaagatagttttagagaatcttccatcacatatgaaggggaggcagctaatagagaagatgaagcaatggagaaagcagtctcaagtggccttagaatgtatttgtgcagactataatatttctgtcaatgatcacaattactatgcccttgaagtcacaaaagaaagattgcttacaacaagagagaaagctcaaacaaaacaatggcagttcaacatggcgcgccagcaaataactatgcagcagaatgaatttgcaagacaaacaatgattctggcaaagatatgcaatagcttttttgatatactgccacttcgtatgtacccccagcgtccagaaagcagtgatcccattattacatacacaggcgcacaccctcccatcggacgtatggaagaacttgcaaaatcactttatcactttatcacaggcaccaatcctgcaggaggctacaccagaatgatctaatttactatcaactacttctagcttatctacgtaatatgtttgtgtttctatatacagttctctgtctgcagcgagttgtatgtagtttaaataatttgtttgcctcaagtgtgtaccacttttaatttgcagctttgtaaccctgcatttwcarcmttyt

SEQ ID NO: 65749 - protein, 164 aa, Triticum aestivum
  peptide (1)..(164): Ceres Seq. ID no. 15219851
YIEHPNRKYNSMFCFTSLGAQVDHSINVGGAPYVFKMNGVVYHRIGSLLPAGGAPPKFAQLYMMDSADELDCRLNVFDREETSSLEPDPEIVSSLIDMLNMHHRLVHKFRIARQSLCTPGVSDVSIRFLSSDGGAHGTRFSGPTTSEVAALIVGDLMDSASIQP

SEQ ID NO: 65750 - protein, 153 aa, Triticum aestivum
  peptide (1)..(153): Ceres Seq. ID no. 15219852
MFCFTSLGAQVDHSINVGGAPYVFKMNGVVYHRIGSLLPAGGAPPKFAQLYMMDSADELDCRLNVFDREETSSLEPDPEIVSSLIDMLNMHHRLVHKFRIARQSLCTPGVSDVSIRFLSSDGGAHGTRFSGPTTSEVAALIVGDLMDSASIQP

SEQ ID NO: 65751 - protein, 145 aa, Triticum aestivum
  peptide (1)..(145): Ceres Seq. ID no. 15219853
MKGRQLIEKMKQWRKQSQVALECICADYNISVNDHNYYALEVTKERLLTTREKAQTKQWQFNMARQQITMQQNEFARQTMILAKICNSFFDILPLRMYPQRPESSDPIITYTGAHPPIGRMEELAKSLYHFITGTNPAGGYTRMI

SEQ ID NO: 65752 - DNA, 1975 bp, Triticum aestivum
  misc_feature (1)..(1975): Ceres Seq. ID no. 14303141
cttttgaagccccgccctccttccacaggcccatgacgaagccaacctagctagcttgcaccacgtaccgtgtggcattatatatacgcccaccggccctccgtgccatcccggtctccatcgccatggcgacgacggggagggtgaggccttctcctctcctcgcggcgtggctggctctcggctttgcgtggcattgcgcgcttcaccatgctccggcggcggccgtgacgctgtcgacggcgtcccggtgggtcgtggacgaggccggggaccgcgtgaagctggcgtgcgtgaactggccgtcgcacctggagccgatgctggcggaggggctgggcaagcggcccgtgggcgccatcgccggggacgtggccaccatggggttcaactgcgtccggctcacctggcccacgttcctggtgaccaacgcctcctactcgtccctcaccgtcgagcagtccttccagaggctcaacctcaccgagtcgctcgccggcatcagggccaacaaccccgccgtcgtcgacctcaagctcatcgacgcgttcaaggccgtggtgagcagcctcggtgagaacaacgtcatggtgatcctggacaaccacgtgagcaagcccgggtggtgctgcgacaacgcggacggcaacgggttcttcggcgacggctacttcgagccggacgtctgggtcgacggcctcaccaagatggccaccatgttcgccggcgtcccccacgtcgtcggcatgagcctcaggaacgagctccgaggccccaggcagaactcaaacgactggtacaagtacatgcagcgcggcgcggaggcggtgcacgcggcgaacccgcgggtgctggtgatcctctcgggcctcagcttcgacaacgacctggcgttcctcaactcgcggcaggtgagcctgagcttcgcccggaaggcggcgttcgaggtgcactggtacagcttctccaacggccaggagtgggcggcggggaaccccaacgaggtgtgcgcgcggatcggggccagcgtgtcccgccgcgcgctctacctgctcgactagggctggccggtcttcctcagcgagttcggcgtcgacaaccgcggcgggaacgccaacgacaaccgctactacggctgcgccgccgccgtcgccgccgacctcgacctcgactgggcgctctggacgctgcaggggagctactacctccgccagggcgtgctggacctcgacgaggtctacggcgtgctcgaccgggcctggtccaggccacgcaacgtcaccgcgctccgcagggtccagcccctgcagcgcccgctccgagggcctggctacgcggaggcggcgccgtacacggtgctgttccacccggcgacggggctgtgcgtgctgcggcggtcgctggcgcagccactggagctgggcgcgtgcgccgggacggaggcctgggagtacgcgccgcagcaggggcggctggcgctgcgggacggcccgctgatgtgcctccacgcgcagggcgccggccggcccgtgcgcctcggcacgccttgcgacgacgacatgtcccggtggcgcctcgtgtcggactccaagctgcacgtcgccgtcaacgcatcgtcttcgtcgtcatccggctccggcgatggccgtggcatgctctgcctggacgtcggcgcggacggccagagcgtggtcaccaacccgtgccgctgcctgagcgcggacaacagctgcgacccggagagccagtggttcaagatggtgagcagcacgaggagcgtcgccgccaatagcatgctcgcggagctgcctgtgaagctcgggagctcgaagattcgctcgctttgatcggcgccagtaggaccgacatatataattgtataggtgcacgcatccgttgtactagctgcaaaggcgccgggatggacgagagaagctgctctagaaccggaataatatccttcagagttcagatg

SEQ ID NO: 65753 - protein, 311 aa, Triticum aestivum
  peptide (1)..(311): Ceres Seq. ID no. 14303142
MATTGRVRPSPLLAAWLALGFAWHCALHHAPAAAVTLSTASRWVVDEAGDRVKLACVNWPSHLEPMLAEGLGKRPVGAIAGDVATMGFNCVRLTWPTFLVTNASYSSLTVEQSFQRLNLTESLAGIRANNPAVVDLKLIDAFKAVVSSLGENNVMVILDNHVSKPGWCCDNADGNGFFGDGYFEPDVWVDGLTKMATMFAGVPHVVGMSLRNELRGPRQNSNDWYKYMQRGAEAVHAANPRVLVILSGLSFDNDLAFLNSRQVSLSFARKAAFEVHWYSFSNGQEWAAGNPNEVCARIGASVSRRALYLLD

SEQ ID NO: 65754 - protein, 246 aa, Triticum aestivum
  peptide (1)..(246): Ceres Seq. ID no. 14303143
MLAEGLGKRPVGAIAGDVATMGFNCVRLTWPTFLVTNASYSSLTVEQSFQRLNLTESLAGIRANNPAVVDLKLIDAFKAVVSSLGENNVMVILDNHVSKPGWCCDNADGNGFFGDGYFEPDVWVDGLTKMATMFAGVPHVVGMSLRNELRGPRQNSNDWYKYMQRGAEAVHAANPRVLVILSGLSFDNDLAFLNSRQVSLSFARKAAFEVHWYSFSNGQEWAAGNPNEVCARIGASVSRRALYLLD

SEQ ID NO: 65755 - protein, 226 aa, Triticum aestivum
  peptide (1)..(226): Ceres Seq. ID no. 14303144
MGFNCVRLTWPTFLVTNASYSSLTVEQSFQRLNLTESLAGIRANNPAVVDLKLIDAFKAVVSSLGENNVMVILDNHVSKPGWCCDNADGNGFFGDGYFEPDVWVDGLTKMATMFAGVPHVVGMSLRNELRGPRQNSNDWYKYMQRGAEAVHAANPRVLVILSGLSFDNDLAFLNSRQVSLSFARKAAFEVHWYSFSNGQEWAAGNPNEVCARIGASVSRRALYLLD

SEQ ID NO: 65756 - DNA, 1351 bp, Triticum aestivum
  misc_feature (1)..(1351): Ceres Seq. ID no. 13656797
cattagatactgtgagccttctcctcctcatccgtgacactagcatcatcccatcccatggtgatcgggcaaaaaaatgcggagggttcgatccaacggtcatgcctaccccgtctgctctgcgcgcgggagcagtactccgcattgctccttttcgtggccgtggccgccgtctgcctcctcgtcgtggttggcagtggcacatacgcgctatcgtctccggccgacgtcggcggcgagatggagcagaggttcttcaacatatttcctcgccaagcagcggccggcgcctcggacgatgaactggaggcggcgctgcgcggcgcggccgacgcgaacaggacgctgatcgtgagcgtgctgaacaaggcgtacgccgaggagggcggcctgctggaccttttcatcgagagcctgaagcaaggggagggcaccgggcatctcatcggccacgtcctccttgtagccatggacgaaccagccttccgcaggtgcagtggcctcggcggcgtccggtgctacctccttcccccggcggccgcgaccaacagcaccaacctctcctcggagcagctctacatgtctggcggcttcatacgcatgatgtggcggcgcattcgcctcctcggcgacatcctcaagcacggctacagcttcatattcaccgatatggatgtgatgtggctgaggaacccgttcccgagcctgaatcgcaccgaggaggaagacctcctgatcagcaccgacggattcaaggggcggccggaggactacctcggccacgagctcaacacgaggttcttcttcgtggccgcgagcaaccggacggcggcgatgttcgacgagtggcacgcggcacgggaggcgtcggaaggcatgaaggagcaggacgtgctaaaccagatgaagcaacaaggcgcgttccgccggctcggcgtgagggtgcgcgtcctggacacggcgcgcttcagcggcttctgccaggacagccaggacgcccggcaggtggtcaccgtgcacgccaactgctgccggaccatgcgggccaaggtcgccgacctcaaggccgttcttggcgccgccaagcagctcaacgggacgacggggcggctgaaatggccgcgtcattcagcctgcttgggatcgtggaggaagtgagacgaggaagcgctcgttcgaggcttcaccttgtctcccttatctcgtttccattgctttacttaccattcgtcactttactgctggtaagatgttttggtttgttggcatgaggaaagaaaaacacccaaaacatcttgctgagtagtaccaagttatcacttatcacatagtacttccttctggaggggtg

SEQ ID NO: 65757 - protein, 366 aa, Triticum aestivum
  peptide (1)..(366): Ceres Seq. ID no. 15219854
MVIGQKNAEGSIQRSCLPRLLCAREQYSALLLFVAVAAVCLLVVVGSGTYALSSPADVGGEMEQRFFNIFPRQAAAGASDDELEAALRGAADANRTLIVSVLNKAYAEEGGLLDLFIESLKQGEGTGHLIGHVLLVAMDEPAFRRCSGLGGVRCYLLPPAAATNSTNLSSEQLYMSGGFIRMMWRRIRLLGDILKHGYSFIFTDMDVMWLRNPFPSLNRTEEEDLLISTDGFKGRPEDYLGHELNTRFFFVAASNRTAAMFDEWHAAREASEGMKEQDVLNQMKQQGAFRRLGVRVRVLDTARFSGFCQDSQDARQVVTVHANCCRTMRAKVADLKAVLGAAKQLNGTTGRLKWPRHSACLGSWRK

SEQ ID NO: 65758 - protein, 305 aa, Triticum aestivum
  peptide (1)..(305): Ceres Seq. ID no. 15219855
MEQRFFNIFPRQAAAGASDDELEAALRGAADANRTLIVSVLNKAYAEEGGLLDLFIESLKQGEGTGHLIGHVLLVAMDEPAFRRCSGLGGVRCYLLPPAAATNSTNLSSEQLYMSGGFIRMMWRRIRLLGDILKHGYSFIFTDMDVMWLRNPFPSLNRTEEEDLLISTDGFKGRPEDYLGHELNTRFFFVAASNRTAAMFDEWHAAREASEGMKEQDVLNQMKQQGAFRRLGVRVRVLDTARFSGFCQDSQDARQVVTVHANCCRTMRAKVADLKAVLGAAKQLNGTTGRLKWPRHSACLGSWRK

SEQ ID NO: 65759 - protein, 229 aa, Triticum aestivum
  peptide (1)..(229): Ceres Seq. ID no. 15219856
MDEPAFRRCSGLGGVRCYLLPPAAATNSTNLSSEQLYMSGGFIRMMWRRIRLLGDILKHGYSFIFTDMDVMWLRNPFPSLNRTEEEDLLISTDGFKGRPEDYLGHELNTRFFFVAASNRTAAMFDEWHAAREASEGMKEQDVLNQMKQQGAFRRLGVRVRVLDTARFSGFCQDSQDARQVVTVHANCCRTMRAKVADLKAVLGAAKQLNGTTGRLKWPRHSACLGSWRK

SEQ ID NO: 65760 - DNA, 1883 bp, Triticum aestivum
  misc_feature (1)..(1883): Ceres Seq. ID no. 14308007
ataaccataaaccatctcatatctcaggctctcgacttagcagcagagaaagccaagcacagaattaaccacaaatcatggagatggagctcaatctcgtctcgtacgtgtccatcgccctgttcgtcctctcgggcgcgtacgtctaccacgcgacgcggagccggtcgccgaggcagcggctcccgccggcgccgccggggtggcccgtgatcggccacctccacctgctgacggacatgccccaccacgcgctggcggagctggccaagaccatgcgcgccccactgctccggctccggctcgggagcgtcccggccctggtgatctccaagcccgacctggcccgcgccgcgctcaccagcaacgacgcggccatggcgtcccgcccccacctcctctccggccagttcctctcgttcgggtgctccgacgtgaccttcgcccccgcggggccgtaccaccgcatggcgcggcgggtggtcgtctccgagctcctctcggcgcgccgcgtcgccacctacggcagcgtccggggcaaggagctccgccgcctgctcgcgcacctcaccaagaacaccaagccgggaacgcccgtcgacctcagcgagtgcttcctcaacctcgccaacgacgtgctctgccgcgtggccttcggccgccggttcccgcacggcaaggacgacaagctcgccgcggtgctcgccgaggcccaggacctgttcgccgggttcaccatcggggacttcttcccggagctcgagcccttcgccagcaccgtcacgggcctccgccgccggctgaagagctgcctcgccgacctccgcgaggtctgcgacgacatcgtcgaggagcacgtgagcggcaagcaccagcgcctccccggcgaccgcgacgaggacttcgtggacgtgctcctccgcgtccagaagtcgcccgacctcgaggtcccgctcaccgacgacaacctcaaagccctcgtcctggacatgttcgtcgccggcacggacacgacgttcgcgacgctggagtgggtgatgacggagctggtgcgccacccgcgcatccttcaaaaggcgcaggaggaggtccggcgggtggtgggcgccaagggccgggtggaggagtcggacctggcggagctccactacatgcgcgccatcatcaaggagaccttccggctgcacccggcggtgccgctgctcgtgccgcgggagaccgtcgcggcgtgcactctcggcggctacgacatcccggccaagacccgcgtcttcatcaacaccttcgccatgggccgggacccggagatctgggaggagccgctggagtactcgccggagcggttcgaggtggccggcgccggcggcgagatcgacctcaaggacccggactacaagctgctgccgttcggcggcgggcggagggggtgcccggggtacacgttcgcgctggccaccgtgcaggtatcgctggccagcctgctgtaccacttcgagtgggcgctgccggccggcgtgcgcgccgaggacgtgagcgtggaggagaccttcgggctggccaccaggaagaaggagccgctcttcgtcgccgtcagcaagagcgatgtgtaccagttcaagggggaggagctcaacgaggtttaaattatttttgcttagtaatttcttgtcatgcaagtaggttttttctcttctcttcagacaatgcaaataagagagtaggtagctaggtaaaaaaacaaaagcaaggaagagagagaataggtaaaataaaaatggatctagtaccgcacgtgttggtgcctgacttgctgtggtaagagacgtgtatgtgtgtaattttgttgtggtaattcttctaaaaaaatgcaatattttgtagtc

SEQ ID NO: 65761 - protein, 521 aa, Triticum aestivum
  peptide (1)..(521): Ceres Seq. ID no. 14308008
MEMELNLVSYVSIALFVLSGAYVYHATRSRSPRQRLPPAPPGWPVIGHLHLLTDMPHHALAELAKTMRAPLLRLRLGSVPALVISKPDLARAALTSNDAAMASRPHLLSGQFLSFGCSDVTFAPAGPYHRMARRVVVSELLSARRVATYGSVRGKELRRLLAHLTKNTKPGTPVDLSECFLNLANDVLCRVAFGRRFPHGKDDKLAAVLAEAQDLFAGFTIGDFFPELEPFASTVTGLRRRLKSCLADLREVCDDIVEEHVSGKHQRLPGDRDEDFVDVLLRVQKSPDLEVPLTDDNLKALVLDMFVAGTDTTFATLEWVMTELVRHPRILQKAQEEVRRVVGAKGRVEESDLAELHYMRAIIKETFRLHPAVPLLVPRETVAACTLGGYDIPAKTRVFINTFAMGRDPEIWEEPLEYSPERFEVAGAGGEIDLKDPDYKLLPFGGGRRGCPGYTFALATVQVSLASLLYHFEWALPAGVRAEDVSVEETFGLATRKKEPLFVAVSKSDVYQFKGEELNEV

SEQ ID NO: 65762 - protein, 519 aa, Triticum aestivum
  peptide (1)..(519): Ceres Seq. ID no. 14308009
MELNLVSYVSIALFVLSGAYVYHATRSRSPRQRLPPAPPGWPVIGHLHLLTDMPHHALAELAKTMRAPLLRLRLGSVPALVISKPDLARAALTSNDAAMASRPHLLSGQFLSFGCSDVTFAPAGPYHRMARRVVVSELLSARRVATYGSVRGKELRRLLAHLTKNTKPGTPVDLSECFLNLANDVLCRVAFGRRFPHGKDDKLAAVLAEAQDLFAGFTIGDFFPELEPFASTVTGLRRRLKSCLADLREVCDDIVEEHVSGKHQRLPGDRDEDFVDVLLRVQKSPDLEVPLTDDNLKALVLDMFVAGTDTTFATLEWVMTELVRHPRILQKAQEEVRRVVGAKGRVEESDLAELHYMRAIIKETFRLHPAVPLLVPRETVAACTLGGYDIPAKTRVFINTFAMGRDPEIWEEPLEYSPERFEVAGAGGEIDLKDPDYKLLPFGGGRRGCPGYTFALATVQVSLASLLYHFEWALPAGVRAEDVSVEETFGLATRKKEPLFVAVSKSDVYQFKGEELNEV

SEQ ID NO: 65763 - protein, 467 aa, Triticum aestivum
  peptide (1)..(467): Ceres Seq. ID no. 14308010
MPHHALAELAKTMRAPLLRLRLGSVPALVISKPDLARAALTSNDAAMASRPHLLSGQFLSFGCSDVTFAPAGPYHRMARRVVVSELLSARRVATYGSVRGKELRRLLAHLTKNTKPGTPVDLSECFLNLANDVLCRVAFGRRFPHGKDDKLAAVLAEAQDLFAGFTIGDFFPELEPFASTVTGLRRRLKSCLADLREVCDDIVEEHVSGKHQRLPGDRDEDFVDVLLRVQKSPDLEVPLTDDNLKALVLDMFVAGTDTTFATLEWVMTELVRHPRILQKAQEEVRRVVGAKGRVEESDLAELHYMRAIIKETFRLHPAVPLLVPRETVAACTLGGYDIPAKTRVFINTFAMGRDPEIWEEPLEYSPERFEVAGAGGEIDLKDPDYKLLPFGGGRRGCPGYTFALATVQVSLASLLYHFEWALPAGVRAEDVSVEETFGLATRKKEPLFVAVSKSDVYQFKGEELNEV

SEQ ID NO: 65764 - DNA, 1393 bp, Triticum aestivum
  misc_feature (1)..(1393): Ceres Seq. ID no. 13656849
accacacactgccctccctccccctccctccccccaccccactcctccccgccgccgccgccgccgccccgctccgatccgccccgcgccgcgcggatcgccgcgccatggaccagtacgagaaggtggagaagatcggggagggcacgtacggggtggtgtacaaggccaaggaccgctacaccaacgagacgatcgcgctcaagaagatccggctggagcaggaggacgagggcgtcccctccaccgccatccgcgagatctccctcctcaaggagatgcagcaccggaacatcgtcaggctgcaggacgtggtgcacaacgagaagtgcatatacctcgtcttcgagtacctcgacctcgacctcaagaagcacatggactcctccgcggacttcaagaaccaccacatagtcaagtccttcctctaccagatcctgcacggcatcgcctactgccactcgcaccgtgtgcttcacagggatctcaagccccagaacctgctgatagatcgccgtaccaattcattgaagcttgctgacttcggattggcgagggcgttcggcattcctgtccggacatttactcacgaggtggtgacattatggtatagagcaccagaaattcttctgggtgcgaggcagtattctacccctgttgatgtgtggtcggttggttgcattttcgccgaaatggtgaatcagaaacctctatttcctggtgattctgagattgatgaactcttcaagattttcagaattatgggcactcctaatgaagaaacctggccaggtgtttcttcgttacctgactacaaatcagctttccccaagtggccatccgtggatcttgcaactgtggttccaacactcgaacctttgggacttgatcttctctctaaaatgctctgcttagatccaaccagaagaatcaacgcccgaaccgccctcgagcacgagtacttcaaggatctggacgtatcctcgtagatcacttgccctgctcctctgtaaattaagatcgcgtcgactgatcgatagcttcctggatcatgtactgtgtgctcctttctctcccattctttctgactctggctgtgtagagagaaatgagaacggaagcgcctccggattcacccttccttgtagtccaagccaattgaaaaatgatcctgatgctctgggagctctgcattgcgatttcgcccgtatttatatggacatcgacgccggcaccagacttgttcatgtacgatggattttggagtagtggcagatagtcaaggggctgcagtgtttcatgaactaccaactgatgtgacaatgtttgggagtgtactactacttgtacttggtaaacatcattatcatcatgaatggaatcagttgtggac

SEQ ID NO: 65765 - protein, 328 aa, Triticum aestivum
  peptide (1)..(328): Ceres Seq. ID no. 13656850
HTLPSLPLPPPTPLLPAAAAAAPLRSAPRRADRRAMDQYEKVEKIGEGTYGVVYKAKDRYTNETIALKKIRLEQEDEGVPSTAIREISLLKEMQHRNIVRLQDVVHNEKCIYLVFEYLDLDLKKHMDSSADFKNHHIVKSFLYQILHGIAYCHSHRVLHRDLKPQNLLIDRRTNSLKLADFGLARAFGIPVRTFTHEVVTLWYRAPEILLGARQYSTPVDVWSVGCIFAEMVNQKPLFPGDSEIDELFKIFRIMGTPNEETWPGVSSLPDYKSAFPKWPSVDLATVVPTLEPLGLDLLSKMLCLDPTRRINARTALEHEYFKDLDVSS

SEQ ID NO: 65766 - protein, 293 aa, Triticum aestivum
  peptide (1)..(293): Ceres Seq. ID no. 13656851
MDQYEKVEKIGEGTYGVVYKAKDRYTNETIALKKIRLEQEDEGVPSTAIREISLLKEMQHRNIVRLQDVVHNEKCIYLVFEYLDLDLKKHMDSSADFKNHHIVKSFLYQILHGIAYCHSHRVLHRDLKPQNLLIDRRTNSLKLADFGLARAFGIPVRTFTHEVVTLWYRAPEILLGARQYSTPVDVWSVGCIFAEMVNQKPLFPGDSEIDELFKIFRIMGTPNEETWPGVSSLPDYKSAFPKWPSVDLATVVPTLEPLGLDLLSKMLCLDPTRRINARTALEHEYFKDLDVSS

SEQ ID NO: 65767 - protein, 236 aa, Triticum aestivum
  peptide (1)..(236): Ceres Seq. ID no. 13656852
MQHRNIVRLQDVVHNEKCIYLVFEYLDLDLKKHMDSSADFKNHHIVKSFLYQILHGIAYCHSHRVLHRDLKPQNLLIDRRTNSLKLADFGLARAFGIPVRTFTHEVVTLWYRAPEILLGARQYSTPVDVWSVGCIFAEMVNQKPLFPGDSEIDELFKIFRIMGTPNEETWPGVSSLPDYKSAFPKWPSVDLATVVPTLEPLGLDLLSKMLCLDPTRRINARTALEHEYFKDLDVSS

SEQ ID NO: 65768 - DNA, 881 bp, Triticum aestivum
  misc_feature (1)..(881): Ceres Seq. ID no. 12626248
gtgctcatcgcagtaaaatccagaaacatccgacgaacacaggcagggagagaagggagagcgtggacaatggcatcacgggtggtgttctccaacaggatcccgctggcgcgcgccatggagaacctcctggccgcgtcctccgggtcggctctcaggccggctgccgtcgccggcggcgtccgcgggtacaacgccggcgcgcccctccggagctacgaccgggacgaggcggtcgagcgcagcccccgcagcggcgcgcgcgagcgcgacgtcggcgtgcccagcttcttctcagatgtgttccgtgacccgttcagcgcgccgcagagcctgggccggctgctgagcatgctggacgacgtggcggcggcgtccaccgacggcgcggcgcgggcggcgccgctccggcgcgggtggaacgcgagggaggacgcggacgcgctgcggctgagggtggacatgccggggctgggcaaggagcacgtgaaggtgtgggcggagcagaacagcctggtgatcaagggcgagggcgagaaggaatcggaccgggagggcgccgacgcgccgaggtacagcggccggctcgagctcgccggggacgtgtaccggatggaccagatcaaggccgagatgaagaacggcgtgctccgggtggtcgtgcccaaggtcaaggaggaggagcgcaaggacgtcttcgaggtcaaagtggactaggcactaggcaggatcacgccaagtttcgcgtcacggaatagccgagtcgtctcgtgtgagccgagtaataataactaaaaataactcaagcttttttgtttgtcgtgttgggtctggatgttttggtctcgtgttaagtgcctgtacgagtagaatcgatcaaa

SEQ ID NO: 65769 - protein, 238 aa, Triticum aestivum
  peptide (1)..(238): Ceres Seq. ID no. 12626249
VLIAVKSRNIRRTQAGREGRAWTMASRVVFSNRIPLARAMENLLAASSGSALRPAAVAGGVRGYNAGAPLRSYDRDEAVERSPRSGARERDVGVPSFFSDVFRDPFSAPQSLGRLLSMLDDVAAASTDGAARAAPLRRGWNAREDADALRLRVDMPGLGKEHVKVWAEQNSLVIKGEGEKESDREGADAPRYSGRLELAGDVYRMDQIKAEMKNGVLRVVVPKVKEEERKDVFEVKVD

SEQ ID NO: 65770 - protein, 215 aa, Triticum aestivum
  peptide (1)..(215): Ceres Seq. ID no. 12626250
MASRVVFSNRIPLARAMENLLAASSGSALRPAAVAGGVRGYNAGAPLRSYDRDEAVERSPRSGARERDVGVPSFFSDVFRDPFSAPQSLGRLLSMLDDVAAASTDGAARAAPLRRGWNAREDADALRLRVDMPGLGKEHVKVWAEQNSLVIKGEGEKESDREGADAPRYSGRLELAGDVYRMDQIKAEMKNGVLRVVVPKVKEEERKDVFEVKVD

SEQ ID NO: 65771 - protein, 199 aa, Triticum aestivum
  peptide (1)..(199): Ceres Seq. ID no. 12626251
MENLLAASSGSALRPAAVAGGVRGYNAGAPLRSYDRDEAVERSPRSGARERDVGVPSFFSDVFRDPFSAPQSLGRLLSMLDDVAAASTDGAARAAPLRRGWNAREDADALRLRVDMPGLGKEHVKVWAEQNSLVIKGEGEKESDREGADAPRYSGRLELAGDVYRMDQIKAEMKNGVLRVVVPKVKEEERKDVFEVKVD

SEQ ID NO: 65772 - DNA, 1148 bp, Triticum aestivum
  misc_feature (1)..(1148): Ceres Seq. ID no. 15169603
aacaccaagcttacatcatctcctttactcgtgacttatgagcagctcatccaagagagagcaaatggatgatgccgtggggctgtcatgggaggcgcggtgcgcggggctagccttcttcagcctgtccatcttcttggtggccctcaccgcggtgctcctgctcgtccgccggtggcccaacccctggtgcggctgccacgtgtgccgggcttacctcacggggtcctgggccaaggacttcaccaacctcgccgactggtacgcgcacctgctgcgcgagtcgccgacaggcaccgtccacttccacgtcctcggctgcaccgtcaccgccaaccctgccaacgtcgagtacatgctcaagacccgcttcgacaacttccccaagggcaagcgcttcgccgcgctcctcggcgacctccttggcggcggcatcttcaacgtcgacggcgacgcctggcgccaccagcgcaagatggccagcctcgagctcggcagcgtcaccgtgcgctcctacgcctacaagatcgtagcccaggaggtggaggcccgcctcctgccggtcctggccgacgccgccgacaagggcaaggtgatcgacctccaggacgtgttccggcggttcgccttcgacaccgtctgcaagatctccttcgggcttgacccaggctgcctcgacctcgacatgcccatgtccgacctagccaacgcgttcgacaccgcctcgcggctctgcgccatgcggggcgccgcggcctcgccgttggtgtggaagatgaagcggatgctcaacattgggtcagagagggagcttaagaaggccatcaagctcgtcgacgacctcgcgtcggccatgattctgcagcggcggagtctgggttttgacaacagccacgaccttctgtcccgcttcatggcctcggacgtcgccatggacgacaagtatctccgcaacatcgtggtcagcttcctcctcgccgggcgggatacggttgcctcggcgcttacaacgctcttcatcccgaaaatataaaatagcacagctgcaccctggccctctctatctaaccatccattctgcgtatcgcaattcgtgcaaacacatttttcttttttgtttctctcatataaaacatattttgaagttc

SEQ ID NO: 65773 - protein, 331 aa, Triticum aestivum
  peptide (1)..(331): Ceres Seq. ID no. 15169604
MSSSSKREQMDDAVGLSWEARCAGLAFFSLSIFLVALTAVLLLVRRWPNPWCGCHVCRAYLTGSWAKDFTNLADWYAHLLRESPTGTVHFHVLGCTVTANPANVEYMLKTRFDNFPKGKRFAALLGDLLGGGIFNVDGDAWRHQRKMASLELGSVTVRSYAYKIVAQEVEARLLPVLADAADKGKVIDLQDVFRRFAFDTVCKISFGLDPGCLDLDMPMSDLANAFDTASRLCAMRGAAASPLVWKMKRMLNIGSERELKKAIKLVDDLASAMILQRRSLGFDNSHDLLSRFMASDVAMDDKYLRNIVVSFLLAGRDTVASALTTLFIPKI

SEQ ID NO: 65774 - protein, 322 aa, Triticum aestivum
  peptide (1)..(322): Ceres Seq. ID no. 15169605
MDDAVGLSWEARCAGLAFFSLSIFLVALTAVLLLVRRWPNPWCGCHVCRAYLTGSWAKDFTNLADWYAHLLRESPTGTVHFHVLGCTVTANPANVEYMLKTRFDNFPKGKRFAALLGDLLGGGIFNVDGDAWRHQRKMASLELGSVTVRSYAYKIVAQEVEARLLPVLADAADKGKVIDLQDVFRRFAFDTVCKISFGLDPGCLDLDMPMSDLANAFDTASRLCAMRGAAASPLVWKMKRMLNIGSERELKKAIKLVDDLASAMILQRRSLGFDNSHDLLSRFMASDVAMDDKYLRNIVVSFLLAGRDTVASALTTLFIPKI

SEQ ID NO: 65775 - protein, 225 aa, Triticum aestivum
  peptide (1)..(225): Ceres Seq. ID no. 15169606
MLKTRFDNFPKGKRFAALLGDLLGGGIFNVDGDAWRHQRKMASLELGSVTVRSYAYKIVAQEVEARLLPVLADAADKGKVIDLQDVFRRFAFDTVCKISFGLDPGCLDLDMPMSDLANAFDTASRLCAMRGAAASPLVWKMKRMLNIGSERELKKAIKLVDDLASAMILQRRSLGFDNSHDLLSRFMASDVAMDDKYLRNIVVSFLLAGRDTVASALTTLFIPKI

SEQ ID NO: 65776 - DNA, 362 bp, Triticum aestivum
  misc_feature (1)..(362): Ceres Seq. ID no. 12619355
atcagcctaaacccgcaccaaagccccgagcgccgtcggatcagatcccactccaccaccaccaccaccacgctcctgccggccaccgctccttrtattccgaggccggccggagaccccctgctcattttccgtctccccccctctgcccgccctcstcctcctcgagctgagctcaaggggaaagaaccatggagccggcgacgatggcgtggacggcggggctggtgggcgccggcytggtgtactggttcgtgtgggtgatgggcgcggcggaggtgaaggggaagcggrcggtggatctcaagatgggatccatcacgcgggacaaggtgcaggacawgtacacgcagtactggtcc

SEQ ID NO: 65777 - protein, 87 aa, Triticum aestivum
  peptide (1)..(87): Ceres Seq. ID no. 13656860
  misc_feature (32)..(32): Xaa is any aa, unknown or other
  misc_feature (53)..(53): Xaa is any aa, unknown or other
  misc_feature (80)..(80): Xaa is any aa, unknown or other
ISLNPHQSPERRRIRSHSTTTTTTLLPATAPXIPRPAGDPLLIFRLPPSARPXPPRAELKGKEPWSRRRWRGRRGWWAPXWCTGSCG

SEQ ID NO: 65778 - protein, 57 aa, Triticum aestivum
  peptide (1)..(57): Ceres Seq. ID no. 13656861
  misc_feature (17)..(17): Xaa is any aa, unknown or other
  misc_feature (35)..(35): Xaa is any aa, unknown or other
  misc_feature (51)..(51): Xaa is any aa, unknown or other
MEPATMAWTAGLVGAGXVYWFVWVMGAAEVKGKRXVDLKMGSITRDKVQDXYTQYWS

SEQ ID NO: 65779 - protein, 56 aa, Triticum aestivum
  peptide (1)..(56): Ceres Seq. ID no. 13656862
  misc_feature (31)..(31): Xaa is any aa, unknown or other
  misc_feature (52)..(52): Xaa is any aa, unknown or other
QPKPAPKPRAPSDQIPLHHHHHHAPAGHRSXYSEAGRRPPAHFPSPPLCPPXSSSS

SEQ ID NO: 65780 - DNA, 797 bp, Triticum aestivum
  misc_feature (1)..(797): Ceres Seq. ID no. 14301890
actcacacacacacaaccagtaccagatccacaagccagcagaaaggaagaagatgatgagcaccaaggccctcaccctcggcgcggtcgtcgtcctcgccatcgccatggcgggcgcgcacgccgagcagtgcggccacgcggccgacggcatggagtgcccaaacaacctctgctgcagcgcgtgggggtactgcggcatggacgccaactactgcggcgacggctgccagagcggcgcctgctacgagcccaaacgctgcggcgcccaggccgaggggaacgcggtgacgtgccccaacaaccactgctgcagcggcaacgggtactgcggctacggccaggagtactgcggcgacggctgccagaacgggccatgccgcgccaacatcaagtgcagcgccgacaagccgtgcctgagcaacttctgctgcagcaagtacggatactgcgggctcggcgtcgagttctgcggccagggctgccagagcggcgcctgccatgacgccgttggcgccgccgccctgccgctcagctccatagtgcaggggtgatcttgaactgcgcatggctacaagtattgcgacgggatcaggtgaggagatgagttgtggcaatgtcgatcgttgccacgtcttcttcaccggctagtttgcgttttcctcgtctttacaatcgttcccatcatgcatgcacgcatgcatgattagcgttcgggaaccacaaataatgcgtgtggcgccatgcgccgtctttgtaacctttgtaatccaataaatctgaatctcgttgcaatc

SEQ ID NO: 65781 - protein, 183 aa, Triticum aestivum
  peptide (1)..(183): Ceres Seq. ID no. 14301891
SHTHNQYQIHKPAERKKMMSTKALTLGAVVVLAIAMAGAHAEQCGHAADGMECPNNLCCSAWGYCGMDANYCGDGCQSGACYEPKRCGAQAEGNAVTCPNNHCCSGNGYCGYGQEYCGDGCQNGPCRANIKCSADKPCLSNFCCSKYGYCGLGVEFCGQGCQSGACHDAVGAAALPLSSIVQG

SEQ ID NO: 65782 - protein, 167 aa, Triticum aestivum
  peptide (1)..(167): Ceres Seq. ID no. 14301892
LTHTQPVPDPQASRKEEDDEHQGPHPRRGRRPRHRHGGRARRAVRPRGRRHGVPKQPLLQRVGVLRHGRQLLRRRLPERRLLRAQTLRRPGRGERGDVPQQPLLQRQRVLRLRPGVLRRRLPERAMPRQHQVQRRQAVPEQLLLQQVRILRARRRVLRPGLPERRLP

SEQ ID NO: 65783 - protein, 166 aa, Triticum aestivum
  peptide (1)..(166): Ceres Seq. ID no. 14301893
MMSTKALTLGAVVVLAIAMAGAHAEQCGHAADGMECPNNLCCSAWGYCGMDANYCGDGCQSGACYEPKRCGAQAEGNAVTCPNNHCCSGNGYCGYGQEYCGDGCQNGPCRANIKCSADKPCLSNFCCSKYGYCGLGVEFCGQGCQSGACHDAVGAAALPLSSIVQG

SEQ ID NO: 65784 - DNA, 1168 bp, Triticum aestivum
  misc_feature (1)..(1168): Ceres Seq. ID no. 12620027
aaagaagtacagcatcagaagaggagaggagagcagaggcggagagtgaggagagagaggtgtagcggaggagccgtaggtaggtagagagagatggaggtggcggtgcctgtcatggcgccgagcgcgccgtgcagcccaagaaccgcggccgccatgggcggcggcggcagccacctgcccagctactgctacttcttctccagcgcccccacgagcccgtccagggccagcagctacgccgcggacgagcagggcgacgccgccacgttcgacttcgccttcggcttcagcgggcagctccgggagtccacgcccatcctcgccgccgccgacgagctgttcgagggcggcaggatccggccgctcaacggcccgcgctcaagcggcagcggcctgctcgccgacgaggactacgcctccctctccgtctccccccggtcgccgagaagagcgaggacgatgtccgcggtgcgcggcggtgcaggggatcgggcggaggcgccggccgatcagggtcagacgaggggcaggtccggccggccggcccctgcgtcgtcctcgtcgtcgggcgtgtcgtctcgcagcaggagggccacgcggtctctgtccccgtacaggggcgaccccatcgacgacgagttctgctcctccccaccctcccctcgcggcgccgcctccctgatgcgcggctgcgggagcggcagccgcaagtggcggctcaaggacctgttcctgttccgcagcgcgtcggagggccgcgccaccgccggcaaggacccgctgctcaagtacagcatgctcaagagcggcggcgacgcgtcgatgcggaaggggaggggctcggcggcgtcggcgagcgacatggcgccgtacacggtgagccgggcggcggccgaggagatgcggcggaggacgacgacgccgctgccgttccaccggaacagcctcttcggctacttccggtccaacccggccatccactccatcagccgcaagcttagcagctactcctcgtcgaactccaaccgcggccggaacgccgccgccgccgccaactgacagccgacgacgcagctcgctcgctcgctcgcgcgcacatgcatggcatgctggctactttggcagtagaaaaaaagggaaggaaagagaacagttttattcgttc

SEQ ID NO: 65785 - protein, 322 aa, Triticum aestivum
  peptide (1)..(322): Ceres Seq. ID no. 12620028
MEVAVPVMAPSAPCSPRTAAAMGGGGSHLPSYCYFFSSAPTSPSRASSYAADEQGDAATFDFAFGFSGQLRESTPILAAADELFEGGRIRPLNGPRSSGSGLLADEDYASLSVSPRSPRRARTMSAVRGGAGDRAEAPADQGQTRGRSGRPAPASSSSSGVSSRSRRATRSLSPYRGDPIDDEFCSSPPSPRGAASLMRGCGSGSRKWRLKDLFLFRSASEGRATAGKDPLLKYSMLKSGGDASMRKGRGSAASASDMAPYTVSRAAAEEMRRRTTTPLPFHRNSLFGYFRSNPAIHSISRKLSSYSSSNSNRGRNAAAAAN

SEQ ID NO: 65786 - protein, 315 aa, Triticum aestivum
  peptide (1)..(315): Ceres Seq. ID no. 12620029
MAPSAPCSPRTAAAMGGGGSHLPSYCYFFSSAPTSPSRASSYAADEQGDAATFDFAFGFSGQLRESTPILAAADELFEGGRIRPLNGPRSSGSGLLADEDYASLSVSPRSPRRARTMSAVRGGAGDRAEAPADQGQTRGRSGRPAPASSSSSGVSSRSRRATRSLSPYRGDPIDDEFCSSPPSPRGAASLMRGCGSGSRKWRLKDLFLFRSASEGRATAGKDPLLKYSMLKSGGDASMRKGRGSAASASDMAPYTVSRAAAEEMRRRTTTPLPFHRNSLFGYFRSNPAIHSISRKLSSYSSSNSNRGRNAAAAAN

SEQ ID NO: 65787 - protein, 301 aa, Triticum aestivum
  peptide (1)..(301): Ceres Seq. ID no. 12620030
MGGGGSHLPSYCYFFSSAPTSPSRASSYAADEQGDAATFDFAFGFSGQLRESTPILAAADELFEGGRIRPLNGPRSSGSGLLADEDYASLSVSPRSPRRARTMSAVRGGAGDRAEAPADQGQTRGRSGRPAPASSSSSGVSSRSRRATRSLSPYRGDPIDDEFCSSPPSPRGAASLMRGCGSGSRKWRLKDLFLFRSASEGRATAGKDPLLKYSMLKSGGDASMRKGRGSAASASDMAPYTVSRAAAEEMRRRTTTPLPFHRNSLFGYFRSNPAIHSISRKLSSYSSSNSNRGRNAAAAAN

SEQ ID NO: 65788 - DNA, 1319 bp, Triticum aestivum
  misc_feature (1)..(1319): Ceres Seq. ID no. 13656856
agaacatcctaattgaaaagagttctgattagtggctttgtgatgcaatcccagttgaagtgcagaacctttccggagtttggactttgggaacttcgaatcatcatcagccgagaaagagaaaagttgcccacgaacacacgaaaaagagccccatcatgactaggctcgctcctcctgttgctttccggccctgtctctctgtattgcacgaacttttagcgcgtaacatttactctcttatattatctgcgatctgaatcttgctgctgatttgctgagactttctgtttgtgcttcatgcagagcgggagatcggcgccgcgcctgagcccgtcgtgtacacgccgccggcgccgctgatgccgtccccgccctcggtcaacggcgccaatgtcagtgccagcaccagcagcgtcgcggccacgtcgcagagcctcctcggcagcatgttcgcgccgtcttccgtggcccagacggcgcagtatccggagcgcgcgctggcagccaagcccccgtcgctgtgcctcgcgaccgacgccgcgtccgcccagttctcggcccctacggctgaccggcagcagcagctcgtgcagccgccgccgtcgccgtccccatcggcgcacatgtccgccacggcgctgcttcagaaggcggcgcagatgggcgccacctcgtcgagctcctcgttcctgcgtgggctgggcctcgacatctcgtcgtcgccgccgggcgtcgacgtcgtcaggtcagcatcaacagcagcaccaccaccaccagcaacaccaccaggagcccatgcagatgcagttcccggagggttcgctgcagcaatggccgccgcggttggagcccgagccggccccgatgatgtcggccgggctgggcctcgggctgccatacgactcgaccggcggtccgatggggttgccggagctcatgatgggccagtcatcactgttcagcgccaagccggccacgctggacttcctggggctggggatgagccccacgggggcgaccacgagcaggggcctccccgtgttcatgcagcccatgggcggcgcggtcggcatggcccggaccggctccggccctccagacacgttcggctccggccggggcgctcaggccaagccgtgggagaggaacccgagcagctcgccgatcctgtaaaaggactgctgggaaagtagtaacacgtagcacagcagctgtaaaatgctgcttgtgtctaattagcagcagctagtcgtcagtccttggccgttcttttgttttcttaggtcacaatcaagaaagtaagttacttttgttcc

SEQ ID NO: 65789 - protein, 277 aa, Triticum aestivum
  peptide (1)..(277): Ceres Seq. ID no. 15220591
MPSPPSVNGANVSASTSSVAATSQSLLGSMFAPSSVAQTAQYPERALAAKPPSLCLATDAASAQFSAPTADRQQQLVQPPPSPSPSAHMSATALLQKAAQMGATSSSSSFLRGLGLDISSSPPGVDVVRSASTAAPPPPATPPGAHADAVPGGFAAAMAAAVGARAGPDDVGRAGPRAAIRLDRRSDGVAGAHDGPVITVQRQAGHAGLPGAGDEPHGGDHEQGPPRVHAAHGRRGRHGPDRLRPSRHVRLRPGRSGQAVGEEPEQLADPVKGLLGK

SEQ ID NO: 65790 - protein, 260 aa, Triticum aestivum
  peptide (1)..(260): Ceres Seq. ID no. 15220592
MSVPAPAASRPRRRASSAACSRRLPWPRRRSIRSARWQPSPRRCASRPTPRPPSSRPLRLTGSSSSCSRRRRRPHRRTCPPRRCFRRRRRWAPPRRAPRSCVGWASTSRRRRRASTSSGQHQQQHHHHQQHHQEPMQMQFPEGSLQQWPPRLEPEPAPMMSAGLGLGLPYDSTGGPMGLPELMMGQSSLFSAKPATLDFLGLGMSPTGATTSRGLPVFMQPMGGAVGMARTGSGPPDTFGSGRGAQAKPWERNPSSSPIL

SEQ ID NO: 65791 - protein, 248 aa, Triticum aestivum
  peptide (1)..(248): Ceres Seq. ID no. 15220593
MFAPSSVAQTAQYPERALAAKPPSLCLATDAASAQFSAPTADRQQQLVQPPPSPSPSAHMSATALLQKAAQMGATSSSSSFLRGLGLDISSSPPGVDVVRSASTAAPPPPATPPGAHADAVPGGFAAAMAAAVGARAGPDDVGRAGPRAAIRLDRRSDGVAGAHDGPVITVQRQAGHAGLPGAGDEPHGGDHEQGPPRVHAAHGRRGRHGPDRLRPSRHVRLRPGRSGQAVGEEPEQLADPVKGLLGK

SEQ ID NO: 65792 - DNA, 1419 bp, Triticum aestivum
  misc_feature (1)..(1419): Ceres Seq. ID no. 13654452
acacacacacagcgcaacgcctcccagctcgactccacgtgctgccgccgccgccggcgtagacctcccgttggccgccatggacccgcgcttccagctgcccactccggtgccgtcctccggcggcgctggtgtgcgagggcaccaccggcgggcccattcggagacgtttctgcgcttccccgacaccgacctcttcctcgaccccgatggagacttctccttctccgacctcgacttcccatccctctccgacgactccccggcggtctccgacccgaccccgcctcctcccccgccgatggcggccagctcgtcccagacaccggctccccgtccaccgggcgggacccacaacaggagcctctcccttgacgccgccttcttcgagggcctcgccttgcaggggggaggaggcgggggttgtggtggccataagaggagcgggtccatggatggggtgaactcgccgttcgaaggcgagtcggcgctgtcgggcgggctggactacgccaagaaggccatgccggccgagaggatcgccgagctagctctccttgaccccaaacgcgcaaagaggattttggcaaaccggcagtcggcagcgaggtcgaaggagaggaagatcaagtataccggtgagctagagaggaaggtccagacactgcagaccgaggccactacgctatcagcacagcttacacttctccagagggatacttctggtttaactaccgagaatagagaactcaaacttcggttgcagtccatggaggagcaagctaaactacgggatgctctaaatgacgctctgcgagaagaagtccagcggcttaagatagctgcagggcaagctccaaaaatgaatgggagtcaattcaacggcggactccagcagattccatcctatttctctcagcaacaccagcgacagcagcagcagcagcatcaacaacagatggcttacttaggtgggcaccaagctcagcgtcaccatccaaaccatcaccagagcccatcgaatggtggccagtcgctgagtggtctgtccctagacgactccatggatttcatttgaggaacactagggccctcctattaaatcatacaccaactgcaactcagcattgtacagatagctaatgtactatctatgcatatgaatcattggtagggtagctagcctttctttgtatttctatcattaatcagaaagcatgctcttgtatgacataatctcctctttcccttctttgtctgtttctggagagcaattgatgatactgggaactcttacttacaatgtgcttttcaggtcataactgttatgagatacacttgttagatwaaaaaaaaaaaaaaaaaaaaaaaaaaaaacaaaaaaccaaaaaaaaaaaaaaaaaagcttatcgataccgt

SEQ ID NO: 65793 - protein, 358 aa, Triticum aestivum
  peptide (1)..(358): Ceres Seq. ID no. 15219657
HTHSATPPSSTPRAAAAAGVDLPLAAMDPRFQLPTPVPSSGGAGVRGHHRRAHSETFLRFPDTDLFLDPDGDFSFSDLDFPSLSDDSPAVSDPTPPPPPPMAASSSQTPAPRPPGGTHNRSLSLDAAFFEGLALQGGGGGGCGGHKRSGSMDGVNSPFEGESALSGGLDYAKKAMPAERIAELALLDPKRAKRILANRQSAARSKERKIKYTGELERKVQTLQTEATTLSAQLTLLQRDTSGLTTENRELKLRLQSMEEQAKLRDALNDALREEVQRLKIAAGQAPKMNGSQFNGGLQQIPSYFSQQHQRQQQQQHQQQMAYLGGHQAQRHHPNHHQSPSNGGQSLSGLSLDDSMDFI

SEQ ID NO: 65794 - protein, 332 aa, Triticum aestivum
  peptide (1)..(332): Ceres Seq. ID no. 15219658
MDPRFQLPTPVPSSGGAGVRGHHRRAHSETFLRFPDTDLFLDPDGDFSFSDLDFPSLSDDSPAVSDPTPPPPPPMAASSSQTPAPRPPGGTHNRSLSLDAAFFEGLALQGGGGGGCGGHKRSGSMDGVNSPFEGESALSGGLDYAKKAMPAERIAELALLDPKRAKRILANRQSAARSKERKIKYTGELERKVQTLQTEATTLSAQLTLLQRDTSGLTTENRELKLRLQSMEEQAKLRDALNDALREEVQRLKIAAGQAPKMNGSQFNGGLQQIPSYFSQQHQRQQQQQHQQQMAYLGGHQAQRHHPNHHQSPSNGGQSLSGLSLDDSMDFI

SEQ ID NO: 65795 - protein, 258 aa, Triticum aestivum
  peptide (1)..(258): Ceres Seq. ID no. 15219659
MAASSSQTPAPRPPGGTHNRSLSLDAAFFEGLALQGGGGGGCGGHKRSGSMDGVNSPFEGESALSGGLDYAKKAMPAERIAELALLDPKRAKRILANRQSAARSKERKIKYTGELERKVQTLQTEATTLSAQLTLLQRDTSGLTTENRELKLRLQSMEEQAKLRDALNDALREEVQRLKIAAGQAPKMNGSQFNGGLQQIPSYFSQQHQRQQQQQHQQQMAYLGGHQAQRHHPNHHQSPSNGGQSLSGLSLDDSMDFI

SEQ ID NO: 65796 - DNA, 610 bp, Triticum aestivum
  misc_feature (1)..(610): Ceres Seq. ID no. 14302375
accccacttcccacttcccaagcgcgcccacgcgcacgaaaatactcctagtactaattcgagagccagtgagtctagggtcgagtcccggctggggatgacgagccctcgccggcgatggacttgccgctagccctcgcagctctactcctcctcctcctagtgctcctcgctgccccgccggcggcgctcctcattgccctccacctgaaccgccgccgccgcctaacgccgcccgagccggcggccgcggcgctcgagccgagcgcgccggccgaggagaacgagggcgggaaggagaagaggcggcggcgcagggcgaggcggaagcagcagcagaagcagggcggcgacggggccctctcgcaggcggcaggcggcggcggggacgacgcgctgccgccgcggccgcggttcccgctcgcctcggtggccggcgcactgcagcggcggatcaccgcgcggtacgacgagctcgcgcgggccagccaggcccagtccctcaccatggacggtgtgatcgtgctcgtcaagctcttgggcctccccctgtgccttgaactcttgagtcatggctatgaataagatctgaactgggcagatccaaatg

SEQ ID NO: 65797 - protein, 155 aa, Triticum aestivum
  peptide (1)..(155): Ceres Seq. ID no. 14302376
MDLPLALAALLLLLLVLLAAPPAALLIALHLNRRRRLTPPEPAAAALEPSAPAEENEGGKEKRRRRRARRKQQQKQGGDGALSQAAGGGGDDALPPRPRFPLASVAGALQRRITARYDELARASQAQSLTMDGVIVLVKLLGLPLCLELLSHGYE

SEQ ID NO: 65798 - DNA, 1749 bp, Triticum aestivum
  misc_feature (1)..(1749): Ceres Seq. ID no. 14308015
agagcaatacttgttgccaacacagacaccgctctgcctcttgaacccaagcagagcatcaaagaaaccagaggaggcggaggcagaggaagaagatggcgctcctccttgtgcttgtcggcgttgtggtcggcgtggtgctcgcgagcagcctgctgctgcggtggaacgaggtcaggtacggccggaggaaggagggccgcttgccgccggggacaatggggtggccgctcttcggcgagaccaccgagttcctcaagcagggcccgagcttcatgaagcagaggaggctcaggtacgggaggctgttccggacgcacatcctgggttgccccacggtggtgtgcatggacccggagctcaaccgccggatgctgctgcagggcgaggccggcggcctggtgcccggctacccgcagtccatgctcgacatcctcggccgcaacaatatcgccgccgtgcacggccagctgcaccgcgtcatgcgtggtgccatggtcggcctcgtccgccccgccgcgctccggcaaagcctcctccccaagatcgacgccttcatgcgcgaccacctctgcggctgggccggcaccgttgtcgacgtccaggccaagaccaaggagatggccttgctgtctgcactcaggcagatcgccggcgtcacggccggcccactctctgacgccctcaagacggagctgtacacgcttgtgctcggcaccatctccttgcccatcaacctcccagggaccagctactaccaaggctttcaggcaaggaagaagctcgtgtccattctagagcagatgatcgcggaacggcgatcctctggtgatgctcacgatgacatgttggatgctctcttgagaagcggcgatgacggcaccagggaaaagattagcgatgagcagatcattgacttgctcatcgccctcatctactctgggtacgagaccatgtcgacgacctcaatgatggctgtcaagtacctgtcagaacatccgcgggccctcgaagaacttaggagagagcatcttgatatcaggaagggaaaatcgccggacgaagccatcagctacgatgatgtcaagtccatgactttcactcgagctgccatttttgagacgctaagattagccacagttgtgaatggactgctgaggaaaactattaaggatgtagaaatgaatgggtatgtcattccaaaaggctggagaatctatgtttacacaagggagataaactacgatccgttcatgtatcctgacccgatgacctttaatccgtggagatggctggagaagaacatggaatcgcacccgcacttcatgttgttcggagggggcggccggatgtgccccgggaaggaggtgggaacggtggagatcacgactttcctccactatttcgtgacccgatacagatgggaggaagaaggcaagaacaccatcttgaaattcccccgggtggaagctcccaacgggctgcatatccgagttcaagattactgaactcttccaagaaacattttgcagagtttagatagatatgacaaagacaaagacgatgagagcgcgattctgcgccgatgaatagattagattagaaatttgatacctgtataaacataggaaaatagcgatagtatagatgttataggttcactaggtagccgggataataggcaacaacatgctcctgtgttcttttgttctaccaattccgaaatgaacaaaggcgtatgatgtgggt

SEQ ID NO: 65799 - protein, 470 aa, Triticum aestivum
  peptide (1)..(470): Ceres Seq. ID no. 14308016
MALLLVLVGVVVGVVLASSLLLRWNEVRYGRRKEGRLPPGTMGWPLFGETTEFLKQGPSFMKQRRLRYGRLFRTHILGCPTVVCMDPELNRRMLLQGEAGGLVPGYPQSMLDILGRNNIAAVHGQLHRVMRGAMVGLVRPAALRQSLLPKIDAFMRDHLCGWAGTVVDVQAKTKEMALLSALRQIAGVTAGPLSDALKTELYTLVLGTISLPINLPGTSYYQGFQARKKLVSILEQMIAERRSSGDAHDDMLDALLRSGDDGTREKISDEQIIDLLIALIYSGYETMSTTSMMAVKYLSEHPRALEELRREHLDIRKGKSPDEAISYDDVKSMTFTRAAIFETLRLATVVNGLLRKTIKDVEMNGYVIPKGWRIYVYTREINYDPFMYPDPMTFNPWRWLEKNMESHPHFMLFGGGGRMCPGKEVGTVEITTFLHYFVTRYRWEEEGKNTILKFPRVEAPNGLHIRVQDY

SEQ ID NO: 65800 - protein, 429 aa, Triticum aestivum
  peptide (1)..(429): Ceres Seq. ID no. 14308017
MGWPLFGETTEFLKQGPSFMKQRRLRYGRLFRTHILGCPTVVCMDPELNRRMLLQGEAGGLVPGYPQSMLDILGRNNIAAVHGQLHRVMRGAMVGLVRPAALRQSLLPKIDAFMRDHLCGWAGTVVDVQAKTKEMALLSALRQIAGVTAGPLSDALKTELYTLVLGTISLPINLPGTSYYQGFQARKKLVSILEQMIAERRSSGDAHDDMLDALLRSGDDGTREKISDEQIIDLLIALIYSGYETMSTTSMMAVKYLSEHPRALEELRREHLDIRKGKSPDEAISYDDVKSMTFTRAAIFETLRLATVVNGLLRKTIKDVEMNGYVIPKGWRIYVYTREINYDPFMYPDPMTFNPWRWLEKNMESHPHFMLFGGGGRMCPGKEVGTVEITTFLHYFVTRYRWEEEGKNTILKFPRVEAPNGLHIRVQDY

SEQ ID NO: 65801 - protein, 410 aa, Triticum aestivum
  peptide (1)..(410): Ceres Seq. ID no. 14308018
MKQRRLRYGRLFRTHILGCPTVVCMDPELNRRMLLQGEAGGLVPGYPQSMLDILGRNNIAAVHGQLHRVMRGAMVGLVRPAALRQSLLPKIDAFMRDHLCGWAGTVVDVQAKTKEMALLSALRQIAGVTAGPLSDALKTELYTLVLGTISLPINLPGTSYYQGFQARKKLVSILEQMIAERRSSGDAHDDMLDALLRSGDDGTREKISDEQIIDLLIALIYSGYETMSTTSMMAVKYLSEHPRALEELRREHLDIRKGKSPDEAISYDDVKSMTFTRAAIFETLRLATVVNGLLRKTIKDVEMNGYVIPKGWRIYVYTREINYDPFMYPDPMTFNPWRWLEKNMESHPHFMLFGGGGRMCPGKEVGTVEITTFLHYFVTRYRWEEEGKNTILKFPRVEAPNGLHIRVQDY

SEQ ID NO: 65802 - DNA, 1479 bp, Triticum aestivum
  misc_feature (1)..(1479): Ceres Seq. ID no. 13657621
accgagcttttccttcttcaagcaacataggagtagtcttcgctctgctcctcctctcccccaccagctctcgtgctcgccgccagccccggacagcgccgccccagctcaccgggagggcagcaagcaatggagcggagcctcccccccgtccccgtccccgcggcgcgcgtgtagcgttttgatccgcgaggatggcgatggcggcctacagcaaccaagcgcaggcgatgatgagggactacctgctcgccgacccgctcgtcccctacacctccgtgctcatcggcgttttcctctgcaagatggcttatgacctcacacggatattgagctcattctacttcaagggctattcttctttgacaaaaatacagcgtgttgaatggaacaacaggggtatgtccagtgcacatgcgatctttatcgcagcagtatcagtatatcttgttgcatctacagatcttttctctgatcgccttaatgggcctattacattccgcagttcgatcatctccacctctgcattaggggtttctgtgggttacttcatcactgatcttgcaatgatcttctggttgtttccttcccttggtggaatggaatatgtactccatcatactctttctctggttgcaatagcctacacaatgttgtcaggggaggggcagttttacacatacatgattcttatttcagaaacaaccacccctgaaatcaacatgagatggttccttgacaccgctggattgaagaagtcgagcgcctacctgattaatggtattttgatatttgttgtatggctggtggcaaggatatttttgttcctgtatgtattttaccacatctatttgcactacagccagataatgaagatgcacgcatttggttattacctgacactgaccgtgccgtcggtgctctttgtcatgaacgcaatgtggtttacgaagattttgaaaggggtaatgaaaacactgtcgaaatggtcgtaatcggagtaggctttgcggaccagaagtgcaacataactgggtgttcctgccgtgctgcactgcgtgtgacttgaatatgtaaagttatgaatatatgaattaggctttgcagaccggaagtacaacgccaacttggttggtgttcctgcagtgctgcttgagaccttgatgtgcaaagttatgaacatatcggcgtaactagggaaagtgaatatgtaaaatactagcaaacaagttagattaggctaaatcgcgctattttccatgagctgggatttcctggccagtttggcactgtactgaagttcctattccaatcctgcaatctgtgtataccaggccaggagataattccattgcatctcttattcatactaaatttgataatctaatttgagatattatatataagctgttgttattccaagaaaaaaaaaaaaaaaaaagcttatcgataccgtcgacctcgagggggggcccggta

SEQ ID NO: 65803 - protein, 266 aa, Triticum aestivum
  peptide (1)..(266): Ceres Seq. ID no. 13657622
MAMAAYSNQAQAMMRDYLLADPLVPYTSVLIGVFLCKMAYDLTRILSSFYFKGYSSLTKIQRVEWNNRGMSSAHAIFIAAVSVYLVASTDLFSDRLNGPITFRSSIISTSALGVSVGYFITDLAMIFWLFPSLGGMEYVLHHTLSLVAIAYTMLSGEGQFYTYMILISETTTPEINMRWFLDTAGLKKSSAYLINGILIFVVWLVARIFLFLYVFYHIYLHYSQIMKMHAFGYYLTLTVPSVLFVMNAMWFTKILKGVMKTLSKWS

SEQ ID NO: 65804 - protein, 264 aa, Triticum aestivum
  peptide (1)..(264): Ceres Seq. ID no. 13657623
MAAYSNQAQAMMRDYLLADPLVPYTSVLIGVFLCKMAYDLTRILSSFYFKGYSSLTKIQRVEWNNRGMSSAHAIFIAAVSVYLVASTDLFSDRLNGPITFRSSIISTSALGVSVGYFITDLAMIFWLFPSLGGMEYVLHHTLSLVAIAYTMLSGEGQFYTYMILISETTTPEINMRWFLDTAGLKKSSAYLINGILIFVVWLVARIFLFLYVFYHIYLHYSQIMKMHAFGYYLTLTVPSVLFVMNAMWFTKILKGVMKTLSKWS

SEQ ID NO: 65805 - protein, 254 aa, Triticum aestivum
  peptide (1)..(254): Ceres Seq. ID no. 13657624
MMRDYLLADPLVPYTSVLIGVFLCKMAYDLTRILSSFYFKGYSSLTKIQRVEWNNRGMSSAHAIFIAAVSVYLVASTDLFSDRLNGPITFRSSIISTSALGVSVGYFITDLAMIFWLFPSLGGMEYVLHHTLSLVAIAYTMLSGEGQFYTYMILISETTTPEINMRWFLDTAGLKKSSAYLINGILIFVVWLVARIFLFLYVFYHIYLHYSQIMKMHAFGYYLTLTVPSVLFVMNAMWFTKILKGVMKTLSKWS

SEQ ID NO: 65806 - DNA, 575 bp, Triticum aestivum
  misc_feature (1)..(575): Ceres Seq. ID no. 13656404
gcagtcgatttcacgcgatcggatccagccgccccatgccgccgtcccccgccgcgtccgccccggcgagccgccacctgcgactctggtggcgccgccgcggccgggccggcgccgtcgcggccaccttcgccgcggcactcctcgccgcggccctcctcctctcgctctcctacttcgcctccctgcccctcgcgcccgcctcctcctccgccctcgtcggcctcaccctcctccgccgcgccgaggagaagggcgcgctgtgcttggatgggagcgcgccggggtaccatctgcagcgagggtcagggagtggctctcagagctggctcatccacttggagggtggaggctggtgccgaaatttgaaatcatgcgcttcacgccagaaatcgatgttgggttcttcccattacatggaacgtcaggttgagtttgctgggatgttgagcgatgatgaagatcagaatccagattttcacaactggaataaagtgaagataaggtattgtgatggggcatcattttctgggaacgttaaagacgagttgcagaacggcacaaaattctttttc

SEQ ID NO: 65807 - protein, 191 aa, Triticum aestivum
  peptide (1)..(191): Ceres Seq. ID no. 13656405
SRFHAIGSSRPMPPSPAASAPASRHLRLWWRRRGRAGAVAATFAAALLAAALLLSLSYFASLPLAPASSSALVGLTLLRRAEEKGALCLDGSAPGYHLQRGSGSGSQSWLIHLEGGGWCRNLKSCASRQKSMLGSSHYMERQVEFAGMLSDDEDQNPDFHNWNKVKIRYCDGASFSGNVKDELQNGTKFFF

SEQ ID NO: 65808 - protein, 180 aa, Triticum aestivum
  peptide (1)..(180): Ceres Seq. ID no. 13656406
MPPSPAASAPASRHLRLWWRRRGRAGAVAATFAAALLAAALLLSLSYFASLPLAPASSSALVGLTLLRRAEEKGALCLDGSAPGYHLQRGSGSGSQSWLIHLEGGGWCRNLKSCASRQKSMLGSSHYMERQVEFAGMLSDDEDQNPDFHNWNKVKIRYCDGASFSGNVKDELQNGTKFFF

SEQ ID NO: 65809 - protein, 143 aa, Triticum aestivum
  peptide (1)..(143): Ceres Seq. ID no. 13656407
QSISRDRIQPPHAAVPRRVRPGEPPPATLVAPPRPGRRRRGHLRRGTPRRGPPPLALLLRLPAPRARLLLRPRRPHPPPPRRGEGRAVLGWERAGVPSAARVREWLSELAHPLGGWRLVPKFEIMRFTPEIDVGFFPLHGTSG

SEQ ID NO: 65810 - DNA, 974 bp, Triticum aestivum
  misc_feature (1)..(974): Ceres Seq. ID no. 13656408
attacctagaacatcctaatcgaaaaactgcggcttacaccagggaaaggctctcgcatcgctccctccccggggcgacacgggcggcggctcaggcgcccctccaccagaccccctcctcattcccctcccctcgccgtcgccggtgggctccgccgggcgaagcccgcatggatccggcggcggcgggacctcttctacccggcgtcgctcgtgaggggaagacttgcagcggcgggcgacggatgccggacgacgtacggtgctggtgtcggctgcgggcggcggatggggagctggggcggcggcatcggtccgggctccggcgtggcctgggcgtggacggcatgcatgcgcgcggcggcggtcggcttcggatcgtgcgtggggtgcggatcgacgtcgggcgcggcagcggctttcgtctcccggatttcgccgccgcagccgctcaccgcccacgcctcctacccgtcgacgagatgacgaagcgcaccaagaaggctggtattgtcggcaaatatggtacccgttatggtgccagtttgcgtaagcagatcaagaagatggaggtgtctcagcactccaagtacttctgtgagttctgtgggaagtttgctgtgaagaggaaagcagttggaatttggggatgcaaggactgtgggaaggtgaaggctggcggtgcttacactatgaacactgccagtgcggtcactgtcaggagcactatccgtcgtttgagggagcagactgaagcataagttgctactagtgttttgtcctagtgaatcatctgggatttcgcagtttagacgatactttggattcagttccattggctgtttagtcaaggattatctttgtacttggtgcgatgatgttctgttatgttattctcccacccttttgttgcctgattccactctgatttactgtggattaaaaaaaaaaaaaaaaaagcttatcgataccgt

SEQ ID NO: 65811 - protein, 252 aa, Triticum aestivum
  peptide (1)..(252): Ceres Seq. ID no. 13656409
YLEHPNRKTAAYTRERLSHRSLPGATRAAAQAPLHQTPSSFPSPRRRRWAPPGEARMDPAAAGPLLPGVAREGKTCSGGRRMPDDVRCWCRLRAADGELGRRHRSGLRRGLGVDGMHARGGGRLRIVRGVRIDVGRGSGFRLPDFAAAAAHRPRLLPVDEMTKRTKKAGIVGKYGTRYGASLRKQIKKMEVSQHSKYFCEFCGKFAVKRKAVGIWGCKDCGKVKAGGAYTMNTASAVTVRSTIRRLREQTEA

SEQ ID NO: 65812 - protein, 196 aa, Triticum aestivum
  peptide (1)..(196): Ceres Seq. ID no. 13656410
MDPAAAGPLLPGVAREGKTCSGGRRMPDDVRCWCRLRAADGELGRRHRSGLRRGLGVDGMHARGGGRLRIVRGVRIDVGRGSGFRLPDFAAAAAHRPRLLPVDEMTKRTKKAGIVGKYGTRYGASLRKQIKKMEVSQHSKYFCEFCGKFAVKRKAVGIWGCKDCGKVKAGGAYTMNTASAVTVRSTIRRLREQTEA

SEQ ID NO: 65813 - protein, 171 aa, Triticum aestivum
  peptide (1)..(171): Ceres Seq. ID no. 13656411
MPDDVRCWCRLRAADGELGRRHRSGLRRGLGVDGMHARGGGRLRIVRGVRIDVGRGSGFRLPDFAAAAAHRPRLLPVDEMTKRTKKAGIVGKYGTRYGASLRKQIKKMEVSQHSKYFCEFCGKFAVKRKAVGIWGCKDCGKVKAGGAYTMNTASAVTVRSTIRRLREQTEA

SEQ ID NO: 65814 - DNA, 1310 bp, Triticum aestivum
  misc_feature (1)..(1310): Ceres Seq. ID no. 14302514
agaaaactgaggaaagtagaccgagccccaaacgaaatcaaatcgagaggagaggagaaagagagaggagcacgcgccgccgccaggccaagcacatcgccatggccgcctcctgccgccgcgcgccccagatgctgggctccgccgcctcccgcctcctccattcgcgtggctacgcggccgccgccgccgcgccctccccggcggtgttcgtcgacaagagcacccgcgtgatctgccagggcatcaccgggaagaacggcaccttccacaccgagcaggccatcgagtacggcaccaacatggtaggtggagttactcccaagaaaggtggaactgagcacctaggccttccagttttcaactcggtagcagaagctaaggccgagacaaaggccaatgcatctgttatatatgttccaccaccatttgctgccgctgcaataatggaggcattggaagcagagcttgaccttgttgtctgcattactgaagggatacctcagcatgacatggtgaaagtgaaagctgctctgaacaggcaatcaaaaaccagattgatcgggccaaactgccctggtatcattaagcctggtgaatgtaagattggaatcatgccaggttacatccacaaaccaggacgcattggaattgtatctcgttctggtaccttgacatatgaagcggtgtttcaaacaacagccgtaggcttggggcagtcaacttgtgtgggcatgggtggtgacccctttaacggcactaattttgttgactgccttgaaaagtttgttgatgatcctcagacagaaggtattgttctcattggagaaattggcggtactgctgaggaggatgctgcagcctttatccgggagagcaaaacagaaaagcctgtcgttgcattcatagctggacttactgcacccccaggccgtcgcatgggccatgctggagcaattgtgtcaggggggaagggtaccgcccaggacaagatcaaggcactcagggatgctggggttactgttgtcgagtcaccagctaagatcggttcaaccatgttcgaacttttcaagcagcgcggaatggtagagtagagagaaggaatggtacagtagaaaagaaaacattgggaaacttctttttgttgctcgttggttaatagcgagcaatacgtcggtagggccccatcgctggtcgctgagttgagctactcagtcccttttttccttttcctttccccgtcttaagtgtgagactggcctttacatgtgctcatttcaaatgttcaataagacaaattctcgacatac

SEQ ID NO: 65815 - protein, 363 aa, Triticum aestivum
  peptide (1)..(363): Ceres Seq. ID no. 14302515
KTEESRPSPKRNQIERRGERERSTRRRQAKHIAMAASCRRAPQMLGSAASRLLHSRGYAAAAAAPSPAVFVDKSTRVICQGITGKNGTFHTEQAIEYGTNMVGGVTPKKGGTEHLGLPVFNSVAEAKAETKANASVIYVPPPFAAAAIMEALEAELDLVVCITEGIPQHDMVKVKAALNRQSKTRLIGPNCPGIIKPGECKIGIMPGYIHKPGRIGIVSRSGTLTYEAVFQTTAVGLGQSTCVGMGGDPFNGTNFVDCLEKFVDDPQTEGIVLIGEIGGTAEEDAAAFIRESKTEKPVVAFIAGLTAPPGRRMGHAGAIVSGGKGTAQDKIKALRDAGVTVVESPAKIGSTMFELFKQRGMVE

SEQ ID NO: 65816 - protein, 330 aa, Triticum aestivum
  peptide (1)..(330): Ceres Seq. ID no. 14302516
MAASCRRAPQMLGSAASRLLHSRGYAAAAAAPSPAVFVDKSTRVICQGITGKNGTFHTEQAIEYGTNMVGGVTPKKGGTEHLGLPVFNSVAEAKAETKANASVIYVPPPFAAAAIMEALEAELDLVVCITEGIPQHDMVKVKAALNRQSKTRLIGPNCPGIIKPGECKIGIMPGYIHKPGRIGIVSRSGTLTYEAVFQTTAVGLGQSTCVGMGGDPFNGTNFVDCLEKFVDDPQTEGIVLIGEIGGTAEEDAAAFIRESKTEKPVVAFIAGLTAPPGRRMGHAGAIVSGGKGTAQDKIKALRDAGVTVVESPAKIGSTMFELFKQRGMVE

SEQ ID NO: 65817 - protein, 320 aa, Triticum aestivum
  peptide (1)..(320): Ceres Seq. ID no. 14302517
MLGSAASRLLHSRGYAAAAAAPSPAVFVDKSTRVICQGITGKNGTFHTEQAIEYGTNMVGGVTPKKGGTEHLGLPVFNSVAEAKAETKANASVIYVPPPFAAAAIMEALEAELDLVVCITEGIPQHDMVKVKAALNRQSKTRLIGPNCPGIIKPGECKIGIMPGYIHKPGRIGIVSRSGTLTYEAVFQTTAVGLGQSTCVGMGGDPFNGTNFVDCLEKFVDDPQTEGIVLIGEIGGTAEEDAAAFIRESKTEKPVVAFIAGLTAPPGRRMGHAGAIVSGGKGTAQDKIKALRDAGVTVVESPAKIGSTMFELFKQRGMVE

SEQ ID NO: 65818 - DNA, 808 bp, Triticum aestivum
  misc_feature (1)..(808): Ceres Seq. ID no. 12618916
aaagcaccaacccctcaagagacacatccttcagctcatccttgcctcttgcgttctcttctccgtagcttgcagataagtaagcttgtccgttgtgcggagaggggaggcggataggtacatacacatggaagggttgcagagatcgtcctccactttcagaaggtccggctcgtcgggcctggtgtgggacgagcggttcctgaccgagggcgccgaggcgaaggccgccggcgagggcggcacggatgaagcccagccggagatgcggcgctcccggagcaccggcggcgtcgggatgatgctgcgccgtggcggcgacgacaagaagcagcagcagcagaaaaaggagcagcaaggccagaagaagaaggacgaggagcgcgatccccaggtgttccggaccaaggaggtggccccggacgtggacccgccgtcgccgagggtgtccggctgcatcctctgcgccatcttcgggggctccggctccggctctggcccggcggcgcgccgaggccgcgccaagccgaagaggaggcaacggtcggcggcgtaaagtttgatcgggccttggcggatggatgtcatgcgagctgtgtttatactggagtgacgatgatgatgatatactactgatattggttggtttgtattgtactctgctctgcgttactgcgtacgtagtctatacgtgtcaggttagttcctctttttttggttagtttctgggttcagatccgtgagcagcagcagctgctgagatctgcgatgttctttcttgatctggcgcatgattttttccccgtcc

SEQ ID NO: 65819 - protein, 142 aa, Triticum aestivum
  peptide (1)..(142): Ceres Seq. ID no. 12618917
MEGLQRSSSTFRRSGSSGLVWDERFLTEGAEAKAAGEGGTDEAQPEMRRSRSTGGVGMMLRRGGDDKKQQQQKKEQQGQKKKDEERDPQVFRTKEVAPDVDPPSPRVSGCILCAIFGGSGSGSGPAARRGRAKPKRRQRSAA

SEQ ID NO: 65820 - protein, 96 aa, Triticum aestivum
  peptide (1)..(96): Ceres Seq. ID no. 12618918
MRRSRSTGGVGMMLRRGGDDKKQQQQKKEQQGQKKKDEERDPQVFRTKEVAPDVDPPSPRVSGCILCAIFGGSGSGSGPAARRGRAKPKRRQRSAA

SEQ ID NO: 65821 - protein, 85 aa, Triticum aestivum
  peptide (1)..(85): Ceres Seq. ID no. 12618919
MMLRRGGDDKKQQQQKKEQQGQKKKDEERDPQVFRTKEVAPDVDPPSPRVSGCILCAIFGGSGSGSGPAARRGRAKPKRRQRSAA

SEQ ID NO: 65822 - DNA, 1180 bp, Triticum aestivum
  misc_feature (1)..(1180): Ceres Seq. ID no. 12780566
caggccgggcgttgcaacgaacaaacaaacgctgctttcagaagaagggttcttccttctccactccttgtattccgtcacacgagtccgacggcgacgacgacttgagggagaaggcgaagaggaaggaaggcggactcgagaggttcgacggggattttggtgttcgtccggcggattcccagcgatcggccgatcctcgccggcggatggggcaggcgttccgcaaactgttcgatgccttcttcggcaacagcgagatgagggtcgtgatgcttgggctggatgccgcgggcaagaccaccatcctgtacaagctgcacatcggggaggtcctctcgactgtccctacgattgggttcaatgttgagaaagttcagtacaagaacgtgctgtttacagtgtgggatgttggtggccaggagaagttgaggcccttgtggagacattactttaataacacagatggcttgatctacgtggttgattcattggatagggagagaattggaaaagccaaagcagagtttcagacaataatcaacgatcctttcatgcttaacagtgtcatattggtatttgccaataaacaagatatgaaaggggcgatgacaccaatggaggtgtgcgaaggccttggcctctatgatttgaagaaccgcgtctggcacatccaagtatgagggcttggactggctgtcaagtactctgcaggatctgcaagcgttcggtcgcctaccctcaggagggacctaacagttctaagtagcacttctgcttataagatcctaatgctcatactaacaacctttggatgaaagatgacactcagagagaaagaaaaagatagtggtgagaaacacatccaggttttgcgataagctttggtgttgattctgctgaagaaaagactttgcttgggtctgaccacatcaaatttaccagtacaatcttgtcatggatagtgtggattctctaattcgtgacatatttcatgtaaaatttcctgtgagtttagaggagctaaccatcttatgcttttgttcacatatgaggagtggaacataatgttattgatgtaaattttctgtaagataattttggcacatacgatccgtatctagacaaaagaattttgggacggagggagtacaatttatgtctcccttgcccccccccc

SEQ ID NO: 65823 - protein, 226 aa, Triticum aestivum
  peptide (1)..(226): Ceres Seq. ID no. 12780567
GRALQRTNKRCFQKKGSSFSTPCIPSHESDGDDDLREKAKRKEGGLERFDGDFGVRPADSQRSADPRRRMGQAFRKLFDAFFGNSEMRVVMLGLDAAGKTTILYKLHIGEVLSTVPTIGFNVEKVQYKNVLFTVWDVGGQEKLRPLWRHYFNNTDGLIYVVDSLDRERIGKAKAEFQTIINDPFMLNSVILVFANKQDMKGAMTPMEVCEGLGLYDLKNRVWHIQV

SEQ ID NO: 65824 - protein, 157 aa, Triticum aestivum
  peptide (1)..(157): Ceres Seq. ID no. 12780568
MGQAFRKLFDAFFGNSEMRVVMLGLDAAGKTTILYKLHIGEVLSTVPTIGFNVEKVQYKNVLFTVWDVGGQEKLRPLWRHYFNNTDGLIYVVDSLDRERIGKAKAEFQTIINDPFMLNSVILVFANKQDMKGAMTPMEVCEGLGLYDLKNRVWHIQV

SEQ ID NO: 65825 - protein, 140 aa, Triticum aestivum
  peptide (1)..(140): Ceres Seq. ID no. 12780569
MRVVMLGLDAAGKTTILYKLHIGEVLSTVPTIGFNVEKVQYKNVLFTVWDVGGQEKLRPLWRHYFNNTDGLIYVVDSLDRERIGKAKAEFQTIINDPFMLNSVILVFANKQDMKGAMTPMEVCEGLGLYDLKNRVWHIQV

SEQ ID NO: 65826 - DNA, 1766 bp, Triticum aestivum
  misc_feature (1)..(1766): Ceres Seq. ID no. 14308027
cacaactcacaacttgcaaacacacgaagcgaaattccttagctccgacccagagtcgccagggagagcgcaaatggaggacaccttcatcacggtctgcctcgccgtagctctcgtttcgctgctcatcatgattgcgggccgccggcgctggggggcgcgtggcgacggcctgcgtatggcgcctgggccgtggcagctgccggtgatcggcagcctgcaccacctcgtcctggccgggcagctccctcaccgcgcgatgcgcgacctggcgcgacgctacgggccggccgtgctgctccagctcggccaggtgaagacgctggtggtgtcctctcgggagggggcgcgcgaggtgatgaagaaccacgacaccatgttcgccacgcggccgctgagcaccaccatgcgcgtgctctcctacggcggccaggacatcgtcttcgcgccctacggagaatactggcgccagctccgcaagatcgccgtgtccgagctcttcaccgcgcgccgcgtcctctccttccgcgccatccgcgaggaggaggtcgccacggcgctccgcgtcgtcggcgaggctgcggcggcggcgcgccccgtggagatgcgcgcggtgctatccacgctcgtgacggacagcacggcgcgcgccgtcataggcgaccggtgcagggagcgcgacgcgttcctccgggagctcgaccgcatcgtgcagctcgcgtcggggttcaacctggccgacatgtggccgtcgtcgcagcttgcggcgtggctcagtggagccgaggagtgccgccacaccctgtacaccatgctcgacggcatcgttgaggagcacctggagaggacggacggcggcggaggccacgccgaggacttgctcgacgtgctgctcaagatccagaaggagggtggtctcaagtttcccatccacatggacgccgtcaaagccatcatcttggacgtattctctgccggcagtgaaacaacaactacgacaattgagtgggccatatcagagctgatcaacaacccgatggccatgcagaaggcgacagatgaggtgcgacaagccttccatgctagtggaaccgtgtccgagcacgccctaagcgagctcccatacctgcgcttggtcatccgagagacgctgcggctacacccgcccctgccgttgttgttccgcgagtgccaggaaccgtgccaagtgcagggatacgacgtgcagcggggcacgcaggtgttggtcaatgcttgggcgctaggccgcgacgagcgctattggcccgacgcgcctgaggagttccggccggaacggttcgaggaagaagcagcaaaggcagactttgggggtggtgactttgcgttcttgccgtttggcgccggccgcaggatgtgccctgggatggcgtttggcctcgccggcgtcgagctcccgcttgcaagcatgctcttccactttgactggaagccaccagggccaggctcggcggagctcgacatgacagagacgttcggcctcaccgcacggcggacagaccagctcctgttgcgccctgtccttcgcgtacctattcccggagtctagtcaatatataaactataagaaatggaggtataatgtaaaactatacttgtacccacatagaaaataaattgcaaagttctacgactgttgcataacatcattagtattgtgcaataactagcgtagtggggctagatcaatatgtggttcctgaatatattgtaaacctatttgaaat

SEQ ID NO: 65827 - protein, 528 aa, Triticum aestivum
  peptide (1)..(528): Ceres Seq. ID no. 14308028
TTHNLQTHEAKFLSSDPESPGRAQMEDTFITVCLAVALVSLLIMIAGRRRWGARGDGLRMAPGPWQLPVIGSLHHLVLAGQLPHRAMRDLARRYGPAVLLQLGQVKTLVVSSREGAREVMKNHDTMFATRPLSTTMRVLSYGGQDIVFAPYGEYWRQLRKIAVSELFTARRVLSFRAIREEEVATALRVVGEAAAAARPVEMRAVLSTLVTDSTARAVIGDRCRERDAFLRELDRIVQLASGFNLADMWPSSQLAAWLSGAEECRHTLYTMLDGIVEEHLERTDGGGGHAEDLLDVLLKIQKEGGLKFPIHMDAVKAIILDVFSAGSETTTTTIEWAISELINNPMAMQKATDEVRQAFHASGTVSEHALSELPYLRLVIRETLRLHPPLPLLFRECQEPCQVQGYDVQRGTQVLVNAWALGRDERYWPDAPEEFRPERFEEEAAKADFGGGDFAFLPFGAGRRMCPGMAFGLAGVELPLASMLFHFDWKPPGPGSAELDMTETFGLTARRTDQLLLRPVLRVPIPGV

SEQ ID NO: 65828 - protein, 504 aa, Triticum aestivum
  peptide (1)..(504): Ceres Seq. ID no. 14308029
MEDTFITVCLAVALVSLLIMIAGRRRWGARGDGLRMAPGPWQLPVIGSLHHLVLAGQLPHRAMRDLARRYGPAVLLQLGQVKTLVVSSREGAREVMKNHDTMFATRPLSTTMRVLSYGGQDIVFAPYGEYWRQLRKIAVSELFTARRVLSFRAIREEEVATALRVVGEAAAAARPVEMRAVLSTLVTDSTARAVIGDRCRERDAFLRELDRIVQLASGFNLADMWPSSQLAAWLSGAEECRHTLYTMLDGIVEEHLERTDGGGGHAEDLLDVLLKIQKEGGLKFPIHMDAVKAIILDVFSAGSETTTTTIEWAISELINNPMAMQKATDEVRQAFHASGTVSEHALSELPYLRLVIRETLRLHPPLPLLFRECQEPCQVQGYDVQRGTQVLVNAWALGRDERYWPDAPEEFRPERFEEEAAKADFGGGDFAFLPFGAGRRMCPGMAFGLAGVELPLASMLFHFDWKPPGPGSAELDMTETFGLTARRTDQLLLRPVLRVPIPGV

SEQ ID NO: 65829 - protein, 485 aa, Triticum aestivum
  peptide (1)..(485): Ceres Seq. ID no. 14308030
MIAGRRRWGARGDGLRMAPGPWQLPVIGSLHHLVLAGQLPHRAMRDLARRYGPAVLLQLGQVKTLVVSSREGAREVMKNHDTMFATRPLSTTMRVLSYGGQDIVFAPYGEYWRQLRKIAVSELFTARRVLSFRAIREEEVATALRVVGEAAAAARPVEMRAVLSTLVTDSTARAVIGDRCRERDAFLRELDRIVQLASGFNLADMWPSSQLAAWLSGAEECRHTLYTMLDGIVEEHLERTDGGGGHAEDLLDVLLKIQKEGGLKFPIHMDAVKAIILDVFSAGSETTTTTIEWAISELINNPMAMQKATDEVRQAFHASGTVSEHALSELPYLRLVIRETLRLHPPLPLLFRECQEPCQVQGYDVQRGTQVLVNAWALGRDERYWPDAPEEFRPERFEEEAAKADFGGGDFAFLPFGAGRRMCPGMAFGLAGVELPLASMLFHFDWKPPGPGSAELDMTETFGLTARRTDQLLLRPVLRVPIPGV

SEQ ID NO: 65830 - DNA, 1434 bp, Triticum aestivum
  misc_feature (1)..(1434): Ceres Seq. ID no. 14302355
gaaccttccagaccgctcccgcgccccctcccctatttatcccctcaccccctcccccattcaccaccatctccacaccacacctcactcgcccacaatctcgaacaacggccgtcggatccatcatcatcggcagcggagcgattccatcgaccagctttctacagacggacatggggatgccggccgtgaggaggagggagagggacgcggaggcggagctcaacctgccccccggcttccgcttccaccccaccgacgacgagctcgtcgagcactacctctgccgcaaggcggcggggcagcgcctcccggtccccatcatcgtcgaggtcgacctctaccgcttcgacccctgggcgctccctgaccgcgccctcttcggcacccgcgagtggtacttcttcaccccccgcgaccgcaagtaccccaacggctcccgacccaaccgcgccgccggcaacggctactggaaggccaccggcgccgacaagcccgtcgcgccccgcggcgggcggaccatggggatcaagaaggccctcgtgttttacgcgggcaaggcgcctaagggggtcaagaccgactggatcatgcatgagtatcgcctcgccgacgccggccgcgccgccgccagcaagaagggctcgctcaggctggacgactgggtgctctgccggctctacaacaagaagaacgagtgggagaagatgcagctgcagcagcaaggggaagaggagacgatgatggagcccaaggcggagaacacggcctccgacatggtggtcacctcgcactcccactcgcagtcccagtcgcactcgcactcgtggggcgaggcgcgcacgccggagtcggagatcgtcgacaacgacccgtcgctgttccagcaggcgacggcggcggcgttccaggcccagagccccgcggccgccgcggcgcaccaggagatgatggccacgctgatggtgcccaagaaggaggcggcggacgaggccggcaggaacgacctcttcgtcgacctcagctacgacgacatccagagcatgtacaacggcctcgacatgatgccgcccggggacgacctgctctactcctccctcttcgcctccccccgtgtccgcgggagccagcccagcgccggcggcatgccggccccgttctaagcagagcaaagacagagaccgtcagagaccccgagatcgacagaagtggaatggacgacttcttggccgcgagcgagcgagaccgcggtgcagtgtaaatacagcataggaaacgggagggagggaggtggcgtcgtgtcgagagaagccggcgtcgtgccggggcgtgccgttgtacatggagagcccggcgccggggcctggccggctgggttgattcttttgttcttactaccttgtactctcaatgcggatgtagctctttcttctc

SEQ ID NO: 65831 - protein, 386 aa, Triticum aestivum
  peptide (1)..(386): Ceres Seq. ID no. 14302356
TFQTAPAPPPLFIPSPPPPFTTISTPHLTRPQSRTTAVGSIIIGSGAIPSTSFLQTDMGMPAVRRRERDAEAELNLPPGFRFHPTDDELVEHYLCRKAAGQRLPVPIIVEVDLYRFDPWALPDRALFGTREWYFFTPRDRKYPNGSRPNRAAGNGYWKATGADKPVAPRGGRTMGIKKALVFYAGKAPKGVKTDWIMHEYRLADAGRAAASKKGSLRLDDWVLCRLYNKKNEWEKMQLQQQGEEETMMEPKAENTASDMVVTSHSHSQSQSHSHSWGEARTPESEIVDNDPSLFQQATAAAFQAQSPAAAAAHQEMMATLMVPKKEAADEAGRNDLFVDLSYDDIQSMYNGLDMMPPGDDLLYSSLFASPRVRGSQPSAGGMPAPF

SEQ ID NO: 65832 - protein, 329 aa, Triticum aestivum
  peptide (1)..(329): Ceres Seq. ID no. 14302357
MGMPAVRRRERDAEAELNLPPGFRFHPTDDELVEHYLCRKAAGQRLPVPIIVEVDLYRFDPWALPDRALFGTREWYFFTPRDRKYPNGSRPNRAAGNGYWKATGADKPVAPRGGRTMGIKKALVFYAGKAPKGVKTDWIMHEYRLADAGRAAASKKGSLRLDDWVLCRLYNKKNEWEKMQLQQQGEEETMMEPKAENTASDMVVTSHSHSQSQSHSHSWGEARTPESEIVDNDPSLFQQATAAAFQAQSPAAAAAHQEMMATLMVPKKEAADEAGRNDLFVDLSYDDIQSMYNGLDMMPPGDDLLYSSLFASPRVRGSQPSAGGMPAPF

SEQ ID NO: 65833 - protein, 327 aa, Triticum aestivum
  peptide (1)..(327): Ceres Seq. ID no. 14302358
MPAVRRRERDAEAELNLPPGFRFHPTDDELVEHYLCRKAAGQRLPVPIIVEVDLYRFDPWALPDRALFGTREWYFFTPRDRKYPNGSRPNRAAGNGYWKATGADKPVAPRGGRTMGIKKALVFYAGKAPKGVKTDWIMHEYRLADAGRAAASKKGSLRLDDWVLCRLYNKKNEWEKMQLQQQGEEETMMEPKAENTASDMVVTSHSHSQSQSHSHSWGEARTPESEIVDNDPSLFQQATAAAFQAQSPAAAAAHQEMMATLMVPKKEAADEAGRNDLFVDLSYDDIQSMYNGLDMMPPGDDLLYSSLFASPRVRGSQPSAGGMPAPF

SEQ ID NO: 65834 - DNA, 1292 bp, Triticum aestivum
  misc_feature (1)..(1292): Ceres Seq. ID no. 13656671
ctcgcgggtccggtccacaatttttttcctcgcataaatcatcctccgtcaccggcggggcgagggagacgcggtcggcgggcgagacgccagagacaaacccaacggagtttcccccccctgccgccgaccccaaaccctagccgctcctaccagccccagcctctcctaccgaccccagccagccgcgccggaattctcctgggtgttctattggcttttctcaagcctgtagcttcatcgcggcagcatgagctctgctggttctgcaagggttccaaagaggagacggactaccaagacgtcggaggctgcagaccggcaacttcaggagcgacagtttctggacctaaacttgtttccagctgttgaagtagccagcactgggggttcactctccatcaatgagcctgtctcacacaggcagccccctcctacggtggctgccctgctttacgagaccacacaggtcatggtgtcatctgctgctgcagagtcaaacattggcatgaatagtttccccatcaacgtggaagtgattgatgatgatgttgtgatttatacctcagggccgccccctcaagctaggcaacagtcgtccaggacaggacctatcactgtgataatagatgatgattctgaaactactgctggaccagcaggggaaggtcttgatgagcatgtgaacactctgctgtctctggggatgaaccctaggcacaatccctcgagagcacaacccaacaccgaccttgtaataaacatagtagacacacctgaaaccaacagcataccgcccaaggtggcgcaggctgtccctgaacctgtgaaggagatcccaaaggaaacaaagttcagctgcccagtctgcatgaatgagctggtcaatgcatcatcgaccatctgcggccacatcttctgccagaaatgcatcaaggcctccattcaggctcagaagaagtgccctacctgccggaggaagctgaccatgagcaacttccaccgggtctacctcccgacggcagataattaaacctatccgcaatacttggagctttagagccgtggcagctgtgacccttttttggcactggcattgtggtgattgtatctgagctattcttcacagggtcatcatgaacattcagttttccccccaacaatttaacaagtgctcgagacgtgattaccaatctgcatacctggtggtagtggacactgttagtagtcttccttgtgggaaagtggaaacctgtgcttggtactgtgagattaatgcttgaaaatatttg

SEQ ID NO: 65835 - protein, 260 aa, Triticum aestivum
  peptide (1)..(260): Ceres Seq. ID no. 13656672
MSSAGSARVPKRRRTTKTSEAADRQLQERQFLDLNLFPAVEVASTGGSLSINEPVSHRQPPPTVAALLYETTQVMVSSAAAESNIGMNSFPINVEVIDDDVVIYTSGPPPQARQQSSRTGPITVIIDDDSETTAGPAGEGLDEHVNTLLSLGMNPRHNPSRAQPNTDLVINIVDTPETNSIPPKVAQAVPEPVKEIPKETKFSCPVCMNELVNASSTICGHIFCQKCIKASIQAQKKCPTCRRKLTMSNFHRVYLPTADN

SEQ ID NO: 65836 - protein, 186 aa, Triticum aestivum
  peptide (1)..(186): Ceres Seq. ID no. 13656673
MVSSAAAESNIGMNSFPINVEVIDDDVVIYTSGPPPQARQQSSRTGPITVIIDDDSETTAGPAGEGLDEHVNTLLSLGMNPRHNPSRAQPNTDLVINIVDTPETNSIPPKVAQAVPEPVKEIPKETKFSCPVCMNELVNASSTICGHIFCQKCIKASIQAQKKCPTCRRKLTMSNFHRVYLPTADN

SEQ ID NO: 65837 - protein, 174 aa, Triticum aestivum
  peptide (1)..(174): Ceres Seq. ID no. 13656674
MNSFPINVEVIDDDVVIYTSGPPPQARQQSSRTGPITVIIDDDSETTAGPAGEGLDEHVNTLLSLGMNPRHNPSRAQPNTDLVINIVDTPETNSIPPKVAQAVPEPVKEIPKETKFSCPVCMNELVNASSTICGHIFCQKCIKASIQAQKKCPTCRRKLTMSNFHRVYLPTADN

SEQ ID NO: 65838 - DNA, 2057 bp, Triticum aestivum
  misc_feature (1)..(2057): Ceres Seq. ID no. 15176081
aaactccacatttccggaggaggcgagccaaaaggacacacagcagccacaacccaattcctatttttttcctggccgccgccgccgcagcttttgtttgatttatatagcccacacacggggcagcgccgagcagagctcctcctccatcctcctctgcatctccgccctcggccacaggaaacagcggcaggcaggaagacacgcacgcacgcacgcacccatggctgcggacagcaagctgcagagcccgctgctgccgccgccggccggtagcgagggcggcggcgacgacgaggggcacggggcggccagcaagcggctggagagcatcctgagtgacgagtcggtgccgtgggcgcggcggatgtgcgcggcgacggcggtggagatgcggatgctggtgcggctggcggcgccggccgtgctggtgtacatgatcaactacctcatgtccatgtccacgcagatcttctccggccacctcggcacgctggagctcgccgccgcctccctcggcaacaccggcatccaggtcttcgcctacggcctcatgcttggcatggggagtgcggtggagactctatgtgggcaggcgtacggcgcgaacaagttcgacatgctgggcatctacatgcaacgttccactgtcctgctcatggccaccggcatcccgctcgccgtcctctacgcgttctcccgccccatcctcatcctcctcggcgagtcccccgagatagccagcgccgcggccatctgcgtgtacggcctcatcccgcagatctttgcctacgccgccaacttccccatccagaagttcatgcaggcgcagagcatcatggcgcccagcgcctacatctcaacggccacgctcgccgtccacctcgtcctcagctacctcgtcgtctacaagtttgggctggggcttctgggcgcctcgctcatgctcagcatcagctggtggattatcgtcattgggcagtttgtatacatcgtcaccagcagccggtgccgcctcacttggactggattctccctccaggcgttctccggcttgcctgagtttttcaagctgtcccttgcctccgctatcatgctctgcctcgagacttggtacttccagatactggtgctcattgctggcctcctcaaggaccccgaaatggctctcgcatcgctctctgtctgcatgaccatttcaggatgggtgttcatgatctcagttggattcaatgcagcagctagcgtgagggtgagcaatgagcttggagccggcaaccccaagtcagcggcgttctcggtggtggtggtgacggtgctgtcgttcatcttggcggcgataatctcgatagtcatcctgttcttccgtgactacatcagttacatttacacggggggcgacgatgtggcagcggcggtgtccaagctgacgcctctcctggcgatcaccctcatcctcaacggcatccagccagtattatcaggggtggccgtggggtgtgggtggcaagcgttcgtcgcctacgtcaacgtcggctgctactacgtcgtcggcatccctcttggctgcctcctcggcttctacttcgaccttggtgcggcgggcatatggagcggcatgattggaggcacctttatgcagaccgtgatcctggtgtgggttaccgtgaggaccgactggaacaaagaggtggccgaagcgaggaaaagattgaacaagtgggaaggcaacaagatgcctctattagcaggccaagaatgaaacggtggatcctgtatatgatcaacagaaatgtggttcgttcgcaagttgatctccctaaaatgtgtaaagtgcatttgttcatcgtgcaattcaccattgaaattccgtacttccgttctgctattccggcttcgcaagcacggtagcagcggcgatcttgtcatgttactactagctagtataacgggattctatggcgatgatagattagtgtgggtggatgagatcactttttgtgtgagatatcaatattgttggacagcggtcaataaaagttcatcctttggtcttc

SEQ ID NO: 65839 - protein, 586 aa, Triticum aestivum
  peptide (1)..(586): Ceres Seq. ID no. 15176082
NSTFPEEASQKDTQQPQPNSYFFPGRRRRSFCLIYIAHTRGSAEQSSSSILLCISALGHRKQRQAGRHARTHAPMAADSKLQSPLLPPPAGSEGGGDDEGHGAASKRLESILSDESVPWARRMCAATAVEMRMLVRLAAPAVLVYMINYLMSMSTQIFSGHLGTLELAAASLGNTGIQVFAYGLMLGMGSAVETLCGQAYGANKFDMLGIYMQRSTVLLMATGIPLAVLYAFSRPILILLGESPEIASAAAICVYGLIPQIFAYAANFPIQKFMQAQSIMAPSAYISTATLAVHLVLSYLVVYKFGLGLLGASLMLSISWWIIVIGQFVYIVTSSRCRLTWTGFSLQAFSGLPEFFKLSLASAIMLCLETWYFQILVLIAGLLKDPEMALASLSVCMTISGWVFMISVGFNAAASVRVSNELGAGNPKSAAFSVVVVTVLSFILAAIISIVILFFRDYISYIYTGGDDVAAAVSKLTPLLAITLILNGIQPVLSGVAVGCGWQAFVAYVNVGCYYVVGIPLGCLLGFYFDLGAAGIWSGMIGGTFMQTVILVWVTVRTDWNKEVAEARKRLNKWEGNKMPLLAGQE

SEQ ID NO: 65840 - protein, 512 aa, Triticum aestivum
  peptide (1)..(512): Ceres Seq. ID no. 15176083
MAADSKLQSPLLPPPAGSEGGGDDEGHGAASKRLESILSDESVPWARRMCAATAVEMRMLVRLAAPAVLVYMINYLMSMSTQIFSGHLGTLELAAASLGNTGIQVFAYGLMLGMGSAVETLCGQAYGANKFDMLGIYMQRSTVLLMATGIPLAVLYAFSRPILILLGESPEIASAAAICVYGLIPQIFAYAANFPIQKFMQAQSIMAPSAYISTATLAVHLVLSYLVVYKFGLGLLGASLMLSISWWIIVIGQFVYIVTSSRCRLTWTGFSLQAFSGLPEFFKLSLASAIMLCLETWYFQILVLIAGLLKDPEMALASLSVCMTISGWVFMISVGFNAAASVRVSNELGAGNPKSAAFSVVVVTVLSFILAAIISIVILFFRDYISYIYTGGDDVAAAVSKLTPLLAITLILNGIQPVLSGVAVGCGWQAFVAYVNVGCYYVVGIPLGCLLGFYFDLGAAGIWSGMIGGTFMQTVILVWVTVRTDWNKEVAEARKRLNKWEGNKMPLLAGQE

SEQ ID NO: 65841 - protein, 464 aa, Triticum aestivum
  peptide (1)..(464): Ceres Seq. ID no. 15176084
MCAATAVEMRMLVRLAAPAVLVYMINYLMSMSTQIFSGHLGTLELAAASLGNTGIQVFAYGLMLGMGSAVETLCGQAYGANKFDMLGIYMQRSTVLLMATGIPLAVLYAFSRPILILLGESPEIASAAAICVYGLIPQIFAYAANFPIQKFMQAQSIMAPSAYISTATLAVHLVLSYLVVYKFGLGLLGASLMLSISWWIIVIGQFVYIVTSSRCRLTWTGFSLQAFSGLPEFFKLSLASAIMLCLETWYFQILVLIAGLLKDPEMALASLSVCMTISGWVFMISVGFNAAASVRVSNELGAGNPKSAAFSVVVVTVLSFILAAIISIVILFFRDYISYIYTGGDDVAAAVSKLTPLLAITLILNGIQPVLSGVAVGCGWQAFVAYVNVGCYYVVGIPLGCLLGFYFDLGAAGIWSGMIGGTFMQTVILVWVTVRTDWNKEVAEARKRLNKWEGNKMPLLAGQE

SEQ ID NO: 65842 - DNA, 1258 bp, Triticum aestivum
  misc_feature (1)..(1258): Ceres Seq. ID no. 13656983
aacctcgcaacgcaccagcgccaagtacatccattggccacccacccaccccacacacgacctccacccccactacactccactccgcgagtagctagctagcaagagagtcccagctgccactgctcctctcctagaggcactcaggcgagctactctgcctgcggcggcctgccggcgcgcggggagggggagttggccggccagtgggggcgcgtgaggacaatgcatggcatgtgttaacatgtacaacccggagcaccaccagtcgtccttcatggcgccgcggatgtccttctccagcgacttcgcgctggagccgccgcccgcgtcggcgccgtcggcgcgcgggcccggggacgccgacttcgagttctccgtcggcagccgccccatgatggccgccgacgagctcttctccaagggccgcctcctgccgctccgggaggccccgcacggccagagcggccggcccacgacgctgcgcgaggagctgcgcaccgacgaccgccacgggcgcgcgccccgcgcgcccaacatccggtggaaggagctgctcggcttcaagaaggcgaacaagaaggccgcggccgcagccgccgacgccggcgccagcacgtcgtcggccgaggccgcagccgccgacgccggcgccagcacgtcgtcggccgaggcccacacggatcttggaggtcacggaggcacgagagagtgaagcagcgagcgctcattcaccaaacgagacgggggcatggttaggcaactagtttgtgtgattgggtggtgatttgcctttcagcttcacgtccatcacctacccgcggtgaagatggatctgccaggaacccaacatccatcagcgcttcattggagaagcagcaagcaaattgaagctgtagctagctctggaggccatgcatgcatgaatgtgcatttcattttactgcctgctgcttgttaccctttttttgttattattattattatttcggtgtagtaaaagggaatttttgctcctgctttagctcttggtctggtcgtcgacgggtggttccattgcatcgcatgtagatgtagtagtagtggtcaaggtaactcctctctagtctctagtctctagtctctagtctaggtgtggctctgaatgttttgtatcggaggaaggggccagttaaatgcagtagcagtatttacaaaaaaaaaaaaaaaaaagcttatcgataccgtcgacctccgagggggggggcccgggtaccca

SEQ ID NO: 65843 - protein, 161 aa, Triticum aestivum
  peptide (1)..(161): Ceres Seq. ID no. 15219857
MACVNMYNPEHHQSSFMAPRMSFSSDFALEPPPASAPSARGPGDADFEFSVGSRPMMAADELFSKGRLLPLREAPHGQSGRPTTLREELRTDDRHGRAPRAPNIRWKELLGFKKANKKAAAAAADAGASTSSAEAAAADAGASTSSAEAHTDLGGHGGTRE

SEQ ID NO: 65844 - protein, 156 aa, Triticum aestivum
  peptide (1)..(156): Ceres Seq. ID no. 15219858
MYNPEHHQSSFMAPRMSFSSDFALEPPPASAPSARGPGDADFEFSVGSRPMMAADELFSKGRLLPLREAPHGQSGRPTTLREELRTDDRHGRAPRAPNIRWKELLGFKKANKKAAAAAADAGASTSSAEAAAADAGASTSSAEAHTDLGGHGGTRE

SEQ ID NO: 65845 - protein, 145 aa, Triticum aestivum
  peptide (1)..(145): Ceres Seq. ID no. 15219859
MAPRMSFSSDFALEPPPASAPSARGPGDADFEFSVGSRPMMAADELFSKGRLLPLREAPHGQSGRPTTLREELRTDDRHGRAPRAPNIRWKELLGFKKANKKAAAAAADAGASTSSAEAAAADAGASTSSAEAHTDLGGHGGTRE

SEQ ID NO: 65846 - DNA, 633 bp, Triticum aestivum
  misc_feature (1)..(633): Ceres Seq. ID no. 12618740
cctcattcctcagccaccacaccgatctagggtttcctgctagggttttagtccttcgtttccagcggcggctacggcagcggtggcggcagctacggcggcggtggcggctatggaggtggtggcggcggcggccgctacggaggaggcggcggcggcggccgtgagtgctacaagtgcggcgaggagggccacatctccagggactgcccccagggcggcggcggcggtggcggtggctacggaggtggtggcggccgtggcggtggtggtggcggtggcggctgcttctcctgcggcgagtccggccacttctcgcgcgagtgccccaacaagaccaactagacggctttgcccgtcagatctgagtgccccgttccccttcgctccttttcctaccgcctgactctgcagcaagtcatacctatacctatcagtattagtatatgtcgccgtagtgttccccgtgcttctcgtaggaagaagaatcgacgatgcgagcttggttccanaagtattgttggtggcgtgttgttcgtttgaagttatcttgtgtcgtctgatggggacagaccttatatctttatgtattggattgaatggactaagttatgcaagtcaagttatgctgcc

SEQ ID NO: 65847 - protein, 97 aa, Triticum aestivum
  peptide (1)..(97): Ceres Seq. ID no. 12618741
MEVVAAAAATEEAAAAAVSATSAARRATSPGTAPRAAAAVAVATEVVAAVAVVVAVAAASPAASPATSRASAPTRPTRRLCPSDLSAPFPFAPFPTA

SEQ ID NO: 65848 - protein, 54 aa, Triticum aestivum
  peptide (1)..(54): Ceres Seq. ID no. 12618742
SFLSHHTDLGFPARVLVLRFQRRLRQRWRQLRRRWRLWRWWRRRPLRRRRRRRP

SEQ ID NO: 65849 - DNA, 1964 bp, Triticum aestivum
  misc_feature (1)..(1964): Ceres Seq. ID no. 14308019
accctcttacaacacatcaacctgaaacctgcactgcacagtccagaatactccaagaaaaaaagttagagcttttagtttgagaaccaataaatggtggacctgtccatgatcgacatggaatggctccaagagccattgagatggctgttcgttgcctcggtcatcttcgtgttgctgcagcggcggcgtggcaaggcgccgccgctgcccccaggaccgtattcgccgccgattgtcggcaatatcttcatgatggaccagctgacccaccggggcttcgcggggctggccaagcagtacggcggccttctccacctccgcctcggcaaggtccacaccttcgccgtatcgacgccggagtacgcccagcaggtgctgcaggcccaggacgccgccttctcgcaccggcctgccaccatcgccaccacctacctcacctacaaccgcgccgacatggtgttcgcccgctacgggcccttctggcgccagatgcgcaagctgtgcgtgatgaagctcttcagccggcgccgtcccgggacgtggctcgccgtgcgcgacgagtccgcggcgctcgtccgtgccgtggcccggcggagcggcgagcctgtcaacctcggcgacctcatcttcaacctcagcatgaacgtcaccttccgcgcggcgttcggcgctgaagccgccggtgacggcaatggccggaagcgggacgagttcatcgctatcatgcaggagttctccaagctcttcggcgcgttcagcatcggcgacttcatcccatggctgggatgggcggacccgcagggcatcagcgtgcgcctccgagctgcgggcgcagccctagacgatttcatggtcaagatcatggacgagcacataaagaggggcaagaaccctgacgacatggacgccgacatggtagacgccatgctcgcctacctccctgaagcgaagccggagaaggccgctggcgacgacctgcagcacacgctccgcctcaaccgtgacaacatcaaggccattatcatggacgtgatgtttggtgggacggagacggtgtcgtcggcaatagaatgggcaatggccgaaatgatgcatagcccagatgacctcttgcagctgcagcaggagtttgccgataaggtgggactcgaccgaaacgtggacgaggcagacctcaacaacctctccttcctcaaatgtgttatcaaggagacactccggttacacccgcccatcccgctcctccaccgtgagaacgccgaggactgtgtggttggcaactactctgtgccccagggctcgagcgtcaatatcaatgtcttcgcaatgggccgcgacgacagggtgtggaaggacgccgacacattccgtccgtcacggttcatgatgggtgaaggggaggcagccggggtcgacttcaagggcgggtgcttccagttcctgccgtttgggtctggtcgtcgctcgtgcccggggatggcgctcggcctgtactcgctggagctcgttattgcgcggctcgcccatgggttcaactgggcgctgcccgacggtaagaagccgtcggagctcgacatgggtgacattttcggcctcaccgcaccgcgtgccacaaggctctgggtcgtgcccacgccccgacttacctgccctttggttgttgatgtcgacgccgcgtgccagacatgatgtcgtgcgcgcacagctgatggtatctaccagctgcgcaggggtgaaggtgtttgattagcgtgttagttaatctagttgtagctatagctatttcccctttcgtgttagatatttcctagtttcgttcatacaagatcgcacccctataaatcggttgccttgcatgtggaatagcacgacctgttgttggcatcgtggagctgtgggtcacgatcgttcctttcatcatgaataaaaaggagagccctacttcagtgctcccctaacgc

SEQ ID NO: 65850 - protein, 532 aa, Triticum aestivum
  peptide (1)..(532): Ceres Seq. ID no. 14308020
MVDLSMIDMEWLQEPLRWLFVASVIFVLLQRRRGKAPPLPPGPYSPPIVGNIFMMDQLTHRGFAGLAKQYGGLLHLRLGKVHTFAVSTPEYAQQVLQAQDAAFSHRPATIATTYLTYNRADMVFARYGPFWRQMRKLCVMKLFSRRRPGTWLAVRDESAALVRAVARRSGEPVNLGDLIFNLSMNVTFRAAFGAEAAGDGNGRKRDEFIAIMQEFSKLFGAFSIGDFIPWLGWADPQGISVRLRAAGAALDDFMVKIMDEHIKRGKNPDDMDADMVDAMLAYLPEAKPEKAAGDDLQHTLRLNRDNIKAIIMDVMFGGTETVSSAIEWAMAEMMHSPDDLLQLQQEFADKVGLDRNVDEADLNNLSFLKCVIKETLRLHPPIPLLHRENAEDCVVGNYSVPQGSSVNINVFAMGRDDRVWKDADTFRPSRFMMGEGEAAGVDFKGGCFQFLPFGSGRRSCPGMALGLYSLELVIARLAHGFNWALPDGKKPSELDMGDIFGLTAPRATRLWVVPTPRLTCPLVVDVDAACQT

SEQ ID NO: 65851 - protein, 527 aa, Triticum aestivum
  peptide (1)..(527): Ceres Seq. ID no. 14308021
MIDMEWLQEPLRWLFVASVIFVLLQRRRGKAPPLPPGPYSPPIVGNIFMMDQLTHRGFAGLAKQYGGLLHLRLGKVHTFAVSTPEYAQQVLQAQDAAFSHRPATIATTYLTYNRADMVFARYGPFWRQMRKLCVMKLFSRRRPGTWLAVRDESAALVRAVARRSGEPVNLGDLIFNLSMNVTFRAAFGAEAAGDGNGRKRDEFIAIMQEFSKLFGAFSIGDFIPWLGWADPQGISVRLRAAGAALDDFMVKIMDEHIKRGKNPDDMDADMVDAMLAYLPEAKPEKAAGDDLQHTLRLNRDNIKAIIMDVMFGGTETVSSAIEWAMAEMMHSPDDLLQLQQEFADKVGLDRNVDEADLNNLSFLKCVIKETLRLHPPIPLLHRENAEDCVVGNYSVPQGSSVNINVFAMGRDDRVWKDADTFRPSRFMMGEGEAAGVDFKGGCFQFLPFGSGRRSCPGMALGLYSLELVIARLAHGFNWALPDGKKPSELDMGDIFGLTAPRATRLWVVPTPRLTCPLVVDVDAACQT

SEQ ID NO: 65852 - protein, 524 aa, Triticum aestivum
  peptide (1)..(524): Ceres Seq. ID no. 14308022
MEWLQEPLRWLFVASVIFVLLQRRRGKAPPLPPGPYSPPIVGNIFMMDQLTHRGFAGLAKQYGGLLHLRLGKVHTFAVSTPEYAQQVLQAQDAAFSHRPATIATTYLTYNRADMVFARYGPFWRQMRKLCVMKLFSRRRPGTWLAVRDESAALVRAVARRSGEPVNLGDLIFNLSMNVTFRAAFGAEAAGDGNGRKRDEFIAIMQEFSKLFGAFSIGDFIPWLGWADPQGISVRLRAAGAALDDFMVKIMDEHIKRGKNPDDMDADMVDAMLAYLPEAKPEKAAGDDLQHTLRLNRDNIKAIIMDVMFGGTETVSSAIEWAMAEMMHSPDDLLQLQQEFADKVGLDRNVDEADLNNLSFLKCVIKETLRLHPPIPLLHRENAEDCVVGNYSVPQGSSVNINVFAMGRDDRVWKDADTFRPSRFMMGEGEAAGVDFKGGCFQFLPFGSGRRSCPGMALGLYSLELVIARLAHGFNWALPDGKKPSELDMGDIFGLTAPRATRLWVVPTPRLTCPLVVDVDAACQT

SEQ ID NO: 65853 - DNA, 2073 bp, Triticum aestivum
  misc_feature (1)..(2073): Ceres Seq. ID no. 13656435
agaacatcctaatcgaaaaatagctcactctcactaccaccctcgccactcaccagctcgactccaccccactccactcgagccacgcgcacgcggagctgggccgtacagtacgtgagcccgtgagcgagcagggtacggactaaatgccgcacccgtcgtcgtcgtcttcctcggycagtgtggacgcggccgccaagggcgtcaagctggagcggtacgccagcggcggcggcgcgctgctgatgcggcgcgcggggagctccaagatcgtggcggcctcctcgcacctcctcttccgcgccaccgtcctcgccacgctcgcgctcgtctgcctcttcgccgtgcactacccttccctcctgtcccgctccttccggctctccgccgccgccgctgcttcctcctcttcttccccgccgcggcagacgtcgcggcaccggaacctgctcgggtcgtcgtcggcgtacgcgggcgccgcgtgggagcgggaggtgcggcgaagcgccacgccgcggcgggacggggggatgtcggtgctggtcacgggcgccgcggggttcgttggcgcgcactgcgcgctggcgctcagggcgcgcggcgacggcgtgctcggcctcgacaacttcaacgcgtactacgagccgggcctgaaacscscctscvgttccarctttattgtgytkctcagcgtcgcgcggggtggtggtgctcggcgccgacatcaacgacgcggccctgctcgagcggctcttcgccgccgtgcccttcacgcacgtgctgcacctcgccgcgcaggccggcgtgcggtacgcgatgcgggcgccgcagacgtacgtggcctccaacgtcgctggcctcgtcagcgtcttcgaggccgccgcccggcacgccgacccgcagccggcgatcgtgtgggcgtcgtcgtcgtcggtgtacgggctcaataccgacgcgccattctccgaggaccaccgcacggaccgaccggcgtcgctgtacgcggccaccaagaaggccggcgaggccatcgcgcacgcgtacaaccacatctacggtctctcgatcaccggcctccggttcttcacggtgtacggtccgtggggtcgccccgacatggcctacttctccttcgctcgcagcatcgtcgccggcgagcccatcacgctcttccgcgccgccgacggcacagacgtccgccgcgacttcacctacatcgacgacgtcgttaaggggtgcctcggctcgctcgacacggccggcaagagcacgggctccaagtccggcaagtagcgcgggccagcgcccctccgcgtctacaacctcggcaacacctcgccggtgcccgtcacccgcatggtggccatcctcgagaagctcctcggcaagaaagcgaacaagcgcgtcgtcaccatgcctagcaacggcgacgtgccgttcacgcacgccaatgtcagccacgccgcgcgcgacttcgggtaccaccccaccacctccctcgacgccggcctgcggaaattcgtcgaatggttcctccagtactacaagatcgaccccgcgaagctcgccaagggcagcagagtcggtaccaagactaccaagaagaaatccatgggcgccatatccgcggcatcgtgaggagagcgcgcgcgccgcgtgcgtcccggcccggatgtccagtccaccaagtgtgcaatctgttctcctcggaggctggcggttgtgttgcacaactttgtgagtgcatccccattgtttaagccattgccggtgcttttcccccttgatgatgcaaccatgctagagctcggtgggaagggaatcgtggaggtggcaaggcaaaggagaagcgattctttcttcgtagcataagcaaaaccaaactattttagggaaaaggggtggggggtataggtaagatgacatgagccgtggaaaggagcgaggaggacacgataaagatgaagtcctgggcttccttttgggacggttcaggttgtttttgcttagtttcatttttgttttgtcgtcactatcttgttcttgctcatttggttaatttgtcttgtgttt

SEQ ID NO: 65854 - protein, 361 aa, Triticum aestivum
  peptide (1)..(361): Ceres Seq. ID no. 15219220
  misc_feature (11)..(11): Xaa is any aa, unknown or other
  misc_feature (171)..(171): Xaa is any aa, unknown or other
  misc_feature (172)..(172): Xaa is any aa, unknown or other
  misc_feature (173)..(173): Xaa is any aa, unknown or other
  misc_feature (174)..(174): Xaa is any aa, unknown or other
  misc_feature (176)..(176): Xaa is any aa, unknown or other
  misc_feature (180)..(180): Xaa is any aa, unknown or other
MPHPSSSSSSXSVDAAAKGVKLERYASGGGALLMRRAGSSKIVAASSHLLFRATVLATLALVCLFAVHYPSLLSRSFRLSAAAAASSSSSPPRQTSRHRNLLGSSSAYAGAAWEREVRRSATPRRDGGMSVLVTGAAGFVGAHCALALRARGDGVLGLDNFNAYYEPGLKXXXXSXFIVXLSVARGGGARRRHQRRGPARAALRRRALHARAAPRRAGRRAVRDAGAADVRGLQRRWPRQRLRGRRPARRPAAGDRVGVVVVGVRAQYRRAILRGPPHGPTGVAVRGHQEGRRGHRARVQPHLRSLDHRPPVLHGVRSVGSPRHGLLLLRSQHRRRRAHHALPRRRRHRRPPRLHLHRRRR

SEQ ID NO: 65855 - protein, 328 aa, Triticum aestivum
  peptide (1)..(328): Ceres Seq. ID no. 15219221
  misc_feature (138)..(138): Xaa is any aa, unknown or other
  misc_feature (139)..(139): Xaa is any aa, unknown or other
  misc_feature (140)..(140): Xaa is any aa, unknown or other
  misc_feature (141)..(141): Xaa is any aa, unknown or other
  misc_feature (143)..(143): Xaa is any aa, unknown or other
  misc_feature (147)..(147): Xaa is any aa, unknown or other
MRRAGSSKIVAASSHLLFRATVLATLALVCLFAVHYPSLLSRSFRLSAAAAASSSSSPPRQTSRHRNLLGSSSAYAGAAWEREVRRSATPRRDGGMSVLVTGAAGFVGAHCALALRARGDGVLGLDNFNAYYEPGLKXXXXSXFIVXLSVARGGGARRRHQRRGPARAALRRRALHARAAPRRAGRRAVRDAGAADVRGLQRRWPRQRLRGRRPARRPAAGDRVGVVVVGVRAQYRRAILRGPPHGPTGVAVRGHQEGRRGHRARVQPHLRSLDHRPPVLHGVRSVGSPRHGLLLLRSQHRRRRAHHALPRRRRHRRPPRLHLHRRRR

SEQ ID NO: 65856 - protein, 233 aa, Triticum aestivum
  peptide (1)..(233): Ceres Seq. ID no. 15219222
  misc_feature (43)..(43): Xaa is any aa, unknown or other
  misc_feature (44)..(44): Xaa is any aa, unknown or other
  misc_feature (45)..(45): Xaa is any aa, unknown or other
  misc_feature (46)..(46): Xaa is any aa, unknown or other
  misc_feature (48)..(48): Xaa is any aa, unknown or other
  misc_feature (52)..(52): Xaa is any aa, unknown or other
MSVLVTGAAGFVGAHCALALRARGDGVLGLDNFNAYYEPGLKXXXXSXFIVXLSVARGGGARRRHQRRGPARAALRRRALHARAAPRRAGRRAVRDAGAADVRGLQRRWPRQRLRGRRPARRPAAGDRVGVVVVGVRAQYRRAILRGPPHGPTGVAVRGHQEGRRGHRARVQPHLRSLDHRPPVLHGVRSVGSPRHGLLLLRSQHRRRRAHHALPRRRRHRRPPRLHLHRRRR

SEQ ID NO: 65857 - DNA, 691 bp, Triticum aestivum
  misc_feature (1)..(691): Ceres Seq. ID no. 13656456
ccatgctctcacagttcttcctaagtattagttccatcaaatatgaccatgataaaatgccccaaatcaaccgtgccgtggctcatgtaactgatagcatcttgggcacgaggaacccggaaatcaccatccgcaatctcaaaatcagattcattttgatggatcgtgactctctcaccattggaagatctgtcgcccacgccatgtcaacccagaaggttgaagcagctgagtttgagattataacggagaaggcttataggaactgcactcctgccgatctccgccagaatgctaagctgttcaataattttgttggtgcttgtccggatgcatttgctggcctcaggcgcctgtggctgcgtaatatgaggttcggtgaacaggacatcccaaacatcctcagcacttgcaagctcttggagtctttgcgtttaatccattgcgactcagggatccattctgtgctgcaagtagaacatgctcaacttattgagctcgaggttgaccttgggaaatttgagagagttgagttgatatgtctacccaaactccaacgggtgagctataataattggtgctcttctgaacatcctgtgtattttggtcttgtaccacagctttcaagactgagcctcactaaagttggcgtcagttctgataagattcttgagttaagtcagcttcttgc

SEQ ID NO: 65858 - protein, 229 aa, Triticum aestivum
  peptide (1)..(229): Ceres Seq. ID no. 13656457
MLSQFFLSISSIKYDHDKMPQINRAVAHVTDSILGTRNPEITIRNLKIRFILMDRDSLTIGRSVAHAMSTQKVEAAEFEIITEKAYRNCTPADLRQNAKLFNNFVGACPDAFAGLRRLWLRNMRFGEQDIPNILSTCKLLESLRLIHCDSGIHSVLQVEHAQLIELEVDLGKFERVELICLPKLQRVSYNNWCSSEHPVYFGLVPQLSRLSLTKVGVSSDKILELSQLL

SEQ ID NO: 65859 - protein, 211 aa, Triticum aestivum
  peptide (1)..(211): Ceres Seq. ID no. 13656458
MPQINRAVAHVTDSILGTRNPEITIRNLKIRFILMDRDSLTIGRSVAHAMSTQKVEAAEFEIITEKAYRNCTPADLRQNAKLFNNFVGACPDAFAGLRRLWLRNMRFGEQDIPNILSTCKLLESLRLIHCDSGIHSVLQVEHAQLIELEVDLGKFERVELICLPKLQRVSYNNWCSSEHPVYFGLVPQLSRLSLTKVGVSSDKILELSQLL

SEQ ID NO: 65860 - protein, 177 aa, Triticum aestivum
  peptide (1)..(177): Ceres Seq. ID no. 13656459
MDRDSLTIGRSVAHAMSTQKVEAAEFEIITEKAYRNCTPADLRQNAKLFNNFVGACPDAFAGLRRLWLRNMRFGEQDIPNILSTCKLLESLRLIHCDSGIHSVLQVEHAQLIELEVDLGKFERVELICLPKLQRVSYNNWCSSEHPVYFGLVPQLSRLSLTKVGVSSDKILELSQLL

SEQ ID NO: 65861 - DNA, 1120 bp, Triticum aestivum
  misc_feature (1)..(1120): Ceres Seq. ID no. 13656460
atcaggtaaacacacaaccatacacaaggcgcacggttgcaaaacaagggagttatttagaagcaaggagtaaggaaccacctgaagccatgtgtatcgctgcatggatttggcaggctcaccctcagcaccagctcctgctgctgctcaacagagatgagttccatagcaggcctacaaaggcagtaggatggtggggggagggctcaatgaagattcttggtggcagggatgtacttggtggaggaacatggatggggagcaccaaagatggcagacttgccttcctgaccaatgtgctcgagcctgatgtgatgcctggcgcacgcactaggggagacctgcccctcaggttcctgcagggcaacaagagcccactggaggttgcaactgaagtcgcaaaagaagctgatgagtacaatggcttcaaccttatactagctgatctaaccaggaatgtcatggtttatgtgtcaaaccggccaaaggggcagcctgcgacgattcagctcgtctcaccaggactccatgtgttgtccaatgcaaggctagacagcccttggcagaaagcaattcgccttggtaaaaacttcagggagtttataaggaagcatggtgatgatgaagttgaagcgaaggatatagctgatagactaatgactgacaccacgagggctgataaagataggctgccaaacaccggttgtgatcccaactgggagcacggtctgagctccatcttcatcgaggtgcaaactgacgaagggctctatggtacaaggagcacagcagttctttcagtgaactatgatggagaagctagcttatatgagaagtacctcgagagtggtatatggaagaaccacacagtgcattaccagatagaattgccaatgcgcacctaaaggcaggagcctcaaataggaagaaagaatgaatagctaccattgtgcatgctgttatttccacagttgcgctttaagatcacataatgatctctaattatggcaattaaattatttactgtatgcggatctataaattcagagacagatcaagtcaaattgttgaatatatatacataataataatatgatatagtatgtttatttacagactt

SEQ ID NO: 65862 - protein, 300 aa, Triticum aestivum
  peptide (1)..(300): Ceres Seq. ID no. 13656461
QVNTQPYTRRTVAKQGSYLEARSKEPPEAMCIAAWIWQAHPQHQLLLLLNRDEFHSRPTKAVGWWGEGSMKILGGRDVLGGGTWMGSTKDGRLAFLTNVLEPDVMPGARTRGDLPLRFLQGNKSPLEVATEVAKEADEYNGFNLILADLTRNVMVYVSNRPKGQPATIQLVSPGLHVLSNARLDSPWQKAIRLGKNFREFIRKHGDDEVEAKDIADRLMTDTTRADKDRLPNTGCDPNWEHGLSSIFIEVQTDEGLYGTRSTAVLSVNYDGEASLYEKYLESGIWKNHTVHYQIELPMRT

SEQ ID NO: 65863 - protein, 271 aa, Triticum aestivum
  peptide (1)..(271): Ceres Seq. ID no. 13656462
MCIAAWIWQAHPQHQLLLLLNRDEFHSRPTKAVGWWGEGSMKILGGRDVLGGGTWMGSTKDGRLAFLTNVLEPDVMPGARTRGDLPLRFLQGNKSPLEVATEVAKEADEYNGFNLILADLTRNVMVYVSNRPKGQPATIQLVSPGLHVLSNARLDSPWQKAIRLGKNFREFIRKHGDDEVEAKDIADRLMTDTTRADKDRLPNTGCDPNWEHGLSSIFIEVQTDEGLYGTRSTAVLSVNYDGEASLYEKYLESGIWKNHTVHYQIELPMRT

SEQ ID NO: 65864 - protein, 231 aa, Triticum aestivum
  peptide (1)..(231): Ceres Seq. ID no. 13656463
MKILGGRDVLGGGTWMGSTKDGRLAFLTNVLEPDVMPGARTRGDLPLRFLQGNKSPLEVATEVAKEADEYNGFNLILADLTRNVMVYVSNRPKGQPATIQLVSPGLHVLSNARLDSPWQKAIRLGKNFREFIRKHGDDEVEAKDIADRLMTDTTRADKDRLPNTGCDPNWEHGLSSIFIEVQTDEGLYGTRSTAVLSVNYDGEASLYEKYLESGIWKNHTVHYQIELPMRT

SEQ ID NO: 65865 - DNA, 1376 bp, Triticum aestivum
  misc_feature (1)..(1376): Ceres Seq. ID no. 14308023
acggctgggtttcagtgagatagaacctttgatcacacgccttaccagtctcttgtggcatggcggccctgcagcttgccgccctccttgccctgctgctcgcactgtggcgtctcgtgtggcggccgcgcgccatggcgcggtcgttcgtgaggcaggggatccgagggccgccctacacgttcctggccgggtccttgccggaggcgaagcggctgctgatcgctggccggagaggcgtgccgcccctcgacgccgggtgccacgacatcatgcccatcctgctgccgcagttccacagatgggttgccgattatggcaaaacgttcctgttctggatcgggctgatccccgccatcttctctatcgacctgcagctgataaagcaagtgctcacagacatgacgggcctgtatcagaaggacttcatgatccccgtgctcaaatccctcttcggcaacggcgtcatattgataaatggtgacgattggaagcggcaccggaaagtagtccttcctgctttcaactatgagcagatcaagagcatgtcagcggtgacggcagaggtcacaaggcagatgatacagcaatggggcgagcagatacaccaaagcaacagcgacaagaaagcagctgagatagacatgatccacgccttcaacgacctgactgccaagatcaacggccgtgtcgccttcggcactacccaccgggatgtcgaggaggtcatcgtcttgatgcaggagatgcaaaaggtcgccactgcggccatgctcgatgctccaatactctggtatctgccgactcggcgtaacttgcacgttcgacgcctgaacaaacagctgagaagcaagatcatgtcgatcatgcaggcacggctggccgcagatggagccaaatatggtcgaggagacaccggcggctgcggggacgacctgctcgggctgttgttagaggcgtggacaccgcaccggcaagtgaggggcggcgatacgctgacaactgacgaggtgattgatgagtgcaaaaccttcttcgccgcagggcaggaaaccacggccaccctcctcgtctgggccatgttcctgcttgccgtgcacccccagtggcaggacaaggtcagggaagaggtcctccgggagttccccggcggggacagcgacgatgtggtacccaacgcggatgttctcgccaaactgaagctggtgcgtacatttcaactgtcaatgtcatttttcctatattttcgtacgaatgtattcggtatcataaatgctcatattgtttctataaagttgatcaaagtttacaaaatttaactgttgagattttttgtatgtagtgtaattttgcaaagagggaataactaatgtgtt

SEQ ID NO: 65866 - protein, 419 aa, Triticum aestivum
  peptide (1)..(419): Ceres Seq. ID no. 14308024
MAALQLAALLALLLALWRLVWRPRAMARSFVRQGIRGPPYTFLAGSLPEAKRLLIAGRRGVPPLDAGCHDIMPILLPQFHRWVADYGKTFLFWIGLIPAIFSIDLQLIKQVLTDMTGLYQKDFMIPVLKSLFGNGVILINGDDWKRHRKVVLPAFNYEQIKSMSAVTAEVTRQMIQQWGEQIHQSNSDKKAAEIDMIHAFNDLTAKINGRVAFGTTHRDVEEVIVLMQEMQKVATAAMLDAPILWYLPTRRNLHVRRLNKQLRSKIMSIMQARLAADGAKYGRGDTGGCGDDLLGLLLEAWTPHRQVRGGDTLTTDEVIDECKTFFAAGQETTATLLVWAMFLLAVHPQWQDKVREEVLREFPGGDSDDVVPNADVLAKLKLVRTFQLSMSFFLYFRTNVFGIINAHIVSIKLIKVYKI

SEQ ID NO: 65867 - protein, 394 aa, Triticum aestivum
  peptide (1)..(394): Ceres Seq. ID no. 14308025
MARSFVRQGIRGPPYTFLAGSLPEAKRLLIAGRRGVPPLDAGCHDIMPILLPQFHRWVADYGKTFLFWIGLIPAIFSIDLQLIKQVLTDMTGLYQKDFMIPVLKSLFGNGVILINGDDWKRHRKVVLPAFNYEQIKSMSAVTAEVTRQMIQQWGEQIHQSNSDKKAAEIDMIHAFNDLTAKINGRVAFGTTHRDVEEVIVLMQEMQKVATAAMLDAPILWYLPTRRNLHVRRLNKQLRSKIMSIMQARLAADGAKYGRGDTGGCGDDLLGLLLEAWTPHRQVRGGDTLTTDEVIDECKTFFAAGQETTATLLVWAMFLLAVHPQWQDKVREEVLREFPGGDSDDVVPNADVLAKLKLVRTFQLSMSFFLYFRTNVFGIINAHIVSIKLIKVYKI

SEQ ID NO: 65868 - protein, 348 aa, Triticum aestivum
  peptide (1)..(348): Ceres Seq. ID no. 14308026
MPILLPQFHRWVADYGKTFLFWIGLIPAIFSIDLQLIKQVLTDMTGLYQKDFMIPVLKSLFGNGVILINGDDWKRHRKVVLPAFNYEQIKSMSAVTAEVTRQMIQQWGEQIHQSNSDKKAAEIDMIHAFNDLTAKINGRVAFGTTHRDVEEVIVLMQEMQKVATAAMLDAPILWYLPTRRNLHVRRLNKQLRSKIMSIMQARLAADGAKYGRGDTGGCGDDLLGLLLEAWTPHRQVRGGDTLTTDEVIDECKTFFAAGQETTATLLVWAMFLLAVHPQWQDKVREEVLREFPGGDSDDVVPNADVLAKLKLVRTFQLSMSFFLYFRTNVFGIINAHIVSIKLIKVYKI

SEQ ID NO: 65869 - DNA, 848 bp, Triticum aestivum
  misc_feature (1)..(848): Ceres Seq. ID no. 12626306
cggtctcaccccaaacccattgtgcatctccatccccacctcctccgatcccatccacccccaccctcaccgccaccaagtcaaagatccaaccttcactccaccaccatgacgaagccatcgccatccccatcgccggcgccggccaagggcgcggggtcgctgcggggcagccagctgaagcagctgcgctccctcttcgaccgcttcgacatggacggcgacggcagcctcacccagctcgagctggcggccctgctccgctccctcggcctgcgccccacgggcgacgagtcgcgggccctcctcctcgccatcgacgccgacggcagcggcaccgtggagttcgacgagctggcgcgggccatcgcgccggtgctcaccgcccacgcgccgcggctcgtcgaccaggcgcagctgctcgaggtcttccgcgccttcgaccgcgacggcaacggctacatctccgccgccgagctcgcgcgttccatggccaagctgggccagccgctcacgttcgaggagctgcggaccatgatgcgggacgcggacgcggatggggacggcgtgattagctttggggagttcgccgccgtcatggccaggtccgcgctcgacttcctcggcgtccccgccgcctgagatgtgagatgatgaccggccgggctccggctggctctgatcggatggactggtagtatgattcttcttctttggtagaactagtcgtagtagggtggttcaaggcccggactggatcaactgtgacgaactcacacggagttgcaacgttgacctggaatgtgtataaattttggtaatttggtcaatcgatgcgtccgctgctg

SEQ ID NO: 65870 - protein, 213 aa, Triticum aestivum
  peptide (1)..(213): Ceres Seq. ID no. 12626307
RSHPKPIVHLHPHLLRSHPPPPSPPPSQRSNLHSTTMTKPSPSPSPAPAKGAGSLRGSQLKQLRSLFDRFDMDGDGSLTQLELAALLRSLGLRPTGDESRALLLAIDADGSGTVEFDELARAIAPVLTAHAPRLVDQAQLLEVFRAFDRDGNGYISAAELARSMAKLGQPLTFEELRTMMRDADADGDGVISFGEFAAVMARSALDFLGVPAA

SEQ ID NO: 65871 - protein, 190 aa, Triticum aestivum
  peptide (1)..(190): Ceres Seq. ID no. 12626308
VSPQTHCASPSPPPPIPSTPTLTATKSKIQPSLHHHDEAIAIPIAGAGQGRGVAAGQPAEAAALPLRPLRHGRRRQPHPARAGGPAPLPRPAPHGRRVAGPPPRHRRRRQRHRGVRRAGAGHRAGAHRPRAAARRPGAAARGLPRLRPRRQRLHLRRRARAFHGQAGPAAHVRGAADHDAGRGRGWGRRD

SEQ ID NO: 65872 - protein, 177 aa, Triticum aestivum
  peptide (1)..(177): Ceres Seq. ID no. 12626309
MTKPSPSPSPAPAKGAGSLRGSQLKQLRSLFDRFDMDGDGSLTQLELAALLRSLGLRPTGDESRALLLAIDADGSGTVEFDELARAIAPVLTAHAPRLVDQAQLLEVFRAFDRDGNGYISAAELARSMAKLGQPLTFEELRTMMRDADADGDGVISFGEFAAVMARSALDFLGVPAA

SEQ ID NO: 65873 - DNA, 1161 bp, Triticum aestivum
  misc_feature (1)..(1161): Ceres Seq. ID no. 12598265
agacacgagcggagcaccgagcaggcgcgcagcacatcatctgtcacaccggcggcggcggcggcatggggatgggcggtcgaggtgtggttggcgacaggtggtcgcagcgcgtcctctggatgtgcgccatcggcagcgccgtgagcctgtacttcgtggcggtggagaggcaggcgcagaaccgcgcgcgggcggtgtccgagggctttaagggcctggacggcgcagacggaggtggcagccgtggcggggaggacgtgtgactttggcggcgccgattccactaggttttccagctctcccgcacccgccgccgccacctccccactccccaccaccccctcagccatggcggtcgtcgagccggtgcccgggggcgacgtgaagctattcaaccgctggaccttcgaggatgttcaggtgagcgacatctcgctgaacgactacctcgcggtgacgtcgatgaagcactacaccttcctgccgcactcggccggccgctactcggccaagcgcttccgcaaggcgcagtgccccatcatcgagcgcctcaccaactccctcatgatgcacgggcgcaacaacggtaagaagatcatggccgtccgcatcatcaagcacaccatggagatcatccacctcctcaccgacgccaaccccatccagatcatcgttgacgccatcatcaacagtggtccacgtgaggatgctacccgtattgggtctgctggtgttgtgaggaggcaggctgtggatatctcccccctgaggagggtgaaccaggccatctaccttctgaccactggtgccagggagagcgccttcaggaatgtcaagaccattgctgagtgcctcgctgatgagctgatcaatgctgccaagggctcatccaacagctatgccatcaagaagaaggacgagattgagcgtgttgccaaggctaaccgttaagatggatgtgcatctgagggtctcatgcttttggctggagattttggactgaatgtgttttacaagatatctagaactgttttagctatgctttaagtttgtgatgaaagaacatttcgatgtagcggcaaggacttgcctgtctttatgaaaccaattcctgttcagacaaatttggagatgttgaatgtgtcgttgtgttctctc

SEQ ID NO: 65874 - protein, 200 aa, Triticum aestivum
  peptide (1)..(200): Ceres Seq. ID no. 12598266
MAVVEPVPGGDVKLFNRWTFEDVQVSDISLNDYLAVTSMKHYTFLPHSAGRYSAKRFRKAQCPIIERLTNSLMMHGRNNGKKIMAVRIIKHTMEIIHLLTDANPIQIIVDAIINSGPREDATRIGSAGVVRRQAVDISPLRRVNQAIYLLTTGARESAFRNVKTIAECLADELINAAKGSSNSYAIKKKDEIERVAKANR

SEQ ID NO: 65875 - protein, 162 aa, Triticum aestivum
  peptide (1)..(162): Ceres Seq. ID no. 12598267
MKHYTFLPHSAGRYSAKRFRKAQCPIIERLTNSLMMHGRNNGKKIMAVRIIKHTMEIIHLLTDANPIQIIVDAIINSGPREDATRIGSAGVVRRQAVDISPLRRVNQAIYLLTTGARESAFRNVKTIAECLADELINAAKGSSNSYAIKKKDEIERVAKANR

SEQ ID NO: 65876 - protein, 128 aa, Triticum aestivum
  peptide (1)..(128): Ceres Seq. ID no. 12598268
MMHGRNNGKKIMAVRIIKHTMEIIHLLTDANPIQIIVDAIINSGPREDATRIGSAGVVRRQAVDISPLRRVNQAIYLLTTGARESAFRNVKTIAECLADELINAAKGSSNSYAIKKKDEIERVAKANR

SEQ ID NO: 65877 - DNA, 787 bp, Triticum aestivum
  misc_feature (1)..(787): Ceres Seq. ID no. 12780295
tttgattgtcggtactgccccctaatcactagaggaggaggtgcaacccgctttagggagcaccttggaggtataccaggtgatgtgaaacagagtatcacagcatactttgacaaggaattgtcgaccaacaaagtatcaatgcagccaaagatcagcactgctttgaatgttgagtcaaaagatgtacttggccaagcttgggaaaagttttttcatgctaatgacattgctggtctgaaagcaaattgtccctattttcgttcggctgtcaagataactcaaaaccttggcccagctcctgttccaactgccaaggagattgatgggatatatttggacaagaattatgaagaagctgagcagtggctgaagatgttcaagcaagactggaggaactatggtgtaactgtgatgtgtgactcatggacagggcctactggtatgagtctcatcaatttcatggtgtattgcaatgcacggatgttctttcataaatccattgatgcttctggtcaaactcagactgcagatacgtgctgaagaagaacaaggccctgcaggcagggtgaagagaaagaaccagaagaaggcaagtggtggcggcgacgccggtggtgatgaggaagaggaatgaggaactagtagctatcaccttatatttatcaaatgttggtgttatgagtactttagctgagaggcctgagactttcatgggttatcctcttgtcattttgtcactttatcactgttgttagcatgtatgcacttctttatgtttggagct

SEQ ID NO: 65878 - protein, 180 aa, Triticum aestivum
  peptide (1)..(180): Ceres Seq. ID no. 12780296
FDCRYCPLITRGGGATRFREHLGGIPGDVKQSITAYFDKELSTNKVSMQPKISTALNVESKDVLGQAWEKFFHANDIAGLKANCPYFRSAVKITQNLGPAPVPTAKEIDGIYLDKNYEEAEQWLKMFKQDWRNYGVTVMCDSWTGPTGMSLINFMVYCNARMFFHKSIDASGQTQTADTC

SEQ ID NO: 65879 - protein, 133 aa, Triticum aestivum
  peptide (1)..(133): Ceres Seq. ID no. 12780297
MQPKISTALNVESKDVLGQAWEKFFHANDIAGLKANCPYFRSAVKITQNLGPAPVPTAKEIDGIYLDKNYEEAEQWLKMFKQDWRNYGVTVMCDSWTGPTGMSLINFMVYCNARMFFHKSIDASGQTQTADTC

SEQ ID NO: 65880 - DNA, 1281 bp, Triticum aestivum
  misc_feature (1)..(1281): Ceres Seq. ID no. 12780298
ccaccttatgcaagaggggtttcatcatttaggcatctcattgctagattgcctgcaagggcccactctatttattacagagatgaaatcggtaatatttcaacatcacacttatggagtgattcgaagaagacccaactggaaattgaaccgaggtttcccttgtttggtggttggcaaacaacctttactattggttatggtttacctcttcaagactttgttttcagtgctgatggaaagagatttctcaatatcacatttggttctccaatggaggagattctcatagaaaagctcatcgtaaaggtggttctacctgaaggttcaaaggatattgatgtttcagctccatttccaacaaatcaatggcaagaggtgaagtattcacaccttgacattgctggaaggccagttcttgtcttggaaaagcctgatgttattccagagcataatttgcatttccaggtgtactacaaattcaataacatctcgttgctcatagagccgatgatgttgattactggcttcttcctcctgtttgttgcatgtattgcctacatgcacactgacatgtcaatctctaagaactctccttcttatctggcaaagctgcaatgggatgaggtgcaagccactgttcagcaaatccagggcatctttcaccagtgcttagctgttcatgataagctagagacatcattgcacgatttgtctaggtctggagacgctaaatcttgcaaagcagctcgtaaagccgctgatgcacagtttaaggaattagcgaaagagctgaagccgctgttgttatctgtacagtcatcccctcagtcttatcagatatggccaaagctagaggacttggttgcgaaggagagggagatgcaggagaagctcatggcgaggcatgccaccgtggttgacagcgtcgagaagaagcagcgcgggcaagacatagaaaaccggatttcctcccagcagcagaagatcgctgcgctgaggcaagaggtcgaatctcttctagagtaccttagcgagatatgagcgaatccggtctcatcttacatgattagtgattagactgaaggtcatcttctgcactttgtgtagatgttgtgttggtaacccattatcctagttcctgaggctaggtttcctagactctgtaatgtgatataagcgccttaatcattttggaactgattaatttttttgcatcatctaaaaagaaatcatggggaaccacccccttgggactccttttgcttaagtggttattgt

SEQ ID NO: 65881 - protein, 347 aa, Triticum aestivum
  peptide (1)..(347): Ceres Seq. ID no. 12780299
PPYARGVSSFRHLIARLPARAHSIYYRDEIGNISTSHLWSDSKKTQLEIEPRFPLFGGWQTTFTIGYGLPLQDFVFSADGKRFLNITFGSPMEEILIEKLIVKVVLPEGSKDIDVSAPFPTNQWQEVKYSHLDIAGRPVLVLEKPDVIPEHNLHFQVYYKFNNISLLIEPMMLITGFFLLFVACIAYMHTDMSISKNSPSYLAKLQWDEVQATVQQIQGIFHQCLAVHDKLETSLHDLSRSGDAKSCKAARKAADAQFKELAKELKPLLLSVQSSPQSYQIWPKLEDLVAKEREMQEKLMARHATVVDSVEKKQRGQDIENRISSQQQKIAALRQEVESLLEYLSEI

SEQ ID NO: 65882 - protein, 256 aa, Triticum aestivum
  peptide (1)..(256): Ceres Seq. ID no. 12780300
MEEILIEKLIVKVVLPEGSKDIDVSAPFPTNQWQEVKYSHLDIAGRPVLVLEKPDVIPEHNLHFQVYYKFNNISLLIEPMMLITGFFLLFVACIAYMHTDMSISKNSPSYLAKLQWDEVQATVQQIQGIFHQCLAVHDKLETSLHDLSRSGDAKSCKAARKAADAQFKELAKELKPLLLSVQSSPQSYQIWPKLEDLVAKEREMQEKLMARHATVVDSVEKKQRGQDIENRISSQQQKIAALRQEVESLLEYLSEI

SEQ ID NO: 65883 - protein, 177 aa, Triticum aestivum
  peptide (1)..(177): Ceres Seq. ID no. 12780301
MMLITGFFLLFVACIAYMHTDMSISKNSPSYLAKLQWDEVQATVQQIQGIFHQCLAVHDKLETSLHDLSRSGDAKSCKAARKAADAQFKELAKELKPLLLSVQSSPQSYQIWPKLEDLVAKEREMQEKLMARHATVVDSVEKKQRGQDIENRISSQQQKIAALRQEVESLLEYLSEI

SEQ ID NO: 65884 - DNA, 826 bp, Triticum aestivum
  misc_feature (1)..(826): Ceres Seq. ID no. 13656871
tagaacatcataatcgaaaacccgatcgcatcctggtcacggactcacgggcccttgtgacgcgatgctgcgcagcttccctcaggcccgtccgctcctcaggaggatggggttcgacaagagggatgcctacttctttaagcagattggcaagggcatgctctgcacctacgcgcttttcggcgcagcatggctctggaatgagacgtcgccgcttggttggtggacgctcaagccactccccaaggaagaaaaagaaatggcacatctttatgagcgcagggagtttccctaccctggtgatgaagaggcagttgaggagttcataaaaagtgagggtgctctaggtaccacgatcgggcccaaaggttttgcggatacaaatgtggactctgataaaatgcagaagcaactacagtcgaaaaagtttgaccaggaggcacaaaacctctggttccgaatgaggaatgaggttgcacatgaactacaagagaagggatttggtgttgaatgaagttttattcttctgaaaggagaagtgaaatggtgtcatgctagagttatctttggaccgtctcagctctgctaattgacacatcagctagtaacttagaataaatgcaaataggaaacatggagcttatgctacgattatcctcctttttcccgctctctgcctgggctctatcttattctatggcaaatgtctttgcagagcatctacgttgtgtcatgtcatgccaatattaatcttgttggcttgttccatttcttctgttactgatttctgatctttaagacatgttatcaaccagttgttgagtcc

SEQ ID NO: 65885 - protein, 149 aa, Triticum aestivum
  peptide (1)..(149): Ceres Seq. ID no. 15220594
MLRSFPQARPLLRRMGFDKRDAYFFKQIGKGMLCTYALFGAAWLWNETSPLGWWTLKPLPKEEKEMAHLYERREFPYPGDEEAVEEFIKSEGALGTTIGPKGFADTNVDSDKMQKQLQSKKFDQEAQNLWFRMRNEVAHELQEKGFGVE

SEQ ID NO: 65886 - protein, 135 aa, Triticum aestivum
  peptide (1)..(135): Ceres Seq. ID no. 15220595
MGFDKRDAYFFKQIGKGMLCTYALFGAAWLWNETSPLGWWTLKPLPKEEKEMAHLYERREFPYPGDEEAVEEFIKSEGALGTTIGPKGFADTNVDSDKMQKQLQSKKFDQEAQNLWFRMRNEVAHELQEKGFGVE

SEQ ID NO: 65887 - protein, 118 aa, Triticum aestivum
  peptide (1)..(118): Ceres Seq. ID no. 15220596
MLCTYALFGAAWLWNETSPLGWWTLKPLPKEEKEMAHLYERREFPYPGDEEAVEEFIKSEGALGTTIGPKGFADTNVDSDKMQKQLQSKKFDQEAQNLWFRMRNEVAHELQEKGFGVE

SEQ ID NO: 65888 - DNA, 943 bp, Triticum aestivum
  misc_feature (1)..(943): Ceres Seq. ID no. 12619560
acatacgctaaaaaaaaacacatgcgccgtaatggcccttaggtgcgcggccggcggcggcggcggcggcggcgcctacctgacgccgcggaggagcagatgctgcggcgtcggctctgcgcgaccctcagccacgaccagggggacacgagggctcagcctcctcctgaggatcccgtcctcacaatactccgaagctccatgggcgttgcgctgctcgcctgattcccctcctctggagggtgaccagcattcagatcgaactggggcgctgggggcgctgaaggccatggtgtgcgacatgttcaggcccctggcgcgcaacatctcggatatccgatcccttcgcactgtctttgacctcgaggattatcaagtcggcatgctgtttggtgcttttcttggctgcgtcgggtgctaccagctgtggaaggctgctccttccatctttgttgatgctgcccttgcctatgcattctataaactgagcgttatgtcctcggaggtgcgccggcagggcaaatgcaatgatttgctgactcgcttgaaatttggtattgtggttattatggctactaaggacttcaggaagaactatgaactcttggatattgtcaagatgcctgttttctttctttatctttcgacattcatctttgatgtggcacgcatgaagaaatatgcaaagcattatctgattctcacagttaatttattgagaatgaagggcggagctcaagaattgttcagaataatgttttatccgagctatacatctccatatgatgattgcttccgtaggaaataaaatgtagacccctgagattgtgtggatctgtttatgtgagatttttatataagaatttttagtataatgtgtaataacatttatgtaatgctagtttacttgcccatggttgtgtacagttttgcggcattcttc

SEQ ID NO: 65889 - protein, 268 aa, Triticum aestivum
  peptide (1)..(268): Ceres Seq. ID no. 12619561
HTLKKNTCAVMALRCAAGGGGGGGAYLTPRRSRCCGVGSARPSATTRGTRGLSLLLRIPSSQYSEAPWALRCSPDSPPLEGDQHSDRTGALGALKAMVCDMFRPLARNISDIRSLRTVFDLEDYQVGMLFGAFLGCVGCYQLWKAAPSIFVDAALAYAFYKLSVMSSEVRRQGKCNDLLTRLKFGIVVIMATKDFRKNYELLDIVKMPVFFLYLSTFIFDVARMKKYAKHYLILTVNLLRMKGGAQELFRIMFYPSYTSPYDDCFRRK

SEQ ID NO: 65890 - protein, 258 aa, Triticum aestivum; identical to SEQ ID NO: 64952
  peptide (1)..(258): Ceres Seq. ID no. 12619562

SEQ ID NO: 65891 - protein, 172 aa, Triticum aestivum; identical to SEQ ID NO: 64953
  peptide (1)..(172): Ceres Seq. ID no. 12619563

SEQ ID NO: 65892 - DNA, 1504 bp, Triticum aestivum
  misc_feature (1)..(1504): Ceres Seq. ID no. 14303664
ataaaatcggagaaacccagaaaaaaaaggactaaacgagatactgagagccgaagacctaaattccgtagagaaaactcgcatcgccgccgctgcctagatcgccgggcgccgccatgtcgaccccgggcgccgcctactacgcttccctcgcgcgcaagcagtacttctgctaccaatgcaaccgcaccgtcctcatcgccgcctccgccgcggccgccggcgagctctcatgccccgactgccgcggcgacttcctggaggaggtcaccgtccccgcccccaccatcctccccttcccctttgccttcccccctatgatgcccaccgcctcctccccgtcccgatcctcctcctcctccaccgccgcgcccccctccagcgacctctccaacttcctcaccagcatcctcgacctccaggagggccgccgcgttaggtccaggagcgggagcggtgccgcctcggccgctggcacggccacgcctgagaacgagccggagtccttcgacccgctcgtgtttttccagaactacatccacaccctcatggaggggggcgccaacatccaggtgctcctcgacgacgccagcgtcaacctcgcccccggcctaggcggccgtgccggtgggacaagctacggggactacttcgtcggcccgggactggagcaactcatcgagcagctcgccgagaacgatcccaaccgctatggcacgccgccggctgccaagtccgccctgaccactcttcctgacgtcgttgtcaccgatgccatggttgcggcggcagagggcgccgagtgtgctgtgtgcaaggaagatttctcacctggagatggggccaagcagatgccctgcaagcatatctaccacgcagattgcatcgtaccctggttggagctccacaattcgtgccccatttgtcgctttgagctgcccaccgatgatcctgattatgagggcaataaggcctcaaacgcacagtcagctgttggtatcgctgctgctgctgcatctgggagctctggtgctgctgaggaaggaggggaggagagtggggaggctgcaagggtggtggaaaggagattcaatgtgtcattggcttggccgtttggtggattggcaggtcaaacaccacagcaagatgggaacaatgccggtgctggcagtagctcacaggacagcggttcgcaggatggagctggtggcagtaacaaaaattgaacacaaatctgtgatcagttggaggtctccttgtcggcgatgcgtccagaggtcgacaatgttgatgcgccaccgtgagttatactacagacaatcgaaagaccaaaggaatttacagcctgtttatttggtggaacaaaacagtgttggttttagttgtcgttgtcgctgtccgttagggcgtgtacgcaaggcacagagactgccgtggcaggaagttgtgcgttgcgtagactctttgtgcagatttgttaaattgattctcgtttatggacccc

SEQ ID NO: 65893 - protein, 369 aa, Triticum aestivum
  peptide (1)..(369): Ceres Seq. ID no. 14303665
MSTPGAAYYASLARKQYFCYQCNRTVLIAASAAAAGELSCPDCRGDFLEEVTVPAPTILPFPFAFPPMMPTASSPSRSSSSSTAAPPSSDLSNFLTSILDLQEGRRVRSRSGSGAASAAGTATPENEPESFDPLVFFQNYIHTLMEGGANIQVLLDDASVNLAPGLGGRAGGTSYGDYFVGPGLEQLIEQLAENDPNRYGTPPAAKSALTTLPDVVVTDAMVAAAEGAECAVCKEDFSPGDGAKQMPCKHIYHADCIVPWLELHNSCPICRFELPTDDPDYEGNKASNAQSAVGIAAAAASGSSGAAEEGGEESGEAARVVERRFNVSLAWPFGGLAGQTPQQDGNNAGAGSSSQDSGSQDGAGGSNKN

SEQ ID NO: 65894 - protein, 302 aa, Triticum aestivum
  peptide (1)..(302): Ceres Seq. ID no. 14303666
MMPTASSPSRSSSSSTAAPPSSDLSNFLTSILDLQEGRRVRSRSGSGAASAAGTATPENEPESFDPLVFFQNYIHTLMEGGANIQVLLDDASVNLAPGLGGRAGGTSYGDYFVGPGLEQLIEQLAENDPNRYGTPPAAKSALTTLPDVVVTDAMVAAAEGAECAVCKEDFSPGDGAKQMPCKHIYHADCIVPWLELHNSCPICRFELPTDDPDYEGNKASNAQSAVGIAAAAASGSSGAAEEGGEESGEAARVVERRFNVSLAWPFGGLAGQTPQQDGNNAGAGSSSQDSGSQDGAGGSNKN

SEQ ID NO: 65895 - protein, 301 aa, Triticum aestivum
  peptide (1)..(301): Ceres Seq. ID no. 14303667
MPTASSPSRSSSSSTAAPPSSDLSNFLTSILDLQEGRRVRSRSGSGAASAAGTATPENEPESFDPLVFFQNYIHTLMEGGANIQVLLDDASVNLAPGLGGRAGGTSYGDYFVGPGLEQLIEQLAENDPNRYGTPPAAKSALTTLPDVVVTDAMVAAAEGAECAVCKEDFSPGDGAKQMPCKHIYHADCIVPWLELHNSCPICRFELPTDDPDYEGNKASNAQSAVGIAAAAASGSSGAAEEGGEESGEAARVVERRFNVSLAWPFGGLAGQTPQQDGNNAGAGSSSQDSGSQDGAGGSNKN

SEQ ID NO: 65896 - DNA, 759 bp, Triticum aestivum
  misc_feature (1)..(759): Ceres Seq. ID no. 13657166
cttagaggtttaccgagtatcggacatggagctggtaagagttcttcctagtgctgaagatgaagtcaatgttgcatgctttcatccttcccctggaggtggtcttgtttatgggactaaggaagggaagctcaggatcctacaacacaatggcgcagacgctgcaagcatggcgctgaattgctttatcgaggaaaatatgcttgaggttcagaggtatgcgttggaaggctgaatgatcatttgcgtcatgagcttatatgtgtccttccctgcaggaacttttgtctgcaagctccatttttgtttaggagagcctcatggactaaattacaagatatcatcagggcctccgactaaatctttcgagcggcagatgattctccacgagtttgttcaagtgcaatgtactgatctattgctggtttccagagaatgctgtgggccgactctaatcgtgcatcgttttgcaacttttaactcaggtctgtgcacaggcggtgtgatgatgtaaatttggcatggtcatcgttgctgtcaagttcccacgaccctgtaattataaaactgtacatgtaatctccaatcagcttaaaacaaccgctgttgtattttagaaagctcgcaatcctaatcctcaagtttcttttacgtgggaaatgtttgtactatttctgtcctgaccaatgccagtgatttgcattaagatgaatgaaaaaaaaaaaaaccaaccgctaccaaagaaggaagagaatgacg

SEQ ID NO: 65897 - protein, 92 aa, Triticum aestivum
  peptide (1)..(92): Ceres Seq. ID no. 13657167
MIICVMSLYVSFPAGTFVCKLHFCLGEPHGLNYKISSGPPTKSFERQMILHEFVQVQCTDLLLVSRECCGPTLIVHRFATFNSGLCTGGVMM

SEQ ID NO: 65898 - protein, 87 aa, Triticum aestivum
  peptide (1)..(87): Ceres Seq. ID no. 13657168
MSLYVSFPAGTFVCKLHFCLGEPHGLNYKISSGPPTKSFERQMILHEFVQVQCTDLLLVSRECCGPTLIVHRFATFNSGLCTGGVMM

SEQ ID NO: 65899 - protein, 77 aa, Triticum aestivum
  peptide (1)..(77): Ceres Seq. ID no. 13657169
LEVYRVSDMELVRVLPSAEDEVNVACFHPSPGGGLVYGTKEGKLRILQHNGADAASMALNCFIEENMLEVQRYALEG

SEQ ID NO: 65900 - DNA, 1349 bp, Triticum aestivum
  misc_feature (1)..(1349): Ceres Seq. ID no. 13657515
atcggttagatattttctaggccacaaaaaaaaggttggtcgcaaaattagagaaggttgaggcgggcgtctggcatggaggcggaggcaaaggcgacctgggcggcggcgcctggctcgggagcggcgactgccgacgggggcttccctgtagatccggtgtgcagcgaaggttgccaatcttcccaggcgtggcggtctcggcgggttcggtccaagatgaagtcagcgatggtgctggctggaggagacgttgggttgttgcctcttctgtggctgcccatgacagctgtgccgccggcgctgccgaatgcagtggagagagcgccccagcggagtcgggagagtcagctgtgaaacctgatccgaaatctgtaggctggataagaagggtgcgagtgggcgcaaatccgatagagcgtatgccttgccctggcaggatgggagcgcttgagaagactatcaggggcttcgtggacagggagggtgatgaagtagtcaagccagagttagggaccactttcgattccctgacagaggcttatgatttttacaatatgtattcgtgggaacatggcttcggcattagatacgggaaaaccaggctaaatcctgataagaggaagaccatgcaggagattgtgtgcggatgctcggggaaaccccttcgagaaaatacaagaccgtgtaggtgcaagtgccctgcaatgattaggctgttgaggacatcggacaacgggtggtacatcacagagcatcgtgtcaagcataatcatgtcatgacgccaaattgtggtgaaatgttgcactggccgtcacacaagcacattgacgtgtacacgagagaccttgttcgtaacctaaggaagaacaacatcaacctgagcaaggtgtacaacataattggagggttctttgggacagtggagaatgtgccttttacgaaaagatctcttcggagcctgtgtgggcaaattagcagggacgaggcagaggacgacgtgaggaatacaagttttcgatgaactaggtgcaaaggacccggctaaatggcccaactccgcgatggacggccctcttaaacaccgtaacgggaggaccgtactgaaccttgcccccctgggcctcatcaatgagtacagacaacacactcatgcactgttcaaaaaagcctgcactaattgaatacatgggccaatacattcatgagctcgaatctccaggaggaccaaccgctgggataatagtaccatatgccagtacaacccatatgtaattttcgtatttgttgacatataaacaaactattgagacgataacgttctaaaagcatgtagtcaaacttttgt

SEQ ID NO: 65901 - protein, 200 aa, Triticum aestivum
  peptide (1)..(200): Ceres Seq. ID no. 13657516
MPCPGRMGALEKTIRGFVDREGDEVVKPELGTTFDSLTEAYDFYNMYSWEHGFGIRYGKTRLNPDKRKTMQEIVCGCSGKPLRENTRPCRCKCPAMIRLLRTSDNGWYITEHRVKHNHVMTPNCGEMLHWPSHKHIDVYTRDLVRNLRKNNINLSKVYNIIGGFFGTVENVPFTKRSLRSLCGQISRDEAEDDVRNTSFR

SEQ ID NO: 65902 - protein, 194 aa, Triticum aestivum
  peptide (1)..(194): Ceres Seq. ID no. 13657517
MGALEKTIRGFVDREGDEVVKPELGTTFDSLTEAYDFYNMYSWEHGFGIRYGKTRLNPDKRKTMQEIVCGCSGKPLRENTRPCRCKCPAMIRLLRTSDNGWYITEHRVKHNHVMTPNCGEMLHWPSHKHIDVYTRDLVRNLRKNNINLSKVYNIIGGFFGTVENVPFTKRSLRSLCGQISRDEAEDDVRNTSFR

SEQ ID NO: 65903 - protein, 155 aa, Triticum aestivum
  peptide (1)..(155): Ceres Seq. ID no. 13657518
MYSWEHGFGIRYGKTRLNPDKRKTMQEIVCGCSGKPLRENTRPCRCKCPAMIRLLRTSDNGWYITEHRVKHNHVMTPNCGEMLHWPSHKHIDVYTRDLVRNLRKNNINLSKVYNIIGGFFGTVENVPFTKRSLRSLCGQISRDEAEDDVRNTSFR

SEQ ID NO: 65904 - DNA, 1452 bp, Triticum aestivum
  misc_feature (1)..(1452): Ceres Seq. ID no. 13591273
ccagtccacctccccccctatccccaccgcctccacaaccccaccccccccctccgctgcccctcccatcgcattcgcatccacctccgcgccccaagcacagcacaggggaagaagcgatcggcaatggcgtcctccacccagggccaggtcatcacctgcaaagcggcggtggcgtacgaggcgaacaagccgctggtggtggaggacgtgcaggtggcgccgccgcaggccggcgaggtccgcatcaagatcctctccaccgcgctctgccacaccgactactacacctggagcggcaaggatcctgagggtctctttccttgcattctcggtcatgaggctgctggaatcgttgagagcgttggcgaaggggtgaccgatgtgcagcctggggaccatgtcatcccttgctaccaagcggaatgcaagaactgcaagatgtgcaacagcgggaagaccaacctctgcggcaaagttcgtggcgccacaggggtaggggtcatgatgagcgaccgcaagagccgcttctcggtgaatgggaagcccatctaccatttcatggggacgtcgacgttcagtcagtacactgttgtgcatgacgtcagtgttgcgaagatcaacccgcaggcgcccctggataaggtctgcctgctcggctgtggtgtttccactggtcttggagcagtatggaatactgcaaaggttgaagcaggttcagttgttgctgtttttgggcttggcacagttggacttgcagttgctgagggggcaaaatcagctggtgcttctcggattattggcattgacattgatgccaagaagtttgatgttgctaagaactttggagtcacagagtttgtgaacccaaaagaccatgacaaaccaatccagcaggtcctagttgaccttacagatggtggtgtggattacagttttgagtgcatcggaaatgtttctatcatgagggctgcactcgaatgctgccacaagggctggggtacctctgttgtcgttggtgtagctgcatctggccaggagattgccacacggccattccagcttgtcactggccgtgtctggaagggaacagcttttggtggcttcaagagtcggagccaggttccatggctcgtcgagaagtacatgaacaaggaaatcaaggtggacgagtacatcacccacaacatgaaccttaccgatatcaacaaggcgttcgacctgctgcacgaaggcggctgcctgcggtgcgtgctggccatggagcactgaggatcctgctatgtgtctcgccctgcctcgaagcggagcagtttgtgtcgtgtgaagttgtaatgcagatctatcctccgccctgggactatagaactcgtttggcctagaaactcttgaacacgaaccgctgctataataatatgttgtgttggatggttgcctctggttggggtcatt

SEQ ID NO: 65905 - protein, 423 aa, Triticum aestivum
  peptide (1)..(423): Ceres Seq. ID no. 13591274
PVHLPPYPHRLHNPTPPLRCPSHRIRIHLRAPSTAQGKKRSAMASSTQGQVITCKAAVAYEANKPLVVEDVQVAPPQAGEVRIKILSTALCHTDYYTWSGKDPEGLFPCILGHEAAGIVESVGEGVTDVQPGDHVIPCYQAECKNCKMCNSGKTNLCGKVRGATGVGVMMSDRKSRFSVNGKPIYHFMGTSTFSQYTVVHDVSVAKINPQAPLDKVCLLGCGVSTGLGAVWNTAKVEAGSVVAVFGLGTVGLAVAEGAKSAGASRIIGIDIDAKKFDVAKNFGVTEFVNPKDHDKPIQQVLVDLTDGGVDYSFECIGNVSIMRAALECCHKGWGTSVVVGVAASGQEIATRPFQLVTGRVWKGTAFGGFKSRSQVPWLVEKYMNKEIKVDEYITHNMNLTDINKAFDLLHEGGCLRCVLAMEH

SEQ ID NO: 65906 - protein, 381 aa, Triticum aestivum
  peptide (1)..(381): Ceres Seq. ID no. 13591275
MASSTQGQVITCKAAVAYEANKPLVVEDVQVAPPQAGEVRIKILSTALCHTDYYTWSGKDPEGLFPCILGHEAAGIVESVGEGVTDVQPGDHVIPCYQAECKNCKMCNSGKTNLCGKVRGATGVGVMMSDRKSRFSVNGKPIYHFMGTSTFSQYTVVHDVSVAKINPQAPLDKVCLLGCGVSTGLGAVWNTAKVEAGSVVAVFGLGTVGLAVAEGAKSAGASRIIGIDIDAKKFDVAKNFGVTEFVNPKDHDKPIQQVLVDLTDGGVDYSFECIGNVSIMRAALECCHKGWGTSVVVGVAASGQEIATRPFQLVTGRVWKGTAFGGFKSRSQVPWLVEKYMNKEIKVDEYITHNMNLTDINKAFDLLHEGGCLRCVLAMEH

SEQ ID NO: 65907 - protein, 276 aa, Triticum aestivum
  peptide (1)..(276): Ceres Seq. ID no. 13591276
MCNSGKTNLCGKVRGATGVGVMMSDRKSRFSVNGKPIYHFMGTSTFSQYTVVHDVSVAKINPQAPLDKVCLLGCGVSTGLGAVWNTAKVEAGSVVAVFGLGTVGLAVAEGAKSAGASRIIGIDIDAKKFDVAKNFGVTEFVNPKDHDKPIQQVLVDLTDGGVDYSFECIGNVSIMRAALECCHKGWGTSVVVGVAASGQEIATRPFQLVTGRVWKGTAFGGFKSRSQVPWLVEKYMNKEIKVDEYITHNMNLTDINKAFDLLHEGGCLRCVLAMEH

SEQ ID NO: 65908 - DNA, 802 bp, Triticum aestivum
  misc_feature (1)..(802): Ceres Seq. ID no. 13657519
ccgtgtcctttttgaagaggaacaatcagcatataaccaagccatgcttcagaatatttgtgatgggaagatgcacccacttacatctatgcaccatacctccacatataatgcttctctatgcaaactgatggaatactgcttgagccctgctataactgtgcttcaggaccgtgtgaaagaaaacgaacttcggttagctatgctagtggaggaggctaaacaactggaggccgagcagagcacgaaaactggctctcctcgccgtgcgatgcccggagggactaccagtggcatcacttcgccaaggggccaggacaagtacccttccggcagacaagggggccctataagccctagcagcagcggccggaggaaggctccttgactcggaccttgctcgccattatgtcatgatggatagtccgattctgggccctgcctgatgctttctggaaccccaaacctgtcccttggcgcgaggggtgaagtcgcaatgcaaatgtacatacccatctcctttcagtgcctcgccgccgccgacgtcgacgtcgacggtatgttgcccgtcgtcgactagctcccgagacgctcgcatactacagtagcacaggatggatcatttaactgtgtgatggattcatctgtaacaatgttctaaattatgttcgtttgcgttttattctcagaagaagcgaacctgcgcagtgtgctagagccagcgtcgtcaattcgtcatgtttcgtagatagtgtctgtaatgatgtaatttctgtctctttttccaaggaaagacctaaat

SEQ ID NO: 65909 - protein, 128 aa, Triticum aestivum
  peptide (1)..(128): Ceres Seq. ID no. 13657520
RVLFEEEQSAYNQAMLQNICDGKMHPLTSMHHTSTYNASLCKLMEYCLSPAITVLQDRVKENELRLAMLVEEAKQLEAEQSTKTGSPRRAMPGGTTSGITSPRGQDKYPSGRQGGPISPSSSGRRKAP

SEQ ID NO: 65910 - protein, 114 aa, Triticum aestivum
  peptide (1)..(114): Ceres Seq. ID no. 13657521
MLQNICDGKMHPLTSMHHTSTYNASLCKLMEYCLSPAITVLQDRVKENELRLAMLVEEAKQLEAEQSTKTGSPRRAMPGGTTSGITSPRGQDKYPSGRQGGPISPSSSGRRKAP

SEQ ID NO: 65911 - protein, 105 aa, Triticum aestivum
  peptide (1)..(105): Ceres Seq. ID no. 13657522
MHPLTSMHHTSTYNASLCKLMEYCLSPAITVLQDRVKENELRLAMLVEEAKQLEAEQSTKTGSPRRAMPGGTTSGITSPRGQDKYPSGRQGGPISPSSSGRRKAP

SEQ ID NO: 65912 - DNA, 757 bp, Triticum aestivum
  misc_feature (1)..(757): Ceres Seq. ID no. 12443653
aatggagcttctccggcggcagatgctgaagcacccggcaggagagccccagcgctgggagaagatcgctgcagtgttcggcggccgccgcacgccggagagcgtcatccgcgcagcaaagtcgggcggcgccacggcggctggtggctcgttcgagcagttcctgcgcaagcgaaagccgctggacccaagggccggggccgctgacgcagacacaggtggcaatgctggaggaggggacggtggttggagtgctggcgaggaccgttctctgctgaacgcgctcaaggagttccctaaggacacggcaatgaggtgggagaaggtggccgcagcagtgcctgggaagacaaaggctgggtgcatgaagagggtcactgagctcaagcgtgactttcggagcagcaaggagccataggaggcagcgccatagcttgaacgttgtcttccttgcctggtaccggacttgatgcagcaaatcattgtgatcatttcccttcctgaagaagaagcgaatcaccattggtctcgctgaatcgggaatcatgatgatgttggatgaaggaaacaataccgttaaacaacatatggtgtagttttattgttttatataccagaatcaagattcgccaaacagaacaacactaacctgtagaaaaaacggtccatacggaaaaggaacagcagtccctgatggtttgggtgttaatgtcaagctccaaattttatgctagtcagttgtcgatgtgtcantgtc

SEQ ID NO: 65913 - protein, 138 aa, Triticum aestivum
  peptide (1)..(138): Ceres Seq. ID no. 12443654
MELLRRQMLKHPAGEPQRWEKIAAVFGGRRTPESVIRAAKSGGATAAGGSFEQFLRKRKPLDPRAGAADADTGGNAGGGDGGWSAGEDRSLLNALKEFPKDTAMRWEKVAAAVPGKTKAGCMKRVTELKRDFRSSKEP

SEQ ID NO: 65914 - protein, 131 aa, Triticum aestivum
  peptide (1)..(131): Ceres Seq. ID no. 12443655
MLKHPAGEPQRWEKIAAVFGGRRTPESVIRAAKSGGATAAGGSFEQFLRKRKPLDPRAGAADADTGGNAGGGDGGWSAGEDRSLLNALKEFPKDTAMRWEKVAAAVPGKTKAGCMKRVTELKRDFRSSKEP

SEQ ID NO: 65915 - DNA, 955 bp, Triticum aestivum
  misc_feature (1)..(955): Ceres Seq. ID no. 13657523
aaaagaaaacaagtaagggcccaaatgcaaacgaggaaaccaacctcctcctcccctgtaacaactccgccgcgcgcccacctcccctcgccggtatcgtgtcctcgttcacgcccaacccaacccaccccatttccccgacctccgatgccggagcgccgcaacgtagccggagacccgccgtactggtgatccccggataacaacgatggaccgcctcttgctgtcccgccccccgatgcccacccccgtccacggcgctgccacggccgcagatggcgacctcctcgagctcgacgtcctctggcccgcctcttcagctccgggactcctcgccgcgcttcccgatgacgaggctaagaagaagcagaagcgcgcgggcggccctgccgtccgatccgccgcccgcgccgtcccggagaaggccgcgttgaccccgtcttcggtggcgaggtcggctccggtgcgcataccttcggatgctgcggcgcggagagggaggtggccccacgtcgtcggtggcggcgacgacggggacgccatggtcccgccgcacgagatcgtcgcgcggcgcgcggcagcgcacagctcggtgctggagggagccgggaggacgctcaagggccgcgacctccgccgcgtacgcaacaccgtcctgcgccgcaccggcttcctcgactgagaggcggaggcgagtcgcctcgtcgctttcgcgataaagttttgacttctgttaattcctccctttagttccatccgttgcgtttccggcagttttgatttcattccccgatgggaaggggatgaaaagtaaagtggtgaggtgagatgagtgaccgaggattataacacgacaataacagtgctgttccattccatcacattatatatatggaatttttggccattaaaaaaaaaataaaaaaaaaaaaaaaaaagcttatcgataccgtcg

SEQ ID NO: 65916 - protein, 157 aa, Triticum aestivum
  peptide (1)..(157): Ceres Seq. ID no. 13657524
MDRLLLSRPPMPTPVHGAATAADGDLLELDVLWPASSAPGLLAALPDDEAKKKQKRAGGPAVRSAARAVPEKAALTPSSVARSAPVRIPSDAAARRGRWPHVVGGGDDGDAMVPPHEIVARRAAAHSSVLEGAGRTLKGRDLRRVRNTVLRRTGFLD

SEQ ID NO: 65917 - protein, 147 aa, Triticum aestivum
  peptide (1)..(147): Ceres Seq. ID no. 13657525
MPTPVHGAATAADGDLLELDVLWPASSAPGLLAALPDDEAKKKQKRAGGPAVRSAARAVPEKAALTPSSVARSAPVRIPSDAAARRGRWPHVVGGGDDGDAMVPPHEIVARRAAAHSSVLEGAGRTLKGRDLRRVRNTVLRRTGFLD

SEQ ID NO: 65918 - protein, 79 aa, Triticum aestivum
  peptide (1)..(79): Ceres Seq. ID no. 13657526
MLRRGEGGGPTSSVAATTGTPWSRRTRSSRGARQRTARCWREPGGRSRAATSAAYATPSCAAPASSTERRRRVASSLSR

SEQ ID NO: 65919 - DNA, 1695 bp, Triticum aestivum
  misc_feature (1)..(1695): Ceres Seq. ID no. 14308003
acacccaaaataagatcacatttttttgctcttcccttctccaattcaaggagccggggcagccatggacgccgccacgggcacgggcatggaggagctgtcatggtgcgcgcggtgcgtcggcctggcattccttgtcttctccgtgtgcgtggtggcgctcggcgcggcgctcttcctcgcccgccggtggccgtggtgcagctgccacgtctgccgttcgtacctcacgggatcgtgggcgcgggacttcaccaacctcggcgactggtacgcacacctgctccgctgctccccgaccggcaccgtggccgtccacgtcctcggctgtaccatcaccgccaacccggccaacgtcgagcacatgctccacacccgcttcgacaacttccccaaagggaagcccttcgccgccgtcctcggcgacctcctcggcggcggcatcttcaacgtcgacggcgacgcctggcgccaccagcgcaagatggccagcctcgagctcggcagcgtcgcggtgcgctcctacgcgtacggcatcgtcgccgaggaagtggaggcgcgcctcctgccactgctcgccgacgccgccgacaatggcagggtggtcgacctgcaggacgtgttccggcgtttcgctttcgacaccatctgcaagatctccttcggactagaccccggctgcctcgagctcgacatgcccatgtccaagctcgccgccgcgttcgacaccgcctcgcggctatccgccatgcgcggcgcggcggcgtcgcccctggtgtggagggcaaagcggctgctgaacttcggctccgagagggagctcaggaagtccatccacctcgtcgacgagctcgcggcggccatgataaggcagcgccggaagctgggcgtcgccgggagccacgacctcctgtcccggttcatggcctcggaggcgcacggcaccgccgtcgacgacaagtacctccgcgacatcgtggtcagcttcctcctcgccggacgggacacggtgtcctccgcgctcaccaccatcttcatgctgctctccaagaaccccgctgtggcggccgccatgcgctcggaggccgccgccggcgagaagacaaggacatcgtcgaagaccacgtacgagcacctcaagtccctccactacacccacgcggtgctgcacgagaacatgcggctgttcccgcctgtgcagttcgactccaagttctgcgccgccgatgacgtgctcccggacggcacgtacgtgaccgccggggctcgtgtgatgtaccacccctacgccatggggcgcatgccccgcatttggggcgacgactgcgagaagttccgaccggagcggtggctgacgggccccggggggacgttcgtgccggagagcctgtacaggtacccggtgttccaggccgggctccgcgtgtgcctcggcaaggagctcgccgtgatggagatgaaggcggtgaccgtggccgtggtgaagcagttcgacgtggaggtggttgggcaaaagggcgccgtgcccaggttcgcgccgggtctgacggcgtccatcagcggcgggctcccggtgagggtcaggcgcatctagagacatgttgagtactgtagtagctagacactgtttctgtactgtacatagggatattataagagaagaaattaatgagaagggaagttgtttgtggcgac

SEQ ID NO: 65920 - protein, 509 aa, Triticum aestivum
  peptide (1)..(509): Ceres Seq. ID no. 14308004
MDAATGTGMEELSWCARCVGLAFLVFSVCVVALGAALFLARRWPWCSCHVCRSYLTGSWARDFTNLGDWYAHLLRCSPTGTVAVHVLGCTITANPANVEHMLHTRFDNFPKGKPFAAVLGDLLGGGIFNVDGDAWRHQRKMASLELGSVAVRSYAYGIVAEEVEARLLPLLADAADNGRVVDLQDVFRRFAFDTICKISFGLDPGCLELDMPMSKLAAAFDTASRLSAMRGAAASPLVWRAKRLLNFGSERELRKSIHLVDELAAAMIRQRRKLGVAGSHDLLSRFMASEAHGTAVDDKYLRDIVVSFLLAGRDTVSSALTTIFMLLSKNPAVAAAMRSEAAAGEKTRTSSKTTYEHLKSLHYTHAVLHENMRLFPPVQFDSKFCAADDVLPDGTYVTAGARVMYHPYAMGRMPRIWGDDCEKFRPERWLTGPGGTFVPESLYRYPVFQAGLRVCLGKELAVMEMKAVTVAVVKQFDVEVVGQKGAVPRFAPGLTASISGGLPVRVRRI

SEQ ID NO: 65921 - protein, 501 aa, Triticum aestivum
  peptide (1)..(501): Ceres Seq. ID no. 14308005
MEELSWCARCVGLAFLVFSVCVVALGAALFLARRWPWCSCHVCRSYLTGSWARDFTNLGDWYAHLLRCSPTGTVAVHVLGCTITANPANVEHMLHTRFDNFPKGKPFAAVLGDLLGGGIFNVDGDAWRHQRKMASLELGSVAVRSYAYGIVAEEVEARLLPLLADAADNGRVVDLQDVFRRFAFDTICKISFGLDPGCLELDMPMSKLAAAFDTASRLSAMRGAAASPLVWRAKRLLNFGSERELRKSIHLVDELAAAMIRQRRKLGVAGSHDLLSRFMASEAHGTAVDDKYLRDIVVSFLLAGRDTVSSALTTIFMLLSKNPAVAAAMRSEAAAGEKTRTSSKTTYEHLKSLHYTHAVLHENMRLFPPVQFDSKFCAADDVLPDGTYVTAGARVMYHPYAMGRMPRIWGDDCEKFRPERWLTGPGGTFVPESLYRYPVFQAGLRVCLGKELAVMEMKAVTVAVVKQFDVEVVGQKGAVPRFAPGLTASISGGLPVRVRRI

SEQ ID NO: 65922 - protein, 409 aa, Triticum aestivum
  peptide (1)..(409): Ceres Seq. ID no. 14308006
MLHTRFDNFPKGKPFAAVLGDLLGGGIFNVDGDAWRHQRKMASLELGSVAVRSYAYGIVAEEVEARLLPLLADAADNGRVVDLQDVFRRFAFDTICKISFGLDPGCLELDMPMSKLAAAFDTASRLSAMRGAAASPLVWRAKRLLNFGSERELRKSIHLVDELAAAMIRQRRKLGVAGSHDLLSRFMASEAHGTAVDDKYLRDIVVSFLLAGRDTVSSALTTIFMLLSKNPAVAAAMRSEAAAGEKTRTSSKTTYEHLKSLHYTHAVLHENMRLFPPVQFDSKFCAADDVLPDGTYVTAGARVMYHPYAMGRMPRIWGDDCEKFRPERWLTGPGGTFVPESLYRYPVFQAGLRVCLGKELAVMEMKAVTVAVVKQFDVEVVGQKGAVPRFAPGLTASISGGLPVRVRRI

SEQ ID NO: 65923 - DNA, 1507 bp, Triticum aestivum
  misc_feature (1)..(1507): Ceres Seq. ID no. 13657138
gttacgtagcactctgtctgacgcatcaatagccccccagccacttcctacaccacttcgtctccctccacttccttccctccctagtctgagtctctacccgagaccagagctcgcacgcgtcgccggcgcgccgatcagtcaagaagccgcgcaacggcgttggcgcattgccccggagaggccggccggccgatgaagccgctgtacctgcggggcagcggcagcttcaagaggctgctgctctccctctcgccccaccgcgccaagcgcgtccacgcgccccccggggacgcgcacgccgagtcgccgcagtcaccgccgccgacggagcggaggcccgagtgggagtgcttctcgtacgaggaggtccggcgcgccacggacggcttccgcgcggccaacctggtgggccggggcgggtcgtcggaggtgtaccgcggcgagctggcggacgggcgcgccgtggcggtgaagcggctcatgggcgcgtccgcctgcgagcgccgggagcgggacttcctggcggagctcggcaccgtgggccacgccaggcaccccaacgtgtgcccgctcctcggctgctgcgtcgaccgcgacctctacctcgtcttcgccttctccgcccgcggctccgtctccgccaacctccacgacggcgaggagggggcgccggcgatggggtgggaggcgcggtacggcgtggcggtgggcacggcgagggggctggagtacctgcacaaggggtgccggcggcggatcatccaccgggacatcaaggcctccaacgtgctgctcaccgacgacttccagccccagatctccgacttcgggctggccaagtggctgccgacggagtggacgcaccgggcgatcgcgccgatcgagggcaccttcgggtgcctggcgccggagtactacacgcgcggcatcgtggacgagaagacggacgtgttcgccttcggcgtcttcctgctggagctcatggccggccggaagccggtggacggcacccacaggagcctcctcggctgggcgaggcccctgctcaacgagggcaagacggaggcgctgctggacccgaggatcgtcgccggcggcgatggcggctacgacgccgagcaggcccggcggctggcgttcgtggcgtcgctctgcgtccgcgcgtcggcgacgtggaggccgtccatgacagaggtcctggagctgctggagggcgtggagatcaaggaggagcggtgggcgatgccggagccggcggccggcgacgacgagggggaggaaatgtggggcttcgacgacctcgacgacgacgacgatgaggaatccggcacgccgtcccctttgtcaacatcctcagccttgagcacttagcacgggctaagattgcgtcagacgagtgtgatgcttgctgaaatttttgctccttcccacctgccccgccccacatgtaaaggcttttcgttgtcgaggttgtgaatacaaaggttatctgtgagaggcaagt

SEQ ID NO: 65924 - protein, 392 aa, Triticum aestivum
  peptide (1)..(392): Ceres Seq. ID no. 13657139
MKPLYLRGSGSFKRLLLSLSPHRAKRVHAPPGDAHAESPQSPPPTERRPEWECFSYEEVRRATDGFRAANLVGRGGSSEVYRGELADGRAVAVKRLMGASACERRERDFLAELGTVGHARHPNVCPLLGCCVDRDLYLVFAFSARGSVSANLHDGEEGAPAMGWEARYGVAVGTARGLEYLHKGCRRRIIHRDIKASNVLLTDDFQPQISDFGLAKWLPTEWTHRAIAPIEGTFGCLAPEYYTRGIVDEKTDVFAFGVFLLELMAGRKPVDGTHRSLLGWARPLLNEGKTEALLDPRIVAGGDGGYDAEQARRLAFVASLCVRASATWRPSMTEVLELLEGVEIKEERWAMPEPAAGDDEGEEMWGFDDLDDDDDEESGTPSPLSTSSALST

SEQ ID NO: 65925 - protein, 296 aa, Triticum aestivum
  peptide (1)..(296): Ceres Seq. ID no. 13657140
MGASACERRERDFLAELGTVGHARHPNVCPLLGCCVDRDLYLVFAFSARGSVSANLHDGEEGAPAMGWEARYGVAVGTARGLEYLHKGCRRRIIHRDIKASNVLLTDDFQPQISDFGLAKWLPTEWTHRAIAPIEGTFGCLAPEYYTRGIVDEKTDVFAFGVFLLELMAGRKPVDGTHRSLLGWARPLLNEGKTEALLDPRIVAGGDGGYDAEQARRLAFVASLCVRASATWRPSMTEVLELLEGVEIKEERWAMPEPAAGDDEGEEMWGFDDLDDDDDEESGTPSPLSTSSALST

SEQ ID NO: 65926 - protein, 231 aa, Triticum aestivum
  peptide (1)..(231): Ceres Seq. ID no. 13657141
MGWEARYGVAVGTARGLEYLHKGCRRRIIHRDIKASNVLLTDDFQPQISDFGLAKWLPTEWTHRAIAPIEGTFGCLAPEYYTRGIVDEKTDVFAFGVFLLELMAGRKPVDGTHRSLLGWARPLLNEGKTEALLDPRIVAGGDGGYDAEQARRLAFVASLCVRASATWRPSMTEVLELLEGVEIKEERWAMPEPAAGDDEGEEMWGFDDLDDDDDEESGTPSPLSTSSALST

SEQ ID NO: 65927 - DNA, 1863 bp, Triticum aestivum
  misc_feature (1)..(1863): Ceres Seq. ID no. 15169511
ttactggtagtacatctgttccgtctttcgccgaacacgcctcgcgcgccgaagcacgctacctggaactggaaggtgttcttcctcctccgctctactgtgctcccgtggcgcggagatccaaccggagctggaccgactccttttgccgaaccagtgtgctagctactgaagcggccatggaagtggtttcttccagtcactcttgcttggcatttcatcaaacacctaccagtgctcggaggtctctgggcactggtcttggtctgcggcataccaagtttgctcggccaagaaaaagcgcagttctctgtgttgggagagcttcaaatcctggtgattcaggaaagctgcatgtcagccgcagcttcgatgtaagcgatgtcgatgctgccctccagggcatctccaagaaggtaggccagatcgagaaagtgtccattcctggtctgccagaagggccagacagttctcaaatcagcactggtttgtgggagtggaagccgaagctgacggtatactacgagaagtctggcaccaagaatagcaaggcgccagcagtgctttttctaccaggttttggggtgggcacgttccattttgagaagcaattgatggatcttggccgtgattacaaggtgtggacgatggattttctgggacagggaatgtcattggcgtgtgaagatcccgctcctaaggccatggcggaggaggatgaggaatcatattggggttttggacaagattcacaaccatgggcagatgaattggtgtactctgtagacttgtggcgtgaccaggtccagcacttcattgaagaggttatcggtgagccagtttatatcgtgggaaactctcttggaggttttgttgctctatatttagctgcatccagcccacaccttgtaaagggggtcacattgcttaacgcaacgccattttggggtttccttcccaatcctgcaagatctcctcgtttgtcaaagatttttccatgggctgggacatttcctcttccatcagttgtgaggaaacttactgaaacagtgtggcagaagataagcgacccaagaagtatacagaagatactcaggcaagtatatgctgaccactcaacaaatgttgacaaggtgttctcgcgtattatagagacaacagaacacccggcagctgctgcatcatttgcctccattatgtttgctccaatgggccagatatcctttcaggaggcactgtctaggtgccaaaggcaggacattcccatttcccttatgtatgggaaagaagacccgtgggttacaccttattggggtatcagagtcaagcaacaggtgccagaagcaccctattatgaaattagccctgccggtcactgtcctcacgacgaggttcctgaggttataaactatttgctccgaggatggcttaagaatgtggagtctgagggttcagttgacctcccatttcttgaagattccagctttcaagaacatggtgtgtcgaaggagctggagtttgtcaggacagggtccaagaaatcagttagtgtgcggctcttcggttcccaaatttccctgtggagccaactgagctcattcttgaagcggcatgcctccaacataagggtagtgtccagatgattcgtccgtagttcgttagatagtagaagcttcaattgtatattgtattcattattctttatgtaaagtagtcaggttgatgcctagatgtacgaaatagagacaagttcaaatattttagtgaatgtgaatatgtgtagtacagagttagcattgggcgtcaaacatctgtcgtggttgtattcataggaattcaagatcacatattttcctgctcggt

SEQ ID NO: 65928 - protein, 546 aa, Triticum aestivum
  peptide (1)..(546): Ceres Seq. ID no. 15169512
TGSTSVPSFAEHASRAEARYLELEGVLPPPLYCAPVARRSNRSWTDSFCRTSVLATEAAMEVVSSSHSCLAFHQTPTSARRSLGTGLGLRHTKFARPRKSAVLCVGRASNPGDSGKLHVSRSFDVSDVDAALQGISKKVGQIEKVSIPGLPEGPDSSQISTGLWEWKPKLTVYYEKSGTKNSKAPAVLFLPGFGVGTFHFEKQLMDLGRDYKVWTMDFLGQGMSLACEDPAPKAMAEEDEESYWGFGQDSQPWADELVYSVDLWRDQVQHFIEEVIGEPVYIVGNSLGGFVALYLAASSPHLVKGVTLLNATPFWGFLPNPARSPRLSKIFPWAGTFPLPSVVRKLTETVWQKISDPRSIQKILRQVYADHSTNVDKVFSRIIETTEHPAAAASFASIMFAPMGQISFQEALSRCQRQDIPISLMYGKEDPWVTPYWGIRVKQQVPEAPYYEISPAGHCPHDEVPEVINYLLRGWLKNVESEGSVDLPFLEDSSFQEHGVSKELEFVRTGSKKSVSVRLFGSQISLWSQLSSFLKRHASNIRVVSR

SEQ ID NO: 65929 - protein, 487 aa, Triticum aestivum
  peptide (1)..(487): Ceres Seq. ID no. 15169513
MEVVSSSHSCLAFHQTPTSARRSLGTGLGLRHTKFARPRKSAVLCVGRASNPGDSGKLHVSRSFDVSDVDAALQGISKKVGQIEKVSIPGLPEGPDSSQISTGLWEWKPKLTVYYEKSGTKNSKAPAVLFLPGFGVGTFHFEKQLMDLGRDYKVWTMDFLGQGMSLACEDPAPKAMAEEDEESYWGFGQDSQPWADELVYSVDLWRDQVQHFIEEVIGEPVYIVGNSLGGFVALYLAASSPHLVKGVTLLNATPFWGFLPNPARSPRLSKIFPWAGTFPLPSVVRKLTETVWQKISDPRSIQKILRQVYADHSTNVDKVFSRIIETTEHPAAAASFASIMFAPMGQISFQEALSRCQRQDIPISLMYGKEDPWVTPYWGIRVKQQVPEAPYYEISPAGHCPHDEVPEVINYLLRGWLKNVESEGSVDLPFLEDSSFQEHGVSKELEFVRTGSKKSVSVRLFGSQISLWSQLSSFLKRHASNIRVVSR

SEQ ID NO: 65930 - protein, 342 aa, Triticum aestivum
  peptide (1)..(342): Ceres Seq. ID no. 15169514
MDLGRDYKVWTMDFLGQGMSLACEDPAPKAMAEEDEESYWGFGQDSQPWADELVYSVDLWRDQVQHFIEEVIGEPVYIVGNSLGGFVALYLAASSPHLVKGVTLLNATPFWGFLPNPARSPRLSKIFPWAGTFPLPSVVRKLTETVWQKISDPRSIQKILRQVYADHSTNVDKVFSRIIETTEHPAAAASFASIMFAPMGQISFQEALSRCQRQDIPISLMYGKEDPWVTPYWGIRVKQQVPEAPYYEISPAGHCPHDEVPEVINYLLRGWLKNVESEGSVDLPFLEDSSFQEHGVSKELEFVRTGSKKSVSVRLFGSQISLWSQLSSFLKRHASNIRVVSR

SEQ ID NO: 65931 - DNA, 1344 bp, Triticum aestivum
  misc_feature (1)..(1344): Ceres Seq. ID no. 13657142
ccattacctagaacatcctagtcgaaaattcgaccaaacctcccacctcgcacctcgccgcccgatccgacgcgccggcgacccgccgccgctctcgagcgtcgccgatccgcggcgcagatccctcacgaggttttctcaccttattagctcgctggtgcaggactgccacggctcgccggctcttgaatttcagcgcacgcggatctggtgggaggagccccgtgggcgccgctgccttggcgatgtcgagggtccgggacaggacggaggacttcaaggagtccgttcgcgtcgccgcgctctcccatggctacacggagtcgcaattggccgcgctcatgtcgtctttcatcatccggaagccgtcgcccaaatcgccgttcacaaatgcagcaatcaagacgcttgagagcatcagggagctcgagaagtttatagtgaagcacaggagggactatgtggacatgcatcgcaccacggagcaagagagggacaacattgagcatgaagttggtatttttgtaaaagcatgcaaggaacagatagatatcctaaagaacaggatccttgaagatgagaggaatagaagagcgaacacatggcttggcacaagagatgagacttcccggttagacttgatagctcaccagcatggtgtggttttgattttgagcgagcgtctccactcagtaactgcacaatttgatcgccttaggtccctgcgctttcaagaagctattaatagggtgatgccaagaaagaagattaagaagaagccagaaataaaacctactgaaccatccaagtcaaaccttgtattgaaatctgatgtctcgaaggttgaagatcgggaggtatcaactgcgcccttaagagttcaagaacaactcttggacgatgaaacacgagctctccagatggagttgaccaatcttcttgatactgtccaagaaacggagacaaagatgatagagatgtcagcacttaatcatcttatgtcaacacatgttctacagcaagctcagcagattcaatatttatacgaccaggcagtggaagcaacgaacaacgtggagcgtgggaacaaggagctatcccaggcgatccagcggaacaacagcagtagaacctttctcctgcttttcttctttgttcttactttctctgttctgtttcttgactggtacaaaaactgaattagcagctcatgtaaccgtactattgcgcaaatggattgagctattgatgtgtcatctcttgtgggatgattatcacttgtcatgcatattggtcagtgttactctgttaagattctaagattttgccgccgttggcaaacat

SEQ ID NO: 65932 - protein, 317 aa, Triticum aestivum
  peptide (1)..(317): Ceres Seq. ID no. 13657143
MSRVRDRTEDFKESVRVAALSHGYTESQLAALMSSFIIRKPSPKSPFTNAAIKTLESIRELEKFIVKHRRDYVDMHRTTEQERDNIEHEVGIFVKACKEQIDILKNRILEDERNRRANTWLGTRDETSRLDLIAHQHGVVLILSERLHSVTAQFDRLRSLRFQEAINRVMPRKKIKKKPEIKPTEPSKSNLVLKSDVSKVEDREVSTAPLRVQEQLLDDETRALQMELTNLLDTVQETETKMIEMSALNHLMSTHVLQQAQQIQYLYDQAVEATNNVERGNKELSQAIQRNNSSRTFLLLFFFVLTFSVLFLDWYKN

SEQ ID NO: 65933 - protein, 285 aa, Triticum aestivum
  peptide (1)..(285): Ceres Seq. ID no. 13657144
MSSFIIRKPSPKSPFTNAAIKTLESIRELEKFIVKHRRDYVDMHRTTEQERDNIEHEVGIFVKACKEQIDILKNRILEDERNRRANTWLGTRDETSRLDLIAHQHGVVLILSERLHSVTAQFDRLRSLRFQEAINRVMPRKKIKKKPEIKPTEPSKSNLVLKSDVSKVEDREVSTAPLRVQEQLLDDETRALQMELTNLLDTVQETETKMIEMSALNHLMSTHVLQQAQQIQYLYDQAVEATNNVERGNKELSQAIQRNNSSRTFLLLFFFVLTFSVLFLDWYKN

SEQ ID NO: 65934 - protein, 243 aa, Triticum aestivum
  peptide (1)..(243): Ceres Seq. ID no. 13657145
MHRTTEQERDNIEHEVGIFVKACKEQIDILKNRILEDERNRRANTWLGTRDETSRLDLIAHQHGVVLILSERLHSVTAQFDRLRSLRFQEAINRVMPRKKIKKKPEIKPTEPSKSNLVLKSDVSKVEDREVSTAPLRVQEQLLDDETRALQMELTNLLDTVQETETKMIEMSALNHLMSTHVLQQAQQIQYLYDQAVEATNNVERGNKELSQAIQRNNSSRTFLLLFFFVLTFSVLFLDWYKN

SEQ ID NO: 65935 - DNA, 1618 bp, Triticum aestivum
  misc_feature (1)..(1618): Ceres Seq. ID no. 13656547
acataaatcatttgatcagcctctcgcctcttcataaggtagctagctcgctcaatccatactaccactatccctctcgaccgtctccgctttatccaatttaggcacttgtgttcagctatctatcgagaaggataggagtagaaggaaggcgaccatggcaagcagcaccagcatcccagccaccaccttgggcgagatccgtgttgctcagcgtgcggatgggccggcggcgatgctggccatcggcacggctaacccgccccactgcgtgccccaggaagactaccccgactactacttcggcgtcaccaagagcgaccacctcaccgacctcaagcgcaccttcgccaaactatgcgggatgacgggcatcggcaggcgtttcttccaccacacggacgaactgctcgccacacacccggacttgtccctcgacgcccggctggacgtcgtggctactgccgccccagagctcgctgcgtcggctgcggcgaacgccatcgccgagtggggccgtccggcgggcgacatcacccatctcgtcgtcagcacgaacgctgggtcgcatgccccgggcaccgacgtccgcttggtctccctcctcggcctccgccatgatgtcctgcgcactgtgctccagctcaacggctgcgcttccggatgcgccgccctgcgcctagccaaagaccttgccgagaacaaccatggcgcgcgcgtcctcgtggcctgcgtcgagctcactatcaccgccttccgcgggcccgatgaggcggactccttcgacaccctcatcccccaggggctcttcggtgacggtgcaggcgccgccatcgtgggtgctgaaccctacgtccacgagcgcccgctgtttgagatggtgtcagcctcccagtacgtgataccagacaccgagcacatgctcaccatgcagctcggcagcggtggcatcggcgggaccattgccaccggactgccaagactggcggcgggcatcgttgagaagtgcttgctggatgcgtttggcgaccgcctagccggcatcggaggtgtcgtcgaatggaacaacctcttctgggccgtgcatcccggcagcagtgcgatgttggaccacatcgtcagggcactccggcttgctccggcgaagctggcggcgagcagaaccgtggtgagagagtacgggaacatgctgggcgccacggtgatcttcgtgctcgatgaggtcaggcgccaaagagaagatcctgaaggagagggagctagccatgatgaaggttggggggttatgatgggatttggaccggggttcactgtggagacgatgctgctgcatgccgctacctaggtaattagaaagaaggaataaaaaaacacatagcatatatatgttcaataaagtgcatgcaatgcaaccttttatatttccatatccacatatcacctatatatacgtacgtgtaagagatgtgaacatgtggtgtgacagtggtcaagtcctgtaagagtgatctgcagtatatggttataaataccacttcagctacttgtaggtttcaaaaaaaaaaaaaaaaaaaaaaaaaaccaaaaaaaaaaaaaaaaaagcttatcgataccgtcg

SEQ ID NO: 65936 - protein, 395 aa, Triticum aestivum
  peptide (1)..(395): Ceres Seq. ID no. 13656548
MASSTSIPATTLGEIRVAQRADGPAAMLAIGTANPPHCVPQEDYPDYYFGVTKSDHLTDLKRTFAKLCGMTGIGRRFFHHTDELLATHPDLSLDARLDVVATAAPELAASAAANAIAEWGRPAGDITHLVVSTNAGSHAPGTDVRLVSLLGLRHDVLRTVLQLNGCASGCAALRLAKDLAENNHGARVLVACVELTITAFRGPDEADSFDTLIPQGLFGDGAGAAIVGAEPYVHERPLFEMVSASQYVIPDTEHMLTMQLGSGGIGGTIATGLPRLAAGIVEKCLLDAFGDRLAGIGGVVEWNNLFWAVHPGSSAMLDHIVRALRLAPAKLAASRTVVREYGNMLGATVIFVLDEVRRQREDPEGEGASHDEGWGVMMGFGPGFTVETMLLHAAT

SEQ ID NO: 65937 - protein, 369 aa, Triticum aestivum
  peptide (1)..(369): Ceres Seq. ID no. 13656549
MLAIGTANPPHCVPQEDYPDYYFGVTKSDHLTDLKRTFAKLCGMTGIGRRFFHHTDELLATHPDLSLDARLDVVATAAPELAASAAANAIAEWGRPAGDITHLVVSTNAGSHAPGTDVRLVSLLGLRHDVLRTVLQLNGCASGCAALRLAKDLAENNHGARVLVACVELTITAFRGPDEADSFDTLIPQGLFGDGAGAAIVGAEPYVHERPLFEMVSASQYVIPDTEHMLTMQLGSGGIGGTIATGLPRLAAGIVEKCLLDAFGDRLAGIGGVVEWNNLFWAVHPGSSAMLDHIVRALRLAPAKLAASRTVVREYGNMLGATVIFVLDEVRRQREDPEGEGASHDEGWGVMMGFGPGFTVETMLLHAAT

SEQ ID NO: 65938 - protein, 326 aa, Triticum aestivum
  peptide (1)..(326): Ceres Seq. ID no. 13656550
MTGIGRRFFHHTDELLATHPDLSLDARLDVVATAAPELAASAAANAIAEWGRPAGDITHLVVSTNAGSHAPGTDVRLVSLLGLRHDVLRTVLQLNGCASGCAALRLAKDLAENNHGARVLVACVELTITAFRGPDEADSFDTLIPQGLFGDGAGAAIVGAEPYVHERPLFEMVSASQYVIPDTEHMLTMQLGSGGIGGTIATGLPRLAAGIVEKCLLDAFGDRLAGIGGVVEWNNLFWAVHPGSSAMLDHIVRALRLAPAKLAASRTVVREYGNMLGATVIFVLDEVRRQREDPEGEGASHDEGWGVMMGFGPGFTVETMLLHAAT

SEQ ID NO: 65939 - DNA, 1802 bp, Triticum aestivum
  misc_feature (1)..(1802): Ceres Seq. ID no. 15169611
agaacatcctaatcgaaaaatccaatcagtcagccacctcaagacagatccccacagaccacggagcagtcagccatggataaggcatacattgccgtcctctccttcgccttcctcttcctgctccactacattctgggcaagaagagcaatggcagcaagggcgccgtgcagctgccgccgagccctccggccatcccgttcttcggccacctccacctcgtggagaagccgctgcacgccgcgctgtgccgtctgggggcgcgctacgggccggtcttctcgctgcggctcggcgcgcgcaacgccgtggtggtgtcctcgccggcgtgcgccagggagtgcttcacggagcacgacgtggccttcgccaaccggccgcagttcccctcgcagatgctcgtctcctacggcggcacctcgctcgtcagctccagctacggcccgcactggcgcaacctccgccgcgtggccgccgtgcggctgctctccgcgcaccgcgtcgccggcatgtcgggcgtcatcgccgctgaggtgcgcgccatggcgcgccggctgtgccgcgccgccgcggcgtccaccggcggcggcgccgcccgggtggagctcaagcggagtctcttcgagctctccctcagcgtgctcatggagaccatcgcgcagaccaaggggacccgcccggaggcggacggcgacacggacatgtccctggaggcgcaggagttcaagcaggtggtggacgagatcatcccgctcattggcgcggccaacgtgtgggactacctgccggtgatgcggtggttcgacgtgtccggcgtgaggagcaggatcctggccacggtgagcaggagggacgccttcctccatcggctcatcgacgcggagcgacggaggatggacgagggcggcgccggcgacgagggcgagaaaaagagcatgattgccgtgctcctcactctgcagaagacagagccggagctgtacactgatcagatgatcatcgctctgtgtgcgaatctctttgtggccggaacggagaccacctcaaccacgatagaatgggccatgtcgctcctgctgaaccacccggcggcgctcaagaaggcccaggccgagatggacgcgtccatcggggcctcccgcatggtcgccgccgacgacgtgccccgcctcagctacctccagtgcatcatcaacgagacgctacgcctgtacccggcggcgccgctgctgctgccgcacgagtcctccgccgactgcaaggtcggcggctacgacgtgccaagcggcacgatgctgatcgtgaacgcgtacgccatccacagggacccggccgtgtgggaggacccggcggcgttccggccggagcggttcgaggacggcaaggccgacgggctgctgctgatgccgttcgggatggggcggcggaggtgccccggcgagacgctggcgctgcagacggtcggggtggttctcgggacgctggtgcagtgcttcgactgggatcgggtggacggcgcggaggtggacatgacggagggggtggggatcaccatgcccaaggccgtggctttggaggccgtgtgtaggcctcgcgcggccatgggcgatgtccttcagaagctctgaggatcgaacttgttggcatcctatatgtacagtagtttccagtagcatcgtcccgtatgcatggcccgataccgttttgatgtagtactgtagtaccgaataaacttttttttaactacttggcgcactttattaaactcatatcaaagttacatcattcacaatgtccgaac

SEQ ID NO: 65940 - protein, 517 aa, Triticum aestivum
  peptide (1)..(517): Ceres Seq. ID no. 15169612
MDKAYIAVLSFAFLFLLHYILGKKSNGSKGAVQLPPSPPAIPFFGHLHLVEKPLHAALCRLGARYGPVFSLRLGARNAVVVSSPACARECFTEHDVAFANRPQFPSQMLVSYGGTSLVSSSYGPHWRNLRRVAAVRLLSAHRVAGMSGVIAAEVRAMARRLCRAAAASTGGGAARVELKRSLFELSLSVLMETIAQTKGTRPEADGDTDMSLEAQEFKQVVDEIIPLIGAANVWDYLPVMRWFDVSGVRSRILATVSRRDAFLHRLIDAERRRMDEGGAGDEGEKKSMIAVLLTLQKTEPELYTDQMIIALCANLFVAGTETTSTTIEWAMSLLLNHPAALKKAQAEMDASIGASRMVAADDVPRLSYLQCIINETLRLYPAAPLLLPHESSADCKVGGYDVPSGTMLIVNAYAIHRDPAVWEDPAAFRPERFEDGKADGLLLMPFGMGRRRCPGETLALQTVGVVLGTLVQCFDWDRVDGAEVDMTEGVGITMPKAVALEAVCRPRAAMGDVLQKL

SEQ ID NO: 65941 - protein, 410 aa, Triticum aestivum
  peptide (1)..(410): Ceres Seq. ID no. 15169613
MLVSYGGTSLVSSSYGPHWRNLRRVAAVRLLSAHRVAGMSGVIAAEVRAMARRLCRAAAASTGGGAARVELKRSLFELSLSVLMETIAQTKGTRPEADGDTDMSLEAQEFKQVVDEIIPLIGAANVWDYLPVMRWFDVSGVRSRILATVSRRDAFLHRLIDAERRRMDEGGAGDEGEKKSMIAVLLTLQKTEPELYTDQMIIALCANLFVAGTETTSTTIEWAMSLLLNHPAALKKAQAEMDASIGASRMVAADDVPRLSYLQCIINETLRLYPAAPLLLPHESSADCKVGGYDVPSGTMLIVNAYAIHRDPAVWEDPAAFRPERFEDGKADGLLLMPFGMGRRRCPGETLALQTVGVVLGTLVQCFDWDRVDGAEVDMTEGVGITMPKAVALEAVCRPRAAMGDVLQKL

SEQ ID NO: 65942 - protein, 372 aa, Triticum aestivum
  peptide (1)..(372): Ceres Seq. ID no. 15169614
MSGVIAAEVRAMARRLCRAAAASTGGGAARVELKRSLFELSLSVLMETIAQTKGTRPEADGDTDMSLEAQEFKQVVDEIIPLIGAANVWDYLPVMRWFDVSGVRSRILATVSRRDAFLHRLIDAERRRMDEGGAGDEGEKKSMIAVLLTLQKTEPELYTDQMIIALCANLFVAGTETTSTTIEWAMSLLLNHPAALKKAQAEMDASIGASRMVAADDVPRLSYLQCIINETLRLYPAAPLLLPHESSADCKVGGYDVPSGTMLIVNAYAIHRDPAVWEDPAAFRPERFEDGKADGLLLMPFGMGRRRCPGETLALQTVGVVLGTLVQCFDWDRVDGAEVDMTEGVGITMPKAVALEAVCRPRAAMGDVLQKL

SEQ ID NO: 65943 - DNA, 691 bp, Triticum aestivum
  misc_feature (1)..(691): Ceres Seq. ID no. 13597970
acacactgcagacaatggcgtctccagccagaagcgcgagcgcctctccagtcctcctcttgctcgtcgtcctcgccgccggggcaagcgcggcaccgctcaccatcacgaaccggtgccacttcacggtgtggccggcggtggcgctcgtgctccaccaagggggcggcggcaccgagctccacccaggggccagctggagcctcgacacgccggtgatcggctcccagtacatatgggggcgcacgggctgctccttcgaccgggccggcaaggggcggtgccagaccggcgactgcggtggcagctcgctgacttgcgggggcaacccggcggtgccggtgaccatggccgaggtgtccgtgctccaaggcaactatacctacggcgtcacgtcgacgctcaaggggttcaacctgcccatggacctgaagtgcagctccggcgacgcgctcccgtgccggaaggctgggtgcgacgttgtccagccgtacgcgaagagctgcagcgcggctggaagccggctccagatcgtcttctgcccatgatgagcggcagaacatatatagcacgtatacgcatgtaataaccaccgcacgtacgggtagtagtacctccgtataccgtacacgtgtgtcaggtattcccagccgcagtgcatacactcgagcgagattccaataaaggtgcc

SEQ ID NO: 65944 - protein, 194 aa, Triticum aestivum
  peptide (1)..(194): Ceres Seq. ID no. 13597971
HTADNGVSSQKRERLSSPPLARRPRRRGKRGTAHHHEPVPLHGVAGGGARAPPRGRRHRAPPRGQLEPRHAGDRLPVHMGAHGLLLRPGRQGAVPDRRLRWQLADLRGQPGGAGDHGRGVRAPRQLYLRRHVDAQGVQPAHGPEVQLRRRAPVPEGWVRRCPAVREELQRGWKPAPDRLLPMMSGRTYIARIRM

SEQ ID NO: 65945 - protein, 181 aa, Triticum aestivum
  peptide (1)..(181): Ceres Seq. ID no. 13597972
TLQTMASPARSASASPVLLLLVVLAAGASAAPLTITNRCHFTVWPAVALVLHQGGGGTELHPGASWSLDTPVIGSQYIWGRTGCSFDRAGKGRCQTGDCGGSSLTCGGNPAVPVTMAEVSVLQGNYTYGVTSTLKGFNLPMDLKCSSGDALPCRKAGCDVVQPYAKSCSAAGSRLQIVFCP

SEQ ID NO: 65946 - protein, 177 aa, Triticum aestivum
  peptide (1)..(177): Ceres Seq. ID no. 13597973
MASPARSASASPVLLLLVVLAAGASAAPLTITNRCHFTVWPAVALVLHQGGGGTELHPGASWSLDTPVIGSQYIWGRTGCSFDRAGKGRCQTGDCGGSSLTCGGNPAVPVTMAEVSVLQGNYTYGVTSTLKGFNLPMDLKCSSGDALPCRKAGCDVVQPYAKSCSAAGSRLQIVFCP

SEQ ID NO: 65947 - DNA, 1126 bp, Triticum aestivum
  misc_feature (1)..(1126): Ceres Seq. ID no. 12465091
gagtcgaaccgtccgagaaggcagtgcacgccgccgccgccccctcctcaatcccccggccccgccgccccctcctcaatcccccggccccgccgcccaactccctccgcctctcacgcgcgtcgccgcccaccgcgcccctgctgtctccaccccgtccgcaatctctcgccactgggtttcgaggggaacatggcgagagatggcggacgggctggcggtctggcacgcgatcgagcagtgggtgacagactacctgaccatctactacccgaacgacggcgtgctgcagggcgacgtggagctgcaggcgtggtggaaggaggtgcgggaggtcgggcacggcgacctcaaggacgcggcgtggtggcccaagatgcacaccgtggcggagctgatcaaggcctgcgccaccatcatctggacggggtcggcgctgcacgcggccgtcaacttcgggcagtacccctactcggggtaccaccccaacaagccgtcggcgagccggcggccgatgccgtcgccgggcagcgaggagtacgccctgctggagcgcgccccggagaaggcattcatcctcaccatcaccaaccagttccaggcgctggtgggcatctcgctgatggagatcctgtccaagcactcctccgacgaggtgtacctggggcagcacgacacgccggcgtggacgtcggacgccaaggcgcaggaggcgttcaggcggttcggggcgaggctggagggcatcgagaagcaggtggtggccatgaacggggacccgcggctcaagaaccgcaccgggccggccaagttcccctacatgctgctctaccccaacacctccgaccacacgggccaggccgaggggctcacggccaggggcatccccaacagcatctccatctgaggacctccatctctgcttgcttgcttgcttgcaccggatactagctactagctactgtgggtgttctgccggtgcatatgcttgccatgatctcaataataataaggcaataatgcgtgcgtgcacgacgggtccgatcggcatgcggtgcgtgtgcgtcgtcgtgtagagaaaaattcccttcatttgcccaataataaagtcgatgttgtgatgttc

SEQ ID NO: 65948 - protein, 316 aa, Triticum aestivum
  peptide (1)..(316): Ceres Seq. ID no. 12465092
ESNRPRRQCTPPPPPPQSPGPAAPSSIPRPRRPTPSASHARRRPPRPCCLHPVRNLSPLGFEGNMARDGGRAGGLARDRAVGDRLPDHLLPERRRAAGRRGAAGVVEGGAGGRARRPQGRGVVAQDAHRGGADQGLRHHHLDGVGAARGRQLRAVPLLGVPPQQAVGEPAADAVAGQRGVRPAGARPGEGIHPHHHQPVPGAGGHLADGDPVQALLRRGVPGAARHAGVDVGRQGAGGVQAVRGEAGGHREAGGGHERGPAAQEPHRAGQVPLHAALPQHLRPHGPGRGAHGQGHPQQHLHLRTSISACLLACTGY

SEQ ID NO: 65949 - protein, 301 aa, Triticum aestivum
  peptide (1)..(301): Ceres Seq. ID no. 12465093
SRTVREGSARRRRPLLNPPAPPPPPQSPGPAAQLPPPLTRVAAHRAPAVSTPSAISRHWVSRGTWREMADGLAVWHAIEQWVTDYLTIYYPNDGVLQGDVELQAWWKEVREVGHGDLKDAAWWPKMHTVAELIKACATIIWTGSALHAAVNFGQYPYSGYHPNKPSASRRPMPSPGSEEYALLERAPEKAFILTITNQFQALVGISLMEILSKHSSDEVYLGQHDTPAWTSDAKAQEAFRRFGARLEGIEKQVVAMNGDPRLKNRTGPAKFPYMLLYPNTSDHTGQAEGLTARGIPNSISI

SEQ ID NO: 65950 - protein, 252 aa, Triticum aestivum
  peptide (1)..(252): Ceres Seq. ID no. 12465094
MARDGGRAGGLARDRAVGDRLPDHLLPERRRAAGRRGAAGVVEGGAGGRARRPQGRGVVAQDAHRGGADQGLRHHHLDGVGAARGRQLRAVPLLGVPPQQAVGEPAADAVAGQRGVRPAGARPGEGIHPHHHQPVPGAGGHLADGDPVQALLRRGVPGAARHAGVDVGRQGAGGVQAVRGEAGGHREAGGGHERGPAAQEPHRAGQVPLHAALPQHLRPHGPGRGAHGQGHPQQHLHLRTSISACLLACTGY

SEQ ID NO: 65951 - protein, 234 aa, Triticum aestivum
  peptide (1)..(234): Ceres Seq. ID no. 12465095
MADGLAVWHAIEQWVTDYLTIYYPNDGVLQGDVELQAWWKEVREVGHGDLKDAAWWPKMHTVAELIKACATIIWTGSALHAAVNFGQYPYSGYHPNKPSASRRPMPSPGSEEYALLERAPEKAFILTITNQFQALVGISLMEILSKHSSDEVYLGQHDTPAWTSDAKAQEAFRRFGARLEGIEKQVVAMNGDPRLKNRTGPAKFPYMLLYPNTSDHTGQAEGLTARGIPNSISI

SEQ ID NO: 65952 - DNA, 1016 bp, Triticum aestivum
  misc_feature (1)..(1016): Ceres Seq. ID no. 12619453
ctcccatctcccacttctccgccccctcgccccctccgccgttgacctcgtcggccgccgccgacgaggcctcctgtcgccggatgcccatcctctagacacccgctccgtcacaacctgaaccccgctcctctcccagacgagccgtgtcagcatccgactccaccgatcctccgaaccctagatcccctggcggaaccgaggtccatcccttcgaaatcaatgtatccaacatttgatgttggtgaccggattctcgccgagagggtttcatatattttccgggagccgcaagttttggacattgtgatcttccgtgcacccctagtccttcaggcattgggctacagctcaagtgatgtgttcatcaagagggttgtggccaagggcggggacatcgttgaagtgactgatggtcaattattagttaatggagtcgtccaagatgaggactttgtgctcgagccacccgattatgaaatggacccggtgagtgtgcctgaaggctacgtgtttgtgctgggggacaacagaaacaacagcttcgattcccataactggggaccgctacccgtgaagaacattcttgggagatctgtgcttcgatactggccaccatcgaaaataacagacacaatttatgatcacattgaccatgatgtggttcatggcatggcaggcatctcctgagatgcacagttgattcggcaatgctaaaccaacccaatttttttttgctgatgatctctgctgcattttttttctcctctagctatttatttgattgatgtcgccttgcacgtaatgcctggctgactcagtttttcccctgccctaccagcagatgcttgtttagaggcaacaattcttgtactgtaaccaaaggtctggctcgcctgtcgaatgagcatccatggcagcgcatggaaattttgttatgtttggcacaaggagagttggttgatctgtttcagatcttaatgtataagaagcagaaagcatatgccatattgtcc

SEQ ID NO: 65953 - protein, 155 aa, Triticum aestivum
  peptide (1)..(155): Ceres Seq. ID no. 12619454
MYPTFDVGDRILAERVSYIFREPQVLDIVIFRAPLVLQALGYSSSDVFIKRVVAKGGDIVEVTDGQLLVNGVVQDEDFVLEPPDYEMDPVSVPEGYVFVLGDNRNNSFDSHNWGPLPVKNILGRSVLRYWPPSKITDTIYDHIDHDVVHGMAGIS

SEQ ID NO: 65954 - DNA, 984 bp, Triticum aestivum
  misc_feature (1)..(984): Ceres Seq. ID no. 12619787
gaccgggtggcacgctgcccccaactcgcagttccagaatcgtcttccctttcctcggcgacccatgaaggaccccttcgaggcggccgttgaggagcaggactccccgccggattcgccggcgccgcccgaggaggaccctgccacagcggtcccccacacagccgccgaggactatgacggcagcgccggcgccggtggttcgcgcgccccgccgccgcggccgcggccttcggcgctagccgcgccctcgacctccgtagccccggcggcggcgaaggccaaggttcggccccataaggagcaggatgacgaccacgacgaggaagaccccatggaggtcgacctcgacaagctgccctccggcaccagcgatcccgacaagctcgccaagatgaatgctttgttatcccaatttacagaagaccagatgaaccggtatgagtcctttcgtagatctggattccagaaatctaacatgaaaaagctattggcgagtatcactggcagtcaaaagatatctatgccaacgaccatcgtagtatcaggaatagcaaagatgtttgtcggcgaggtcattgaaacagcaagaatagttatgagtgaaaggaaagattctggacccatcaggccttgccacatcagagaagcatacagaagattgaagcttgaagggaagatcccaaagcgatccgttcctagactctttcgctagagtcgaatcatcgctgttgatgtaagtcaggcgtcgtatgattctctctcggaggcaaaaggttatggtaactgtaatggaacttccgctttgcaatctcaatgcgttccgacacttctacttgccatcgcacggaaggtgattgttgggagaacaaagaaaaatagtagccgcagcgtgatggtattttatggtgcttgctactcattggaatttgcatctataagctgtaagttgtgactgtttcatgcttatttactagtggttct

SEQ ID NO: 65955 - protein, 237 aa, Triticum aestivum
  peptide (1)..(237): Ceres Seq. ID no. 12619788
TGWHAAPNSQFQNRLPFPRRPMKDPFEAAVEEQDSPPDSPAPPEEDPATAVPHTAAEDYDGSAGAGGSRAPPPRPRPSALAAPSTSVAPAAAKAKVRPHKEQDDDHDEEDPMEVDLDKLPSGTSDPDKLAKMNALLSQFTEDQMNRYESFRRSGFQKSNMKKLLASITGSQKISMPTTIVVSGIAKMFVGEVIETARIVMSERKDSGPIRPCHIREAYRRLKLEGKIPKRSVPRLFR

SEQ ID NO: 65956 - protein, 216 aa, Triticum aestivum
  peptide (1)..(216): Ceres Seq. ID no. 12619789
MKDPFEAAVEEQDSPPDSPAPPEEDPATAVPHTAAEDYDGSAGAGGSRAPPPRPRPSALAAPSTSVAPAAAKAKVRPHKEQDDDHDEEDPMEVDLDKLPSGTSDPDKLAKMNALLSQFTEDQMNRYESFRRSGFQKSNMKKLLASITGSQKISMPTTIVVSGIAKMFVGEVIETARIVMSERKDSGPIRPCHIREAYRRLKLEGKIPKRSVPRLFR

SEQ ID NO: 65957 - protein, 126 aa, Triticum aestivum
  peptide (1)..(126): Ceres Seq. ID no. 12619790
MEVDLDKLPSGTSDPDKLAKMNALLSQFTEDQMNRYESFRRSGFQKSNMKKLLASITGSQKISMPTTIVVSGIAKMFVGEVIETARIVMSERKDSGPIRPCHIREAYRRLKLEGKIPKRSVPRLFR

SEQ ID NO: 65958 - DNA, 727 bp, Triticum aestivum
  misc_feature (1)..(727): Ceres Seq. ID no. 12619015
tccgcctttccctcccccattcgcgtcgcgtctccaccccacctcccctcgcctcctcctccacctccccgtgtcgcgagaaaccctcgtcccttcctcccctctcctccctcgtccctcctcccatggcggagtcgcccgagaacgccgccgcggcgcccgccgctcctcccgcccccgccccggccccggcgccggcgccgaagccgtccccgcccgccaggtccgggatcccgccgcggtacgacctcgacgccaagtgggacgcctgcctcgacctctccatccgccgcgtcgcctactcctccctcgccggcgccttcgggggcctcatcctcttccgtagcccaacaacccgctgggcatcagttgcacttggagctggtgtggggataggggctgcgttcactgaatgctcatacatattcaatggttctcctccaaagtggtcggccaatgcttcgactgttgctgctcattctgaagggggagacaattaaaacagtgtcgggcgggatgagtagcccaatcttggcggagttttggagcgtttgttgattgaacctagctgtttggtgtctgatgatatcgccacttgtcatagtatgtcctgaaagttagcgtgtgccccctcgtgaatttcttcacacattacgcggaaaccattcgtgactgcggtctgatgatatgaccctatggctccgtaagttgggtctgtcgtgaggtt

SEQ ID NO: 65959 - protein, 165 aa, Triticum aestivum
  peptide (1)..(165): Ceres Seq. ID no. 12619016
RLSLPHSRRVSTPPPLASSSTSPCREKPSSLPPLSSLVPPPMAESPENAAAAPAAPPAPAPAPAPAPKPSPPARSGIPPRYDLDAKWDACLDLSIRRVAYSSLAGAFGGLILFRSPTTRWASVALGAGVGIGAAFTECSYIFNGSPPKWSANASTVAAHSEGGDN

SEQ ID NO: 65960 - protein, 131 aa, Triticum aestivum
  peptide (1)..(131): Ceres Seq. ID no. 12619017
SAFPSPIRVASPPHLPSPPPPPPRVARNPRPFLPSPPSSLLPWRSRPRTPPRRPPLLPPPPRPRRRRRSRPRPPGPGSRRGTTSTPSGTPASTSPSAASPTPPSPAPSGASSSSVAQQPAGHQLHLELVWG

SEQ ID NO: 65961 - protein, 124 aa, Triticum aestivum
  peptide (1)..(124): Ceres Seq. ID no. 12619018
MAESPENAAAAPAAPPAPAPAPAPAPKPSPPARSGIPPRYDLDAKWDACLDLSIRRVAYSSLAGAFGGLILFRSPTTRWASVALGAGVGIGAAFTECSYIFNGSPPKWSANASTVAAHSEGGDN

SEQ ID NO: 65962 - DNA, 1022 bp, Triticum aestivum
  misc_feature (1)..(1022): Ceres Seq. ID no. 15224382
ttcctcccctcccctcccctccatccatcctcagccgccccttcgccggccggccatggcaaatgcttccctccagtccttcctcccccagcaccaccattccttcctcaacagcaacacccacgacggctcccctcccgcgctcctcaagctcaccaccaacagcaccaacgccagcaacagcatttccttcaagctcttcgccagcagctcctcctcggtgaccacaaccgccaactcgccggctccgactccggtcgccgccgccgccgcggcgacaacctcgccgcccaccccctccctggagctcctgggccagcagctcgcggcgggggactaccggcaggccgacgagaccacgcgcgccctcctcatcgtcctcgcgggcgaggccgcgcgccgccgagggtacgtcttcttctcggaggtccagttcatctccgtcgaggacctccgcgccgtggacgcgctctggctggagcacagcggcggcaggttcgggtacagcgtgcagcgccgggtttgggacaagtcgctgcgcgagttcacccgattcttcatcaagatcggctggatgaagaagctggacaccgaggtggagcagttcaactacagggccttccccgacgagttcatctgggagctcaccgacgacacgccggagggccacctgcccctcaccaatgccctcagggggacgcggctcctggagaacatcttcacccaccccgccttcgactgcgaagaagatgaagcagcaggggcagatgaggaggctgacaagggcagtgccactggtcagaataataaggatgacaacaaaggcaggggcaggccaaagagtttgacagatttcaagcccgactactccttttaaggagcgtgcaagtttgtgatgatgctgccatggggcagctgattttaaaaaaaagtcatgtttctgtagttcgttttggctgtttttgtactgaacatgcatgcaaatttgtgaccatatatattactataaagataagtgtttg

SEQ ID NO: 65963 - protein, 291 aa, Triticum aestivum
  peptide (1)..(291): Ceres Seq. ID no. 15224383
SSPPLPSIHPQPPLRRPAMANASLQSFLPQHHHSFLNSNTHDGSPPALLKLTTNSTNASNSISFKLFASSSSSVTTTANSPAPTPVAAAAAATTSPPTPSLELLGQQLAAGDYRQADETTRALLIVLAGEAARRRGYVFFSEVQFISVEDLRAVDALWLEHSGGRFGYSVQRRVWDKSLREFTRFFIKIGWMKKLDTEVEQFNYRAFPDEFIWELTDDTPEGHLPLTNALRGTRLLENIFTHPAFDCEEDEAAGADEEADKGSATGQNNKDDNKGRGRPKSLTDFKPDYSF

SEQ ID NO: 65964 - protein, 273 aa, Triticum aestivum
  peptide (1)..(273): Ceres Seq. ID no. 15224384
MANASLQSFLPQHHHSFLNSNTHDGSPPALLKLTTNSTNASNSISFKLFASSSSSVTTTANSPAPTPVAAAAAATTSPPTPSLELLGQQLAAGDYRQADETTRALLIVLAGEAARRRGYVFFSEVQFISVEDLRAVDALWLEHSGGRFGYSVQRRVWDKSLREFTRFFIKIGWMKKLDTEVEQFNYRAFPDEFIWELTDDTPEGHLPLTNALRGTRLLENIFTHPAFDCEEDEAAGADEEADKGSATGQNNKDDNKGRGRPKSLTDFKPDYSF

SEQ ID NO: 65965 - protein, 250 aa, Triticum aestivum
  peptide (1)..(250): Ceres Seq. ID no. 15224385
FLPSPPLHPSSAAPSPAGHGKCFPPVLPPPAPPFLPQQQHPRRLPSRAPQAHHQQHQRQQQHFLQALRQQLLLGDHNRQLAGSDSGRRRRRGDNLAAHPLPGAPGPAARGGGLPAGRRDHARPPHRPRGRGRAPPRVRLLLGGPVHLRRGPPRRGRALAGAQRRQVRVQRAAPGLGQVAARVHPILHQDRLDEEAGHRGGAVQLQGLPRRVHLGAHRRHAGGPPAPHQCPQGDAAPGEHLHPPRLRLRRR

SEQ ID NO: 65966 - DNA, 738 bp, Triticum aestivum
  misc_feature (1)..(738): Ceres Seq. ID no. 12619201
gttccacttccacagcgggcgccatggacgcggccgtgtccctgcaccaccacggggcgctccccgccgccgcagcctccctccagccccaccaccaccaccgcgcgctccacctcaggcacccgcctccggcctcctccatctccgcgcgcctgaccgtgaccgcgccgccccgccgctcctcctcctcctcgtctgtctccgccgctccgccggcgcacccggcgcgtgccagcaccaaaaccatcaccagcagccgcgccgccacgggctacgcggccgcgctagccgacgcgtcgctccgcgcgggcacgctgcccggggccgcccgccacgcgcgcgccctgctccggcgcctgaaggagcctccccgcgggcagcgcctggaggagcccgacgcgcgggtgggcgcgctggtgcggctgctcgtcggcaagggcaaggccggcatggtctccgacgtcatggccgagttcgccgccctctgcgaccacctgctcgccccgccgccgtcttcagcctcgtcgagcaagcgcgcccagtgcgcccccgcctactagcgcctgatgcacgtaacgtacgtgccatgctagcttttcggttttgcacttcaggattactggctgatgcatgcacgtacgtaacgccacgccggtatcaactgcagatgcccaactgcttgctactgtactatgactgtataattaactgtgagcactgtccatgcgcgtacgcatc

SEQ ID NO: 65967 - protein, 245 aa, Triticum aestivum
  peptide (1)..(245): Ceres Seq. ID no. 12619202
FHFHSGRHGRGRVPAPPRGAPRRRSLPPAPPPPPRAPPQAPASGLLHLRAPDRDRAAPPLLLLLVCLRRSAGAPGACQHQNHHQQPRRHGLRGRASRRVAPRGHAARGRPPRARPAPAPEGASPRAAPGGARRAGGRAGAAARRQGQGRHGLRRHGRVRRPLRPPARPAAVFSLVEQARPVRPRLLAPDARNVRAMLAFRFCTSGLLADACTYVTPRRYQLQMPNCLLLYYDCIINCEHCPCAYA

SEQ ID NO: 65968 - protein, 185 aa, Triticum aestivum
  peptide (1)..(185): Ceres Seq. ID no. 12619203
STSTAGAMDAAVSLHHHGALPAAAASLQPHHHHRALHLRHPPPASSISARLTVTAPPRRSSSSSSVSAAPPAHPARASTKTITSSRAATGYAAALADASLRAGTLPGAARHARALLRRLKEPPRGQRLEEPDARVGALVRLLVGKGKAGMVSDVMAEFAALCDHLLAPPPSSASSSKRAQCAPAY

SEQ ID NO: 65969 - protein, 178 aa, Triticum aestivum
  peptide (1)..(178): Ceres Seq. ID no. 12619204
MDAAVSLHHHGALPAAAASLQPHHHHRALHLRHPPPASSISARLTVTAPPRRSSSSSSVSAAPPAHPARASTKTITSSRAATGYAAALADASLRAGTLPGAARHARALLRRLKEPPRGQRLEEPDARVGALVRLLVGKGKAGMVSDVMAEFAALCDHLLAPPPSSASSSKRAQCAPAY

SEQ ID NO: 65970 - DNA, 1393 bp, Triticum aestivum
  misc_feature (1)..(1393): Ceres Seq. ID no. 15224772
gccgtggtttgttgccagaaaaacaatctatcttcgttccttgcttcgtctacctccgtccctcaaaactagttcgagctagctagggttagacccaacaattggtatcagagcctcgtttgttcatgtgctcgtggccatgacgatcgtccagcacggcgcagggggtagcacggtgtcgatgccaatgccgatgctcacaccggaaaactacacggtgtgggcgatcaaggccgaagccatcctcgacgcccagaacctctgggaagcggtgtcgccggcaggcgacgcggcggtcgacgcggggaaaaacaagacggcgagggtggtgctgttcggtgtgctctccgaagacttgttgatgcaggtatcgacgaagaagacggccgctgaggtgtgggccagcttgaagacgaggttcgtcggtgctgatcgggtccaggcggcgcggctctccactctccgtggcgagtttgacaacctgcgcatggaggagggggaggcgctttacgcgtacgccggcaaaatcggcggcatggcagcaaggtatgctggcctcggctcgacgctcgacgacaccgccatggtgaaaaaactgctcgacacggtgcccgatcggttgtatgccgcggtggccgggattgagcagttctgcgacgtggagacgatggtgttcgaggaggcgttgagcaggctcaaggagttcgacgaacgcttacgtcggcgcacgcaggacaacggcggacgaggcggcgatcagctgatgttcgcggcggcccagtgggaggcacggcagtgtcagcgcggcggcaacctcgaccatgacgacggtgcgagcagcgtggcttcgggcacgagatgacggcgcgggaagtgctacaactgtggcgttcgtggccacttctcccgtgactgccggcagccgaaggagaaggcgctcctcgccaacatcgacgacgagccgaccttactgtaggtcgtgtcttagggggagattcttaggaataagacacggcggtggtggtgaccagtgtgtgcgtgcgtgttggtcgtgccagacgccgtggcgagtgtgcgtgtgtgcgtgcgttgtgtgcgtgtcgagtctgtgctcataattgagtcgtagtcggttagcagcagtagctggacgcgttagaacgcgtcgtagaggcggtgtaggtgagcaggttgttgggcgctcgtacgtgcttgcgtaggaaaacaatggcttgggcgctacgtctcgtaggctacaaagccggccaggatttggtttgttagtgcgtcagattgatatacgtaggtggttaggagtccagatatgttttgatttgtccagctatatatatgacagagaaaagaggcgttcggcgccgtggtttgttgctac

SEQ ID NO: 65971 - protein, 240 aa, Triticum aestivum
  peptide (1)..(240): Ceres Seq. ID no. 15224773
MTIVQHGAGGSTVSMPMPMLTPENYTVWAIKAEAILDAQNLWEAVSPAGDAAVDAGKNKTARVVLFGVLSEDLLMQVSTKKTAAEVWASLKTRFVGADRVQAARLSTLRGEFDNLRMEEGEALYAYAGKIGGMAARYAGLGSTLDDTAMVKKLLDTVPDRLYAAVAGIEQFCDVETMVFEEALSRLKEFDERLRRRTQDNGGRGGDQLMFAAAQWEARQCQRGGNLDHDDGASSVASGTR

SEQ ID NO: 65972 - protein, 226 aa, Triticum aestivum
  peptide (1)..(226): Ceres Seq. ID no. 15224774
MPMPMLTPENYTVWAIKAEAILDAQNLWEAVSPAGDAAVDAGKNKTARVVLFGVLSEDLLMQVSTKKTAAEVWASLKTRFVGADRVQAARLSTLRGEFDNLRMEEGEALYAYAGKIGGMAARYAGLGSTLDDTAMVKKLLDTVPDRLYAAVAGIEQFCDVETMVFEEALSRLKEFDERLRRRTQDNGGRGGDQLMFAAAQWEARQCQRGGNLDHDDGASSVASGTR

SEQ ID NO: 65973 - protein, 224 aa, Triticum aestivum
  peptide (1)..(224): Ceres Seq. ID no. 15224775
MPMLTPENYTVWAIKAEAILDAQNLWEAVSPAGDAAVDAGKNKTARVVLFGVLSEDLLMQVSTKKTAAEVWASLKTRFVGADRVQAARLSTLRGEFDNLRMEEGEALYAYAGKIGGMAARYAGLGSTLDDTAMVKKLLDTVPDRLYAAVAGIEQFCDVETMVFEEALSRLKEFDERLRRRTQDNGGRGGDQLMFAAAQWEARQCQRGGNLDHDDGASSVASGTR

SEQ ID NO: 65974 - DNA, 1329 bp, Triticum aestivum
  misc_feature (1)..(1329): Ceres Seq. ID no. 15225131
aaaaactgcaagtccgcacctgtccggggaacccgtcccgatccgttccgcaaccagacccggccagttttcccccagcaagcatgggagtaattgcgttgacgacggggacgctgcacggggaatcggggagatattaaccgattccttttcctctggattccggccgtccttttcccgcactataaattccggggcagcggcaagaatccgcagagaccgctgtcagaaggccctgcactcaaactcagcaggtggaggggggcgatagaggcaacgggccgccggcgatgtcgtcgtcgtggaactcggtggggctggaggtgctctaccaggtcatcgggtggatcgccttcgtcgcctggtccttcagcttctacccgcaggtcgtcctcaactacaggcgcaagagtgtcgtcggtctgaacttcgattttctggtgctgaatttcacaaagcattcttcctacctcatatacaatgctgctctattcttcagccccttcatccagcaacagtatcatgacaagtttggtgataaagagatgattcctgttgctgcaaatgatgttgctttctctctacatgcagtggccttgacatcttttaccctttaccaagtttttatttatgagcgtggaaaccagaaagtctccaaagtgtgcatatcaatctctgctgttgtctggtcagctgctattgtttgcctcattgtagcttggccaaaaagtaactggctatggcttattgatgtattcaattcaatacaggttgcgatgacaacagtcaagtacatccctcaggctgtgatgaacttcaggcggaagagtacagttggttggagtattggcaatattttacttgatcttacagggggggtgctgaactttggtcagatgggtgtgcaatctattgatcagcacactttagtgaatttctatggaaatatcggcaagactcttctttcattggaaactgttttcttcgatgttctcttcataattcaacactatgtgttgtaccctgtcaaacgggatgagaatggtaaggccatcatttctgagagggtagctcctctgatcaggccctcagataagcctgaagaagatagtgtatgatatatgtacagtacacacagtgctgtctcaatttctatctgttttaacaaagataaaccacgattatttttcatgtattgtgaattaactgctgtacatatttcttcacggattactgtaaaaatttaaatattgcagaccttcagttttgtccttgacatttatactttgtgtaaagatttacaaaaaacaatatataattgatttggct

SEQ ID NO: 65975 - protein, 275 aa, Triticum aestivum
  peptide (1)..(275): Ceres Seq. ID no. 15225132
MSSSWNSVGLEVLYQVIGWIAFVAWSFSFYPQVVLNYRRKSVVGLNFDFLVLNFTKHSSYLIYNAALFFSPFIQQQYHDKFGDKEMIPVAANDVAFSLHAVALTSFTLYQVFIYERGNQKVSKVCISISAVVWSAAIVCLIVAWPKSNWLWLIDVFNSIQVAMTTVKYIPQAVMNFRRKSTVGWSIGNILLDLTGGVLNFGQMGVQSIDQHTLVNFYGNIGKTLLSLETVFFDVLFIIQHYVLYPVKRDENGKAIISERVAPLIRPSDKPEEDSV

SEQ ID NO: 65976 - protein, 190 aa, Triticum aestivum
  peptide (1)..(190): Ceres Seq. ID no. 15225133
MIPVAANDVAFSLHAVALTSFTLYQVFIYERGNQKVSKVCISISAVVWSAAIVCLIVAWPKSNWLWLIDVFNSIQVAMTTVKYIPQAVMNFRRKSTVGWSIGNILLDLTGGVLNFGQMGVQSIDQHTLVNFYGNIGKTLLSLETVFFDVLFIIQHYVLYPVKRDENGKAIISERVAPLIRPSDKPEEDSV

SEQ ID NO: 65977 - DNA, 597 bp, Triticum aestivum
  misc_feature (1)..(597): Ceres Seq. ID no. 12619336
acacccatctgaagccatctttgcagaagccactagctcactactagtcgatcaattagttgtttcagagagagacgccatgaagtacttggcccagttggtggtggcgctcctggccttctcggcggtggtgttgatggtggcgccgacgggagcggaggcggcgacctgcaatgcgctgcagctgaccccgtgcgcgggggccattatggggaacgcggcgcccacggcgtcgtgctgcagcaagatgaaggagcagcagccgtgcatgtgccagtacgcgcgcgaccccaacctgaagcagtacgtcgactcccccaacggcaagaaggtcatggccgcctgcaaggtgcccgtgccctcctgctaagtccatattactgattcgcacgagagagcccagcgcgcacgcgcgcctctggtctctcgctctcccagcatgttccatgtgtgttgttgtacgctcgatcgtatgccgtgtggtgtgatcgccaatgtcgttagtcgtcgccgttaccctctgccgatcggcgatctatgtggaccgatgtgtatctgaaattctgaatatatgcaataatgatgatgtgtccagct

SEQ ID NO: 65978 - protein, 122 aa, Triticum aestivum
  peptide (1)..(122): Ceres Seq. ID no. 12619337
HPSEAIFAEATSSLLVDQLVVSERDAMKYLAQLVVALLAFSAVVLMVAPTGAEAATCNALQLTPCAGAIMGNAAPTASCCSKMKEQQPCMCQYARDPNLKQYVDSPNGKKVMAACKVPVPSC

SEQ ID NO: 65979 - protein, 96 aa, Triticum aestivum
  peptide (1)..(96): Ceres Seq. ID no. 12619338
MKYLAQLVVALLAFSAVVLMVAPTGAEAATCNALQLTPCAGAIMGNAAPTASCCSKMKEQQPCMCQYARDPNLKQYVDSPNGKKVMAACKVPVPSC

SEQ ID NO: 65980 - protein, 77 aa, Triticum aestivum
  peptide (1)..(77): Ceres Seq. ID no. 12619339
MVAPTGAEAATCNALQLTPCAGAIMGNAAPTASCCSKMKEQQPCMCQYARDPNLKQYVDSPNGKKVMAACKVPVPSC

SEQ ID NO: 65981 - DNA, 575 bp, Triticum aestivum
  misc_feature (1)..(575): Ceres Seq. ID no. 13656565
agagcttgcatccaggcacatataccgagtacaccaatcagcaaccttcaagtatcctagtttaatctcgccgcgagcccgcgaagatgaagatggtgcttaaggtgccgatggtctgcaagaagtgcaagtcttgcgtccttacgattgtgtccaaggtcaaaggggtcaagtcgatggcatacgacgaggagaagagcacgctgacggtggtgggggatgtggacgtggtggtggtcgtcgacgcgctgcgcaaggggaagcacccggcgacggtggtgacggtgggcgacgagaagaaggagnnngaggannngaagaagaaggaggaagaggagaagaagaagaaggaggccgaggagaagaagaaaaaggaatgcatgcagaagcactgcctcaaggcttgctcgccgccactctactgccccaaggcttgctcgccgccacgccactgcccgccgccaccccactgcccgccgcaatcctactgctacgtcgacgactcggnnncctgcaccatcatgtgagcgagagggcagatcatcgacccggcgccgccgtatatatacagccga

SEQ ID NO: 65982 - protein, 146 aa, Triticum aestivum
  peptide (1)..(146): Ceres Seq. ID no. 13656566
  misc_feature (74)..(74): Xaa is any aa, unknown or other
  misc_feature (76)..(76): Xaa is any aa, unknown or other
  misc_feature (77)..(77): Xaa is any aa, unknown or other
  misc_feature (141)..(141): Xaa is any aa, unknown or other
  misc_feature (142)..(142): Xaa is any aa, unknown or other
MKMVLKVPMVCKKCKSCVLTIVSKVKGVKSMAYDEEKSTLTVVGDVDVVVVVDALRKGKHPATVVTVGDEKKEXEXXKKKEEEEKKKKEAEEKKKKECMQKHCLKACSPPLYCPKACSPPRHCPPPPHCPPQSYCYVDDSXXCTIM

SEQ ID NO: 65983 - protein, 144 aa, Triticum aestivum
  peptide (1)..(144): Ceres Seq. ID no. 13656567
  misc_feature (72)..(72): Xaa is any aa, unknown or other
  misc_feature (74)..(74): Xaa is any aa, unknown or other
  misc_feature (75)..(75): Xaa is any aa, unknown or other
  misc_feature (139)..(139): Xaa is any aa, unknown or other
  misc_feature (140)..(140): Xaa is any aa, unknown or other
MVLKVPMVCKKCKSCVLTIVSKVKGVKSMAYDEEKSTLTVVGDVDVVVVVDALRKGKHPATVVTVGDEKKEXEXXKKKEEEEKKKKEAEEKKKKECMQKHCLKACSPPLYCPKACSPPRHCPPPPHCPPQSYCYVDDSXXCTIM

SEQ ID NO: 65984 - protein, 138 aa, Triticum aestivum
  peptide (1)..(138): Ceres Seq. ID no. 13656568
  misc_feature (66)..(66): Xaa is any aa, unknown or other
  misc_feature (68)..(68): Xaa is any aa, unknown or other
  misc_feature (69)..(69): Xaa is any aa, unknown or other
  misc_feature (133)..(133): Xaa is any aa, unknown or other
  misc_feature (134)..(134): Xaa is any aa, unknown or other
MVCKKCKSCVLTIVSKVKGVKSMAYDEEKSTLTVVGDVDVVVVVDALRKGKHPATVVTVGDEKKEXEXXKKKEEEEKKKKEAEEKKKKECMQKHCLKACSPPLYCPKACSPPRHCPPPPHCPPQSYCYVDDSXXCTIM

SEQ ID NO: 65985 - DNA, 1044 bp, Triticum aestivum
  misc_feature (1)..(1044): Ceres Seq. ID no. 13656651
cattgtattctcataggctccccttctctgagctagccgtaataacctactatcactagccatcaaaccgtgcagacgcataggttagtatatctaagatgtcgtcacgctctacctccgtcatcgtcgccagagcagtgagcgggcaccatttgctcaagatcgatgggtactcgcaaaccaaggtggtcacccatggtagaggcatcaaatcctacacttttaaggtcggaggccacagttggcttctccagtattaccccaatggcgagccctcgggtcctgacacttacatagatgatgtcttcattcagcttgtcagtgtaagcagggacatgccggtcaagcctgacaagggcatctcagctcaaggctcgctcagtttactggacagggctgggaagccagtgccatcatataccagcaccttcaatagaagtttcacaaccactgggatcttggtctggtacacctcaaggacgaccctagagaactcaggttatctcaaggacgattgcttcactctcaggtgcgacatcaccgtcacggagctgcgtgccgagaaaacagaggattgcgatttcgcctatctcctgtggaaggagggggcagatgtggccttccatgtgggaggtgagacaaccgccgcccatcaatgggtgctggctgcccggtctccgatcttgaaggcagcagccgaagcagagctccttggcgtgccagaaagggagaagaaagacgcccacggccaccgtaaggattgacgacatggaggcaaaagtgttcaaggctttgatccactacatatatattgatgcattgcctgatgagatagacaagggctgagactgggagaagcaaggataccatgatcacggtcatggtggccatttctatttgtcaatgctgtgttggtcaatgtaagaagtactactggtgacaatcaactatgctccatactaataatatgctgatgtacattcgtttatgtttggggattgtagttgtatttgctatacaattataatgcttatgatttctttt

SEQ ID NO: 65986 - protein, 221 aa, Triticum aestivum
  peptide (1)..(221): Ceres Seq. ID no. 13656652
MSSRSTSVIVARAVSGHHLLKIDGYSQTKVVTHGRGIKSYTFKVGGHSWLLQYYPNGEPSGPDTYIDDVFIQLVSVSRDMPVKPDKGISAQGSLSLLDRAGKPVPSYTSTFNRSFTTTGILVWYTSRTTLENSGYLKDDCFTLRCDITVTELRAEKTEDCDFAYLLWKEGADVAFHVGGETTAAHQWVLAARSPILKAAAEAELLGVPEREKKDAHGHRKD

SEQ ID NO: 65987 - protein, 142 aa, Triticum aestivum
  peptide (1)..(142): Ceres Seq. ID no. 13656653
MPVKPDKGISAQGSLSLLDRAGKPVPSYTSTFNRSFTTTGILVWYTSRTTLENSGYLKDDCFTLRCDITVTELRAEKTEDCDFAYLLWKEGADVAFHVGGETTAAHQWVLAARSPILKAAAEAELLGVPEREKKDAHGHRKD

SEQ ID NO: 65988 - DNA, 719 bp, Triticum aestivum
  misc_feature (1)..(719): Ceres Seq. ID no. 13657174
agttcttgtacccttccttagcccgcaagcagagtatgcattccttccttgtccctcgccgacgcatccaccgccaagcaacctcgctacatatgcgccgttccttcgtctacccccattgttctaccaaactcgtcggccggtgagcccatacatacacacgcacaggtcggatcagaggtcggagctcgtgcacagtttgatagctgcagcctggaggctggtggcgagaggatcatcggtagccatgaacgggggcatcgggggcacggcggagggggcgcctcgcccgagcacggactggggcccgatcatcgtggcggtgatcctgttcgtggtgctgtcgccggggctgctgttccagctgccggccaggacccgggtggtggagctcggcaacatggccaccagcgccatcgccatcctcgtccacgccgtcatcttcttctgcatcctcaccctcgtcgtcgtggccatcggcgtccacgtgtacgccgcctagctatctcatatagtactccagatcaagatgggttttgtctttcttcagtgctgccctgcccctgtttgcctgtttgatttggccggctgtaaactgcggaaacactgctggctgaaaacagtacgtatataattgtgttcttggatgaggaattagttgcttgtaattacttctctgtgtcgataattgatgaaatgcctttgaaattgattccggc

SEQ ID NO: 65989 - protein, 166 aa, Triticum aestivum
  peptide (1)..(166): Ceres Seq. ID no. 13657175
VLVPFLSPQAEYAFLPCPSPTHPPPSNLATYAPFLRLPPLFYQTRRPVSPYIHTHRSDQRSELVHSLIAAAWRLVARGSSVAMNGGIGGTAEGAPRPSTDWGPIIVAVILFVVLSPGLLFQLPARTRVVELGNMATSAIAILVHAVIFFCILTLVVVAIGVHVYAA

SEQ ID NO: 65990 - protein, 84 aa, Triticum aestivum
  peptide (1)..(84): Ceres Seq. ID no. 13657176
MNGGIGGTAEGAPRPSTDWGPIIVAVILFVVLSPGLLFQLPARTRVVELGNMATSAIAILVHAVIFFCILTLVVVAIGVHVYAA

SEQ ID NO: 65991 - DNA, 678 bp, Triticum aestivum
  misc_feature (1)..(678): Ceres Seq. ID no. 12619649
gtactaccgcaagtgcaaagtagctcacacatccatcggcgccagactactgactcagatcctccaccgaccaccagacccagaccgatggcttcttcttccgtgctgctcggaggaggcgcgggcgcgggcgccgccgccttcaccggcgccgctgccggcaaggctcttcccaggccgtgtttcctcgccgctcgtccgcacactgtcagcggtggccgcctctgcctgcaaacccctcctagagcgactcctgctaacgacgccgtcgagaccgtgaagggggcggccggggaagccggagacaaggtctcggaaggggcggacagcgtgacgaaggcggccagcgacgcggcgggcaaggtacaggaggcggtagagggcgccgtggagggagccaaggacctgggcgagaaggcgaagcaggcgacggaggaggcgtgggacgccaccaaagacgccgcacagggcgtcgccgacgacgtcaccgccgcggttgaggatgtgagcaaatgagctcaacatttgcgtatcagattgaatatttaacatgcatgatgtgcacgcgagtgtcttttgtgggtcacgttattaatgatgtatgctttgtataagagctacaacgttggtcaaaagttgtgctaaaagagcatctacaatcgcacacccgtacccgtc

SEQ ID NO: 65992 - protein, 171 aa, Triticum aestivum
  peptide (1)..(171): Ceres Seq. ID no. 12619650
VLPQVQSSSHIHRRQTTDSDPPPTTRPRPMASSSVLLGGGAGAGAAAFTGAAAGKALPRPCFLAARPHTVSGGRLCLQTPPRATPANDAVETVKGAAGEAGDKVSEGADSVTKAASDAAGKVQEAVEGAVEGAKDLGEKAKQATEEAWDATKDAAQGVADDVTAAVEDVSK

SEQ ID NO: 65993 - protein, 142 aa, Triticum aestivum
  peptide (1)..(142): Ceres Seq. ID no. 12619651
MASSSVLLGGGAGAGAAAFTGAAAGKALPRPCFLAARPHTVSGGRLCLQTPPRATPANDAVETVKGAAGEAGDKVSEGADSVTKAASDAAGKVQEAVEGAVEGAKDLGEKAKQATEEAWDATKDAAQGVADDVTAAVEDVSK

SEQ ID NO: 65994 - protein, 92 aa, Triticum aestivum
  peptide (1)..(92): Ceres Seq. ID no. 12619652
YYRKCKVAHTSIGARLLTQILHRPPDPDRWLLLPCCSEEARARAPPPSPAPLPARLFPGRVSSPLVRTLSAVAASACKPLLERLLLTTPSRP

SEQ ID NO: 65995 - DNA, 1067 bp, Triticum aestivum
  misc_feature (1)..(1067): Ceres Seq. ID no. 13662959
aaaacccccaccgcacgccccacccgcgtcgcaggcatgcctctctcgctcggcgccgaccacctcgccgcgcccggcgcgcgcgctccgcctgcgcgggtgggcacgggcatgggcatggacacgtccctctcgctgggcggtgccgccgcctacctcccgctcaacgagaacgactccctcgacatgctcctcttcgacgtcctccgcgaggcctccgccgtggccgccgcctcgccctcctcgtcctcctctcccccgacgaagacggcgacggccattgccgccgctggcgccgacgcgatcgagagcggcggggcatgcgcggccgggagggccgcggagcgcccgcactaccgcggggtgaggcggcggccgtggggcaagtacgcggcggagatccgggacccgtcgcggcccggcacgcgcctgtggctcggcaccttcggcacggccgaggaggcggccgtcgcgtacgaccgcgccgcgttccgcctgcgcggcgccaaggcgctgctcaacttcccgccggccgtgggggcgcacgaggcgcgccgcggcggcgccaatgaggcgaggtgaatgctacgtgcgttcgttctctcgccgatcgttcctctctctcttagctgcgtgttgttagcttcttagtttaggcatcgaaacattgaattcccattctgtaaccgttcattcatgcgtggtgtggtctgtggtggaccaatttgcatttcgtgggtatcgtctctagcttcgggcgaaggtgctattttggtgatctctctacggttatcaacagatatcaatcatcaattgtacagtagtactactaccagtctcgtctgaaattttacgaaatctggagaaatgtgtgaaccggtaatgagaagacagattccctcgacaaaccttgtattcatctacgattcctcggctcctttgatttaaaggaattttataggatttctgaaggactgagatccttagaattttttttttcctatgtttgttctttgatttataggattggattctataggaatttttcctatggattcttttgtgct

SEQ ID NO: 65996 - protein, 193 aa, Triticum aestivum
  peptide (1)..(193): Ceres Seq. ID no. 13662960
KTPTARPTRVAGMPLSLGADHLAAPGARAPPARVGTGMGMDTSLSLGGAAAYLPLNENDSLDMLLFDVLREASAVAAASPSSSSSPPTKTATAIAAAGADAIESGGACAAGRAAERPHYRGVRRRPWGKYAAEIRDPSRPGTRLWLGTFGTAEEAAVAYDRAAFRLRGAKALLNFPPAVGAHEARRGGANEAR

SEQ ID NO: 65997 - protein, 189 aa, Triticum aestivum
  peptide (1)..(189): Ceres Seq. ID no. 13662961
NPHRTPHPRRRHASLARRRPPRRARRARSACAGGHGHGHGHVPLAGRCRRLPPAQRERLPRHAPLRRPPRGLRRGRRLALLVLLSPDEDGDGHCRRWRRRDRERRGMRGREGRGAPALPRGEAAAVGQVRGGDPGPVAARHAPVARHLRHGRGGGRRVRPRRVPPARRQGAAQLPAGRGGARGAPRRRQ

SEQ ID NO: 65998 - protein, 181 aa, Triticum aestivum
  peptide (1)..(181): Ceres Seq. ID no. 13662962
MPLSLGADHLAAPGARAPPARVGTGMGMDTSLSLGGAAAYLPLNENDSLDMLLFDVLREASAVAAASPSSSSSPPTKTATAIAAAGADAIESGGACAAGRAAERPHYRGVRRRPWGKYAAEIRDPSRPGTRLWLGTFGTAEEAAVAYDRAAFRLRGAKALLNFPPAVGAHEARRGGANEAR

SEQ ID NO: 65999 - DNA, 845 bp, Triticum aestivum
  misc_feature (1)..(845): Ceres Seq. ID no. 12620302
ggctcactgctaagaacacactcccgccccacccccaccgacagcagtaatgaaggccctcgccggcgacagcaacgcctccgcgccgcttctgcaggaggccaagatcagcatccccgcctcctccacgggcggggccgcggaggcggcgctcctcgggaagggccggtacaaggtgtgggccctcgccgccatcgcgctcctcgcgctctggtccatgtccgccgcctccgtctccctccgctggtcggccggcgacctggcagccgttatttcaggggacctcgacgcgccactccgcgacgatctagattccctcgagatggaggaaagggagaaattagttggtcggatgtgggacatgtacacacgcaccagcgacgaggtacgccttccacggttctggcaagaagcattcgaggctgcatacgaggagcttgctggtgatgatatgcaggtccgcgacacggccatctttgagattgctcgaatgtcagcccacagacttgagcttgagcagcctgtgaatgcgaacgaggaagagggcaaggtaagcatcaggaataatgatcatggcagagcgaagcagtagcttcaaaactgaagatctataacggttgcggacaacaaatatcagcagctgaacttgaagtttgatgtaaactgaaattttctgtatgggagggcaagcaaaagcttaccatgatgcaaagttttaacttccccgcagtaaagcgttgtattatacgtgtattattcataggtcctgattagaaatgtcatgccatttgctatatgtagtaacgtggaatagaggaagtctagcaagatcatgctgtttttgt

SEQ ID NO: 66000 - protein, 180 aa, Triticum aestivum
  peptide (1)..(180): Ceres Seq. ID no. 12620303
MKALAGDSNASAPLLQEAKISIPASSTGGAAEAALLGKGRYKVWALAAIALLALWSMSAASVSLRWSAGDLAAVISGDLDAPLRDDLDSLEMEEREKLVGRMWDMYTRTSDEVRLPRFWQEAFEAAYEELAGDDMQVRDTAIFEIARMSAHRLELEQPVNANEEEGKVSIRNNDHGRAKQ

SEQ ID NO: 66001 - protein, 148 aa, Triticum aestivum
  peptide (1)..(148): Ceres Seq. ID no. 12620304
GSLLRTHSRPTPTDSSNEGPRRRQQRLRAASAGGQDQHPRLLHGRGRGGGAPREGPVQGVGPRRHRAPRALVHVRRLRLPPLVGRRPGSRYFRGPRRATPRRSRFPRDGGKGEISWSDVGHVHTHQRRGTPSTVLARSIRGCIRGACW

SEQ ID NO: 66002 - protein, 124 aa, Triticum aestivum
  peptide (1)..(124): Ceres Seq. ID no. 12620305
MSAASVSLRWSAGDLAAVISGDLDAPLRDDLDSLEMEEREKLVGRMWDMYTRTSDEVRLPRFWQEAFEAAYEELAGDDMQVRDTAIFEIARMSAHRLELEQPVNANEEEGKVSIRNNDHGRAKQ

SEQ ID NO: 66003 - DNA, 1062 bp, Triticum aestivum
  misc_feature (1)..(1062): Ceres Seq. ID no. 13657064
ccattacctagaacatcctaatcgaaaaatgttccatctcatctcgcccctccctttccaccatctccagtaagtttgggcctcgctttccttcccgacccgacccagctcgcaatcgcaagccacacgcatcgggtttccctcagcgcagcgatctcacctccctgacccgctccctcctcccgcgtcacgtgtcctcacagctcaccccgccggcggccggccgcagcggcgcgcccccgacccccgacccccgaccaggcggagcgcggccagggcaggcgagatggtcttcgtctggctcgccgccttcttcctcgtcgtcacgctcatcgtgctcgtcatcttccagttgatgtgcttggcagatctggagttcgattatatcaacccgtttgattcatcctctcgaatcaataaagtggttatgccagaatttatagtgcaagcacttctaagtgcattattcctcttatctgggcactgggcgatgtttctgctttctgccccaatggtgtactataattatacattgtacgagcggcggcagcatcttgtagatgtgacagagatatttaaccatctttcacgggagaagaagcgccgtctttttaagatagctgctcttatcgtcctcctattcttgtccttgttctggatgatttggagtgtactggaggagcacgagtagaatgagagaaaacactgtgattgtgatagctcaacctggttctgcagccgttagttaggtattacgacgtggtcctcgtggcctgctgaacacctactccgatgccgttattgttcatatgaaagcccttttggataaatttagggtgtcatggagaaacgatgcaagcagaagggcgaagactacgtgtccgaggtgctgtttgttgctcgcgcctagtgtgaaatctcctgctgttgtagcgtgtaacataacatgtaagttaggagccactccctcctgtttatttgatcgtgcatccgttcatatggggcaaagtaactgctgcgcccaactgtgcatggttttattatgaccgacattctgtgttt

SEQ ID NO: 66004 - protein, 134 aa, Triticum aestivum
  peptide (1)..(134): Ceres Seq. ID no. 13657065
MVFVWLAAFFLVVTLIVLVIFQLMCLADLEFDYINPFDSSSRINKVVMPEFIVQALLSALFLLSGHWAMFLLSAPMVYYNYTLYERRQHLVDVTEIFNHLSREKKRRLFKIAALIVLLFLSLFWMIWSVLEEHE

SEQ ID NO: 66005 - protein, 111 aa, Triticum aestivum
  peptide (1)..(111): Ceres Seq. ID no. 13657066
MCLADLEFDYINPFDSSSRINKVVMPEFIVQALLSALFLLSGHWAMFLLSAPMVYYNYTLYERRQHLVDVTEIFNHLSREKKRRLFKIAALIVLLFLSLFWMIWSVLEEHE

SEQ ID NO: 66006 - protein, 87 aa, Triticum aestivum
  peptide (1)..(87): Ceres Seq. ID no. 13657067
MPEFIVQALLSALFLLSGHWAMFLLSAPMVYYNYTLYERRQHLVDVTEIFNHLSREKKRRLFKIAALIVLLFLSLFWMIWSVLEEHE

SEQ ID NO: 66007 - DNA, 1735 bp, Triticum aestivum
  misc_feature (1)..(1735): Ceres Seq. ID no. 14313220
ccggtagttaagcgccccgcgccaccaccactactactagtagcagcggcactcccgctgccatccccactgcccccccgaacccccctccgcgctccgcacattgggtgggaggagctgctccagctcggttgtcggtgccgggtggatcgccctgccgcgccatggacggcgacgcggacgccctgaagtccgggaggcacggggccggggacgtgtgccagatctgcgccgacgggctgggcaccacggtggacggcgaggtcttcaccgcctgcgacgtctgccgcttcccggtctgccgcccctgctacgagcacgagcgcaaggagggcacccaggcctgcctccagtgcaagaccaagtacaagcgccacagagggagccctccgatccgcggggaggaaggcgatgacaccgatgccgatgatggcagtgacttcaactaccctgcatctggcactgaggaccagaagcagaagattgctgataggatgcgcagctggcgcatgaacaccgggggtagtggcaatgttggccaccccaagtatgacagtggcgagatcggcctctccaagtatgacagtggagagatccctaggggatacgtcccttcagtcaccaacagccagatgtcaggagaaatccctggagcttcccctgatcatcatatgatgtcccctacagggaacatcagcagacgtgctccctttccctatgtgaatcattcaccaaatccgtcaagggagttctctggcagtattgggaatgttgcctggaaagagagagtcgatggctggaaaatgaagcaggacaagggtgcaattcccatgactaatgggacaagtattgctccctctgaaggtcgggcagctactgacattgatgcatctactgaatacaacatggaagacgctttactgaatgatgaaactcgccagcctctatctagaaaagtccccattgcttcatccaaaataaatccctacagaatggtcattgttctgcggttggttgttctaagcatcttcctgcactaccgtctcacaaatcctgtgcgtaatgcatacccactgtggcttttatctgttatatgtgagatttggtttgctttatcctggatactggatcagttcccgaagtggtttccaatcaaccgggagacctaccttgatagactggctttaaggtatgaccgagaaggtgaaccgtctcagttggctgctgttgacatatttgtcagtacagtcgaccccttgaaggagccacctatcgtcactgccaacactgtgctatccattcttgctgttgattatcccgtggacaaggtctcttgctatgtatctgatgacggagcttcaatgctgacttttgatgcattggctgagacttcagagtttgctaggaaatgggtaccatttgtgaagaagtatgacattgaacccagagctcctgagttttacttttgccagaaaattgattacctgaaagacaaagtccagccttcatttgttaaagaccgccggaccagagaaggagagcagcggaaggtggaggatgggattgtggagaaggccatcttggtgaaagatttcgcgtgagcttttcttctagcttgatgagaagacatctccctagtatttgttgtttctttgacttgcaatgtataccttgattttaagatcagatgacattatgctaatctctttggtccgggggcaagtttcttggcctc

SEQ ID NO: 66008 - protein, 478 aa, Triticum aestivum
  peptide (1)..(478): Ceres Seq. ID no. 14313221
MDGDADALKSGRHGAGDVCQICADGLGTTVDGEVFTACDVCRFPVCRPCYEHERKEGTQACLQCKTKYKRHRGSPPIRGEEGDDTDADDGSDFNYPASGTEDQKQKIADRMRSWRMNTGGSGNVGHPKYDSGEIGLSKYDSGEIPRGYVPSVTNSQMSGEIPGASPDHHMMSPTGNISRRAPFPYVNHSPNPSREFSGSIGNVAWKERVDGWKMKQDKGAIPMTNGTSIAPSEGRAATDIDASTEYNMEDALLNDETRQPLSRKVPIASSKINPYRMVIVLRLVVLSIFLHYRLTNPVRNAYPLWLLSVICEIWFALSWILDQFPKWFPINRETYLDRLALRYDREGEPSQLAAVDIFVSTVDPLKEPPIVTANTVLSILAVDYPVDKVSCYVSDDGASMLTFDALAETSEFARKWVPFVKKYDIEPRAPEFYFCQKIDYLKDKVQPSFVKDRRTREGEQRKVEDGIVEKAILVKDFA

SEQ ID NO: 66009 - protein, 368 aa, Triticum aestivum
  peptide (1)..(368): Ceres Seq. ID no. 14313222
MRSWRMNTGGSGNVGHPKYDSGEIGLSKYDSGEIPRGYVPSVTNSQMSGEIPGASPDHHMMSPTGNISRRAPFPYVNHSPNPSREFSGSIGNVAWKERVDGWKMKQDKGAIPMTNGTSIAPSEGRAATDIDASTEYNMEDALLNDETRQPLSRKVPIASSKINPYRMVIVLRLVVLSIFLHYRLTNPVRNAYPLWLLSVICEIWFALSWILDQFPKWFPINRETYLDRLALRYDREGEPSQLAAVDIFVSTVDPLKEPPIVTANTVLSILAVDYPVDKVSCYVSDDGASMLTFDALAETSEFARKWVPFVKKYDIEPRAPEFYFCQKIDYLKDKVQPSFVKDRRTREGEQRKVEDGIVEKAILVKDFA

SEQ ID NO: 66010 - protein, 363 aa, Triticum aestivum
  peptide (1)..(363): Ceres Seq. ID no. 14313223
MNTGGSGNVGHPKYDSGEIGLSKYDSGEIPRGYVPSVTNSQMSGEIPGASPDHHMMSPTGNISRRAPFPYVNHSPNPSREFSGSIGNVAWKERVDGWKMKQDKGAIPMTNGTSIAPSEGRAATDIDASTEYNMEDALLNDETRQPLSRKVPIASSKINPYRMVIVLRLVVLSIFLHYRLTNPVRNAYPLWLLSVICEIWFALSWILDQFPKWFPINRETYLDRLALRYDREGEPSQLAAVDIFVSTVDPLKEPPIVTANTVLSILAVDYPVDKVSCYVSDDGASMLTFDALAETSEFARKWVPFVKKYDIEPRAPEFYFCQKIDYLKDKVQPSFVKDRRTREGEQRKVEDGIVEKAILVKDFA

SEQ ID NO: 66011 - DNA, 634 bp, Triticum aestivum
  misc_feature (1)..(634): Ceres Seq. ID no. 12620202
cccaacatccccggcgccggggggaaaagctaccagggatgcgtctcgtcagcctcgcgcgcgcggcccctcgcgtccgcgcggcgtcgacggcggccacccccaccctggcggcggcgctgaaggtgggcgacgcgctgcgcccgcgccggcggcggttcacggaggaggccgtgccggcgtacgcgggggtgagcggcgaccgcaaccccgtgcacctagacgacgccttcgcgcgcgggacgggcggcttccagcgcggccgcgtggtgcacggcatgctcgtcgcctccctcttccccgccctcatcgcctcccacttccctggagccgtgtacgcgagccagtccctcaagttcgcggcgccggtgcacgtcggggacgaggtggtcgcgcaggtgcaggcgctccacatcaaggccaccggcgcaaggcacatcgtcaagttcgccaccaggtgcttcatggacgacgaggagactctcgccatcgacggcgaggccatggcttttctgcccacactgcagctcagcacagaggcaatcgagtgacaagtatgttatgttgattagaaccatttggaataggacgacttttatctcatgatgaaacattttgcctccgcataagcggg

SEQ ID NO: 66012 - protein, 188 aa, Triticum aestivum
  peptide (1)..(188): Ceres Seq. ID no. 12620203
PTSPAPGGKATRDASRQPRARGPSRPRGVDGGHPHPGGGAEGGRRAAPAPAAVHGGGRAGVRGGERRPQPRAPRRRLRARDGRLPARPRGARHARRLPLPRPHRLPLPWSRVREPVPQVRGAGARRGRGGRAGAGAPHQGHRRKAHRQVRHQVLHGRRGDSRHRRRGHGFSAHTAAQHRGNRVTSMLC

SEQ ID NO: 66013 - protein, 182 aa, Triticum aestivum
  peptide (1)..(182): Ceres Seq. ID no. 12620204
QHPRRRGEKLPGMRLVSLARAAPRVRAASTAATPTLAAALKVGDALRPRRRRFTEEAVPAYAGVSGDRNPVHLDDAFARGTGGFQRGRVVHGMLVASLFPALIASHFPGAVYASQSLKFAAPVHVGDEVVAQVQALHIKATGARHIVKFATRCFMDDEETLAIDGEAMAFLPTLQLSTEAIE

SEQ ID NO: 66014 - protein, 170 aa, Triticum aestivum
  peptide (1)..(170): Ceres Seq. ID no. 12620205
MRLVSLARAAPRVRAASTAATPTLAAALKVGDALRPRRRRFTEEAVPAYAGVSGDRNPVHLDDAFARGTGGFQRGRVVHGMLVASLFPALIASHFPGAVYASQSLKFAAPVHVGDEVVAQVQALHIKATGARHIVKFATRCFMDDEETLAIDGEAMAFLPTLQLSTEAIE

SEQ ID NO: 66015 - DNA, 556 bp, Triticum aestivum
  misc_feature (1)..(556): Ceres Seq. ID no. 13656166
atcttcatttcacatcaaaatttctcctctttctatccatggccacggacgcacagcaccagcgacacagccgcaacggcggcgtgcacaccggccaccacttcctcatcgtggcctacggcatccagagccacctcaacccgtgccgcgtcctcgcgcaccgcctcgcgcgcctccacggcgtcgacggctccggggccgtcctcgccacggtctccctcccggtgtccgctcaccgccgcatgttcccttcgtccggagacgtcgacaatgatgataaagccaccgacggcgtcgtctcttacgctccatactccgacggcctcgacgacggctccatggccagggacggcgaggcgagggcgcgcagccgccaggccacctttgagagcctgtcagccgtcgtcgccaccctcgccgcacgtggccggccggtgacgtgtgtcgtttgcagcatggttctccccgcggcgctggacgtcgcgcgtgagcacggcatcccgctggccgtgtactggatccaaccggccaccgtgctcgccgcgtactaccacta

SEQ ID NO: 66016 - protein, 184 aa, Triticum aestivum
  peptide (1)..(184): Ceres Seq. ID no. 13656167
LHFTSKFLLFLSMATDAQHQRHSRNGGVHTGHHFLIVAYGIQSHLNPCRVLAHRLARLHGVDGSGAVLATVSLPVSAHRRMFPSSGDVDNDDKATDGVVSYAPYSDGLDDGSMARDGEARARSRQATFESLSAVVATLAARGRPVTCVVCSMVLPAALDVAREHGIPLAVYWIQPATVLAAYYH

SEQ ID NO: 66017 - protein, 172 aa, Triticum aestivum
  peptide (1)..(172): Ceres Seq. ID no. 13656168
MATDAQHQRHSRNGGVHTGHHFLIVAYGIQSHLNPCRVLAHRLARLHGVDGSGAVLATVSLPVSAHRRMFPSSGDVDNDDKATDGVVSYAPYSDGLDDGSMARDGEARARSRQATFESLSAVVATLAARGRPVTCVVCSMVLPAALDVAREHGIPLAVYWIQPATVLAAYYH

SEQ ID NO: 66018 - protein, 145 aa, Triticum aestivum
  peptide (1)..(145): Ceres Seq. ID no. 13656169
IFISHQNFSSFYPWPRTHSTSDTAATAACTPATTSSSWPTASRATSTRAASSRTASRASTASTAPGPSSPRSPSRCPLTAACSLRPETSTMMIKPPTASSLTLHTPTASTTAPWPGTARRGRAAARPPLRACQPSSPPSPHVAGR

SEQ ID NO: 66019 - DNA, 2544 bp, Triticum aestivum
  misc_feature (1)..(2544): Ceres Seq. ID no. 14303680
atttcaaatcactctccctcccctgctctcctctcctcctcctcctccgccctctcgctcgcgtcccaggacccagccgcgcgaccccgaccccgaccccctcggcggccaccaccgcgcgctcccaccgccggcctgccgataccgcgccgagagattgctcctgacgatgggtggcgcggtgagagaccagcagcagcagctccacccgtgcgattcgcttctcctcgagctcaacgtgatctgggatgaggtcggtgagcccgacacggtgcgggacaagacgctgctggagctcgagcaggaatgcctcgatgtctacaggaggaaggtcgaccaggccaaccgctgcagggctcagctgcggcaatccatcgccgaggccgaggctgagctcgccggcatctgctcggccataggcgagccgccggttcacgtcaggcagtcaaaccagaaattgcatggtttaagggaggagttgaatgcaattatcccatatttagaggagatgcggactaaaaaggttgaaagatggagccagttcgttcatgtcctcgaggagattaagaaaatctcatccgaaatcaggccttcagactttgtgccatttaaaactcctgtggatcagtctgatctgtcgttaagaaagtttgaggagttaacgaaggagctagaatctcttcagaaagagaagagggaaagattaaagcaagtgatggatcatttgaacacattacattccttatgtgaggtgcttggcattgactttaaacaaacagtgcatgaggtgcaccctagcctggacgaagctgaaggatcaaagaacctgagcaacactacaatcgagagactagcattggctgtggatagacttcgtgaaataaaaattcagaggatgcaaaagcttcaagactttgcatcgacaatgctagaactatggaatcttatggatacaccaattgaagagcagcagatgttccagaatgtaacgtgcaatattgctgcctcggagcatgaaataacagaacccaacaccctgtcgatcgacttcctcagctatgtggaagctgaggttttaaggcttgagcaactgaaaggaagcaaaatgaaggacctcgttttgaaaaagaaatcggagctggaggagcacagaagacgtgcgcatctaattggcgaggaaggatattcagatgaatttaacattgaggctattgagtcgggagctattgatcctgcattggtgctggaacaaattgaggctcacattgcaacagtgaaagatgaagctttcagtcgaaaggatattcttgagaaggttgaaagatttctgaatgcatgtgaggaggaagcctggctggaagattacaacaaagatgacaatcgttacaatgctgggaagggggcacatctgacgctcaagagggctgagaaagctcgcattttggttaacaagattccgggaatggtagatgttttgaccacaaaaatcattgcttgggagaatgaaagaggaaaagagttcacatatgatggcgtacgccttctctcaatgctggatgaatacatgattgttcgccaggagaaagaacaagagaagaagagacaaagggatcagaagaagctccacgatcagctcaaagccgagcaggaagctctctacggttcaaagccaagtccatccaagcctcaaagcataaagaaggcgcctagacactcgatgggtggtgtaaaccgcagggtgtccatgggtggagccacgatgcaagcacccaaaacagacatactgcattccaagaatgttcgtgctgccaagagaactgaagacattgcccatttgtcccctgccagcagaggcttggacattggcgatcttcccatcaagaagctatctttcaatgccactgccttgcgtgaaaccgagacacctcgcaagccatttgcgcagatcatgccgccgccaagcagtgtcccctccactcctgcgcgctctgtcaccaatgacaccgaggatgagaaccggacccccaaccccaagacatttggagcagcactgaatctcaagaccccgatgaccgtggcggctccgatgcagctggcaatgacgcccgctgtggctagcaaggtcacggctgctcctgtctcccttgtctacgagaagccagagccaacattgctggaggcgatcgagtattccttcgaagaaaggcggctggccgtctatttgtcaagagaagtttaagctctctttgcgtaggcgaaagttggaaacctgacggctgttacttgtgagagactggctgctgcctagtatgttggtcgacgacagtcgtccagtgctgttctgattgttcccctctgccacatttgattgtttccatactcagcaaaggaagcttgcgcttcagcagcttccgttcagtactgccattggttagatataattaatgtgtataggtttctttctcggcactgaatcatcttgaatctgtttgattaatatagatcggtattgtgttttaatcctcatgcgatgatgtgtttctg

SEQ ID NO: 66020 - protein, 745 aa, Triticum aestivum
  peptide (1)..(745): Ceres Seq. ID no. 14303681
FQITLPPLLSSPPPPPPSRSRPRTQPRDPDPDPLGGHHRALPPPACRYRAERLLLTMGGAVRDQQQQLHPCDSLLLELNVIWDEVGEPDTVRDKTLLELEQECLDVYRRKVDQANRCRAQLRQSIAEAEAELAGICSAIGEPPVHVRQSNQKLHGLREELNAIIPYLEEMRTKKVERWSQFVHVLEEIKKISSEIRPSDFVPFKTPVDQSDLSLRKFEELTKELESLQKEKRERLKQVMDHLNTLHSLCEVLGIDFKQTVHEVHPSLDEAEGSKNLSNTTIERLALAVDRLREIKIQRMQKLQDFASTMLELWNLMDTPIEEQQMFQNVTCNIAASEHEITEPNTLSIDFLSYVEAEVLRLEQLKGSKMKDLVLKKKSELEEHRRRAHLIGEEGYSDEFNIEAIESGAIDPALVLEQIEAHIATVKDEAFSRKDILEKVERFLNACEEEAWLEDYNKDDNRYNAGKGAHLTLKRAEKARILVNKIPGMVDVLTTKIIAWENERGKEFTYDGVRLLSMLDEYMIVRQEKEQEKKRQRDQKKLHDQLKAEQEALYGSKPSPSKPQSIKKAPRHSMGGVNRRVSMGGATMQAPKTDILHSKNVRAAKRTEDIAHLSPASRGLDIGDLPIKKLSFNATALRETETPRKPFAQIMPPPSSVPSTPARSVTNDTEDENRTPNPKTFGAALNLKTPMTVAAPMQLAMTPAVASKVTAAPVSLVYEKPEPTLLEAIEYSFEERRLAVYLSREV

SEQ ID NO: 66021 - protein, 689 aa, Triticum aestivum
  peptide (1)..(689): Ceres Seq. ID no. 14303682
MGGAVRDQQQQLHPCDSLLLELNVIWDEVGEPDTVRDKTLLELEQECLDVYRRKVDQANRCRAQLRQSIAEAEAELAGICSAIGEPPVHVRQSNQKLHGLREELNAIIPYLEEMRTKKVERWSQFVHVLEEIKKISSEIRPSDFVPFKTPVDQSDLSLRKFEELTKELESLQKEKRERLKQVMDHLNTLHSLCEVLGIDFKQTVHEVHPSLDEAEGSKNLSNTTIERLALAVDRLREIKIQRMQKLQDFASTMLELWNLMDTPIEEQQMFQNVTCNIAASEHEITEPNTLSIDFLSYVEAEVLRLEQLKGSKMKDLVLKKKSELEEHRRRAHLIGEEGYSDEFNIEAIESGAIDPALVLEQIEAHIATVKDEAFSRKDILEKVERFLNACEEEAWLEDYNKDDNRYNAGKGAHLTLKRAEKARILVNKIPGMVDVLTTKIIAWENERGKEFTYDGVRLLSMLDEYMIVRQEKEQEKKRQRDQKKLHDQLKAEQEALYGSKPSPSKPQSIKKAPRHSMGGVNRRVSMGGATMQAPKTDILHSKNVRAAKRTEDIAHLSPASRGLDIGDLPIKKLSFNATALRETETPRKPFAQIMPPPSSVPSTPARSVTNDTEDENRTPNPKTFGAALNLKTPMTVAAPMQLAMTPAVASKVTAAPVSLVYEKPEPTLLEAIEYSFEERRLAVYLSREV

SEQ ID NO: 66022 - protein, 576 aa, Triticum aestivum
  peptide (1)..(576): Ceres Seq. ID no. 14303683
MRTKKVERWSQFVHVLEEIKKISSEIRPSDFVPFKTPVDQSDLSLRKFEELTKELESLQKEKRERLKQVMDHLNTLHSLCEVLGIDFKQTVHEVHPSLDEAEGSKNLSNTTIERLALAVDRLREIKIQRMQKLQDFASTMLELWNLMDTPIEEQQMFQNVTCNIAASEHEITEPNTLSIDFLSYVEAEVLRLEQLKGSKMKDLVLKKKSELEEHRRRAHLIGEEGYSDEFNIEAIESGAIDPALVLEQIEAHIATVKDEAFSRKDILEKVERFLNACEEEAWLEDYNKDDNRYNAGKGAHLTLKRAEKARILVNKIPGMVDVLTTKIIAWENERGKEFTYDGVRLLSMLDEYMIVRQEKEQEKKRQRDQKKLHDQLKAEQEALYGSKPSPSKPQSIKKAPRHSMGGVNRRVSMGGATMQAPKTDILHSKNVRAAKRTEDIAHLSPASRGLDIGDLPIKKLSFNATALRETETPRKPFAQIMPPPSSVPSTPARSVTNDTEDENRTPNPKTFGAALNLKTPMTVAAPMQLAMTPAVASKVTAAPVSLVYEKPEPTLLEAIEYSFEERRLAVYLSREV

SEQ ID NO: 66023 - DNA, 1057 bp, Triticum aestivum
  misc_feature (1)..(1057): Ceres Seq. ID no. 13657258
ataatatcctgactttgaagtcattttttcatttacatcagcccagcctatgcaaactccattctgtgatggatgaaatatccattatatttaaggctgtattgtcttgttattttttgttttcatacctataatttacatccagattactacatcggattttgttcaactctgctgaacatctgtaacacttattttcttcacaggtgaagactatatatgtgaagaacctgccggagaatgtttctaaagagaaagttaaggatctctttgaagttcatggagaggtcacaaaaattgttttaccgcctgctaaggccgggcataagagggattttgggtttgttcactttgctgaaagatcaagtgcactgaaggcagttaaaggaagtgaaaaatacgaaatcgatgggcaagtgcttgaagtttccatggccaaacctttgagtgataagaaacctgaccactcgttcaagcctggtggagctcccagctatcctcttccaccttatggtggctacatgggagacccatatggtgcctatggtggcggccctggattcaaccagcctatgatctatggtagaggaccagcaccagctggaatgaggatggtgccgatggtgctccctgatggtcgccttggctatgttctgtaagactttttttctgcatactagtgtcgatgcatacacatcttcagttccttgacaacgtgttactaatgttgataggcaacaacctggtggaatgccgcctccaccccctccgcgacgtggtgaccggcgggatggcggtggccgaggtggcgaaggaagccagcggcgttatcggccctactagtttgtcccttgccttgcatttttcgtcgtgctaggtgatggatttgttaactttgatggagtgcgtttaggagcgtgtgttgtttttgccctgtaagacttctatagccttagacttggtactcttctgttttgttatttgataaacacccgagacgtgtactgttgcgccgtccttttcaataacttgtgtatcatgcagtgctcgtgactcc

SEQ ID NO: 66024 - protein, 75 aa, Triticum aestivum
  peptide (1)..(75): Ceres Seq. ID no. 13657259
MAKPLSDKKPDHSFKPGGAPSYPLPPYGGYMGDPYGAYGGGPGFNQPMIYGRGPAPAGMRMVPMVLPDGRLGYVL

SEQ ID NO: 66025 - protein, 63 aa, Triticum aestivum
  peptide (1)..(63): Ceres Seq. ID no. 13657260
MHTHLQFLDNVLLMLIGNNLVECRLHPLRDVVTGGMAVAEVAKEASGVIGPTSLSLALHFSSC

SEQ ID NO: 66026 - protein, 50 aa, Triticum aestivum
  peptide (1)..(50): Ceres Seq. ID no. 13657261
MLIGNNLVECRLHPLRDVVTGGMAVAEVAKEASGVIGPTSLSLALHFSSC

SEQ ID NO: 66027 - DNA, 851 bp, Triticum aestivum
  misc_feature (1)..(851): Ceres Seq. ID no. 13657832
gaacccccagcagttcactccactcctagtcctgctaccaccagcaagaggctggctgtgggctgatccatgaggcgcctcgtgttcgcggagctcgtggtcctcctcgccgcggcgctcctgctccccgtcgtgatctgctgccggcgctcgagcggcggcgccacgcggccgctgcccgtctcggagcagcccggcgccggtgccaacgccagcaggaagaagcgccgcgtcgagcggctgcggcgggcgctccacgccctgcgcgtctggtgccgccgctcccgcgtcgagccggcggcctccgcgtccgcgtctccggacgacggcgcgcaggcgcagggggaggttcagctggagcagatcgccgccccggcggcggcggcggagcaggcggggcacgaggaggagggtgtggcggcgtggcgcgagcgctggttcggcggccccgggtcgcgcgcgctctacaccatcgaggaggcgtcggagacggagggcgacgtggagagccagtacggcgccgagcccgagacgccgttctacacgccgccggcctcgccgccgcacgatggagagcaagcagaccagccggagcacggcgaggccagttagttagccggcgatgcgccgctcgttccctgtgtgtcatagattcgacaattttctttgggttctttcgcgcatcagcagcagcagaaagcagcggctgttgaagcaaggcgtgcatgataggattggctagtcagtactaattctttctttcccctccttgtttccggaggcaggagtggatggatggacatgcatgcagattaatactactacggcgaatctgcatgtattaatctgct

SEQ ID NO: 66028 - protein, 180 aa, Triticum aestivum
  peptide (1)..(180): Ceres Seq. ID no. 13657833
MRRLVFAELVVLLAAALLLPVVICCRRSSGGATRPLPVSEQPGAGANASRKKRRVERLRRALHALRVWCRRSRVEPAASASASPDDGAQAQGEVQLEQIAAPAAAAEQAGHEEEGVAAWRERWFGGPGSRALYTIEEASETEGDVESQYGAEPETPFYTPPASPPHDGEQADQPEHGEAS

SEQ ID NO: 66029 - DNA, 1613 bp, Triticum aestivum
  misc_feature (1)..(1613): Ceres Seq. ID no. 14307952
aaatcattcactcaacaatggaattcgttatgctcctggccgctctcttttgcctcctagccggagtggtctttctgcggagctacaccaggagatcccaggccaccacccaccacatcggggaccccgatgttgctcatcgagcgctcattgggaacgccgacgacttcttaaaccggccggcagcaagcttccccacctccctggccacctggcgccatggcgaacggaacgacaacatagccactgtgacctacggcccgcagtggcgagtgctccggtgcaacctcacggctgagatcctctcacgcctcggttccttagccccgcttcatgaggaggccgcccaggcactcgtcgcagacttctcggcccgatgcggcggaggaggtgacgtggccgtccgtgagcccgtcaccaaagccgtgttcacgctggccacgcgcctgtgcttcggcgacattgtggacgacggccagagacacgccataggacgcgtgatacgggactccatcgtcgccgcaggtaagctcagccccgggttcgatggctcgatgctatccaagctcgcgaactggagggggtttcgccggatctccgccgtgctcaaacggcagaccgagctgtacctccctctgatcgcggcacggaggcagtcgcagtctcagctctgtggcggcatcgtccatccttacgaggactcgctcctggatctccgtgtccccgacaatggtgatgcctccggccccggccgtcctcttcaagacggcgagctggtgggccttgtgttcgagttcctgggtgcagccactgggtcaaccgcagcctgcctcgagtggaccctcgcccatctcatcgaccagcaggagaccctggacaggctgcgccgggagatcgaagacgaggccgacgccggcgggatactctccagcaagagccttcgcagcggcatgccctacctgaacgcggtagtccttgaatgcctccgcatgcaccagccggtgccggtcatcttgagcagcgcccacggggacggcgccaaagcgatcggtggaatgagagctgtgccgctggacggcttgagcgtgcagttcaatttagccgacattggaagagatgcgaagcggtggacccatcctgacaagttctggccggagcggttccttgccggaggcgaggcggaagacatcgggccggcgccgggccccaaggagatcaggatgatgccgttcggtgcgggacatcggcactgccctggcgtgaacatgggaatgttgcacatcaagtgcttcttagcggcgctcgtgcacaacttcgactgggcactgtccgccgaagactgcagcagcggtgtcgacatgacggagcaggacggcttcataaaaataatgaagaagccgctctccgcgcgtgtcactggacgcacttgagttcttctaaaatctttgacaaacttgtgtccggtttctgaatgtgtgtggtcctatttttcatgcacgtcttgttctgctttcctgttgaagtttgtttgagcttgcttaccacacggaccgtgtggtatgtgtgattgtacttgcatcaaataataagaaatcgtgtgcttcttgcttttc

SEQ ID NO: 66030 - protein, 475 aa, Triticum aestivum
  peptide (1)..(475): Ceres Seq. ID no. 14307953
IIHSTMEFVMLLAALFCLLAGVVFLRSYTRRSQATTHHIGDPDVAHRALIGNADDFLNRPAASFPTSLATWRHGERNDNIATVTYGPQWRVLRCNLTAEILSRLGSLAPLHEEAAQALVADFSARCGGGGDVAVREPVTKAVFTLATRLCFGDIVDDGQRHAIGRVIRDSIVAAGKLSPGFDGSMLSKLANWRGFRRISAVLKRQTELYLPLIAARRQSQSQLCGGIVHPYEDSLLDLRVPDNGDASGPGRPLQDGELVGLVFEFLGAATGSTAACLEWTLAHLIDQQETLDRLRREIEDEADAGGILSSKSLRSGMPYLNAVVLECLRMHQPVPVILSSAHGDGAKAIGGMRAVPLDGLSVQFNLADIGRDAKRWTHPDKFWPERFLAGGEAEDIGPAPGPKEIRMMPFGAGHRHCPGVNMGMLHIKCFLAALVHNFDWALSAEDCSSGVDMTEQDGFIKIMKKPLSARVTGRT

SEQ ID NO: 66031 - protein, 470 aa, Triticum aestivum
  peptide (1)..(470): Ceres Seq. ID no. 14307954
MEFVMLLAALFCLLAGVVFLRSYTRRSQATTHHIGDPDVAHRALIGNADDFLNRPAASFPTSLATWRHGERNDNIATVTYGPQWRVLRCNLTAEILSRLGSLAPLHEEAAQALVADFSARCGGGGDVAVREPVTKAVFTLATRLCFGDIVDDGQRHAIGRVIRDSIVAAGKLSPGFDGSMLSKLANWRGFRRISAVLKRQTELYLPLIAARRQSQSQLCGGIVHPYEDSLLDLRVPDNGDASGPGRPLQDGELVGLVFEFLGAATGSTAACLEWTLAHLIDQQETLDRLRREIEDEADAGGILSSKSLRSGMPYLNAVVLECLRMHQPVPVILSSAHGDGAKAIGGMRAVPLDGLSVQFNLADIGRDAKRWTHPDKFWPERFLAGGEAEDIGPAPGPKEIRMMPFGAGHRHCPGVNMGMLHIKCFLAALVHNFDWALSAEDCSSGVDMTEQDGFIKIMKKPLSARVTGRT

SEQ ID NO: 66032 - protein, 466 aa, Triticum aestivum
  peptide (1)..(466): Ceres Seq. ID no. 14307955
MLLAALFCLLAGVVFLRSYTRRSQATTHHIGDPDVAHRALIGNADDFLNRPAASFPTSLATWRHGERNDNIATVTYGPQWRVLRCNLTAEILSRLGSLAPLHEEAAQALVADFSARCGGGGDVAVREPVTKAVFTLATRLCFGDIVDDGQRHAIGRVIRDSIVAAGKLSPGFDGSMLSKLANWRGFRRISAVLKRQTELYLPLIAARRQSQSQLCGGIVHPYEDSLLDLRVPDNGDASGPGRPLQDGELVGLVFEFLGAATGSTAACLEWTLAHLIDQQETLDRLRREIEDEADAGGILSSKSLRSGMPYLNAVVLECLRMHQPVPVILSSAHGDGAKAIGGMRAVPLDGLSVQFNLADIGRDAKRWTHPDKFWPERFLAGGEAEDIGPAPGPKEIRMMPFGAGHRHCPGVNMGMLHIKCFLAALVHNFDWALSAEDCSSGVDMTEQDGFIKIMKKPLSARVTGRT

SEQ ID NO: 66033 - DNA, 759 bp, Triticum aestivum
  misc_feature (1)..(759): Ceres Seq. ID no. 12619615
cttccttgtgcttcttcattcacctgcgactgcgagtgagtgcgagtgcgagtgcggggtgggtcaaaggctcaaagcaagtgcgtgggattggaggagaaggagatggagctggtgtcctcctcccgctccaccctatcctcttgcagccgactggttgctccctccaggtccagttccacgacggcatccgcagctgctaggcgccacgggaagaggctattatgtgtcttgggtggagacaggaatgatgagctcaagatcgggaggcgggcggttcttgctctgctcctggctacgcccacactctcactgcctttctccgcccacgccaagaccaagaccataaatccttatgatgaaagacgcttgcttcagcagaacaagaaaatccaggaagccaaccgtgcacctgatgatttcccaaacttcatcagagaaggttttcaggtcaaagtagtgacacccgacaactacataactcgggactccggattaatatatgaggacgtcaaagttggtacaggcgattgcccaaaggatggtcagcaggttatatttcactatgtgggctacaacgaatcaggacgaaggatagatagcacctacatccagggttcgcctgccaactttgtgcccggcaagtaaacacatgagaatcgacttctcaggagtatatgtgtgctctggatgtatgattaatatctgatcgttgatgttgtacactatcaaagatgtttacaaatagcgcccatctgg

SEQ ID NO: 66034 - protein, 180 aa, Triticum aestivum
  peptide (1)..(180): Ceres Seq. ID no. 12619616
MELVSSSRSTLSSCSRLVAPSRSSSTTASAAARRHGKRLLCVLGGDRNDELKIGRRAVLALLLATPTLSLPFSAHAKTKTINPYDERRLLQQNKKIQEANRAPDDFPNFIREGFQVKVVTPDNYITRDSGLIYEDVKVGTGDCPKDGQQVIFHYVGYNESGRRIDSTYIQGSPANFVPGK

SEQ ID NO: 66035 - protein, 115 aa, Triticum aestivum
  peptide (1)..(115): Ceres Seq. ID no. 12619617
FLVLLHSPATASECECECGVGQRLKASAWDWRRRRWSWCPPPAPPYPLAADWLLPPGPVPRRHPQLLGATGRGYYVSWVETGMMSSRSGGGRFLLCSWLRPHSHCLSPPTPRPRP

SEQ ID NO: 66036 - DNA, 2115 bp, Triticum aestivum
  misc_feature (1)..(2115): Ceres Seq. ID no. 15169470
tgaaaaatcgccgtcccgtctcgtcgccacccaccaaatcccccgccctgcctcgccaccaaccccacgccaccacccctccccgccggccgcccggtatataaaccccgaccgccacccccatttcccccagaccacacgactcgccctcctccccgcgcagcagccccacctaccgacctaccgccccaagccgccgcgcatctcgcccctcagcccctcccctcccctcccgccgcagcaatggcgctcgccaccaacaccgccgccgcggccgcagcgctgaccggcagcgcggcccagccccgccgcgcgggcttcctccccctcaagcgccgcaccatctccgccgtgcacgccgccgaccccgccaggagcggcgcgtccgtcccggcggccgcggcagccaagacctcgtccccgacggtggcgccggaggccgcggccgtgacccggcccgcgagctggtccgtcgacagctggaggaagaagaaggcgctgcagctgcccgagtaccccaacaaggaggagctcgacgcggtcctcaagacgatcgagaccttcccgcccatcgtgttcgccggggaggcgcgccacctcgaggaccgcctcgccgaggccgccatgggccgcgccttcgtcctccagggcggcgactgcgccgagagcttcaaggagttcaacgccaacaacatccgtgacaccttccgcgtgctcctccagatgggcgccgtcctcatgttcggcggccaggtccccgtcgtcaaggtgggacggatggctggccagttcgccaagcccaggtctgacaacttcgaagagaaggacggcgtcaagctgccgagttacaggggcgacaacgtcaacggcgacgccttcgacctcaagagccgcacgcctgaccccgacaggatgatcagggcctacgcccagtcggtggcgaccctcaacctgctccgcgcgttcgcgaccggaggctacgcagctatgcagcgggtcatccagtggaacctggatttcatggatcacaacgagcagggagacaggtaccgtgagttggcgcatagggtggacgaggctcttggcttcatgacagcagctgggctggggatggaccatccgataatgacgactactgacttctggacatcccacgagtgtctcctcttgccatatgagcaggctcttacccgtgaggactccacaagtggccttttctacgactgctcggcccatatggtgtgggttggtgagcgtactcgtcaactcgacggggctcatgttgaatttctccgtggtattgccaaccctcttggcattaaggtgagtgacaagatgaaccctgctgaattggtgaagctgattgacattttgaacccttcaaacaagccgggaaggatcaccatcattacaaggatgggagctgagaacatgagggtgaagttgcctcatctcatccgtgctgtccgcaattctggacagattgtcacatggattactgaccccatgcacggaaacaccatcaaggccccatgtggtctgaagactcgtccatttgactctattatgaatgaggtgcgtgcattcttcgatgtgcacgaccaagaaggaagccacccaggaggcatccaccttgaaatgactggacagaatgtgaccgagtgcatcggtggatcacggaccgtgaccttcgatgacctgggtgaccgctaccacacccactgcgacccaaggctgaacgcgtcacagtctctggagctcgctttcatcatcgccgagagactcaggaagaggaggatgaagtcaggactcaccaacaacctgccactgcccccattggctttctaagcaggaagcaccagggaggaggggttagatagttggcatttgcaagcggtaaccaaatgcgcattccattgagtttgtatggtggctgctctttgcacaagctgtgtgcttatgaggtgttggtacttgtcgaggacagcaggggggtagcgtactcgtggtgttgcactatgttttgtttctttgttttatttttgagtgtttgatctgtttgagcctttgtgatccgagaaaataaaaataatatgagttacctttgttaattag

SEQ ID NO: 66037 - protein, 534 aa, Triticum aestivum
  peptide (1)..(534): Ceres Seq. ID no. 15169471
MALATNTAAAAAALTGSAAQPRRAGFLPLKRRTISAVHAADPARSGASVPAAAAAKTSSPTVAPEAAAVTRPASWSVDSWRKKKALQLPEYPNKEELDAVLKTIETFPPIVFAGEARHLEDRLAEAAMGRAFVLQGGDCAESFKEFNANNIRDTFRVLLQMGAVLMFGGQVPVVKVGRMAGQFAKPRSDNFEEKDGVKLPSYRGDNVNGDAFDLKSRTPDPDRMIRAYAQSVATLNLLRAFATGGYAAMQRVIQWNLDFMDHNEQGDRYRELAHRVDEALGFMTAAGLGMDHPIMTTTDFWTSHECLLLPYEQALTREDSTSGLFYDCSAHMVWVGERTRQLDGAHVEFLRGIANPLGIKVSDKMNPAELVKLIDILNPSNKPGRITIITRMGAENMRVKLPHLIRAVRNSGQIVTWITDPMHGNTIKAPCGLKTRPFDSIMNEVRAFFDVHDQEGSHPGGIHLEMTGQNVTECIGGSRTVTFDDLGDRYHTHCDPRLNASQSLELAFIIAERLRKRRMKSGLTNNLPLPPLAF

SEQ ID NO: 66038 - protein, 407 aa, Triticum aestivum
  peptide (1)..(407): Ceres Seq. ID no. 15169472
MGRAFVLQGGDCAESFKEFNANNIRDTFRVLLQMGAVLMFGGQVPVVKVGRMAGQFAKPRSDNFEEKDGVKLPSYRGDNVNGDAFDLKSRTPDPDRMIRAYAQSVATLNLLRAFATGGYAAMQRVIQWNLDFMDHNEQGDRYRELAHRVDEALGFMTAAGLGMDHPIMTTTDFWTSHECLLLPYEQALTREDSTSGLFYDCSAHMVWVGERTRQLDGAHVEFLRGIANPLGIKVSDKMNPAELVKLIDILNPSNKPGRITIITRMGAENMRVKLPHLIRAVRNSGQIVTWITDPMHGNTIKAPCGLKTRPFDSIMNEVRAFFDVHDQEGSHPGGIHLEMTGQNVTECIGGSRTVTFDDLGDRYHTHCDPRLNASQSLELAFIIAERLRKRRMKSGLTNNLPLPPLAF

SEQ ID NO: 66039 - protein, 374 aa, Triticum aestivum
  peptide (1)..(374): Ceres Seq. ID no. 15169473
MGAVLMFGGQVPVVKVGRMAGQFAKPRSDNFEEKDGVKLPSYRGDNVNGDAFDLKSRTPDPDRMIRAYAQSVATLNLLRAFATGGYAAMQRVIQWNLDFMDHNEQGDRYRELAHRVDEALGFMTAAGLGMDHPIMTTTDFWTSHECLLLPYEQALTREDSTSGLFYDCSAHMVWVGERTRQLDGAHVEFLRGIANPLGIKVSDKMNPAELVKLIDILNPSNKPGRITIITRMGAENMRVKLPHLIRAVRNSGQIVTWITDPMHGNTIKAPCGLKTRPFDSIMNEVRAFFDVHDQEGSHPGGIHLEMTGQNVTECIGGSRTVTFDDLGDRYHTHCDPRLNASQSLELAFIIAERLRKRRMKSGLTNNLPLPPLAF

SEQ ID NO: 66040 - DNA, 1034 bp, Triticum aestivum
  misc_feature (1)..(1034): Ceres Seq. ID no. 12620250
ttccttcccaagaaaccctagatcaagtgctgccgcctccctctccccgatccagatccctcctccgacgcccctcctcccccatccccggccatcccccttccatcacccttaatgtcccagtcgccgctctctctctctctctccctctcggttcagtgagatgggatccactcccgcagccaccgccccaccctcacactcaccatcgacgacccccgccgccatcgcacaccatagcgccatcccctcaccctagccccaggtcaggcagtgcgaggcggcgctcctagacccgcgatggccgtctgggtcatcgccttcgaggacgacgagtacgccgacccggcagtcatcatcgcctccgagacggacgcgtgttggcggcacatggggcccacatcatcatggccgtgcgcaacctcgccgcggcagaggccgtgcgccaggtcgtccttgccgagacccccgtcgccagcctcaacctgatagagctggacctctccccactgacctccatccgcaacttcgccgccaacttcgccgacaggggcctaccgctgaacatcctcatgacaattcaacatacccctgccctttcggagagggaaggtttcccactcatggacacctagctgaatgcctgaacctgaacctcgtttttcttcttcttcttcttcttcttcttcttcttcttggtaattccttgttgattccttctgggcatgctatattattgggtgcaacaacaaattattgtccttgttttgatttccttcctgtcaagttcatcctttagtgctagtactagtggtacatcagtttgatttaggaaaaacaccagcctctgcttaacattaaatctagtcaagcaattgatgcacaacatatttgtttttgtacaacaacaatccgttaaacgatctggcctgtatacacatgttgaggaagagagagaggatatatacttgttctgttgcttctatatacatgtatatacgtttagtttttcaacatgcttcaacatttttttt

SEQ ID NO: 66041 - protein, 96 aa, Triticum aestivum
  peptide (1)..(96): Ceres Seq. ID no. 12620251
PSQETLDQVLPPPSPRSRSLLRRPSSPIPGHPPSITLNVPVAALSLSLPLGSVRWDPLPQPPPHPHTHHRRPPPPSHTIAPSPHPSPRSGSARRRS

SEQ ID NO: 66042 - protein, 75 aa, Triticum aestivum
  peptide (1)..(75): Ceres Seq. ID no. 12620252
MAVRNLAAAEAVRQVVLAETPVASLNLIELDLSPLTSIRNFAANFADRGLPLNILMTIQHTPALSEREGFPLMDT

SEQ ID NO: 66043 - protein, 62 aa, Triticum aestivum
  peptide (1)..(62): Ceres Seq. ID no. 12620253
MAVWVIAFEDDEYADPAVIIASETDACWRHMGPTSSWPCATSPRQRPCARSSLPRPPSPAST

SEQ ID NO: 66044 - DNA, 1021 bp, Triticum aestivum
  misc_feature (1)..(1021): Ceres Seq. ID no. 15224319
accgaagcccaacccgaaacaccacttctcccccaaagccgccgagcttgcctgcgcgcacacaatcgagcaacccagcacctccgccgcccgggaagcccaaaccaaaccctaagcctccgcgaccggccgccggcgatggcccgctacgaccgcgcgatcaccgtcttctcccccgacggccacctcttccaggtcgagtacgccctcgaggccgtccgcaagggcaacgccgccgtcggcgtccgcggcaccgacaccgtcgtcctcggcgtcgagaagaagtccacccccaagctccaggactccaggtccgtgcgcaagatcgcgagcctggacacgcacgtcgcgctggcgtgcgcggggctcaaggcggacgcgcgggtgctcatcaaccgcgcccgcgtcgagtgccagagccaccgcctcaccgtcgaggaccccgtcaccgtcgagtacatcacccgctacatcgccggcctgcagcagaagtacacccagagcggcggggtacgccccttcggcctctccaccctcatcgtcggcttcgatccatacacggacaagcccgccctgtaccagaccgacccctccggcaccttctccgcctggaaggccaacgccaccgggaggaactccaactccatgcgggagttcctggagaagaactacaaggacacatccggcaaggagaccatcaagctcaccatccgagcccttctagaggttgttgagagtggtgggaagaacatcgagattgcagtgatgacaaagaaggatggccttcggcaactcgaggagactgaaattgatgaatatgttgccgagattgaggcagagaaggccgcggctgaggctgcaaagaagagcggcccgaaggatacctaattactgggtgtgctatatcttcattctgtcggccgaaaccttttagtgtgtcactgttacgttccataactttctttaaactgctttaacaagatattgaagtcattcgtaaatgaattgccttgttttcttg

SEQ ID NO: 66045 - protein, 295 aa, Triticum aestivum
  peptide (1)..(295): Ceres Seq. ID no. 15224320
TEAQPETPLLPQSRRACLRAHNRATQHLRRPGSPNQTLSLRDRPPAMARYDRAITVFSPDGHLFQVEYALEAVRKGNAAVGVRGTDTVVLGVEKKSTPKLQDSRSVRKIASLDTHVALACAGLKADARVLINRARVECQSHRLTVEDPVTVEYITRYIAGLQQKYTQSGGVRPFGLSTLIVGFDPYTDKPALYQTDPSGTFSAWKANATGRNSNSMREFLEKNYKDTSGKETIKLTIRALLEVVESGGKNIEIAVMTKKDGLRQLEETEIDEYVAEIEAEKAAAEAAKKSGPKDT

SEQ ID NO: 66046 - protein, 249 aa, Triticum aestivum
  peptide (1)..(249): Ceres Seq. ID no. 15224321
MARYDRAITVFSPDGHLFQVEYALEAVRKGNAAVGVRGTDTVVLGVEKKSTPKLQDSRSVRKIASLDTHVALACAGLKADARVLINRARVECQSHRLTVEDPVTVEYITRYIAGLQQKYTQSGGVRPFGLSTLIVGFDPYTDKPALYQTDPSGTFSAWKANATGRNSNSMREFLEKNYKDTSGKETIKLTIRALLEVVESGGKNIEIAVMTKKDGLRQLEETEIDEYVAEIEAEKAAAEAAKKSGPKDT

SEQ ID NO: 66047 - protein, 243 aa, Triticum aestivum
  peptide (1)..(243): Ceres Seq. ID no. 15224322
RSPTRNTTSPPKPPSLPARTQSSNPAPPPPGKPKPNPKPPRPAAGDGPLRPRDHRLLPRRPPLPGRVRPRGRPQGQRRRRRPRHRHRRPRRREEVHPQAPGLQVRAQDREPGHARRAGVRGAQGGRAGAHQPRPRRVPEPPPHRRGPRHRRVHHPLHRRPAAEVHPERRGTPLRPLHPHRRLRSIHGQARPVPDRPLRHLLRLEGQRHREELQLHAGVPGEELQGHIRQGDHQAHHPSPSRGC

SEQ ID NO: 66048 - DNA, 893 bp, Triticum aestivum
  misc_feature (1)..(893): Ceres Seq. ID no. 12619664
ctgacactagctatctcctacccacctatcccccgtccgtccgcccgtctaggtctctggagaagcggcgatggcggcgcccgtgacggtgtacgggccggcgatctcgccggcggtggcgcgcgtggcggcgtgcctgctggagaaggacgtgccgttccagctcgaggcggtggacatgtccaagggcgagcacaagtccccctccttcctcaagctccagcccttcggccaggtccccgccttcaaagaccacctcaccaccgtcttcgagtcaagggccatttgccgttacatctgtgaccagtactccgaccgtggcaaccagactctcctaggccggaaagaagacggcgcggtaggccgcgctgccatcgagcaatgggtagagtccgaaggccaagcatttaacccgccgagcttggccatcgcattccagctcaccttcgcgcctctcatgggcatggccaccgacatggccgtggtggagcagaatgaggcgaagctcgccaaggtgctcgacgtgtatgagcggcggctggcggagagccagtatttcgccggcgacgagttcacccttgccgaccttgtgcacatgcccaacactgatctcctcgtgagcaaggccggcaaggcgggtctgatcaccgagagaaagaatctgtccagatggtgggatgaggtctcggctcgtccgtcatggaagaaggttgtcgagttgcagagtgtaccacggccctctaaagcttgagggccccttcagtttttttagccgagcagcttctggtggcaattagtcacattctgttatgtgttgccatcactcctaaatgttattgtgttgtgaaagactcgggctgctttgtacaatatgttatcctgctatctatcgc

SEQ ID NO: 66049 - protein, 226 aa, Triticum aestivum
  peptide (1)..(226): Ceres Seq. ID no. 12619665
MAAPVTVYGPAISPAVARVAACLLEKDVPFQLEAVDMSKGEHKSPSFLKLQPFGQVPAFKDHLTTVFESRAICRYICDQYSDRGNQTLLGRKEDGAVGRAAIEQWVESEGQAFNPPSLAIAFQLTFAPLMGMATDMAVVEQNEAKLAKVLDVYERRLAESQYFAGDEFTLADLVHMPNTDLLVSKAGKAGLITERKNLSRWWDEVSARPSWKKVVELQSVPRPSKA

SEQ ID NO: 66050 - protein, 190 aa, Triticum aestivum
  peptide (1)..(190): Ceres Seq. ID no. 12619666
MSKGEHKSPSFLKLQPFGQVPAFKDHLTTVFESRAICRYICDQYSDRGNQTLLGRKEDGAVGRAAIEQWVESEGQAFNPPSLAIAFQLTFAPLMGMATDMAVVEQNEAKLAKVLDVYERRLAESQYFAGDEFTLADLVHMPNTDLLVSKAGKAGLITERKNLSRWWDEVSARPSWKKVVELQSVPRPSKA

SEQ ID NO: 66051 - DNA, 1581 bp, Triticum aestivum
  misc_feature (1)..(1581): Ceres Seq. ID no. 13657915
aaaaatccgacaatccatggggcgtagagaagacgagagaatcccgtactttcacgccaaggcaagcaaccggccgcccgcccgccgccatcaccaccgtcctccccacggtactccggttccaagttccgtatccggccctgcatggcctaaatcaccatccctccacgcctctgcttagtgagctcttgcttgccgtacatacatgccgatgagctcctcgccggcggtcgcggtcgcggtcgcgtctgcggccgtggtagcgctggctgtcgctaaccgcgtgctctataagctcgcgctggtgcccctcaagtcctatcccttcctcctcgctcagctcaccacgttcgggtacgtcacggtgtacttttcaatactctatgcgaggtaccgcgcgggggtggtgacgcgggacatgctgacactgccgaagatccggttcgctgtcatcggcttgctagaggctcttggggtcgccgctggaatgtctgcgggagctatgctgcctggccctgctattcctatactgtctcagtctttcctggtgtggcagcttatcttctctgtgttgcttttgggaaagacctactctctgagacaaatcattggttgcttgcttgtaacttctggtgtgattcttgctgttgcgagtggggcaaatgatggtcatcttctatctggagtcaagttaatttggccattgctgatggttgtttcatcggcattccaagctggtgcatccattttgaaggggaaacggcctgacatcttcgtggttaattcattcggatctgggtttcaggctcttgttgtcttccttcttctcccattactttctaatttgagggggattaagcttgctgagctttctggccatttaaatggtggtgctgagtgcttcttaaatgttggggagagcccaattgattgtggaggtgctccattcctaccattgctttttatattcgtaaacatggctttcaacatctcgttgcttaatttggtaaagatgtcgtctgccgtggttgcttcacttacagcaacttccgccgtgccaatatcaatctacatcctttctcttcctttgccctacatccctcaaggcgcggaattaagcgcttcttttatcttcggtggcattgtattgttgatgggcctaattctgtataaccttccccaatcatctaaagagtcaaagactgactaaaagcttatggcgattgagtgtatattaccacttcaaccgaaaatcaattattggtttggtcctgaagctaatattaggtttctagattggtgacgccagagtcgataaggactgtttgttgggatgcatgaatgcttggtatttctaatwtktgtcagagaatagkactastagtaaaaaaaaaaaaaaaaaaaaaaaaaaaaaaaaaaaaaaaaaaaaaaaaaaaaaaaaaaaaaaaaaaaaaaaaaaaaaaaaaaaaaaaaaaaaaaaaaaaaaaaaaaaaaaaamcccccaaaaaaaaaaaaaaaattttttttttcccccccccccccgggggggggsssssssccccctyyyccccwwaggggggg

SEQ ID NO: 66052 - protein, 334 aa, Triticum aestivum
  peptide (1)..(334): Ceres Seq. ID no. 15219893
MPMSSSPAVAVAVASAAVVALAVANRVLYKLALVPLKSYPFLLAQLTTFGYVTVYFSILYARYRAGVVTRDMLTLPKIRFAVIGLLEALGVAAGMSAGAMLPGPAIPILSQSFLVWQLIFSVLLLGKTYSLRQIIGCLLVTSGVILAVASGANDGHLLSGVKLIWPLLMVVSSAFQAGASILKGKRPDIFVVNSFGSGFQALVVFLLLPLLSNLRGIKLAELSGHLNGGAECFLNVGESPIDCGGAPFLPLLFIFVNMAFNISLLNLVKMSSAVVASLTATSAVPISIYILSLPLPYIPQGAELSASFIFGGIVLLMGLILYNLPQSSKESKTD

SEQ ID NO: 66053 - protein, 332 aa, Triticum aestivum
  peptide (1)..(332): Ceres Seq. ID no. 15219894
MSSSPAVAVAVASAAVVALAVANRVLYKLALVPLKSYPFLLAQLTTFGYVTVYFSILYARYRAGVVTRDMLTLPKIRFAVIGLLEALGVAAGMSAGAMLPGPAIPILSQSFLVWQLIFSVLLLGKTYSLRQIIGCLLVTSGVILAVASGANDGHLLSGVKLIWPLLMVVSSAFQAGASILKGKRPDIFVVNSFGSGFQALVVFLLLPLLSNLRGIKLAELSGHLNGGAECFLNVGESPIDCGGAPFLPLLFIFVNMAFNISLLNLVKMSSAVVASLTATSAVPISIYILSLPLPYIPQGAELSASFIFGGIVLLMGLILYNLPQSSKESKTD

SEQ ID NO: 66054 - protein, 263 aa, Triticum aestivum
  peptide (1)..(263): Ceres Seq. ID no. 15219895
MLTLPKIRFAVIGLLEALGVAAGMSAGAMLPGPAIPILSQSFLVWQLIFSVLLLGKTYSLRQIIGCLLVTSGVILAVASGANDGHLLSGVKLIWPLLMVVSSAFQAGASILKGKRPDIFVVNSFGSGFQALVVFLLLPLLSNLRGIKLAELSGHLNGGAECFLNVGESPIDCGGAPFLPLLFIFVNMAFNISLLNLVKMSSAVVASLTATSAVPISIYILSLPLPYIPQGAELSASFIFGGIVLLMGLILYNLPQSSKESKTD

SEQ ID NO: 66055 - DNA, 724 bp, Triticum aestivum
  misc_feature (1)..(724): Ceres Seq. ID no. 13657920
atgtccatcaaccatcaaggcaataatccacgtacggttgtgagcggttcaccagcaagatacatagaggttacagagaagccagcagcagcaagcaagattgagcattcacggatggtggccggggccgtggtgcaggcgtcatcggtgttcgccgccttcgacaaggacggcgacggcaaggtgtcggccgccgagctgcgcggctccatgatggcggcgctgggcgaggaggtttccgaggaggaggccgcggcgatcctggccacggtggacgccgacggcgacgggctgctggaccaggaggagttctcccggctcgggctcggcgccgccggagacaacggtggggcggccggagacgacgacgacgacgaggtgaggcggcggtgcctgaaggaggcgttcgccatgtacgcgacggggggcggcgaggagggcgccaggatcacgccggcgagcctgaggcggatgctgggcaagctgctggggtccgagaagatggggctggaggagtgcagggccatgatctgcaggtttgacctcaacggcgacggcgtcctctccttcgacgagttcagggtcatgatgatggccaatttgtaaaggaaggatggtttcatttcattcgttcgcttttctcttctgtatttttgacatgtggttgcagttgttcacatgatggacgtttcaattgtatgttgaggcttgggtgtgatgcttg

SEQ ID NO: 66056 - protein, 201 aa, Triticum aestivum
  peptide (1)..(201): Ceres Seq. ID no. 13657921
MSINHQGNNPRTVVSGSPARYIEVTEKPAAASKIEHSRMVAGAVVQASSVFAAFDKDGDGKVSAAELRGSMMAALGEEVSEEEAAAILATVDADGDGLLDQEEFSRLGLGAAGDNGGAAGDDDDDEVRRRCLKEAFAMYATGGGEEGARITPASLRRMLGKLLGSEKMGLEECRAMICRFDLNGDGVLSFDEFRVMMMANL

SEQ ID NO: 66057 - protein, 163 aa, Triticum aestivum
  peptide (1)..(163): Ceres Seq. ID no. 13657922
MVAGAVVQASSVFAAFDKDGDGKVSAAELRGSMMAALGEEVSEEEAAAILATVDADGDGLLDQEEFSRLGLGAAGDNGGAAGDDDDDEVRRRCLKEAFAMYATGGGEEGARITPASLRRMLGKLLGSEKMGLEECRAMICRFDLNGDGVLSFDEFRVMMMANL

SEQ ID NO: 66058 - protein, 131 aa, Triticum aestivum
  peptide (1)..(131): Ceres Seq. ID no. 13657923
MMAALGEEVSEEEAAAILATVDADGDGLLDQEEFSRLGLGAAGDNGGAAGDDDDDEVRRRCLKEAFAMYATGGGEEGARITPASLRRMLGKLLGSEKMGLEECRAMICRFDLNGDGVLSFDEFRVMMMANL

SEQ ID NO: 66059 - DNA, 810 bp, Triticum aestivum
  misc_feature (1)..(810): Ceres Seq. ID no. 13657924
catccccaactggcaacgtgccaccatcccgccctcaaccggcgaccggagacgccgccccgccccgccaccggccgccgccgttcccgccgcatcatcgaccgcgccgctgccgccccgccaccgaccgctgtcgccgccgcccaccatcgaccgccgttgccgccccgtccccaacaggagacgctgccgccgccggagacccgctacaccgcgccacctacggaggccctgttttctgtgccgtcgcgcctccaatggccaggatccgcgccgccacgcctccattggcctggatccgcaccgccgcgcaccgaaacagggcccgtccacctctgccgcaacagtctaccctcccgcagctgggggcgcgtgtgatggctgccatcggtggcagcgtgcccagatgcctccctcccccacggtgcagcaagctcgaggccgtcaccagactcccacctggtcgtggacatctcccctcctgccgctgcacgggctccaccatggacgcccccactcctccaccccccgagatttctgcacctacatacggccgtgatctgctgcccacccgtggttgcgtcgagcaacatcttgtgctccccaacgcgtgaggtgctgctgcctgctagtgctacaagcacgcgagttacgtaccctacctctctctcggatcagtgcaacaaggagcctcgtactttgatgatgaattagttgtacacgagcgtgttgtccatgagtacgttggtgcagatctcatgtgcttttgtatgcacgtgtgatgatgaattggttgagcattgcacccct

SEQ ID NO: 66060 - protein, 203 aa, Triticum aestivum
  peptide (1)..(203): Ceres Seq. ID no. 13657925
SPTGNVPPSRPQPATGDAAPPRHRPPPFPPHHRPRRCRPATDRCRRRPPSTAVAAPSPTGDAAAAGDPLHRATYGGPVFCAVAPPMARIRAATPPLAWIRTAAHRNRARPPLPQQSTLPQLGARVMAAIGGSVPRCLPPPRCSKLEAVTRLPPGRGHLPSCRCTGSTMDAPTPPPPEISAPTYGRDLLPTRGCVEQHLVLPNA

SEQ ID NO: 66061 - protein, 185 aa, Triticum aestivum
  peptide (1)..(185): Ceres Seq. ID no. 13657926
IPNWQRATIPPSTGDRRRRPAPPPAAAVPAASSTAPLPPRHRPLSPPPTIDRRCRPVPNRRRCRRRRPATPRHLRRPCFLCRRASNGQDPRRHASIGLDPHRRAPKQGPSTSAATVYPPAAGGACDGCHRWQRAQMPPSPTVQQARGRHQTPTWSWTSPLLPLHGLHHGRPHSSTPRDFCTYIRP

SEQ ID NO: 66062 - protein, 125 aa, Triticum aestivum
  peptide (1)..(125): Ceres Seq. ID no. 13657927
HPQLATCHHPALNRRPETPPRPATGRRRSRRIIDRAAAAPPPTAVAAAHHRPPLPPRPQQETLPPPETRYTAPPTEALFSVPSRLQWPGSAPPRLHWPGSAPPRTETGPVHLCRNSLPSRSWGRV

SEQ ID NO: 66063 - protein, 118 aa, Triticum aestivum
  peptide (1)..(118): Ceres Seq. ID no. 13657928
MARIRAATPPLAWIRTAAHRNRARPPLPQQSTLPQLGARVMAAIGGSVPRCLPPPRCSKLEAVTRLPPGRGHLPSCRCTGSTMDAPTPPPPEISAPTYGRDLLPTRGCVEQHLVLPNA

SEQ ID NO: 66064 - DNA, 818 bp, Triticum aestivum
  misc_feature (1)..(818): Ceres Seq. ID no. 15225989
cccctcccattccgcctcctgttgcttcgaactatggcagcagcagctgccggtgctgcatcggccgccgccgcgccagctacgcatcacgccgaccactccatgaacgccctccgctccaccgccttccgccgctccaccctccattgggacgccgccgcggccttcttttccccgcccttccgctctcgccgctgccaccgacgtgtcttgctccctcctgccgcggcgctgcccgcgaagtcccgctccagggccaaggctaagctcctggcggacgcgggggctgtggacccctggctcgcctccctctccctgctccccgccggcggcggcggctacggcggccagcgcggcggtggcggaggctacggcggcggcggcggctacggaggcggcggcggctacggcggtggtggcggctacggcggccagcgcggcggtggcggcggcgactccggcggccagtggaggaactgagcctcgaatctcccagttatcgatctatctaccgtgtcgtcgtcgtcgtcgtcgtcttcgtcagcaagttatcttcggtgtcgtcgtgttcctgtgtcagtctgagtcgtcgtgtgtgtggtgtttttgatcgcgagctcgagtgtcgctctgtccggggttaattagagctggttacgcgaggaagaaacaacatgtgttactatctttcagtcggtcggtcggtcggtcagtcggtgatgcagcaatccccttctgtcatggattgggatgtgatgttggaatatcctatgtttgaacaagtttaaatggatgaagaaaatgcaagtcatagctgc

SEQ ID NO: 66065 - protein, 159 aa, Triticum aestivum
  peptide (1)..(159): Ceres Seq. ID no. 15225990
PLPFRLLLLRTMAAAAAGAASAAAAPATHHADHSMNALRSTAFRRSTLHWDAAAAFFSPPFRSRRCHRRVLLPPAAALPAKSRSRAKAKLLADAGAVDPWLASLSLLPAGGGGYGGQRGGGGGYGGGGGYGGGGGYGGGGGYGGQRGGGGGDSGGQWRN

SEQ ID NO: 66066 - protein, 148 aa, Triticum aestivum
  peptide (1)..(148): Ceres Seq. ID no. 15225991
MAAAAAGAASAAAAPATHHADHSMNALRSTAFRRSTLHWDAAAAFFSPPFRSRRCHRRVLLPPAAALPAKSRSRAKAKLLADAGAVDPWLASLSLLPAGGGGYGGQRGGGGGYGGGGGYGGGGGYGGGGGYGGQRGGGGGDSGGQWRN

SEQ ID NO: 66067 - protein, 125 aa, Triticum aestivum
  peptide (1)..(125): Ceres Seq. ID no. 15225992
MNALRSTAFRRSTLHWDAAAAFFSPPFRSRRCHRRVLLPPAAALPAKSRSRAKAKLLADAGAVDPWLASLSLLPAGGGGYGGQRGGGGGYGGGGGYGGGGGYGGGGGYGGQRGGGGGDSGGQWRN

SEQ ID NO: 66068 - DNA, 1842 bp, Triticum aestivum
  misc_feature (1)..(1842): Ceres Seq. ID no. 14303706
acaacgaagcaccagaaaagaacaaaaatataaaaaaataagacgagagagccacccccatcgcctcgtctctcctctcctcgcagatctttcccgtctccggccaccatgaactcctactccggcgaccggtcctcctcccgtcccaccacaacctccttcgactcctaccagtttgacttcggggccaacgcctcccgctcctccacctcccgccccctccgcgaccagaggccaggtggcgccaccaacccttcaccgaggccaaccaccacaaacacatggtcacaccagccggtgaagacgtcctggactcatcagccatccccgtccgccgccgcggcgctcggatccgggcctgtgtccatggtcggcgacatctccggccggagctggtccgccactgcgccctcctccggcatcggcctccctcagtccaacaaccccaacctcttcagcgacctcctcgggcccgcgcttggatccacccgagcccagtccaacgcgccgctcagatcagcagcggcccagccctccaagccgtcaagcgctaaccctaggaccaacagctcttccttctcgatgggcggtatggcgagcacgctcccgaaaaccaccggggcaccgatagcttctggtagttatggggttggtggccggccaatgaagccggtgggcatggcgccggcgaccgcgtcacagcccacggcgcagaagaaggatccgttcggctccatagatcccttcgcggcgaagcctgggtctatgaatgctgcaaagcaggcaggttcggccaaatcggatcagggatttggcgtgtttcagggcgtgagttcgggcgccaacgctggattcagtagtttccagaaagccggtgctggatccagtggcttccagagttctggtgccacgaagccttccaatgttacgcctccgcctgcacccgctccagcgcctgtttctgcagcggtgaactctggcgtggatcattttgacacgctgtttccttcgtccgcatctgcaccaactgcttctgcggcgagtaatggtggtggtgacatgtttggtgagatggatggttgggtggacgtggagtcggagtatgttggtggtggtgatagcagtggcacaaccacagagctggagggattaccgccaccaccctctgggttgacggcatctgctgctaaggcaaaaggaatggataattacaagggtgggcagtatgctgatgctatcaaatggttgtcttgggctgttctgctcatcgagaagactgggaaaaatgctggtattgcagaggtgttgtcatcaagggcctcgtcctataaggaggtcggcgagtacaagaaggctattgccgactgttcgaaggtgctcgagcaagataaggacaatgtgtcggtgctagtgcaacgtgctctcttatatgagagcagtgagaaatataggcttggggctgaggacctgcgtttggttctgaagattgaccctgggaatcgtcttgccaggagtatgattcatcgattgaacaaaatggctgactagggatgtttgtcaagttccctgatgtaccaccattgtaatcatccttgacacggaaactgtgagttatttcaaattgttttactatacttgtggctttgggggtaataatttacaactttggtgttatgaagcacatcattgcatcttcacacacagtatatctttgatatgtattgtatatcatatattgtattgaactttaatagttcactttgtgtttgaaaaaaaaaaaaaaaaaaaaaaaaaaaaaaaaaaaaaaaaaaaaaaaaaaaaaaaaaaaaaaaaaaaaaaagg

SEQ ID NO: 66069 - protein, 479 aa, Triticum aestivum
  peptide (1)..(479): Ceres Seq. ID no. 14303707
MNSYSGDRSSSRPTTTSFDSYQFDFGANASRSSTSRPLRDQRPGGATNPSPRPTTTNTWSHQPVKTSWTHQPSPSAAAALGSGPVSMVGDISGRSWSATAPSSGIGLPQSNNPNLFSDLLGPALGSTRAQSNAPLRSAAAQPSKPSSANPRTNSSSFSMGGMASTLPKTTGAPIASGSYGVGGRPMKPVGMAPATASQPTAQKKDPFGSIDPFAAKPGSMNAAKQAGSAKSDQGFGVFQGVSSGANAGFSSFQKAGAGSSGFQSSGATKPSNVTPPPAPAPAPVSAAVNSGVDHFDTLFPSSASAPTASAASNGGGDMFGEMDGWVDVESEYVGGGDSSGTTTELEGLPPPPSGLTASAAKAKGMDNYKGGQYADAIKWLSWAVLLIEKTGKNAGIAEVLSSRASSYKEVGEYKKAIADCSKVLEQDKDNVSVLVQRALLYESSEKYRLGAEDLRLVLKIDPGNRLARSMIHRLNKMAD

SEQ ID NO: 66070 - protein, 393 aa, Triticum aestivum
  peptide (1)..(393): Ceres Seq. ID no. 14303708
MVGDISGRSWSATAPSSGIGLPQSNNPNLFSDLLGPALGSTRAQSNAPLRSAAAQPSKPSSANPRTNSSSFSMGGMASTLPKTTGAPIASGSYGVGGRPMKPVGMAPATASQPTAQKKDPFGSIDPFAAKPGSMNAAKQAGSAKSDQGFGVFQGVSSGANAGFSSFQKAGAGSSGFQSSGATKPSNVTPPPAPAPAPVSAAVNSGVDHFDTLFPSSASAPTASAASNGGGDMFGEMDGWVDVESEYVGGGDSSGTTTELEGLPPPPSGLTASAAKAKGMDNYKGGQYADAIKWLSWAVLLIEKTGKNAGIAEVLSSRASSYKEVGEYKKAIADCSKVLEQDKDNVSVLVQRALLYESSEKYRLGAEDLRLVLKIDPGNRLARSMIHRLNKMAD

SEQ ID NO: 66071 - protein, 321 aa, Triticum aestivum
  peptide (1)..(321): Ceres Seq. ID no. 14303709
MGGMASTLPKTTGAPIASGSYGVGGRPMKPVGMAPATASQPTAQKKDPFGSIDPFAAKPGSMNAAKQAGSAKSDQGFGVFQGVSSGANAGFSSFQKAGAGSSGFQSSGATKPSNVTPPPAPAPAPVSAAVNSGVDHFDTLFPSSASAPTASAASNGGGDMFGEMDGWVDVESEYVGGGDSSGTTTELEGLPPPPSGLTASAAKAKGMDNYKGGQYADAIKWLSWAVLLIEKTGKNAGIAEVLSSRASSYKEVGEYKKAIADCSKVLEQDKDNVSVLVQRALLYESSEKYRLGAEDLRLVLKIDPGNRLARSMIHRLNKMAD

SEQ ID NO: 66072 - DNA, 1960 bp, Triticum aestivum
  misc_feature (1)..(1960): Ceres Seq. ID no. 13590904
aaaaatccctctcccaaaacaagcggcataaaccacgacctcgacccgctccgtctccgctcccccgcttccagtccactccccttcctccccctccgctccgccccctcaagcgaaggcaccggatggcggcgtcccccacccccggcggcggcctcggggccatcctcgccgccggcgacagggactacctcgtccgcaactccggcgagcaggtgaagatcagcagcattgagggagacactgtagctatctatttctcggcctcatggtgcccgccatgccagcggtttacaccaaagcttattgaagcatacaaagaacttacctcaaatggcaagagctttgaggtgatctttgtttcaggcgaccgagatgaggaagcattcaatgcctattttgcaaagatgccgtggttggcagttcctttctccgactccgaaggccgtaaaagccttgatgagcggtttgacgtcaacggtattccacaccttgttttccttgatgcaaaaactggcgaagttcttactgacgaaggagttgagtttgtgagtgaatatggaatagaagcttatccttttacaactgagaggatcaatgaattgaaggaacaagaaaaggctgctaaggataaccaaactattcatagtgtgcttgctacaccaaatcgtaactatgtaatttcaaacacgggggagaaggtacccatcgttgatcttgaggggaagtatgttggtatatgctttgtagtgaacggctaccctccagttgaggaatttaccccagtgcttgccaagatatatgcgaaactcaaagaagtgggggagaagtttgaagttgtagctgtatccttggacagtgatgaggaatcattcaataacagtttttcaagcatgccttggctcgccattccccatggcgacaagatgtgtcagaagcttgtcagttactttgagcttagtgatcttcctacactagtgctgattggtcctgatgggaagacactgagcagcaatattgcagacataatcaatgagcatggtttggatgcatgggaggggttccccttcaatgcagagaagctggaaattctagctgagaaggcaaaggctaaagcagcctcacagacattggagtcccttctggttactggtgacgtggactttgtcatcgggaaagatggagcaaaggttcctgtagcagaacttgttgggaagactgtcctcctctacttttcagctaaatggtgtgggccatgcagagccttcctgcctacacttgtggatgtctacaacaagatcaaggagaagaacagcgatttcgagatcgtcttcgtctctagcgacagggaccagagctcattcgacgacttcttctctggcatgccatggctcgccatccccttggaagacgaaaggaaggcgtacctgaaaaagaagttcaagatccgtggaatcccttctctggtcgccattggccccgatgggaagacggtcaacacggacgcgaagacttcgctggcggtccatggcgccgacgcgtttccgttcaccgacgagaggatccaggagctggagaagaagatcgaggagatggcaaaggggtggcctgagaagctgaagcacgagctgcacgagcacgagctcgtgctgatccgccgccccaggccgtacggctgcgacgggtgcgaagagatgggcacctcctggtcctacaactgcgcggagtgcgacttcgatctgcacaccaagtgtgcgctgggtgaggagaagaagggagaggaggtgaatgggcaggagcatgctgctgccccagctgggtacgtgtgcgagggagacgtctgcaggaaggcctaggtatcgttgtgttgtgtgtgttccttgccagctgaggcgtgtctgaatcatgtgctgtgtggtgtgatgataaataaatcttgcatccgatggtttggcttggg

SEQ ID NO: 66073 - protein, 617 aa, Triticum aestivum
  peptide (1)..(617): Ceres Seq. ID no. 13590905
KSLSQNKRHKPRPRPAPSPLPRFQSTPLPPPPLRPLKRRHRMAASPTPGGGLGAILAAGDRDYLVRNSGEQVKISSIEGDTVAIYFSASWCPPCQRFTPKLIEAYKELTSNGKSFEVIFVSGDRDEEAFNAYFAKMPWLAVPFSDSEGRKSLDERFDVNGIPHLVFLDAKTGEVLTDEGVEFVSEYGIEAYPFTTERINELKEQEKAAKDNQTIHSVLATPNRNYVISNTGEKVPIVDLEGKYVGICFVVNGYPPVEEFTPVLAKIYAKLKEVGEKFEVVAVSLDSDEESFNNSFSSMPWLAIPHGDKMCQKLVSYFELSDLPTLVLIGPDGKTLSSNIADIINEHGLDAWEGFPFNAEKLEILAEKAKAKAASQTLESLLVTGDVDFVIGKDGAKVPVAELVGKTVLLYFSAKWCGPCRAFLPTLVDVYNKIKEKNSDFEIVFVSSDRDQSSFDDFFSGMPWLAIPLEDERKAYLKKKFKIRGIPSLVAIGPDGKTVNTDAKTSLAVHGADAFPFTDERIQELEKKIEEMAKGWPEKLKHELHEHELVLIRRPRPYGCDGCEEMGTSWSYNCAECDFDLHTKCALGEEKKGEEVNGQEHAAAPAGYVCEGDVCRKA

SEQ ID NO: 66074 - protein, 576 aa, Triticum aestivum
  peptide (1)..(576): Ceres Seq. ID no. 13590906
MAASPTPGGGLGAILAAGDRDYLVRNSGEQVKISSIEGDTVAIYFSASWCPPCQRFTPKLIEAYKELTSNGKSFEVIFVSGDRDEEAFNAYFAKMPWLAVPFSDSEGRKSLDERFDVNGIPHLVFLDAKTGEVLTDEGVEFVSEYGIEAYPFTTERINELKEQEKAAKDNQTIHSVLATPNRNYVISNTGEKVPIVDLEGKYVGICFVVNGYPPVEEFTPVLAKIYAKLKEVGEKFEVVAVSLDSDEESFNNSFSSMPWLAIPHGDKMCQKLVSYFELSDLPTLVLIGPDGKTLSSNIADIINEHGLDAWEGFPFNAEKLEILAEKAKAKAASQTLESLLVTGDVDFVIGKDGAKVPVAELVGKTVLLYFSAKWCGPCRAFLPTLVDVYNKIKEKNSDFEIVFVSSDRDQSSFDDFFSGMPWLAIPLEDERKAYLKKKFKIRGIPSLVAIGPDGKTVNTDAKTSLAVHGADAFPFTDERIQELEKKIEEMAKGWPEKLKHELHEHELVLIRRPRPYGCDGCEEMGTSWSYNCAECDFDLHTKCALGEEKKGEEVNGQEHAAAPAGYVCEGDVCRKA

SEQ ID NO: 66075 - protein, 482 aa, Triticum aestivum
  peptide (1)..(482): Ceres Seq. ID no. 13590907
MPWLAVPFSDSEGRKSLDERFDVNGIPHLVFLDAKTGEVLTDEGVEFVSEYGIEAYPFTTERINELKEQEKAAKDNQTIHSVLATPNRNYVISNTGEKVPIVDLEGKYVGICFVVNGYPPVEEFTPVLAKIYAKLKEVGEKFEVVAVSLDSDEESFNNSFSSMPWLAIPHGDKMCQKLVSYFELSDLPTLVLIGPDGKTLSSNIADIINEHGLDAWEGFPFNAEKLEILAEKAKAKAASQTLESLLVTGDVDFVIGKDGAKVPVAELVGKTVLLYFSAKWCGPCRAFLPTLVDVYNKIKEKNSDFEIVFVSSDRDQSSFDDFFSGMPWLAIPLEDERKAYLKKKFKIRGIPSLVAIGPDGKTVNTDAKTSLAVHGADAFPFTDERIQELEKKIEEMAKGWPEKLKHELHEHELVLIRRPRPYGCDGCEEMGTSWSYNCAECDFDLHTKCALGEEKKGEEVNGQEHAAAPAGYVCEGDVCRKA

SEQ ID NO: 66076 - DNA, 1727 bp, Triticum aestivum
  misc_feature (1)..(1727): Ceres Seq. ID no. 15169585
ttttttttcgattacactccgtccagtgcagctaggctagggcgctaggctaggcagcagacatgatgaccgtcccgcttgttgtcgcgctgttcaactcgcccttcgtcctcaccaccctcgccttcctcctcttcaccctcctcgtctccaagacgcgcagcaatgttgctgcccggggaacgttgcctccgtcgccgcccagcctgccagtcttcggccaccttcgtctactcgggagcctgccgcacaggagcctccggtcactggccgcgtcctacggcccggtcatgtacctacgcctcgggcgtgtgcccaccgtcgtggcgtactccgcggccgccgcggaggaggccatgaagacccgcgacctggccttcgccagccgccccaagctgttcatggtcgaccggttctactacggcaccggcggcatcggcttcgcgccgtacggcgagcactggcgccaggcccgccgcgtctgcgtcacccacatgcttaacccgcaccgcctcctgtccttcaggcgcgtccgggggcaggaggtcgccgccctcgtcgaccgggtccgccgcgccggtaccgtcgtgaacctgagcgacaacctcatcgtctactctttcaccgccatctctcgcgccacctttggcgacacggactacgggatcgacggcgaggaggggggagcgaggctgaggaaggtgttcgccgagatcgaggagcttctcggcacggcccccatgggggagaaggtgccatggctgcggtgggtcgacgtcctgacgggactggagcggaagacgaggcgcgcgttcgaggagatggatggactgctcgagcgggtcatcacggaccatcgccaaaagagcggcgccggggacaacgaccagcgtgacttcgtggacgtgctgttaggggccaacgagctcgacacgaacggcatcaaggccatcatcctggacatgcttgccgccgccacggattcaacgttcacgttgctggaatgggccatggcggagctcatcaaccacccgcaagaaatgcgcaagctccaggacgaggtccgcacggccgtcggcgacgccggccacgtcaccgaggatcatctgccggatctacgctacctgaaggccgtcgtcaaggagaccctccggctccaccctcccacgccgctcctcctgccccgggagactgtcgaggacacccagctgctcggctaccacgtcccggcaggcacgcgggtgctgatccacgcctgggccatcggccgtgacccggcgacgtggggcgaccgcgccgaggagttcgtgccggagaggttcttggagtacacccacgagatggggcaagacttcgcgttcttgcccttcggcaccgggaggagaggttgccccggggtcaagttcgccatgccgtccaacgagctggccctcgcgagcctggtgtaccatttcgactgggagctagccggcgggaggaagccgcccgtggacatgaccgagctgcacgggctctccgtgcgcctgaagacgcctctgcttctggctgctaaaccgtggtcaagccgtggtgtcgaatgagagaaaagcgtctctacatgcttcttctaagtagtacgagctagctcagagctcggatgatcattatcgaccaagtctagtaatgtactccttcatgtattgttcacttgttaatttccttacccgtatttgttgagcagtaacttc

SEQ ID NO: 66077 - protein, 505 aa, Triticum aestivum
  peptide (1)..(505): Ceres Seq. ID no. 15169586
MMTVPLVVALFNSPFVLTTLAFLLFTLLVSKTRSNVAARGTLPPSPPSLPVFGHLRLLGSLPHRSLRSLAASYGPVMYLRLGRVPTVVAYSAAAAEEAMKTRDLAFASRPKLFMVDRFYYGTGGIGFAPYGEHWRQARRVCVTHMLNPHRLLSFRRVRGQEVAALVDRVRRAGTVVNLSDNLIVYSFTAISRATFGDTDYGIDGEEGGARLRKVFAEIEELLGTAPMGEKVPWLRWVDVLTGLERKTRRAFEEMDGLLERVITDHRQKSGAGDNDQRDFVDVLLGANELDTNGIKAIILDMLAAATDSTFTLLEWAMAELINHPQEMRKLQDEVRTAVGDAGHVTEDHLPDLRYLKAVVKETLRLHPPTPLLLPRETVEDTQLLGYHVPAGTRVLIHAWAIGRDPATWGDRAEEFVPERFLEYTHEMGQDFAFLPFGTGRRGCPGVKFAMPSNELALASLVYHFDWELAGGRKPPVDMTELHGLSVRLKTPLLLAAKPWSSRGVE

SEQ ID NO: 66078 - protein, 504 aa, Triticum aestivum
  peptide (1)..(504): Ceres Seq. ID no. 15169587
MTVPLVVALFNSPFVLTTLAFLLFTLLVSKTRSNVAARGTLPPSPPSLPVFGHLRLLGSLPHRSLRSLAASYGPVMYLRLGRVPTVVAYSAAAAEEAMKTRDLAFASRPKLFMVDRFYYGTGGIGFAPYGEHWRQARRVCVTHMLNPHRLLSFRRVRGQEVAALVDRVRRAGTVVNLSDNLIVYSFTAISRATFGDTDYGIDGEEGGARLRKVFAEIEELLGTAPMGEKVPWLRWVDVLTGLERKTRRAFEEMDGLLERVITDHRQKSGAGDNDQRDFVDVLLGANELDTNGIKAIILDMLAAATDSTFTLLEWAMAELINHPQEMRKLQDEVRTAVGDAGHVTEDHLPDLRYLKAVVKETLRLHPPTPLLLPRETVEDTQLLGYHVPAGTRVLIHAWAIGRDPATWGDRAEEFVPERFLEYTHEMGQDFAFLPFGTGRRGCPGVKFAMPSNELALASLVYHFDWELAGGRKPPVDMTELHGLSVRLKTPLLLAAKPWSSRGVE

SEQ ID NO: 66079 - protein, 429 aa, Triticum aestivum
  peptide (1)..(429): Ceres Seq. ID no. 15169588
MYLRLGRVPTVVAYSAAAAEEAMKTRDLAFASRPKLFMVDRFYYGTGGIGFAPYGEHWRQARRVCVTHMLNPHRLLSFRRVRGQEVAALVDRVRRAGTVVNLSDNLIVYSFTAISRATFGDTDYGIDGEEGGARLRKVFAEIEELLGTAPMGEKVPWLRWVDVLTGLERKTRRAFEEMDGLLERVITDHRQKSGAGDNDQRDFVDVLLGANELDTNGIKAIILDMLAAATDSTFTLLEWAMAELINHPQEMRKLQDEVRTAVGDAGHVTEDHLPDLRYLKAVVKETLRLHPPTPLLLPRETVEDTQLLGYHVPAGTRVLIHAWAIGRDPATWGDRAEEFVPERFLEYTHEMGQDFAFLPFGTGRRGCPGVKFAMPSNELALASLVYHFDWELAGGRKPPVDMTELHGLSVRLKTPLLLAAKPWSSRGVE

SEQ ID NO: 66080 - DNA, 1792 bp, Triticum aestivum
  misc_feature (1)..(1792): Ceres Seq. ID no. 14301587
acaaaatttctccccccaaatttcctactcgtccgtttcacgctcccacggtctcactctcacctccaaacccaaatccccaaaccctaaccacagcacctacctcctccgccgccgccgccatggcaggagcaggagtcggcggccgcaaggctcgcaactttgcgacctttcgcctattcccccgcgacggtgccgccgaccccaacgaccgcgtcttcgtccgcgtcgacaacaacgcctacaccatccccggcttcggcgacgacgaagacccttccctctcgcccaccgccgccgccgaccaattcccttcctccacctctgggcccctccccgaccacgtccgccagcagatccttgagctcggcctccccgacgatggctacaactaccttctccatctccgcgagctgcggccctccgctgtggcctcctccttcgtacccagccataccgcccgcccagagcaacttcccctggacgtgaaggcctatgatgcaagcaaggtgcgggttgcttctggcaaggtcgaggaagagttggacgaggggaggaccatgtgtaaggtggccgcaaagacggcaccggtgaggcgagttgagaaggccgtcgaccctgacgttgcaaggttgctcgatgagagcgaggatgagggtttggaggaggatttcgtcataatggcaaaccaagccgaaggggatgatatggaggatgaaagtgaggaagaggggggtggtgtgttcagtgatgtggaaaatgatgaggagttcgaggatgaagagggtgagcccaagccgagggtgccacggctgctggatgaacaatttgatctgcttgctttggaagaatatggagctagtgatgatgatgatggagctgttagagatggggaacatgaactcccgtctgaggttatagatgaactgaagttgttccacaatcaaaatgtatgcgttgatgaagaatatagaacaccagcagattttgttcgtggaaaacttgactcaaccaccgccgaggaggtggatgaatctgctaatgtgatccagaagtgtgctgaatatgctgaaaggtatttaaatgaaactgcagaagatgaagaggtcttgcttgtttcggaaagcagtgatgaatctgaagtttgggactgtgagaccattgtttccacatactctaacttggacaatcaccctggcaaaattcaaactccaggaaatcctagaaatcgtcttcccaaagtttttcctggggaaacagctacaacgaaagatatcatcaagcttcatggtaaagagaaacttcctgtagattacctgccacagaggaaaagaaaagttgaaaaggagaagaaagcaaagcccacagaagcttcagatgctgaatattattttgaaaaggttgtagttcagaaggaaacaaaagatgaaaagaaagctagaaagtccgcggtaaaagaagagaagagagaagcccggaaagcaaagaaagagctcaaagaactgtataaatttgaaacacagaaggctcagaaagttgctgctgttacaggaccatcttccatacggctaatataattgtcctgtgtcatatgtaacgtgtttcctacatctgctgaactgttgaagccttgaagacagtagtccagagcaagataggcatgtcatatgtaactgctggtacctgagacatttcatgccttgcttaaggttgtcccattctctggactggaggcagtgaatgattctgcttggcattacctttttactgctgaatgtatgagttttgtgtt

SEQ ID NO: 66081 - protein, 524 aa, Triticum aestivum
  peptide (1)..(524): Ceres Seq. ID no. 14301588
KISPPKFPTRPFHAPTVSLSPPNPNPQTLTTAPTSSAAAAMAGAGVGGRKARNFATFRLFPRDGAADPNDRVFVRVDNNAYTIPGFGDDEDPSLSPTAAADQFPSSTSGPLPDHVRQQILELGLPDDGYNYLLHLRELRPSAVASSFVPSHTARPEQLPLDVKAYDASKVRVASGKVEEELDEGRTMCKVAAKTAPVRRVEKAVDPDVARLLDESEDEGLEEDFVIMANQAEGDDMEDESEEEGGGVFSDVENDEEFEDEEGEPKPRVPRLLDEQFDLLALEEYGASDDDDGAVRDGEHELPSEVIDELKLFHNQNVCVDEEYRTPADFVRGKLDSTTAEEVDESANVIQKCAEYAERYLNETAEDEEVLLVSESSDESEVWDCETIVSTYSNLDNHPGKIQTPGNPRNRLPKVFPGETATTKDIIKLHGKEKLPVDYLPQRKRKVEKEKKAKPTEASDAEYYFEKVVVQKETKDEKKARKSAVKEEKREARKAKKELKELYKFETQKAQKVAAVTGPSSIRLI

SEQ ID NO: 66082 - protein, 484 aa, Triticum aestivum
  peptide (1)..(484): Ceres Seq. ID no. 14301589
MAGAGVGGRKARNFATFRLFPRDGAADPNDRVFVRVDNNAYTIPGFGDDEDPSLSPTAAADQFPSSTSGPLPDHVRQQILELGLPDDGYNYLLHLRELRPSAVASSFVPSHTARPEQLPLDVKAYDASKVRVASGKVEEELDEGRTMCKVAAKTAPVRRVEKAVDPDVARLLDESEDEGLEEDFVIMANQAEGDDMEDESEEEGGGVFSDVENDEEFEDEEGEPKPRVPRLLDEQFDLLALEEYGASDDDDGAVRDGEHELPSEVIDELKLFHNQNVCVDEEYRTPADFVRGKLDSTTAEEVDESANVIQKCAEYAERYLNETAEDEEVLLVSESSDESEVWDCETIVSTYSNLDNHPGKIQTPGNPRNRLPKVFPGETATTKDIIKLHGKEKLPVDYLPQRKRKVEKEKKAKPTEASDAEYYFEKVVVQKETKDEKKARKSAVKEEKREARKAKKELKELYKFETQKAQKVAAVTGPSSIRLI

SEQ ID NO: 66083 - protein, 338 aa, Triticum aestivum
  peptide (1)..(338): Ceres Seq. ID no. 14301590
MCKVAAKTAPVRRVEKAVDPDVARLLDESEDEGLEEDFVIMANQAEGDDMEDESEEEGGGVFSDVENDEEFEDEEGEPKPRVPRLLDEQFDLLALEEYGASDDDDGAVRDGEHELPSEVIDELKLFHNQNVCVDEEYRTPADFVRGKLDSTTAEEVDESANVIQKCAEYAERYLNETAEDEEVLLVSESSDESEVWDCETIVSTYSNLDNHPGKIQTPGNPRNRLPKVFPGETATTKDIIKLHGKEKLPVDYLPQRKRKVEKEKKAKPTEASDAEYYFEKVVVQKETKDEKKARKSAVKEEKREARKAKKELKELYKFETQKAQKVAAVTGPSSIRLI

SEQ ID NO: 66084 - DNA, 899 bp, Triticum aestivum
  misc_feature (1)..(899): Ceres Seq. ID no. 13657435
atcgaaaaactcgcgcacctcacaacacccctccatccaccttttgccagcgtgagagcttcttctttcttgcgagggagaggacagcgagcaaccagggagctaggcgtcaatggcgaccatagccacgatgaccatgctcaagcccgccaagatcacggccaggtcggcgccttcctcgccgtcgttcagcgccaaggtggcgtcgccgagcatctcgctgcgcagcctgcagaagaacgcggccaagaagggagccctggccgtgtcgccggcggccgcggccatggcgagcgccttcttcacctcgctggcctcgtcggacgccgcgatggcgtcgcagcggatcgcggacgtggcggcggtggcgcccgcggacgacaaccggggcctgctgctgctcttcgtggtggcgcccgcgctcgggtgggtgctctacaacatcctccagccggcgctgaaccagctcaataagatgcggtccgagaaggcgctcgtcgccgggctcggcatcagcgccgccgcggccgccggcctggccgccgcgccggagccggcctccgccgccgtgcaggagctcgccgcgctggcggcggtagcgcccgccgacgacaaccggggcctgctgctgctcttcgtggtggcgcccgccctcggatgggtgctctacaacatcctgcagccggcgctgaaccagctcaacaaaatgcggtccaactgagcgtcgtcgtcgtcgtggcatcgcatgcggtccggccgagtgggttcgtatgtgtgtgttcgtctattaagagtcgtggtagtagcgtggaacgtggtgtgagtgcctgcttgcatactctctaatcttgttccttccattgatcaaatgcagtacagctcttcttgttttctcttcg

SEQ ID NO: 66085 - protein, 202 aa, Triticum aestivum
  peptide (1)..(202): Ceres Seq. ID no. 13657436
MATIATMTMLKPAKITARSAPSSPSFSAKVASPSISLRSLQKNAAKKGALAVSPAAAAMASAFFTSLASSDAAMASQRIADVAAVAPADDNRGLLLLFVVAPALGWVLYNILQPALNQLNKMRSEKALVAGLGISAAAAAGLAAAPEPASAAVQELAALAAVAPADDNRGLLLLFVVAPALGWVLYNILQPALNQLNKMRSN

SEQ ID NO: 66086 - protein, 196 aa, Triticum aestivum
  peptide (1)..(196): Ceres Seq. ID no. 13657437
MTMLKPAKITARSAPSSPSFSAKVASPSISLRSLQKNAAKKGALAVSPAAAAMASAFFTSLASSDAAMASQRIADVAAVAPADDNRGLLLLFVVAPALGWVLYNILQPALNQLNKMRSEKALVAGLGISAAAAAGLAAAPEPASAAVQELAALAAVAPADDNRGLLLLFVVAPALGWVLYNILQPALNQLNKMRSN

SEQ ID NO: 66087 - protein, 194 aa, Triticum aestivum
  peptide (1)..(194): Ceres Seq. ID no. 13657438
MLKPAKITARSAPSSPSFSAKVASPSISLRSLQKNAAKKGALAVSPAAAAMASAFFTSLASSDAAMASQRIADVAAVAPADDNRGLLLLFVVAPALGWVLYNILQPALNQLNKMRSEKALVAGLGISAAAAAGLAAAPEPASAAVQELAALAAVAPADDNRGLLLLFVVAPALGWVLYNILQPALNQLNKMRSN

SEQ ID NO: 66088 - DNA, 1741 bp, Triticum aestivum
  misc_feature (1)..(1741): Ceres Seq. ID no. 15225244
acctaccgcaaacccccaaagccacagcgaactcgagctccccccaatggcagctccgcccatctccggccacccccattcctccgtcgactcgccgctccccaccgacgccctcctcgcgcacccccaactcccctccgcccccgcgccccaggcccccaccgcctcccgcttcctcatcatcctcaccgccgccctcgccgtctccacctcctacctcctcctcctccgcccgcccttctccgccgtgtccgccgccgcctccacctcatccttcgcacggcctctatccaagctcccgaagccggtggtcctcctcatatcctccgatggcttccgcttcggctaccaccacaaggcccccaccccgcacatccgccgcctcatcgccaatggcacctccgccgccgagggcctcatccccgtcttccccaccctcaccttccccaaccactactccatcgtcaccggccttcacccttcctcccacggcatcatcaacaacttcttccccgaccccatctcgggggacaacttcaacatgggctcccacgagcccaagtggtggctcggggagcccctctgggtcaccgccgccgaccagggggtccaggcctccacgttcttctggccgggctcggaggtgaagaagggctcctgggactgccccgataagtattgccgccactataatggctctgtgccattcgaggacagggttgacgccgtccttggttactttgatctcccggttgatgaaatgccgcagtttctgacactgtactttgaggatccagatcaccaggggcaccaggttggtcctgatgacccagccatcaccgatgctgtgacgcacattgacgagatgatcgggaggctcattgctggtttggaagctaggggggtgttcgaggatgtgaacatcatattggttggggatcatgggatggttgggacctgcgaccagaagctactgtttctcgaggaattggctccatggattgaggtgaaggctgattgggttctgtcgaggacaccattgctggcaatcaggccaccagatggtatatccccgtcagaggtcgtggccaagatgaatgaagggctgagctctgggaaggtgaagaatgggcaatatctgaagatgtacttgaaggaggatttgccttctcgcctgcattactcggaaagctataggataccaccaattattgggctggtagctgaaggttataaggtagagatgaaagtatcaaagaaaaatgagtgtggaggggcgcacgggtatgacaatgccttcttctcaatgaggaccatattcatcgcacatgggcctcgtttcgaagagggtaaaattgtgccctcatttgtgaatgtggagatatacaatgccattgcttccattctcagtttgaagccagctccaaacaatggctccagttctttccctgaaacagttcttttaccgagtgaatgatcatcggtgtatgtgagggctttggttctggaggaggaaagcccacactgatggtattatcttctggttgtagttgtatttgtacactattttagttcaaattctgccatgtgcagctattcgctactgataatactgcaagcagagtttctttttccttaaggatgtaatttgccaatgcaaatcacatctaacttttgatcttctgtgatgaatgtataatgctacttcttttaagtgccatgtgtttctacttgagttgat

SEQ ID NO: 66089 - protein, 491 aa, Triticum aestivum
  peptide (1)..(491): Ceres Seq. ID no. 15225245
PTANPQSHSELELPPMAAPPISGHPHSSVDSPLPTDALLAHPQLPSAPAPQAPTASRFLIILTAALAVSTSYLLLLRPPFSAVSAAASTSSFARPLSKLPKPVVLLISSDGFRFGYHHKAPTPHIRRLIANGTSAAEGLIPVFPTLTFPNHYSIVTGLHPSSHGIINNFFPDPISGDNFNMGSHEPKWWLGEPLWVTAADQGVQASTFFWPGSEVKKGSWDCPDKYCRHYNGSVPFEDRVDAVLGYFDLPVDEMPQFLTLYFEDPDHQGHQVGPDDPAITDAVTHIDEMIGRLIAGLEARGVFEDVNIILVGDHGMVGTCDQKLLFLEELAPWIEVKADWVLSRTPLLAIRPPDGISPSEVVAKMNEGLSSGKVKNGQYLKMYLKEDLPSRLHYSESYRIPPIIGLVAEGYKVEMKVSKKNECGGAHGYDNAFFSMRTIFIAHGPRFEEGKIVPSFVNVEIYNAIASILSLKPAPNNGSSSFPETVLLPSE

SEQ ID NO: 66090 - protein, 476 aa, Triticum aestivum
  peptide (1)..(476): Ceres Seq. ID no. 15225246
MAAPPISGHPHSSVDSPLPTDALLAHPQLPSAPAPQAPTASRFLIILTAALAVSTSYLLLLRPPFSAVSAAASTSSFARPLSKLPKPVVLLISSDGFRFGYHHKAPTPHIRRLIANGTSAAEGLIPVFPTLTFPNHYSIVTGLHPSSHGIINNFFPDPISGDNFNMGSHEPKWWLGEPLWVTAADQGVQASTFFWPGSEVKKGSWDCPDKYCRHYNGSVPFEDRVDAVLGYFDLPVDEMPQFLTLYFEDPDHQGHQVGPDDPAITDAVTHIDEMIGRLIAGLEARGVFEDVNIILVGDHGMVGTCDQKLLFLEELAPWIEVKADWVLSRTPLLAIRPPDGISPSEVVAKMNEGLSSGKVKNGQYLKMYLKEDLPSRLHYSESYRIPPIIGLVAEGYKVEMKVSKKNECGGAHGYDNAFFSMRTIFIAHGPRFEEGKIVPSFVNVEIYNAIASILSLKPAPNNGSSSFPETVLLPSE

SEQ ID NO: 66091 - protein, 311 aa, Triticum aestivum
  peptide (1)..(311): Ceres Seq. ID no. 15225247
MGSHEPKWWLGEPLWVTAADQGVQASTFFWPGSEVKKGSWDCPDKYCRHYNGSVPFEDRVDAVLGYFDLPVDEMPQFLTLYFEDPDHQGHQVGPDDPAITDAVTHIDEMIGRLIAGLEARGVFEDVNIILVGDHGMVGTCDQKLLFLEELAPWIEVKADWVLSRTPLLAIRPPDGISPSEVVAKMNEGLSSGKVKNGQYLKMYLKEDLPSRLHYSESYRIPPIIGLVAEGYKVEMKVSKKNECGGAHGYDNAFFSMRTIFIAHGPRFEEGKIVPSFVNVEIYNAIASILSLKPAPNNGSSSFPETVLLPSE

SEQ ID NO: 66092 - DNA, 1768 bp, Triticum aestivum
  misc_feature (1)..(1768): Ceres Seq. ID no. 13658032
tgctcaaggcacatggcgcgctgctccgtcgcgaagccgcttacaaccgccgccgcggctccgcgcctccctcgccgccgcgctctgctcgttagcgccgccgccgcctccctggccacggcaacaacaagaacgcagcggctgtccgccctatcgaagccgcctaaaccaccgcctctcctcccgcgcccaaggctccccacctccaaccacgcccccaccaacgacaagcaagacgaccgccgtgaagcatcgacgggcgcggcgtcctctggctctgggtcgccctcgggcgccggagacgtgctccgcctgatggatgccctcggcgtcgcgcccgacgaggacgtctacgtctccctcctcagggactccgtcgacgccgccgaggtcgccgccgtgcacgcccacttygacgccgcacgcgccgcgcctggcctccccctgccgctggccaaccggctgctgctcgcctacgcggcctgcggcgacatggcggccgcccgcaaggtgttcgacgaaattcccgtcaaggacggcatcacgtgggcgaccatggtgtcggcctactccgatgggtgtttccatgaagaagcgctaaggctcttcacccgcatgtgccaagaagaacatgggcttgctggtgatctgctcggccatgccattgtggcagtgctgcggtcatgtgctcggctgggcagattaaggggctttggtgagcaggtacatgcgctcgtcgtcaagacaaagagagtctgcggtgataccggtagttcgctgctgcagctgtacatcgcaagtaatcagcatgacagtgcgcggcaagtgcttcaggcgatgaggtgttgttcccatgagccagtgcccgaggcagcctggactagcttcatgacagcttgccaccgggacggactgctagatgaggccatctatgtctttagggacatggtgtcctccggagtcgccaggagcagcttctccctgtcgactatccttgcggtatgtgcagaatcagataactgcaggtgttatggacagcaagtgcatggcgacgccatcaagcacggcgtggaaacagaccagttcgttgtgtctgggttggtccacatgtatgcgaagcaaggacggcttgcagacgccgcgagggcatttgaggcagtgggtggcaagcctgacgcggtgtgctggaacgccatggccatggggtatgcacgcggtgggtggtacagagaggccaccagaatgatgtaccagatgaaagctgctggactggatcttccaggactaaatgtggttggaatggcctgctccagattgatgcatgtagggattgatgcatccatggcaggattgatgcatgttttcccattttgggcgatggatcccaaggaggacatgaaccagaaggtgctcctcttcgcccgcaggaactgtgaccaccagtgtttgttcacctactggagcagctgagaagaggaggaagaaaaacaggacaactcttcaggaactagggttcatacaacactgttcatgatgtgagtatatcaccatgttcttgattttttagttaacaatattcagtcactaggagtacaacagtagcagtacatagctggaatatgcatttacatagacttactgatggctcaacattcgagctgattactagcagtgcaacactagcagtacacatatggatactcacagattactcctttgttactgtatttatctagagatgggagtagagctgaagcagtacgacttc

SEQ ID NO: 66093 - protein, 489 aa, Triticum aestivum
  peptide (1)..(489): Ceres Seq. ID no. 15220618
  misc_feature (138)..(138): Xaa is any aa, unknown or other
CSRHMARCSVAKPLTTAAAAPRLPRRRALLVSAAAASLATATTRTQRLSALSKPPKPPPLLPRPRLPTSNHAPTNDKQDDRREASTGAASSGSGSPSGAGDVLRLMDALGVAPDEDVYVSLLRDSVDAAEVAAVHAHXDAARAAPGLPLPLANRLLLAYAACGDMAAARKVFDEIPVKDGITWATMVSAYSDGCFHEEALRLFTRMCQEEHGLAGDLLGHAIVAVLRSCARLGRLRGFGEQVHALVVKTKRVCGDTGSSLLQLYIASNQHDSARQVLQAMRCCSHEPVPEAAWTSFMTACHRDGLLDEAIYVFRDMVSSGVARSSFSLSTILAVCAESDNCRCYGQQVHGDAIKHGVETDQFVVSGLVHMYAKQGRLADAARAFEAVGGKPDAVCWNAMAMGYARGGWYREATRMMYQMKAAGLDLPGLNVVGMACSRLMHVGIDASMAGLMHVFPFWAMDPKEDMNQKVLLFARRNCDHQCLFTYWSS

SEQ ID NO: 66094 - protein, 485 aa, Triticum aestivum
  peptide (1)..(485): Ceres Seq. ID no. 15220619
  misc_feature (134)..(134): Xaa is any aa, unknown or other
MARCSVAKPLTTAAAAPRLPRRRALLVSAAAASLATATTRTQRLSALSKPPKPPPLLPRPRLPTSNHAPTNDKQDDRREASTGAASSGSGSPSGAGDVLRLMDALGVAPDEDVYVSLLRDSVDAAEVAAVHAHXDAARAAPGLPLPLANRLLLAYAACGDMAAARKVFDEIPVKDGITWATMVSAYSDGCFHEEALRLFTRMCQEEHGLAGDLLGHAIVAVLRSCARLGRLRGFGEQVHALVVKTKRVCGDTGSSLLQLYIASNQHDSARQVLQAMRCCSHEPVPEAAWTSFMTACHRDGLLDEAIYVFRDMVSSGVARSSFSLSTILAVCAESDNCRCYGQQVHGDAIKHGVETDQFVVSGLVHMYAKQGRLADAARAFEAVGGKPDAVCWNAMAMGYARGGWYREATRMMYQMKAAGLDLPGLNVVGMACSRLMHVGIDASMAGLMHVFPFWAMDPKEDMNQKVLLFARRNCDHQCLFTYWSS

SEQ ID NO: 66095 - protein, 384 aa, Triticum aestivum
  peptide (1)..(384): Ceres Seq. ID no. 15220620
  misc_feature (33)..(33): Xaa is any aa, unknown or other
MDALGVAPDEDVYVSLLRDSVDAAEVAAVHAHXDAARAAPGLPLPLANRLLLAYAACGDMAAARKVFDEIPVKDGITWATMVSAYSDGCFHEEALRLFTRMCQEEHGLAGDLLGHAIVAVLRSCARLGRLRGFGEQVHALVVKTKRVCGDTGSSLLQLYIASNQHDSARQVLQAMRCCSHEPVPEAAWTSFMTACHRDGLLDEAIYVFRDMVSSGVARSSFSLSTILAVCAESDNCRCYGQQVHGDAIKHGVETDQFVVSGLVHMYAKQGRLADAARAFEAVGGKPDAVCWNAMAMGYARGGWYREATRMMYQMKAAGLDLPGLNVVGMACSRLMHVGIDASMAGLMHVFPFWAMDPKEDMNQKVLLFARRNCDHQCLFTYWSS

SEQ ID NO: 66096 - DNA, 1966 bp, Triticum aestivum
  misc_feature (1)..(1966): Ceres Seq. ID no. 15169599
agcaaccaacaacatccgagcatcagcaccagctcaaacacacatactgtagtacattgcacgccaagctagcacccgcgcagagcacagcatggctgtctccgcgcgcagggtggccttcgccacggcagcctccttggccgtgtactggctcctcaaatcgttcctccacgcaccgcaccccgcgctgctgccggcagcggccgccctcgtcgccgtcgccgtgggagcgggagggaagcgtggaggccccggcgcccctccaggccccgcggccgtgccggtgttcggcaactggctgcaggtgggcaacgacctgaaccaccgcttcctggcgcggctgtcggcgcggtacggccccgtgttccggctgcggctgggcgtgcgcaacctggtggtggtgtcggacccgcggctggccacggaggtgctccacacgcagggcgtggagttcggctcccgcccgcggaacgtcgtcttcgacatcttcacggccaatggcgccgacatggtcttcaccgagtacggcgaccactggcgccgcatgcgccgcgtcatgacgctgcccttcttcacggcgcgggttgtgcagcagtaccgcgccatgtgggaggccgagatggacgacgtcgtgtccgacctgcgcgccgactcggcggcccgcggcgccggcgtcgtcgtgcgccgcaggctgcagctcatgctctacaacatcatgtaccgcatgatgttcgacgcccgcttcgactccgtggacgaccccatgttcgtggaggccaccaagttcaactcggagcgcagccgcctcgcgcagagcttcgattacaactacggcgacttcatccccatcctcaggcccttcctgcgtggctacctcaacaagtgcagggacctgcagacgaggaggctggccttcttcaacagcaactacgtcgagaagagaagggaggtgatggacaccccaggacaagacaagaacaagctccggtgcgcgatcgaccacatcctcgcagcagagaagagcggcgagatcacgccggagaacgtcatctacatcgtcgagaacatcaacgtcgcggccatcgagacgacgctatggtccatcgagtgggcgctggccgaggtggtgaaccacccggacgtgcagcgcaaggtccgcggcgagatcagggacgtgctcggcgacgacgagcccatcaccgagtccaacatcagcaagctgccgtacctgcaggccgtgatcaaggagacgctgcggctgcactccccgatcccgctcctcgtcccccacatgaacctggaggaggccagcctcggcggctacaccattcccaagggctccaaggtcgtcgtcaacgcctggtggctggccaacaacccagagctatgggagaagccggaggagttcaagccggagaggttcttgggcgaggagagcaacgtggacgccacggtcggcggcaaggtggacttccggttcctcccgttcggcgtggggcggcgcagctgccccggtatcatcctcgcgctgcccatcctggcgctcatcgtcgggaagctggtgaggagcttcgagatggtgccgccgccaggcgtggacaagctcgacgtgagcgagaaaggcgggcagttcagcctgcacattgccaaccattccgtcgtcgcattccaccccatctcaccctgagcaattgcatcttcaacccaatagcctgatccacaagcacaatttttcttcagattacaaatacagtagattacacgaaagtatgtcagttgatttatggggtttacatttttttttctttataaaaaggaggatcacgcgtggcctctgcataaggggtttaaaaaatgcttttcagctttaagaaattggtttacataacgcttttcagctttaagaaatgtatgtattttgcaaatcaaaatgttttttatgggtgcaaattgaaatgttattgcc

SEQ ID NO: 66097 - protein, 531 aa, Triticum aestivum
  peptide (1)..(531): Ceres Seq. ID no. 15169600
MAVSARRVAFATAASLAVYWLLKSFLHAPHPALLPAAAALVAVAVGAGGKRGGPGAPPGPAAVPVFGNWLQVGNDLNHRFLARLSARYGPVFRLRLGVRNLVVVSDPRLATEVLHTQGVEFGSRPRNVVFDIFTANGADMVFTEYGDHWRRMRRVMTLPFFTARVVQQYRAMWEAEMDDVVSDLRADSAARGAGVVVRRRLQLMLYNIMYRMMFDARFDSVDDPMFVEATKFNSERSRLAQSFDYNYGDFIPILRPFLRGYLNKCRDLQTRRLAFFNSNYVEKRREVMDTPGQDKNKLRCAIDHILAAEKSGEITPENVIYIVENINVAAIETTLWSIEWALAEVVNHPDVQRKVRGEIRDVLGDDEPITESNISKLPYLQAVIKETLRLHSPIPLLVPHMNLEEASLGGYTIPKGSKVVVNAWWLANNPELWEKPEEFKPERFLGEESNVDATVGGKVDFRFLPFGVGRRSCPGIILALPILALIVGKLVRSFEMVPPPGVDKLDVSEKGGQFSLHIANHSVVAFHPISP

SEQ ID NO: 66098 - protein, 392 aa, Triticum aestivum
  peptide (1)..(392): Ceres Seq. ID no. 15169601
MVFTEYGDHWRRMRRVMTLPFFTARVVQQYRAMWEAEMDDVVSDLRADSAARGAGVVVRRRLQLMLYNIMYRMMFDARFDSVDDPMFVEATKFNSERSRLAQSFDYNYGDFIPILRPFLRGYLNKCRDLQTRRLAFFNSNYVEKRREVMDTPGQDKNKLRCAIDHILAAEKSGEITPENVIYIVENINVAAIETTLWSIEWALAEVVNHPDVQRKVRGEIRDVLGDDEPITESNISKLPYLQAVIKETLRLHSPIPLLVPHMNLEEASLGGYTIPKGSKVVVNAWWLANNPELWEKPEEFKPERFLGEESNVDATVGGKVDFRFLPFGVGRRSCPGIILALPILALIVGKLVRSFEMVPPPGVDKLDVSEKGGQFSLHIANHSVVAFHPISP

SEQ ID NO: 66099 - protein, 380 aa, Triticum aestivum
  peptide (1)..(380): Ceres Seq. ID no. 15169602
MRRVMTLPFFTARVVQQYRAMWEAEMDDVVSDLRADSAARGAGVVVRRRLQLMLYNIMYRMMFDARFDSVDDPMFVEATKFNSERSRLAQSFDYNYGDFIPILRPFLRGYLNKCRDLQTRRLAFFNSNYVEKRREVMDTPGQDKNKLRCAIDHILAAEKSGEITPENVIYIVENINVAAIETTLWSIEWALAEVVNHPDVQRKVRGEIRDVLGDDEPITESNISKLPYLQAVIKETLRLHSPIPLLVPHMNLEEASLGGYTIPKGSKVVVNAWWLANNPELWEKPEEFKPERFLGEESNVDATVGGKVDFRFLPFGVGRRSCPGIILALPILALIVGKLVRSFEMVPPPGVDKLDVSEKGGQFSLHIANHSVVAFHPISP

SEQ ID NO: 66100 - DNA, 531 bp, Triticum aestivum
  misc_feature (1)..(531): Ceres Seq. ID no. 14305395
cgtatacctgatgggaaatttcaggctgctttcctgacgtaccattctcttggacactgggttcatcgaggaagctcatcagaccaggctggccatagtcatgctgtcttgccagtcatgggtttgcaatcttacaacgacaagggggagtggtggtttcagacgagcagatctggttcgggggatgcagagtcctcgtcgagtcggccgtctcaggttcttcaagaaaggttgtcgacgctgaaccaagccgcggcggcgatggccagggccgacgtgtggaagaaggaccaggctcgcagaaacaggcacccggactacgagttcttcctgtcccggcagcaacggtagacagacgactccaggctttttgcgcgtacaatgtgttcaaaatgctgacggacgaacgtttgttcccttgtaaccagaagcaagcatgcggactgagcggtgccgtctgcgtgtgttaccaccctgtatatatttgagatagaggtacatgtcatgtggaggtgctgctcaattgaaagg

SEQ ID NO: 66101 - protein, 116 aa, Triticum aestivum
  peptide (1)..(116): Ceres Seq. ID no. 14305396
RIPDGKFQAAFLTYHSLGHWVHRGSSSDQAGHSHAVLPVMGLQSYNDKGEWWFQTSRSGSGDAESSSSRPSQVLQERLSTLNQAAAAMARADVWKKDQARRNRHPDYEFFLSRQQR

SEQ ID NO: 66102 - protein, 77 aa, Triticum aestivum
  peptide (1)..(77): Ceres Seq. ID no. 14305397
MGLQSYNDKGEWWFQTSRSGSGDAESSSSRPSQVLQERLSTLNQAAAAMARADVWKKDQARRNRHPDYEFFLSRQQR

SEQ ID NO: 66103 - DNA, 1838 bp, Triticum aestivum
  misc_feature (1)..(1838): Ceres Seq. ID no. 14313216
atgcggagctccatggcctgctggtcgccaaccatggcgccgctggcaatgctgctcgtctctgctctattcttcgtcacctcccatgcttcccttcctatccctatccaagctgccgccgacgacttcctccggtgcatgtcggcgtccgtcccaggcaaccttctctttccccgcagctcgccgtcgttcgcgtcggtccttgcgtcctccgtccggaacccgcggttcctcgggccggccgtggtgcgtccgctctgcatcgtcacggcgaccaacgcgtcccacgtccaggccgccgtcgtgtgcggccgccggcacggcgtgcgcctccgcgtgcgcagcggcgggcacgactacgagggcctctcgttccggtccgcgcgccaggaggacttcgccgtcgtggacctcgccgccctccgctccgtgcgcgtcaccgtgcgggagccggccgaggcgtgggtggagtccggcgccacgctcggggagctgtaccacgccatcgggagggcgaccgaccggcacgcgttcccggggggcctctgcccgacggtgggcgtcgggggccacctgagcggcggcggcttcggcatgctgctgcgcaagtacggcctcgcctccgaccacgtcatcaacgccgtgatggtggacgcggaggggcggctgctggacaagcaggccatggggcgcgacgtgttctgggccatccgcggcggcggcggcgggagcttcgggatcgtgctgtcgtggaaggtgaggctggtggccgtgccgccgagggtgacggtgttcaccgtcgtgaagacggcccgggagggcgcggcggacctcctcgccaagtggcaggaggtcgcccctgctctccccgacgacctgctggtgagggtggtcgtccagggggacaaggcgaggttccaggccctgtacctgggcgcccgcgacgcgctgctgccggtgatgggcagccggttcccggagctgggagtgaacccgacgcactgcaaggagatgtcgtggatccagtcggtgccctacatctacatcggcgaggcagccagcgtggacgacatcctgaaccggaccgtcgcgagggactcctccccgagcaagtcgacgtccgactacgtgcggcgggccatcccgagggacgtgtgggcgcggatcttctccgactggctggcgaggcgggacgcggggctgatgatcctggacccctacggcgggagcatcgcgggcgtggcggagtcggcgacgcccttctcgcaccgggccggcgtgctgtacaacgtgcagtacatgaacttctggggcgtgggcggcgacggcgcggcaaacacgaggtggatcagggacatgtacgcgttcatggagccgcacgtgagcaagaacccgcgggaggcgtacgtgaactacagggacctggacctcgggcagaacgtggtgggcgccggcgacgtctcgagcttcgaggccggtagggtgtggggggagaagtactactccaaggccaacttccggaggctcgccatggccaaggggcagatcgatccccgcgactacttcaggagcgagcagagcatcccgccgcttgttggctcgcagctggagctgacctccgccaggaacgcgccgcacgttgatggcgtgaatcctccgggttggtgggcagtggggtgtgggacaggcagtccgtgttcagtccttagctctgtcttggctaaactgatgcctagtttcttttagacatagctcattctgttttaccacgtagtacttgttggtcttattgtcaatggtgtttgctagcggaaataaagtctgaaattatggttaag

SEQ ID NO: 66104 - protein, 581 aa, Triticum aestivum
  peptide (1)..(581): Ceres Seq. ID no. 14313217
MRSSMACWSPTMAPLAMLLVSALFFVTSHASLPIPIQAAADDFLRCMSASVPGNLLFPRSSPSFASVLASSVRNPRFLGPAVVRPLCIVTATNASHVQAAVVCGRRHGVRLRVRSGGHDYEGLSFRSARQEDFAVVDLAALRSVRVTVREPAEAWVESGATLGELYHAIGRATDRHAFPGGLCPTVGVGGHLSGGGFGMLLRKYGLASDHVINAVMVDAEGRLLDKQAMGRDVFWAIRGGGGGSFGIVLSWKVRLVAVPPRVTVFTVVKTAREGAADLLAKWQEVAPALPDDLLVRVVVQGDKARFQALYLGARDALLPVMGSRFPELGVNPTHCKEMSWIQSVPYIYIGEAASVDDILNRTVARDSSPSKSTSDYVRRAIPRDVWARIFSDWLARRDAGLMILDPYGGSIAGVAESATPFSHRAGVLYNVQYMNFWGVGGDGAANTRWIRDMYAFMEPHVSKNPREAYVNYRDLDLGQNVVGAGDVSSFEAGRVWGEKYYSKANFRRLAMAKGQIDPRDYFRSEQSIPPLVGSQLELTSARNAPHVDGVNPPGWWAVGCGTGSPCSVLSSVLAKLMPSFF

SEQ ID NO: 66105 - protein, 577 aa, Triticum aestivum
  peptide (1)..(577): Ceres Seq. ID no. 14313218
MACWSPTMAPLAMLLVSALFFVTSHASLPIPIQAAADDFLRCMSASVPGNLLFPRSSPSFASVLASSVRNPRFLGPAVVRPLCIVTATNASHVQAAVVCGRRHGVRLRVRSGGHDYEGLSFRSARQEDFAVVDLAALRSVRVTVREPAEAWVESGATLGELYHAIGRATDRHAFPGGLCPTVGVGGHLSGGGFGMLLRKYGLASDHVINAVMVDAEGRLLDKQAMGRDVFWAIRGGGGGSFGIVLSWKVRLVAVPPRVTVFTVVKTAREGAADLLAKWQEVAPALPDDLLVRVVVQGDKARFQALYLGARDALLPVMGSRFPELGVNPTHCKEMSWIQSVPYIYIGEAASVDDILNRTVARDSSPSKSTSDYVRRAIPRDVWARIFSDWLARRDAGLMILDPYGGSIAGVAESATPFSHRAGVLYNVQYMNFWGVGGDGAANTRWIRDMYAFMEPHVSKNPREAYVNYRDLDLGQNVVGAGDVSSFEAGRVWGEKYYSKANFRRLAMAKGQIDPRDYFRSEQSIPPLVGSQLELTSARNAPHVDGVNPPGWWAVGCGTGSPCSVLSSVLAKLMPSFF

SEQ ID NO: 66106 - protein, 570 aa, Triticum aestivum
  peptide (1)..(570): Ceres Seq. ID no. 14313219
MAPLAMLLVSALFFVTSHASLPIPIQAAADDFLRCMSASVPGNLLFPRSSPSFASVLASSVRNPRFLGPAVVRPLCIVTATNASHVQAAVVCGRRHGVRLRVRSGGHDYEGLSFRSARQEDFAVVDLAALRSVRVTVREPAEAWVESGATLGELYHAIGRATDRHAFPGGLCPTVGVGGHLSGGGFGMLLRKYGLASDHVINAVMVDAEGRLLDKQAMGRDVFWAIRGGGGGSFGIVLSWKVRLVAVPPRVTVFTVVKTAREGAADLLAKWQEVAPALPDDLLVRVVVQGDKARFQALYLGARDALLPVMGSRFPELGVNPTHCKEMSWIQSVPYIYIGEAASVDDILNRTVARDSSPSKSTSDYVRRAIPRDVWARIFSDWLARRDAGLMILDPYGGSIAGVAESATPFSHRAGVLYNVQYMNFWGVGGDGAANTRWIRDMYAFMEPHVSKNPREAYVNYRDLDLGQNVVGAGDVSSFEAGRVWGEKYYSKANFRRLAMAKGQIDPRDYFRSEQSIPPLVGSQLELTSARNAPHVDGVNPPGWWAVGCGTGSPCSVLSSVLAKLMPSFF

SEQ ID NO: 66107 - DNA, 1861 bp, Triticum aestivum
  misc_feature (1)..(1861): Ceres Seq. ID no. 15178460
accactctcccattcccgtataacccccgcagccgccgccgctcctccccctctcttcctcccttggccaaattttgcgggaaacgcgacgccacccggagaaaccctcctcccgcacctcgcctcccaccctgccaaaaccctcgcccctcctcctcctcctcctcctacgatggccgcgccgacgcctccgcccgccgccgcccccgccgcggcgccaggaccgacgccgccggcgcaagtggtgggcaacgccttcgtgcagcagtactacaacatcctccaccagtcaccggagctcgtcttccgcttctaccaggaggccagccgcatcggccgccccgccaccaccggcgccgacatggacaccgtcaccaccatggaggcgattaacgagaagatcatgtccatggacatcgcgcgggcggagatcaggggggtggacgcgcaggagtcgctatgtggcggtgtgaccgtgctcgtcacgggccacctcacagggaaggacgacgtctgccgcgagttcgcgcagtccttcttcctcgcgccgcaggagaagggttacttcgtgctcaacgacatactacgttatgtcgggcagggtgaggccgacccgtcattgccgccacctcagcagcagccgccggcaccggagttggatgcagtggttgcccctgctgccgccttggcaaatggtactgttgcccctgtggagactgtgcctcgcgagcaggaggcttcgccgcagccagagctggatctctctgagtctgttcctcataccaacgaggaggaggatcccaaggaggaggtttacaacccaccgaatgacgtggaggtgcctgttgtggaggaaacactggttcctgaggtcatagatgaagtgccaaataatgtagcagcctccataccggtttcggctccccctgtaccacatgaggaggcccctaagaagtcgtacgcttcaattgtcaaagtcatgaaagcagttctgccaccaaattccacagttccttacaggcctgcaccaccaaaaccagagaagcaagctcctgctcctgcccagtctgtggctgttgatgctccaactttcagtcctaatcctgagagcagcaacattcaagaccaagaagttgatgcgcttgcggtgtatgtaaaaaatctgcccttacatgccacacctagccaattagaagaggagttcaaaagatttggtactattaaacatgatggtatccaagttagaagccacaagattcaagggttctgctatggcttcatagagtttgaggatgccagctcagttcaaagtgcactagcggcttctcctgtgacgattgatgaccggccatgccacgtcgaagaaaaaagaactcctggttcacgtggtagtagcaggggaaggtttccaccgggtagaggtggtaatttccgaggtgaaggcatgagaggccgtggtagttacactggagggagaggctatggaaggggcgagtacaacaactatcgatctgattttggaggcagaggcggtggtagaggcggctcaggtcgtggaggtgatgttggctaccagcgggttgatcactctggcaccggtggtcgtggtggtgcccgggcagctgcaaagtgagtttggtagctatgcgttggtagaagtttgctatttcattgtcgttgaacgtactaagattcacaaaaatggtgtgtcgtgagctgggttcctgtgcggtcgttgtcagcgtattcaggtcataaattggtgctctccttgttttgtggcaaggaaagcagtggtgatattggttactaattgtagaatattacaatctattcagatgcagtcctagtaagttttgac

SEQ ID NO: 66108 - protein, 543 aa, Triticum aestivum
  peptide (1)..(543): Ceres Seq. ID no. 15178461
PLSHSRITPAAAAAPPPLFLPWPNFAGNATPPGETLLPHLASHPAKTLAPPPPPPPTMAAPTPPPAAAPAAAPGPTPPAQVVGNAFVQQYYNILHQSPELVFRFYQEASRIGRPATTGADMDTVTTMEAINEKIMSMDIARAEIRGVDAQESLCGGVTVLVTGHLTGKDDVCREFAQSFFLAPQEKGYFVLNDILRYVGQGEADPSLPPPQQQPPAPELDAVVAPAAALANGTVAPVETVPREQEASPQPELDLSESVPHTNEEEDPKEEVYNPPNDVEVPVVEETLVPEVIDEVPNNVAASIPVSAPPVPHEEAPKKSYASIVKVMKAVLPPNSTVPYRPAPPKPEKQAPAPAQSVAVDAPTFSPNPESSNIQDQEVDALAVYVKNLPLHATPSQLEEEFKRFGTIKHDGIQVRSHKIQGFCYGFIEFEDASSVQSALAASPVTIDDRPCHVEEKRTPGSRGSSRGRFPPGRGGNFRGEGMRGRGSYTGGRGYGRGEYNNYRSDFGGRGGGRGGSGRGGDVGYQRVDHSGTGGRGGARAAAK

SEQ ID NO: 66109 - protein, 486 aa, Triticum aestivum
  peptide (1)..(486): Ceres Seq. ID no. 15178462
MAAPTPPPAAAPAAAPGPTPPAQVVGNAFVQQYYNILHQSPELVFRFYQEASRIGRPATTGADMDTVTTMEAINEKIMSMDIARAEIRGVDAQESLCGGVTVLVTGHLTGKDDVCREFAQSFFLAPQEKGYFVLNDILRYVGQGEADPSLPPPQQQPPAPELDAVVAPAAALANGTVAPVETVPREQEASPQPELDLSESVPHTNEEEDPKEEVYNPPNDVEVPVVEETLVPEVIDEVPNNVAASIPVSAPPVPHEEAPKKSYASIVKVMKAVLPPNSTVPYRPAPPKPEKQAPAPAQSVAVDAPTFSPNPESSNIQDQEVDALAVYVKNLPLHATPSQLEEEFKRFGTIKHDGIQVRSHKIQGFCYGFIEFEDASSVQSALAASPVTIDDRPCHVEEKRTPGSRGSSRGRFPPGRGGNFRGEGMRGRGSYTGGRGYGRGEYNNYRSDFGGRGGGRGGSGRGGDVGYQRVDHSGTGGRGGARAAAK

SEQ ID NO: 66110 - protein, 423 aa, Triticum aestivum
  peptide (1)..(423): Ceres Seq. ID no. 15178463
MDTVTTMEAINEKIMSMDIARAEIRGVDAQESLCGGVTVLVTGHLTGKDDVCREFAQSFFLAPQEKGYFVLNDILRYVGQGEADPSLPPPQQQPPAPELDAVVAPAAALANGTVAPVETVPREQEASPQPELDLSESVPHTNEEEDPKEEVYNPPNDVEVPVVEETLVPEVIDEVPNNVAASIPVSAPPVPHEEAPKKSYASIVKVMKAVLPPNSTVPYRPAPPKPEKQAPAPAQSVAVDAPTFSPNPESSNIQDQEVDALAVYVKNLPLHATPSQLEEEFKRFGTIKHDGIQVRSHKIQGFCYGFIEFEDASSVQSALAASPVTIDDRPCHVEEKRTPGSRGSSRGRFPPGRGGNFRGEGMRGRGSYTGGRGYGRGEYNNYRSDFGGRGGGRGGSGRGGDVGYQRVDHSGTGGRGGARAAAK

SEQ ID NO: 66111 - DNA, 1380 bp, Triticum aestivum
  misc_feature (1)..(1380): Ceres Seq. ID no. 12784228
actctcccccgaaccttctagaaccctacccacccatggcggcctcgctcctctcgcgcgccgcctcggccgccttcgccctccgcggcggcgcccggctcctccccaagggaagggtcggatgggcgcgcgcggcggaggtcggctgcggggcgtcgctgtcgccgtcgatgacgcggttcgggatcgccgcgcgcttcaacgccacctcgtcggccgtgtcggaggccgccgccgccgcgtcgggcgccgtccacgcggtgccgcggacggagcctgtcgtgtccgccgagtggctccacgccaacctcagggaccccgatgtgaaggtacttgatgcctcttggtatatgcctgcagaacaaaggaatccccttcaggagtaccaggtggctcatatccctggtgccttattctttgatgtcgatggaatatctgacagagcatctagtctgccacacatgctgccatctgagaaagcattttctgctgctgtgtcttctcttggcatctacaacaaagatggaatagtagtttatgatggaaagggtctatttagcgctgctcgtgtttggtggatgtttcgtgcttatggacatgacaaagtttgggttttggatggaggtttgccccaatggcgtgcttctgggtatgatgtcgaatcaagtgcctctagtgatgctatcttaaaagccagtgctgctagtgaagcaatcgagaaagtttatcaggggcaatcggttggtcccaccacatttgaagcgaagttgcagcctcatcttctttggaatcttggtcaggtgaaagagaacatcgagacccagacacatcaacttatagatgctcgagggaagcctagatttgatggtgcagttccagagccacgcaagggaataagaagcgggcatgtgcctgggagcaaatgcgttccttttcctcaggtccttgacagtacacagaagctattgcctgcagatgatctccgtaagcgattcgagcaagaaggtatatcacttgatcaacccattgtgacctcttgcggcactggtgtgacagcatgtgtattggctttgggccttcatcgcctcggcaaaactgatgttgccgtgtacgatggatcatggactgaatggggtgctcaccctgacactccagttgctactgctgtttagtctcacgcggcgtgtatggaggaccatcttttgtacccgcacttctcagcgatgtatgaaggtcagaaggcaaaggaaactgaagagtgtgggtgggtgtaaggttgtggaagcgatgctgttcggcgttttcaatgtaaattatcgaaacagagaaaaattgaatacatactgtgtgaatcaatagttgatgatccacctttctgtg

SEQ ID NO: 66112 - protein, 389 aa, Triticum aestivum
  peptide (1)..(389): Ceres Seq. ID no. 12784229
SPPNLLEPYPPMAASLLSRAASAAFALRGGARLLPKGRVGWARAAEVGCGASLSPSMTRFGIAARFNATSSAVSEAAAAASGAVHAVPRTEPVVSAEWLHANLRDPDVKVLDASWYMPAEQRNPLQEYQVAHIPGALFFDVDGISDRASSLPHMLPSEKAFSAAVSSLGIYNKDGIVVYDGKGLFSAARVWWMFRAYGHDKVWVLDGGLPQWRASGYDVESSASSDAILKASAASEAIEKVYQGQSVGPTTFEAKLQPHLLWNLGQVKENIETQTHQLIDARGKPRFDGAVPEPRKGIRSGHVPGSKCVPFPQVLDSTQKLLPADDLRKRFEQEGISLDQPIVTSCGTGVTACVLALGLHRLGKTDVAVYDGSWTEWGAHPDTPVATAV

SEQ ID NO: 66113 - protein, 378 aa, Triticum aestivum
  peptide (1)..(378): Ceres Seq. ID no. 12784230
MAASLLSRAASAAFALRGGARLLPKGRVGWARAAEVGCGASLSPSMTRFGIAARFNATSSAVSEAAAAASGAVHAVPRTEPVVSAEWLHANLRDPDVKVLDASWYMPAEQRNPLQEYQVAHIPGALFFDVDGISDRASSLPHMLPSEKAFSAAVSSLGIYNKDGIVVYDGKGLFSAARVWWMFRAYGHDKVWVLDGGLPQWRASGYDVESSASSDAILKASAASEAIEKVYQGQSVGPTTFEAKLQPHLLWNLGQVKENIETQTHQLIDARGKPRFDGAVPEPRKGIRSGHVPGSKCVPFPQVLDSTQKLLPADDLRKRFEQEGISLDQPIVTSCGTGVTACVLALGLHRLGKTDVAVYDGSWTEWGAHPDTPVATAV

SEQ ID NO: 66114 - protein, 333 aa, Triticum aestivum
  peptide (1)..(333): Ceres Seq. ID no. 12784231
MTRFGIAARFNATSSAVSEAAAAASGAVHAVPRTEPVVSAEWLHANLRDPDVKVLDASWYMPAEQRNPLQEYQVAHIPGALFFDVDGISDRASSLPHMLPSEKAFSAAVSSLGIYNKDGIVVYDGKGLFSAARVWWMFRAYGHDKVWVLDGGLPQWRASGYDVESSASSDAILKASAASEAIEKVYQGQSVGPTTFEAKLQPHLLWNLGQVKENIETQTHQLIDARGKPRFDGAVPEPRKGIRSGHVPGSKCVPFPQVLDSTQKLLPADDLRKRFEQEGISLDQPIVTSCGTGVTACVLALGLHRLGKTDVAVYDGSWTEWGAHPDTPVATAV

SEQ ID NO: 66115 - DNA, 1750 bp, Triticum aestivum
  misc_feature (1)..(1750): Ceres Seq. ID no. 13657460
gcaaccaaaatcaccatgaaatcttactaattaagcagacaatattattgcaccagtgcagatcatgttcatatatataagctctatatagaaggcagtgagcaagcaaaccctaggtcaccgtcgtcgactgttcgtagtcgccggtatgcatgcatgcacagagtagaaggcgcgcgcgccaatggcacctactgccacgccgacacggacagcagcggccgcgtctgccacccgaggaagcacgcgccgcgggactcctgcaccaggtatccctccgacgggtagtgcagccgcagcagtagccgcgcctgggaaacggcgaacgcgctgagcggccgcgcggcgaacccagtgccgcgtgcggcggtagcccaccgctcgagcccgcgccaccacctcccgcctgtcccgcccaccgcggcctcgatctccctgccgaggacctcctgctccaccgccagcctctcccggctccccggcggcaccgtcgcctcaagcgcctcgaacaccgccgaatagtgatccatggccacaccaacacggcgcgggagctcgtcgatggggtcgatctctcctccgctcgcctccctctcggcgacggtcaccacggcgggggccatggccttcacccacttgaggaacgctgcgagctcgtcctgcccgccgagcttgtgcaagaacagcacgcagttcacggccagcgtctcgtcgggatgtagctccaggctcgtgacagcggtgctcggggtggtgctcgtgccggcgacgtggtgcgtgctggcggcgcaggagaggaggagcggggtgaagtggaaagggaggtggatcgagcgggcgaaagcgcgtagccggttgcctgtacgaaggagtgtgtcgcggtcggcgccagcgccggtgatgcggacctcgggcgggcccagcgccgggtcggctcgttcggcgatcgcctggaggagtggcggccactgcacgccgtgcgccgcgtcgaggtcgaggatgtggacgcggcgcgaaccctccacggcctcgaggatggcctggttggccgtcaggtgggcgaaccgcaggaacggcgcgatctggttgaacgccaggtacgccccggacggtgccggcgctgtcccagctggcggccgcggggagaacggcagcccggccttggagtccacgcggagcacgagcgcgcgcgcgaagtggtacgcgaggcggtcggtggcgtcgccgcgcggggacgccgcggagaggaggatctcggcagcgcggcgcgcggcggcgaggtccccgcgctgcagcaggtcggcgcaggccagcacgaggtcccgcgtggacggtgccgccgcgagcgcacgcccgccgccgcccagcaaggcagcgtcgcccccgccctcgccgctgctgttcctgaggtcggcgttgctgttgttgtcggtgtcggaggacgaggaagagtggagtgagctgatcatgtcttcttcttcgctcgcggcgccctgggactaggatcgtcgtgagcggccggaggtggaggagaagacggagacggagacggagcatgagggcgcgcatctctgggggggtttaatagggacgatgagggcgcacgtccagcagcatctgggctcgcagcttccttgacaggacatcatctgccaaaaatacacaagtatgctgctgctgctagctagcttgtgtgagtgagtgagaggggagaacccagcagcaccatcttttcgattaggatgttcta

SEQ ID NO: 66116 - protein, 324 aa, Triticum aestivum
  peptide (1)..(324): Ceres Seq. ID no. 13657461
MATPTRRGSSSMGSISPPLASLSATVTTAGAMAFTHLRNAASSSCPPSLCKNSTQFTASVSSGCSSRLVTAVLGVVLVPATWCVLAAQERRSGVKWKGRWIERAKARSRLPVRRSVSRSAPAPVMRTSGGPSAGSARSAIAWRSGGHCTPCAASRSRMWTRREPSTASRMAWLAVRWANRRNGAIWLNARYAPDGAGAVPAGGRGENGSPALESTRSTSARAKWYARRSVASPRGDAAERRISAARRAAARSPRCSRSAQASTRSRVDGAAASARPPPPSKAASPPPSPLLFLRSALLLLSVSEDEEEWSELIMSSSSLAAPWD

SEQ ID NO: 66117 - protein, 313 aa, Triticum aestivum
  peptide (1)..(313): Ceres Seq. ID no. 13657462
MGSISPPLASLSATVTTAGAMAFTHLRNAASSSCPPSLCKNSTQFTASVSSGCSSRLVTAVLGVVLVPATWCVLAAQERRSGVKWKGRWIERAKARSRLPVRRSVSRSAPAPVMRTSGGPSAGSARSAIAWRSGGHCTPCAASRSRMWTRREPSTASRMAWLAVRWANRRNGAIWLNARYAPDGAGAVPAGGRGENGSPALESTRSTSARAKWYARRSVASPRGDAAERRISAARRAAARSPRCSRSAQASTRSRVDGAAASARPPPPSKAASPPPSPLLFLRSALLLLSVSEDEEEWSELIMSSSSLAAPWD

SEQ ID NO: 66118 - protein, 293 aa, Triticum aestivum
  peptide (1)..(293): Ceres Seq. ID no. 13657463
MAFTHLRNAASSSCPPSLCKNSTQFTASVSSGCSSRLVTAVLGVVLVPATWCVLAAQERRSGVKWKGRWIERAKARSRLPVRRSVSRSAPAPVMRTSGGPSAGSARSAIAWRSGGHCTPCAASRSRMWTRREPSTASRMAWLAVRWANRRNGAIWLNARYAPDGAGAVPAGGRGENGSPALESTRSTSARAKWYARRSVASPRGDAAERRISAARRAAARSPRCSRSAQASTRSRVDGAAASARPPPPSKAASPPPSPLLFLRSALLLLSVSEDEEEWSELIMSSSSLAAPWD

SEQ ID NO: 66119 - DNA, 1854 bp, Triticum aestivum
  misc_feature (1)..(1854): Ceres Seq. ID no. 13657677
cgcctccaccgccccactcacaaccttatcgtcgccgcggcctgagcacagatggcgccgccggcagcagcgccgcctcccgccatgtccgccctccccaccttcgcctcctcccacccatacccttccctcaccacgcccaaaaccgccgccctcaaaccgcgcctcaacctggcctatgccggcgccgccgcggcccccaatgccgtcccccaccgcagcgccgccgcctccaacgaccgcctgcggggtctggtccgccgcggcgacctcgaggaggccctccggctcgtcgagtccatggcgggcatcgagccgtccgcggccgccgcggggccctgcgccgcgctcatcaagaagctgtgcgcgtccgggcgcaccgcggaggcccggcgcgtgctggccgcctgcgagcccgacgtcatggcctacaacgcgatggtcgccgggtactgcgtcacggggcagctcgacaacgcccgccggctcgtcgcggcgatgcccatggagcccgacgcctacacctacaacaccctcatccgcggcctgtgcgggcgcggcaggaccgacaacgccctggcgggtgctcgacgatatgctccgccgggggtgcgtgcccgacgtggtcacctacaccatcctgctcgaggccacctgcaagaggagcgggtacaagcaggccatgaagctgctcgacgagatgcgcgacaaggggtgcgccccggacatcatcacctacaacgtcgtggtcaacggcatttgccaagaggggcgagtcgatgatgccatggagttcttgaagagcctgctgtcctatggatgcgagccaaacacggtcagctacaacattgtgctgaagggcctgtgcaccgcagagcggtgggaggacgccgagaagctcatggctgagatgagtcgcaaggggtgccccccaaatgtggtgacattcaatatgctcatcagcttcttgtgccggagaggattggtcgagcctgcgatggagattcttgagcagatcccaaagtacgggtgcacgcccaattcgttgagttacaacccaatacttcacgcattctgcaagcaaaagaagatggacagagccatggcgtttgtggaactgatggtgtccagtggctgttaccccgacatcgtctcatacaacactcttcttaccgcgctgtgtcgcggcggggaagttgatgccgctgttgagctgcttcatcaactgaaggacaaaggctgcacccctgtcttgattagctacaacaccgtcatcgatggccttaccaaagccggcaagacagaggaagctttagaactgctgaatgagatggttaccaaagggctccaaccggacataatcacttactcgacaatatcttctggtctttgtcgggaagacagaatcgaagaagcgatcaaagcattttgtaaagtgcaagacatgggcataaggcccaacactgtgctgtacaacgcgatacttcttgggctctgcaaaaggcgtgaaacacacagtgctatcgatctgtttacttacatgatatcgaatggctgcatgccaaatgaatcgacctacactatattgattgaaggcttggcttacgaaggcttggtcaaggaggcacgggaaatgctggctgagttgtgctccagaggagtggtgagtaagactttggtaaataagggagccatccggttacttgatgcttgaaggaactatgcatacttaaaaaggttgagcagaccagtaggagtgtgtggatccaggaatatgttcttctgcatcttcggcagtacgtagagatacttcattgttcttaatgatgtcttattcgatgctgccttcttatg

SEQ ID NO: 66120 - protein, 570 aa, Triticum aestivum
  peptide (1)..(570): Ceres Seq. ID no. 15219871
ASTAPLTTLSSPRPEHRWRRRQQRRLPPCPPSPPSPPPTHTLPSPRPKPPPSNRASTWPMPAPPRPPMPSPTAAPPPPTTACGVWSAAATSRRPSGSSSPWRASSRPRPPRGPAPRSSRSCARPGAPRRPGACWPPASPTSWPTTRWSPGTASRGSSTTPAGSSRRCPWSPTPTPTTPSSAACAGAAGPTTPWRVLDDMLRRGCVPDVVTYTILLEATCKRSGYKQAMKLLDEMRDKGCAPDIITYNVVVNGICQEGRVDDAMEFLKSLLSYGCEPNTVSYNIVLKGLCTAERWEDAEKLMAEMSRKGCPPNVVTFNMLISFLCRRGLVEPAMEILEQIPKYGCTPNSLSYNPILHAFCKQKKMDRAMAFVELMVSSGCYPDIVSYNTLLTALCRGGEVDAAVELLHQLKDKGCTPVLISYNTVIDGLTKAGKTEEALELLNEMVTKGLQPDIITYSTISSGLCREDRIEEAIKAFCKVQDMGIRPNTVLYNAILLGLCKRRETHSAIDLFTYMISNGCMPNESTYTILIEGLAYEGLVKEAREMLAELCSRGVVSKTLVNKGAIRLLDA

SEQ ID NO: 66121 - protein, 511 aa, Triticum aestivum
  peptide (1)..(511): Ceres Seq. ID no. 15219872
MPAPPRPPMPSPTAAPPPPTTACGVWSAAATSRRPSGSSSPWRASSRPRPPRGPAPRSSRSCARPGAPRRPGACWPPASPTSWPTTRWSPGTASRGSSTTPAGSSRRCPWSPTPTPTTPSSAACAGAAGPTTPWRVLDDMLRRGCVPDVVTYTILLEATCKRSGYKQAMKLLDEMRDKGCAPDIITYNVVVNGICQEGRVDDAMEFLKSLLSYGCEPNTVSYNIVLKGLCTAERWEDAEKLMAEMSRKGCPPNVVTFNMLISFLCRRGLVEPAMEILEQIPKYGCTPNSLSYNPILHAFCKQKKMDRAMAFVELMVSSGCYPDIVSYNTLLTALCRGGEVDAAVELLHQLKDKGCTPVLISYNTVIDGLTKAGKTEEALELLNEMVTKGLQPDIITYSTISSGLCREDRIEEAIKAFCKVQDMGIRPNTVLYNAILLGLCKRRETHSAIDLFTYMISNGCMPNESTYTILIEGLAYEGLVKEAREMLAELCSRGVVSKTLVNKGAIRLLDA

SEQ ID NO: 66122 - protein, 503 aa, Triticum aestivum
  peptide (1)..(503): Ceres Seq. ID no. 15219873
MPSPTAAPPPPTTACGVWSAAATSRRPSGSSSPWRASSRPRPPRGPAPRSSRSCARPGAPRRPGACWPPASPTSWPTTRWSPGTASRGSSTTPAGSSRRCPWSPTPTPTTPSSAACAGAAGPTTPWRVLDDMLRRGCVPDVVTYTILLEATCKRSGYKQAMKLLDEMRDKGCAPDIITYNVVVNGICQEGRVDDAMEFLKSLLSYGCEPNTVSYNIVLKGLCTAERWEDAEKLMAEMSRKGCPPNVVTFNMLISFLCRRGLVEPAMEILEQIPKYGCTPNSLSYNPILHAFCKQKKMDRAMAFVELMVSSGCYPDIVSYNTLLTALCRGGEVDAAVELLHQLKDKGCTPVLISYNTVIDGLTKAGKTEEALELLNEMVTKGLQPDIITYSTISSGLCREDRIEEAIKAFCKVQDMGIRPNTVLYNAILLGLCKRRETHSAIDLFTYMISNGCMPNESTYTILIEGLAYEGLVKEAREMLAELCSRGVVSKTLVNKGAIRLLDA

SEQ ID NO: 66123 - DNA, 1047 bp, Triticum aestivum
  misc_feature (1)..(1047): Ceres Seq. ID no. 12619999
gccgaagcgaaccgcccccagatcagttcgaccacgtagccacgtctccttccttccgaagtaaacagaggaggaaatcccccctctctccctcgtcgctgctcccctccaaatcccctgaaccccgcctctccccggagtagctgctgcggccgcggcggaggagagatgtcgtacgcctacctcttcaagtacatcatcatcggcgacacaggtgtcggcaagtcgtgcctgctgctgcagttcaccgacaagcgcttccagcccgtccacgacctcaccatcggcgtcgagttcggcgcccggatgatcaccatcngacaacaagcccatcaagctccagatttgggacacggcaggccaggagtcattcagatcgataactagatcatactacaggggagctgctggtgctcttttggtttatgacatcaccaggagggaaacctttaatcatcttgcaagctggctggaagatgcaaggcaacatgcaaatgccaacatgacaataatgctagttggaaacaaatgtgacctatcccataggcgtgccgtgagcttcgaggaaggcgagcagtttgccaaggagaatggtctcatctttatggaggcatctgcaaaaactgcacaaaatgtcgaggagggctttgtcaagactgctggagcaatatacaagaaaattcaggatggtgtctttgatgtatctaatgagtcgtatggaatcaaagttggctatgcagttcctggccaagctggaggtgctggtgcttcgtcttcccaaggtggcagctgctgcggctaatggaacgatccatggtgtacaaaatcgcatggcatgtgttacaatacctgttacattatttcgagttgcgagtgattgtaactccagggtgctttgttatttcacgcgcctatggattatgttccagtgagccagtcaaaataggttcagttcatttccttatactgtatacaatcactgtaatccatcagatgcttccagccgtgtcatttaggattcacgaattatatccatttgcatgtgtg

SEQ ID NO: 66124 - protein, 113 aa, Triticum aestivum
  peptide (1)..(113): Ceres Seq. ID no. 12620000
MVSSLWRHLQKLHKMSRRALSRLLEQYTRKFRMVSLMYLMSRMESKLAMQFLAKLEVLVLRLPKVAAAAANGTIHGVQNRMACVTIPVTLFRVASDCNSRVLCYFTRLWIMFQ

SEQ ID NO: 66125 - protein, 99 aa, Triticum aestivum
  peptide (1)..(99): Ceres Seq. ID no. 12620001
MSRRALSRLLEQYTRKFRMVSLMYLMSRMESKLAMQFLAKLEVLVLRLPKVAAAAANGTIHGVQNRMACVTIPVTLFRVASDCNSRVLCYFTRLWIMFQ

SEQ ID NO: 66126 - protein, 99 aa, Triticum aestivum
  peptide (1)..(99): Ceres Seq. ID no. 12620002
MTIMLVGNKCDLSHRRAVSFEEGEQFAKENGLIFMEASAKTAQNVEEGFVKTAGAIYKKIQDGVFDVSNESYGIKVGYAVPGQAGGAGASSSQGGSCCG

SEQ ID NO: 66127 - DNA, 2023 bp, Triticum aestivum
  misc_feature (1)..(2023): Ceres Seq. ID no. 14302458
gttagatctctgcttacagtagccgagtccccactgtgtagcgtagtgtgttctcttctcttctcccgtcacgcccaccccccttcttcccccctcactctccctcccacactctcagcagccgccgcccaagctgagagggcggggcacacacagaggcacgcatccggccagcagaccagcacggtgcgagcaatggagtatgagaggattcacaagccccaggcaggcgccctttctcccacaaagctgaggatgaagctcctgggagcccacaaccgcgtgagggtcatcagcagcagctcgtcgcgaacatcgccttcaaagaacgccgagccatcgctagcgcacaacagattattagtatgcgatgttcttgacgaagtttcagacagctccggtgcctccaaatgccctgcagcagtcagcaacaccgaagttatagacaaggatccagcagtagataggtacaaggttcagaacacgcccaagagttcagttcaccaaccggcgccgagcaactcaagcatgatacatccagtgcgaactgtcgaggaggacagtaacgaatgcgacagtggtcttgacaatgccagtaccagcagcttcgagttccatggaggtgagaagacggcggcgaagaacccaacggcggggtacttctcgagacaggcttcctccaagtggaacgacgcggagaaatggattgtgaacaagcagactgttcagcagaacaccaccaccaagggcgcatcgcagaaccagagtgcgcaccaggtgagttccgctgcgcccaggggcggtggcgttgtgcccaaacaccacggaacatttgctcgccccattcagaacatgaagagattcaatccggcttcgtcagcctctcggagcatattagagaggctgtctttcgcttcgcatcagccgaagctggtcaggcatgctgatgtctgtgcagatcaaggttctagcgccatctcggactatcagaagggtcaagctgaaaccgattcaattgcaattaagccctgcaatgatactgaagctatttctacagttcaggcggtgtctgtgagagatgtgggcacagaaatgactccaataccaagtcaagatccgtcaagaacaggaacaccacttgggtctgtgacaccgactcgcagccctaattgttcgataccatcaactcctgtaggtggacgatcgtcggcatcaataggagaagacaacgcagatgatggtccttatttcaacagaaaaggtggcatgaatgaaatgtcagaggatgaaatcaggctcaaggcaaggaaagaaatcgctgccctaggtgtacaactaggaaagatgaacattgcttcatgggctagtaaagaggagctagaattagtctctgcgacaccgagcatcgctgatctggagcggatgaagcaggaatacgctactcgtgctgcagcattcgaggatgctgaaaattctaaacacacggcacgattcaagaaggaagagctgaagatcgaagcatgggagagccgccaaagaacaaaagttgaatccgaaatgaagagactagaggaacgcgcggagaaaatgagaagcgaggccatggcgaggatggccgaaaggctggagctggcacgccgtgtggccgaggagaagcgggcatcagccaacgccaagatgaacaagcaagcagcaagggcagttcagaaggccgatctgattcgccagacaggacggattccagggtcgcgtatcctatgctgcggctgcttctgtgaaccttagcacttgtttaactactagcctgttaaaatatggtcgtgagaggaatctaatttcctcctatagtcagcattccctggttttttagtatgcaaaagggaatgtctggtctaggtgattcaggtgtacacattcttcattgtcatataaataatttgcttagtgtgaggtgtgccaggttcttgttttttttagaaaaaaaaaaaaaaaaaaaaaaaaaaaaaaaaaaaaaaaaaaaaag

SEQ ID NO: 66128 - protein, 594 aa, Triticum aestivum
  peptide (1)..(594): Ceres Seq. ID no. 14302459
VRSLLTVAESPLCSVVCSLLFSRHAHPPSSPLTLPPTLSAAAAQAERAGHTQRHASGQQTSTVRAMEYERIHKPQAGALSPTKLRMKLLGAHNRVRVISSSSSRTSPSKNAEPSLAHNRLLVCDVLDEVSDSSGASKCPAAVSNTEVIDKDPAVDRYKVQNTPKSSVHQPAPSNSSMIHPVRTVEEDSNECDSGLDNASTSSFEFHGGEKTAAKNPTAGYFSRQASSKWNDAEKWIVNKQTVQQNTTTKGASQNQSAHQVSSAAPRGGGVVPKHHGTFARPIQNMKRFNPASSASRSILERLSFASHQPKLVRHADVCADQGSSAISDYQKGQAETDSIAIKPCNDTEAISTVQAVSVRDVGTEMTPIPSQDPSRTGTPLGSVTPTRSPNCSIPSTPVGGRSSASIGEDNADDGPYFNRKGGMNEMSEDEIRLKARKEIAALGVQLGKMNIASWASKEELELVSATPSIADLERMKQEYATRAAAFEDAENSKHTARFKKEELKIEAWESRQRTKVESEMKRLEERAEKMRSEAMARMAERLELARRVAEEKRASANAKMNKQAARAVQKADLIRQTGRIPGSRILCCGCFCEP

SEQ ID NO: 66129 - protein, 529 aa, Triticum aestivum
  peptide (1)..(529): Ceres Seq. ID no. 14302460
MEYERIHKPQAGALSPTKLRMKLLGAHNRVRVISSSSSRTSPSKNAEPSLAHNRLLVCDVLDEVSDSSGASKCPAAVSNTEVIDKDPAVDRYKVQNTPKSSVHQPAPSNSSMIHPVRTVEEDSNECDSGLDNASTSSFEFHGGEKTAAKNPTAGYFSRQASSKWNDAEKWIVNKQTVQQNTTTKGASQNQSAHQVSSAAPRGGGVVPKHHGTFARPIQNMKRFNPASSASRSILERLSFASHQPKLVRHADVCADQGSSAISDYQKGQAETDSIAIKPCNDTEAISTVQAVSVRDVGTEMTPIPSQDPSRTGTPLGSVTPTRSPNCSIPSTPVGGRSSASIGEDNADDGPYFNRKGGMNEMSEDEIRLKARKEIAALGVQLGKMNIASWASKEELELVSATPSIADLERMKQEYATRAAAFEDAENSKHTARFKKEELKIEAWESRQRTKVESEMKRLEERAEKMRSEAMARMAERLELARRVAEEKRASANAKMNKQAARAVQKADLIRQTGRIPGSRILCCGCFCEP

SEQ ID NO: 66130 - protein, 509 aa, Triticum aestivum
  peptide (1)..(509): Ceres Seq. ID no. 14302461
MKLLGAHNRVRVISSSSSRTSPSKNAEPSLAHNRLLVCDVLDEVSDSSGASKCPAAVSNTEVIDKDPAVDRYKVQNTPKSSVHQPAPSNSSMIHPVRTVEEDSNECDSGLDNASTSSFEFHGGEKTAAKNPTAGYFSRQASSKWNDAEKWIVNKQTVQQNTTTKGASQNQSAHQVSSAAPRGGGVVPKHHGTFARPIQNMKRFNPASSASRSILERLSFASHQPKLVRHADVCADQGSSAISDYQKGQAETDSIAIKPCNDTEAISTVQAVSVRDVGTEMTPIPSQDPSRTGTPLGSVTPTRSPNCSIPSTPVGGRSSASIGEDNADDGPYFNRKGGMNEMSEDEIRLKARKEIAALGVQLGKMNIASWASKEELELVSATPSIADLERMKQEYATRAAAFEDAENSKHTARFKKEELKIEAWESRQRTKVESEMKRLEERAEKMRSEAMARMAERLELARRVAEEKRASANAKMNKQAARAVQKADLIRQTGRIPGSRILCCGCFCEP

SEQ ID NO: 66131 - DNA, 3063 bp, Triticum aestivum
  misc_feature (1)..(3063): Ceres Seq. ID no. 15224315
ttcaacatgctaccacttgatggctaagaaacatcaaacctgaagtctctggtgtacgcacaccacaaccgtgccctcaccaaatccactactactgtttgcatctctctctatacatgtcctgcacattcttgcttccttggctaccaaaaaactcgccatcgagctctgcttccattcttcagactatcagcgcagctgtttctggacgcggcgttgctcgctagtttgcttcacgaccgcggctgacgggcatggagaggaacggcaatgccaatgccgggccaccgctggaagagaacaagggcgcggacggcaagagcgggagccggcggagcacgcggttcaaggaggagaacgagtacgtggaggtcacgctcgacgtcggggccgacgacgccgtggccgtccagggcgtcagggccgccggcgagacccccgaggcggcgctgctgccccggagcggcggcctgtcctcgaggctcaaggccgagctgaggcgcatcgcgtcggccaagcgtgggggcggcgacaacgcgccggcgagccagccccggctggaccggagcatgaccggcgccgcgcgcgcgctcaggggcctccacttcctcaaccagagcgtggtcacgcggggcagctggcccgaggtggacaagcggttcgaccgcctcgccgtcgacggcctgctcctccgctcacgcttcggccagtgcattgggatggttggatcggaggaattcgcggcgcagatgtacgacgcgcttgcacggcgaaggggggtcgttgctcaggtgctgaccaaggatgagctgagggagttctgggagcagctatccgacccaggctttgatgccaagctgcagactttctttgacatggttgacaagaacgcagacggtcggatcaccgaagaggagctcaaagaggtcctcactctgacggcctctgcaaacaagctcaccaagatcctggagcgcgtcgacgagtacacggcgttgatcatggaggagctcgaccccgaccagctcggctacatcgagcttgcgacactggagtccctgctgctgctgcccccttcccaggcgccgacgagcctggtggcgcacagctccaacatcagccagctgatcagccagaggctggtgccggcgcgggacgcgaacccgctccggcggggcctcacggcggcgcgctacttcctggaggacaactggaagcgcgtgtgggtgatgtcgctgtggctgtccatcaacgccggcctcttcgcctggaagttctacgcgtaccgccgccacccgacgttcgacgtgatgggctactgcgtgtgcgtggccaagggcggcgccgagaccaccaagttcaacatggccctcatcctcctccccgtctgccgcaacaccctcacctggctccgctcccggaccagcctcggcgccgccgtgcccttcaacgacaacatcaacttccacaaggtggtggccgggggcgtggccgtcggcgtggcgctgcacggggtgacccacctgacttgcgacttcccgcgcctgctccacgccagcgacgaggcctacgagccgatgaagcgctactttgggcagacgagggtcccggactactggtggttcgtgaggggcgtggagggcgtcaccggcgtcctcatggtggtgctcatggccgtcgcctacacgctggcgcacccgcggttccgccggagcaagctcggcgccgggaacccgctcaagaggctcagcggcttcaacatgttctggtactcccaccacctcttcgtcgtcgtctacgtcgccttggtcgtccacggcgtctgcctctacatcaaccggacatggtacaagcagacgacatggatgtaccttgccgtccccgtgctgctgtacgccggcgagcggcttcttcgggcgctgaggtcgcacggactcaccacggtgaggatcgagaaggtggcggtgtatcctgggaatgtgatagccatccacatgagtaagccccacggcttcaggtacaggagcggccagtacatctacgtcaactgcggcgaggtctcgccgttcgagtggcacccattcaccatcacctcggctcccggcgacgactacctcagcatgcacatccggtgccggggcgactggacgagcagattcagagccatcttctcccagatatgcaggccaccgttggcagggcagagcggtctcctgagagccgacttcacgtccatggtggagcacaacgccaacgccaagttcccgcggctgctgatcgacgggccctacggcgcgccggcgcaggactaccgcaagtacgacgtgctcctcctcatcggcctcggcatcggcgccacgccgctcatcagcatcgtcaaggacgtgctcaacaacgtccaccggcagggtcaggagcaggagggcgacgaggggttcatgacgaagcgggtctacttctactggtgcacgcgggaggagggctccttcgagtggttccgcggcgtgatgaacgaggtggcggagcgcgacgccgccggcgaggagtccgtggtggagctgcacaaccactgcaccagcgtgtacgaggaaggcgacgcgcggtcggccatggtggtgatgctgcaggcgctccaccacgccaagagcggcgtggacgtggtgtccgggacccgcgtgcgcacgcacttcgccaggccctgctggcgcgacgtcttcaagcgcgtcgcctgcgaccaccaggggcagcgcgtcggggtcttctactgcggcgaccagaagctcacgccggagctcaggcggctgtcccaggacttctcgcaccggaccaccaccaagttcgtcttccacaaggagaacttctgacctgaatttcgacatgcatgttaattaggctatatatatacatgaacgtagaacatatacactttattcgcttgctgtttgctagtagtatcagacacgtacggtcttgcattgggtatgcacatttcttcctttcttctttgcgtatcttattaactaatacaagtaggagagcatctctcaaatcattaatttccac

SEQ ID NO: 66132 - protein, 869 aa, Triticum aestivum
  peptide (1)..(869): Ceres Seq. ID no. 15224316
MERNGNANAGPPLEENKGADGKSGSRRSTRFKEENEYVEVTLDVGADDAVAVQGVRAAGETPEAALLPRSGGLSSRLKAELRRIASAKRGGGDNAPASQPRLDRSMTGAARALRGLHFLNQSVVTRGSWPEVDKRFDRLAVDGLLLRSRFGQCIGMVGSEEFAAQMYDALARRRGVVAQVLTKDELREFWEQLSDPGFDAKLQTFFDMVDKNADGRITEEELKEVLTLTASANKLTKILERVDEYTALIMEELDPDQLGYIELATLESLLLLPPSQAPTSLVAHSSNISQLISQRLVPARDANPLRRGLTAARYFLEDNWKRVWVMSLWLSINAGLFAWKFYAYRRHPTFDVMGYCVCVAKGGAETTKFNMALILLPVCRNTLTWLRSRTSLGAAVPFNDNINFHKVVAGGVAVGVALHGVTHLTCDFPRLLHASDEAYEPMKRYFGQTRVPDYWWFVRGVEGVTGVLMVVLMAVAYTLAHPRFRRSKLGAGNPLKRLSGFNMFWYSHHLFVVVYVALVVHGVCLYINRTWYKQTTWMYLAVPVLLYAGERLLRALRSHGLTTVRIEKVAVYPGNVIAIHMSKPHGFRYRSGQYIYVNCGEVSPFEWHPFTITSAPGDDYLSMHIRCRGDWTSRFRAIFSQICRPPLAGQSGLLRADFTSMVEHNANAKFPRLLIDGPYGAPAQDYRKYDVLLLIGLGIGATPLISIVKDVLNNVHRQGQEQEGDEGFMTKRVYFYWCTREEGSFEWFRGVMNEVAERDAAGEESVVELHNHCTSVYEEGDARSAMVVMLQALHHAKSGVDVVSGTRVRTHFARPCWRDVFKRVACDHQGQRVGVFYCGDQKLTPELRRLSQDFSHRTTTKFVFHKENF

SEQ ID NO: 66133 - protein, 764 aa, Triticum aestivum
  peptide (1)..(764): Ceres Seq. ID no. 15224317
MTGAARALRGLHFLNQSVVTRGSWPEVDKRFDRLAVDGLLLRSRFGQCIGMVGSEEFAAQMYDALARRRGVVAQVLTKDELREFWEQLSDPGFDAKLQTFFDMVDKNADGRITEEELKEVLTLTASANKLTKILERVDEYTALIMEELDPDQLGYIELATLESLLLLPPSQAPTSLVAHSSNISQLISQRLVPARDANPLRRGLTAARYFLEDNWKRVWVMSLWLSINAGLFAWKFYAYRRHPTFDVMGYCVCVAKGGAETTKFNMALILLPVCRNTLTWLRSRTSLGAAVPFNDNINFHKVVAGGVAVGVALHGVTHLTCDFPRLLHASDEAYEPMKRYFGQTRVPDYWWFVRGVEGVTGVLMVVLMAVAYTLAHPRFRRSKLGAGNPLKRLSGFNMFWYSHHLFVVVYVALVVHGVCLYINRTWYKQTTWMYLAVPVLLYAGERLLRALRSHGLTTVRIEKVAVYPGNVIAIHMSKPHGFRYRSGQYIYVNCGEVSPFEWHPFTITSAPGDDYLSMHIRCRGDWTSRFRAIFSQICRPPLAGQSGLLRADFTSMVEHNANAKFPRLLIDGPYGAPAQDYRKYDVLLLIGLGIGATPLISIVKDVLNNVHRQGQEQEGDEGFMTKRVYFYWCTREEGSFEWFRGVMNEVAERDAAGEESVVELHNHCTSVYEEGDARSAMVVMLQALHHAKSGVDVVSGTRVRTHFARPCWRDVFKRVACDHQGQRVGVFYCGDQKLTPELRRLSQDFSHRTTTKFVFHKENF

SEQ ID NO: 66134 - protein, 714 aa, Triticum aestivum
  peptide (1)..(714): Ceres Seq. ID no. 15224318
MVGSEEFAAQMYDALARRRGVVAQVLTKDELREFWEQLSDPGFDAKLQTFFDMVDKNADGRITEEELKEVLTLTASANKLTKILERVDEYTALIMEELDPDQLGYIELATLESLLLLPPSQAPTSLVAHSSNISQLISQRLVPARDANPLRRGLTAARYFLEDNWKRVWVMSLWLSINAGLFAWKFYAYRRHPTFDVMGYCVCVAKGGAETTKFNMALILLPVCRNTLTWLRSRTSLGAAVPFNDNINFHKVVAGGVAVGVALHGVTHLTCDFPRLLHASDEAYEPMKRYFGQTRVPDYWWFVRGVEGVTGVLMVVLMAVAYTLAHPRFRRSKLGAGNPLKRLSGFNMFWYSHHLFVVVYVALVVHGVCLYINRTWYKQTTWMYLAVPVLLYAGERLLRALRSHGLTTVRIEKVAVYPGNVIAIHMSKPHGFRYRSGQYIYVNCGEVSPFEWHPFTITSAPGDDYLSMHIRCRGDWTSRFRAIFSQICRPPLAGQSGLLRADFTSMVEHNANAKFPRLLIDGPYGAPAQDYRKYDVLLLIGLGIGATPLISIVKDVLNNVHRQGQEQEGDEGFMTKRVYFYWCTREEGSFEWFRGVMNEVAERDAAGEESVVELHNHCTSVYEEGDARSAMVVMLQALHHAKSGVDVVSGTRVRTHFARPCWRDVFKRVACDHQGQRVGVFYCGDQKLTPELRRLSQDFSHRTTTKFVFHKENF

SEQ ID NO: 66135 - DNA, 1784 bp, Triticum aestivum
  misc_feature (1)..(1784): Ceres Seq. ID no. 15169466
aagtctttcctactactaccattccaacccccacccccttaccctgtcccgtccgcctcggctgccgtagctctgctcacctccccccaaaccgccgacgcgtcctccctctccctcacagccatggcgaagctcaagcacctgcccgtgtgctctctgctgctggccgtcttgctcctcgcgctctcctccttctcctgcagcgctggcaccaactcgacggcctcggccggaccactgtatggcatcgagttcccgccgtacaacacggccgtcgccgacgccggctgcgacggcaggctcgtggccgaggaggaggagctcgcgcgccgggcaccctccctcaagctccacatgacacaccgctccgccgcggagggcgcgacggggaaaggctccttcgtcctcgactcggccaagaaagacgccgcccgcatcggcaccatgcacggcattagggccgcgctgtccaggaagggctcgcggccgcgccgggcgctgtcggagcgggtggtggccacggtggggtcaggcgtggcggtgggctccggggagtacctggtggacgtgtacgttggcacgccgccgcgccggttccgcatgatcatggacaccggcagcgacctcaactggctgcagtgcgcgccctgcctcgactgcttccaccagaccggccccgtcttcgaccccgccgcctccgcctcctaccgcaacgtcacctgcggcgacgcgcgctgcggcctcgtctccccgccgccagagtctccggcggcgccgcccgggaggacgtgccgcaggccgcggagcgacccctgcccgtattactactggtacggcgaccagtccaacaccacgggggacctggcgctggaggccttcaccgtgaacctcacgggcgccgccgggtcgacccggcgcgtggacggcgtggcgttcgggtgcggccaccggaaccgcggcctcttccacggcgccgcggggctgctggggctcggccgcggcccgctctcgttcgcgtcgcagctgcgcggcgtctacggcgggcacgccttctcctactgcctcgtggagcacggcagcgccgccgggagcaagatcgtcttcggccacgacgacgcgctgctcgcgcacccgcggctcaactacacggccttcgccccggccgcggccgacgcggcggacaccttctactacgtgcagctcaggtccgtcctcgtgggcggggaggcggttgacatcccgtcgggcacgctggccgccggcggcaccatcatcgactccggcacgacgctgagctacttcccggagccggcgtaccgggcgatccggcaggcgttcatcgaccgcatgagcccgtcctacccgctcatcgccgggttcccggtgctgagcccgtgctacaacgtgtcgggggcggagagggtggaggtgccggagctgtcgctggtgttcgcggacggcgcggcgtgggagttcccggcggagaactacttcatccggctggagccggagggggtgatgtgcctggccgtcctgggcacgccgcgctccggcatgtccatcatcggcaactaccagcagcagaatttccacgtcttgtacgacctggagcacaaccggctcggcttcgcgccgcgccggtgcgccgacgtctaattagtccggcctccgtgcgtccattttgacttgctgattgggttgattgtttgaccggtaggagtatgtaggcggctctgctgactggatgggaagaagaaagaaggaagcaacggggttgggtgtag

SEQ ID NO: 66136 - protein, 551 aa, Triticum aestivum
  peptide (1)..(551): Ceres Seq. ID no. 15169467
KSFLLLPFQPPPPYPVPSASAAVALLTSPQTADASSLSLTAMAKLKHLPVCSLLLAVLLLALSSFSCSAGTNSTASAGPLYGIEFPPYNTAVADAGCDGRLVAEEEELARRAPSLKLHMTHRSAAEGATGKGSFVLDSAKKDAARIGTMHGIRAALSRKGSRPRRALSERVVATVGSGVAVGSGEYLVDVYVGTPPRRFRMIMDTGSDLNWLQCAPCLDCFHQTGPVFDPAASASYRNVTCGDARCGLVSPPPESPAAPPGRTCRRPRSDPCPYYYWYGDQSNTTGDLALEAFTVNLTGAAGSTRRVDGVAFGCGHRNRGLFHGAAGLLGLGRGPLSFASQLRGVYGGHAFSYCLVEHGSAAGSKIVFGHDDALLAHPRLNYTAFAPAAADAADTFYYVQLRSVLVGGEAVDIPSGTLAAGGTIIDSGTTLSYFPEPAYRAIRQAFIDRMSPSYPLIAGFPVLSPCYNVSGAERVEVPELSLVFADGAAWEFPAENYFIRLEPEGVMCLAVLGTPRSGMSIIGNYQQQNFHVLYDLEHNRLGFAPRRCADV

SEQ ID NO: 66137 - protein, 510 aa, Triticum aestivum
  peptide (1)..(510): Ceres Seq. ID no. 15169468
MAKLKHLPVCSLLLAVLLLALSSFSCSAGTNSTASAGPLYGIEFPPYNTAVADAGCDGRLVAEEEELARRAPSLKLHMTHRSAAEGATGKGSFVLDSAKKDAARIGTMHGIRAALSRKGSRPRRALSERVVATVGSGVAVGSGEYLVDVYVGTPPRRFRMIMDTGSDLNWLQCAPCLDCFHQTGPVFDPAASASYRNVTCGDARCGLVSPPPESPAAPPGRTCRRPRSDPCPYYYWYGDQSNTTGDLALEAFTVNLTGAAGSTRRVDGVAFGCGHRNRGLFHGAAGLLGLGRGPLSFASQLRGVYGGHAFSYCLVEHGSAAGSKIVFGHDDALLAHPRLNYTAFAPAAADAADTFYYVQLRSVLVGGEAVDIPSGTLAAGGTIIDSGTTLSYFPEPAYRAIRQAFIDRMSPSYPLIAGFPVLSPCYNVSGAERVEVPELSLVFADGAAWEFPAENYFIRLEPEGVMCLAVLGTPRSGMSIIGNYQQQNFHVLYDLEHNRLGFAPRRCADV

SEQ ID NO: 66138 - protein, 433 aa, Triticum aestivum
  peptide (1)..(433): Ceres Seq. ID no. 15169469
MTHRSAAEGATGKGSFVLDSAKKDAARIGTMHGIRAALSRKGSRPRRALSERVVATVGSGVAVGSGEYLVDVYVGTPPRRFRMIMDTGSDLNWLQCAPCLDCFHQTGPVFDPAASASYRNVTCGDARCGLVSPPPESPAAPPGRTCRRPRSDPCPYYYWYGDQSNTTGDLALEAFTVNLTGAAGSTRRVDGVAFGCGHRNRGLFHGAAGLLGLGRGPLSFASQLRGVYGGHAFSYCLVEHGSAAGSKIVFGHDDALLAHPRLNYTAFAPAAADAADTFYYVQLRSVLVGGEAVDIPSGTLAAGGTIIDSGTTLSYFPEPAYRAIRQAFIDRMSPSYPLIAGFPVLSPCYNVSGAERVEVPELSLVFADGAAWEFPAENYFIRLEPEGVMCLAVLGTPRSGMSIIGNYQQQNFHVLYDLEHNRLGFAPRRCADV

SEQ ID NO: 66139 - DNA, 2111 bp, Triticum aestivum
  misc_feature (1)..(2111): Ceres Seq. ID no. 15169474
accaccgcattcccattccgcggcacacgacacgaaccctggccgcggcacggagcgcgccaaatggacccccgccgcttcctctgctgcctcttgctcgccctcgccctcgccttccgccgctgcggcgcgcagggcgccgccaacggcaccgggcgcttcgcgtgcctcgtgccggccccgtgcgacacgttcgtcctgtaccgcacgcaggccccggggtccctcgacctcggcgccatctcggacctcttcggcgtgagccgggccatgatcgccagcgccaacggcctcagcctcgacgccgagggcgcggcgctgctgcccgaccagccgctgctcgtgcccgtccgctgcggctgcaccggcaaccgctccttcgtcaacgtcacctaccccatccgctccggcgacaccttctacgcgctcgcgctcaccggcttcgagaacctcaccacccccgacgtcatccaggagctcaacccgcaggcggtcttcaacaagctcaatgtctcgcagctggtcaccgtgccgctcttctgccggtgccccacgccggcggagcggagcggcggggcgcagctgctcgtcacctacatgtggcgacctgtcgacaccatgtccgaggtgagcaagctgatgaactctagcgcgagcgcgatcgctgcggtgaacaacgtcagcgccgacttcacctccacgacgatgctgccgatgctgatcccggtggcgcggccgccggtgcttcctccgctgcaatatggcgcgagcgcgagcaccggcgatcccggagttagcaagcgcttctcgggtgccaccgtcgcggcgagcatcgccgggtctctcatcgcggtcgccgccttgtgcgcggcgatcttcgcgtaccggaggtaccgcgagaagaaggccacggtgcactcggcgtccaggttcgcgagcccgaggttttgtttcaaccagaacgcctacgggattcagagcagcagttccatcgcgcgcatgatcaacggaggggacaagctgctcaccagcgtgtcgcagttcatcgacaagcctgtcatcttcggcacagcggagatcatggaagcgacgatgaacttggacgaacggtgcaggatcggcagctcctactaccgggccaagctagaaggcgaggtgttcgcggtgaagccggcgaaaggcgacgtgtcggcggagctgaggatgatgcagatggtcaaccacgccaacctcatcaggctggccggcatatccatcggcgccgatggggactacaccttcctcgtgtacgagttcgccgagaagggctcgctcgacaagtggctgtaccagaagcctccgtcctcgctgccgtcgtcgagctcatcagcggacacgctctcgtggaaccagaggctgggcatcgcgttcgacgtcgccaacggcctactatacatgcacgagcacactcagccgagcatggtgcacggtgacgtccgcgcacggaacatcctcctcaccgcggacttcagggccaggatatccaacttctccgtggccacgccggcgatggccgacgccgcggcgacgagcagcgacgtgttcgccttcggcctacttgtcctcgagcttctctccggcaggacggccatggagacgcgcgtcggcgcggagatcggcatgctatggagggacatccgggcggtgctggaggccggggacaagagggacgccaagctgaggaagtggatggaccccgcccttggggacgagtactacttggatgcggcactcagcctggccggcatggcgagggcttgcacggaggaggacgcggcgcggcggccgaagatggccgacgtggtgttcagcctctcgatgctggtgcagccgttgccggtgggcgacgcgttcgagaagctatggcagcccagctcggaggagaacattaggattgtcaatgaagtggcagccagatgatatcggagcataactgaatttagcgactgatctagaaagttcttagtttgggtgttgcgtgcagtgatttggttcgttttgtgaatgtgtgtcactgtaatttactgcaatgctttgctttactctgaagaccaaagatcaggttttgttgc

SEQ ID NO: 66140 - protein, 652 aa, Triticum aestivum
  peptide (1)..(652): Ceres Seq. ID no. 15169475
TTAFPFRGTRHEPWPRHGARQMDPRRFLCCLLLALALAFRRCGAQGAANGTGRFACLVPAPCDTFVLYRTQAPGSLDLGAISDLFGVSRAMIASANGLSLDAEGAALLPDQPLLVPVRCGCTGNRSFVNVTYPIRSGDTFYALALTGFENLTTPDVIQELNPQAVFNKLNVSQLVTVPLFCRCPTPAERSGGAQLLVTYMWRPVDTMSEVSKLMNSSASAIAAVNNVSADFTSTTMLPMLIPVARPPVLPPLQYGASASTGDPGVSKRFSGATVAASIAGSLIAVAALCAAIFAYRRYREKKATVHSASRFASPRFCFNQNAYGIQSSSSIARMINGGDKLLTSVSQFIDKPVIFGTAEIMEATMNLDERCRIGSSYYRAKLEGEVFAVKPAKGDVSAELRMMQMVNHANLIRLAGISIGADGDYTFLVYEFAEKGSLDKWLYQKPPSSLPSSSSSADTLSWNQRLGIAFDVANGLLYMHEHTQPSMVHGDVRARNILLTADFRARISNFSVATPAMADAAATSSDVFAFGLLVLELLSGRTAMETRVGAEIGMLWRDIRAVLEAGDKRDAKLRKWMDPALGDEYYLDAALSLAGMARACTEEDAARRPKMADVVFSLSMLVQPLPVGDAFEKLWQPSSEENIRIVNEVAAR

SEQ ID NO: 66141 - protein, 631 aa, Triticum aestivum
  peptide (1)..(631): Ceres Seq. ID no. 15169476
MDPRRFLCCLLLALALAFRRCGAQGAANGTGRFACLVPAPCDTFVLYRTQAPGSLDLGAISDLFGVSRAMIASANGLSLDAEGAALLPDQPLLVPVRCGCTGNRSFVNVTYPIRSGDTFYALALTGFENLTTPDVIQELNPQAVFNKLNVSQLVTVPLFCRCPTPAERSGGAQLLVTYMWRPVDTMSEVSKLMNSSASAIAAVNNVSADFTSTTMLPMLIPVARPPVLPPLQYGASASTGDPGVSKRFSGATVAASIAGSLIAVAALCAAIFAYRRYREKKATVHSASRFASPRFCFNQNAYGIQSSSSIARMINGGDKLLTSVSQFIDKPVIFGTAEIMEATMNLDERCRIGSSYYRAKLEGEVFAVKPAKGDVSAELRMMQMVNHANLIRLAGISIGADGDYTFLVYEFAEKGSLDKWLYQKPPSSLPSSSSSADTLSWNQRLGIAFDVANGLLYMHEHTQPSMVHGDVRARNILLTADFRARISNFSVATPAMADAAATSSDVFAFGLLVLELLSGRTAMETRVGAEIGMLWRDIRAVLEAGDKRDAKLRKWMDPALGDEYYLDAALSLAGMARACTEEDAARRPKMADVVFSLSMLVQPLPVGDAFEKLWQPSSEENIRIVNEVAAR

SEQ ID NO: 66142 - protein, 562 aa, Triticum aestivum
  peptide (1)..(562): Ceres Seq. ID no. 15169477
MIASANGLSLDAEGAALLPDQPLLVPVRCGCTGNRSFVNVTYPIRSGDTFYALALTGFENLTTPDVIQELNPQAVFNKLNVSQLVTVPLFCRCPTPAERSGGAQLLVTYMWRPVDTMSEVSKLMNSSASAIAAVNNVSADFTSTTMLPMLIPVARPPVLPPLQYGASASTGDPGVSKRFSGATVAASIAGSLIAVAALCAAIFAYRRYREKKATVHSASRFASPRFCFNQNAYGIQSSSSIARMINGGDKLLTSVSQFIDKPVIFGTAEIMEATMNLDERCRIGSSYYRAKLEGEVFAVKPAKGDVSAELRMMQMVNHANLIRLAGISIGADGDYTFLVYEFAEKGSLDKWLYQKPPSSLPSSSSSADTLSWNQRLGIAFDVANGLLYMHEHTQPSMVHGDVRARNILLTADFRARISNFSVATPAMADAAATSSDVFAFGLLVLELLSGRTAMETRVGAEIGMLWRDIRAVLEAGDKRDAKLRKWMDPALGDEYYLDAALSLAGMARACTEEDAARRPKMADVVFSLSMLVQPLPVGDAFEKLWQPSSEENIRIVNEVAAR

SEQ ID NO: 66143 - DNA, 1367 bp, Triticum aestivum
  misc_feature (1)..(1367): Ceres Seq. ID no. 14302404
ctccttttgccacggcccgcgcgcaccggtcacacatggctgagaccccccgtgccccgccgccactgaggcctccgccgcccgttccgctgccggacacgccgcctcgcccggattcgtcgccttccacgcccggcgaggattaccacacgccgacgccctcgctggacgaggcgcgcgaagaaacgccaccgtggtcgcaagaaaccaacggcaacgagagagcggccagcaaaagcccggccctctcgcccgtgcgcctcccctcgccgcaccgcctgctgccgcccaactcccccaccggcaacggcgatgacggtgccgccgccgggcatgcgccggtgccgggccgccgcccgcagctccgcctcgcgcccggcctcgtccggacgccgtcggaagggtccgtcgccaagtctccctcgccgtcgccctcttcgtcgctgacgtcgccatcgcctctaaccctggctcccacaatcacaaccaacagcaagagcgcccagagcacgccgaagcgcacggaggcatggaagccgccggccacggggatcgcggtgcagttcgaccctgtcgaggaagccgtcacgtcgccgctgcaactgggcaaggcccgaatcgaccgccatcgcgccactacgatggcggcagcagagaacggaggcgcgcccaacacggtgcctcgcgacgtggcggcggtggccgctgtcggggagaggaggccactgtcggtggcgctgcggctggccacggcagtgctcagcctggcgtccttcgcggtgatggccagcgcccggacgtccggctgggacggcgatcacttcgatcgctacgatcagtacaggtacgccctggcgatgaacgtgatcgtctgcgcctactcaatcgcgcaatcgcttggtgagatccgccgtctggtcgcggcgaggtttatttacaggagcatgtcaagctactacgtcagcctgttccttgatcaggtcctggcgtatctcctcatgtcggcgtcctcggctgccgcgtcgcgcaacgatctgtgggtgtcgaggttcagccaggacgccttcaacaggaagatcaccagctccgtgtggctgtccttccttgccttcatagcgctcgccgcaagctcgctcatctccacggctaatctcttcagcatggtctaattatgatagatacggttcatccctttccctctggggatgagtaactgccgacgttcttcatgtaaattttgcattttatattgcgagaaatcatacgatcgacttataccgtacgttgttctcggtcctgacctctgactcgtcagaaatcccttgtaaagaggttcatatagtgctctaattaagcttttcactgtc

SEQ ID NO: 66144 - protein, 388 aa, Triticum aestivum
  peptide (1)..(388): Ceres Seq. ID no. 14302405
PFATARAHRSHMAETPRAPPPLRPPPPVPLPDTPPRPDSSPSTPGEDYHTPTPSLDEAREETPPWSQETNGNERAASKSPALSPVRLPSPHRLLPPNSPTGNGDDGAAAGHAPVPGRRPQLRLAPGLVRTPSEGSVAKSPSPSPSSSLTSPSPLTLAPTITTNSKSAQSTPKRTEAWKPPATGIAVQFDPVEEAVTSPLQLGKARIDRHRATTMAAAENGGAPNTVPRDVAAVAAVGERRPLSVALRLATAVLSLASFAVMASARTSGWDGDHFDRYDQYRYALAMNVIVCAYSIAQSLGEIRRLVAARFIYRSMSSYYVSLFLDQVLAYLLMSASSAAASRNDLWVSRFSQDAFNRKITSSVWLSFLAFIALAASSLISTANLFSMV

SEQ ID NO: 66145 - protein, 377 aa, Triticum aestivum
  peptide (1)..(377): Ceres Seq. ID no. 14302406
MAETPRAPPPLRPPPPVPLPDTPPRPDSSPSTPGEDYHTPTPSLDEAREETPPWSQETNGNERAASKSPALSPVRLPSPHRLLPPNSPTGNGDDGAAAGHAPVPGRRPQLRLAPGLVRTPSEGSVAKSPSPSPSSSLTSPSPLTLAPTITTNSKSAQSTPKRTEAWKPPATGIAVQFDPVEEAVTSPLQLGKARIDRHRATTMAAAENGGAPNTVPRDVAAVAAVGERRPLSVALRLATAVLSLASFAVMASARTSGWDGDHFDRYDQYRYALAMNVIVCAYSIAQSLGEIRRLVAARFIYRSMSSYYVSLFLDQVLAYLLMSASSAAASRNDLWVSRFSQDAFNRKITSSVWLSFLAFIALAASSLISTANLFSMV

SEQ ID NO: 66146 - DNA, 1573 bp, Triticum aestivum
  misc_feature (1)..(1573): Ceres Seq. ID no. 14302887
gttaaccacacgcagcagccggagggaggagcgagcgaggaagccaccagtataaaaccaacgccgcgtccttggcagccagcgatcccgcgactcagccgacggttttctgttcccccctctgacctgtccctccatcctcctcaattctcctccccggcgcccgccgttgacgaggcctcggaggaggaggactcgagcgcgccgctgtctcctgctccgccggctgccctcgcgttgagtttcacagggttgagttaggaggactgcgaccatgaaggccctcattcttgtgggaggattcggcacccgcctgcggccgctgacgctcagcgtgcccaagccgctcgtcgatttcgccaacaagcccatgatcctgcatcagatcgaggctctgaaagatgtgggagttacagaagttgtcctagccatcaattaccagccagaggtcatgctcaactttctcaaggacttcgagagcaagcttggcatcaagatcacctgctcccaggagacagagccaatgggaaccgctggaccgctggccctggcccgcgacaagctcgacgacggatccggcgagcctttcttcgtcctcaacagtgacgtgatcagcgagtacccgttcgcagagctcatcgagttccacaagtcccatggcggcgaggccacgatcatggtcaccaaggtggagcggttcgtggagaagcccaaggtgttcgtgggcaacaagatcaacgccggcatctacctgctgagcccgtccgtgctggaccgcatcgagctgaagccgacgtccatcgagaaggaggtgttcccgcgcatcgccgccgacaagggcctgttcgccatggtgctgccggggttctggatggacatcgggcagccgagggactacatcacggggctgaggctctacctggagtccctgaggaagagggcgccggcgaggctggcggcgggcgcgcacgtgctgggcaacgtgctggtacacgagacggcgacgatcggggaggggtgcctgatcgggccggacgtggccgtcggccccgggtgcgtggtggaggccggggtgcggctgtcgaggtgcaccgtgatgcggggcgcccgcgtgaagaagcacgcgtgcatctccggcagcatcgtggggtggcactcgacggtgggcaagtgggcgcgcgtggagaacatgaccatcctcggcgaggacgtgcacgtctgcgacgaggtgtacagcaacggcggcgtcgtgctcccgcacaaggagatcaagtccagcatcctcaagcccgagatcgtcatgtgatcgggaccatcgcccgcgccacatggtgaaaaagggtcgtatatttcttcatgcgtttgttggtttatttgtctgtctgtctgcaagtgtaaccagaggtgtccaccaaactgccaagtgtctatcaagctctatgtatgtctagacgtgtcgcaagtttttttttctttcttttttgaagacaaaatgcgtctcggttaaatttaagccccgggcttcaatttgtagataggtgtcagatgcatgggaataaagcatcagttttac

SEQ ID NO: 66147 - protein, 343 aa, Triticum aestivum
  peptide (1)..(343): Ceres Seq. ID no. 14302888
MKALILVGGFGTRLRPLTLSVPKPLVDFANKPMILHQIEALKDVGVTEVVLAINYQPEVMLNFLKDFESKLGIKITCSQETEPMGTAGPLALARDKLDDGSGEPFFVLNSDVISEYPFAELIEFHKSHGGEATIMVTKVERFVEKPKVFVGNKINAGIYLLSPSVLDRIELKPTSIEKEVFPRIAADKGLFAMVLPGFWMDIGQPRDYITGLRLYLESLRKRAPARLAAGAHVLGNVLVHETATIGEGCLIGPDVAVGPGCVVEAGVRLSRCTVMRGARVKKHACISGSIVGWHSTVGKWARVENMTILGEDVHVCDEVYSNGGVVLPHKEIKSSILKPEIVM

SEQ ID NO: 66148 - protein, 311 aa, Triticum aestivum
  peptide (1)..(311): Ceres Seq. ID no. 14302889
MILHQIEALKDVGVTEVVLAINYQPEVMLNFLKDFESKLGIKITCSQETEPMGTAGPLALARDKLDDGSGEPFFVLNSDVISEYPFAELIEFHKSHGGEATIMVTKVERFVEKPKVFVGNKINAGIYLLSPSVLDRIELKPTSIEKEVFPRIAADKGLFAMVLPGFWMDIGQPRDYITGLRLYLESLRKRAPARLAAGAHVLGNVLVHETATIGEGCLIGPDVAVGPGCVVEAGVRLSRCTVMRGARVKKHACISGSIVGWHSTVGKWARVENMTILGEDVHVCDEVYSNGGVVLPHKEIKSSILKPEIVM

SEQ ID NO: 66149 - protein, 284 aa, Triticum aestivum
  peptide (1)..(284): Ceres Seq. ID no. 14302890
MLNFLKDFESKLGIKITCSQETEPMGTAGPLALARDKLDDGSGEPFFVLNSDVISEYPFAELIEFHKSHGGEATIMVTKVERFVEKPKVFVGNKINAGIYLLSPSVLDRIELKPTSIEKEVFPRIAADKGLFAMVLPGFWMDIGQPRDYITGLRLYLESLRKRAPARLAAGAHVLGNVLVHETATIGEGCLIGPDVAVGPGCVVEAGVRLSRCTVMRGARVKKHACISGSIVGWHSTVGKWARVENMTILGEDVHVCDEVYSNGGVVLPHKEIKSSILKPEIVM

SEQ ID NO: 66150 - DNA, 1283 bp, Triticum aestivum
  misc_feature (1)..(1283): Ceres Seq. ID no. 13662654
ataatttcgcctaatatcctcccgcgccgcgcgtctgcgcgggcaccacaaaccagaagaagaaatggcagcgggccccacgccatccaccgccgcgtccttccggccgcccctgccgcctccgccgccgtgcttcgactatcggtccgcgtcgctcgccgacacgcgtgccagcgcagccgcggcggacccagcgttggctgggttggtcgagtccggcgcactggtacgcgtcccgcggcggcggttcgggccggtgccggcgtggcggccgccggacttcgctgagcccgaggacgtgtggatcctcgggacctcgcacctctccgcggagtccgccgacgaggtcgagcgcgtgctccgtgccgtccgccccgacaacgtcgtcgtcgaactctgccggagcagagccgggatcatgtacgcttccgacgacgcctccggcgagccgctgttgaaatccaacatgttctcgctcggcggcgccaagttcttcggagccgtcaaccggagcatcaacctgggtggacagagtgctcttgctctgcgtttgctcctagctgttttttcgtccaagatttcttctggcgcgaaccggccgtttggggaggagttccgagcagctaggagggtgtctgaagatattggcgctcagctcgttcttggggatcgccctattgaaataactcttgaacgagctttgaaatccctcagctgggatgaaaagactaaactcgtaatctcattattccgtggaatcacttcaacgactgatatgccgcaggatgagaaagctgcggttagcccgtacgagctgtacgagaagcttagcagctcatatccttcactgctacagcctctcgtacatgagcgcgacatgttcatggcttggtccctaaagaggagcaaggccgtgaacaagagcaagacggtggttggggtcatcgggaaggggcatatgaacggcgtggtgtacgcgctgatctctgaccagggggacctgaggttccgcgacctcgtcggcagggaatcgtcggagacctgggctagctccgtcgtcaagggcctggtcagggatacggtgatagggctcgctctctgggctctgtacgaactgctgcaagctgccgccgtacatataaagctgtagctgaagtccatttttactggcaaagactgacattcgtaaccgtgcacgctctttgcaacgtccatgcagcttgagattgtaaagtcaagtgaagtactccatatgtaacttctataagacgttaagggattcc

SEQ ID NO: 66151 - protein, 361 aa, Triticum aestivum
  peptide (1)..(361): Ceres Seq. ID no. 13662655
MAAGPTPSTAASFRPPLPPPPPCFDYRSASLADTRASAAAADPALAGLVESGALVRVPRRRFGPVPAWRPPDFAEPEDVWILGTSHLSAESADEVERVLRAVRPDNVVVELCRSRAGIMYASDDASGEPLLKSNMFSLGGAKFFGAVNRSINLGGQSALALRLLLAVFSSKISSGANRPFGEEFRAARRVSEDIGAQLVLGDRPIEITLERALKSLSWDEKTKLVISLFRGITSTTDMPQDEKAAVSPYELYEKLSSSYPSLLQPLVHERDMFMAWSLKRSKAVNKSKTVVGVIGKGHMNGVVYALISDQGDLRFRDLVGRESSETWASSVVKGLVRDTVIGLALWALYELLQAAAVHIKL

SEQ ID NO: 66152 - protein, 243 aa, Triticum aestivum
  peptide (1)..(243): Ceres Seq. ID no. 13662656
MYASDDASGEPLLKSNMFSLGGAKFFGAVNRSINLGGQSALALRLLLAVFSSKISSGANRPFGEEFRAARRVSEDIGAQLVLGDRPIEITLERALKSLSWDEKTKLVISLFRGITSTTDMPQDEKAAVSPYELYEKLSSSYPSLLQPLVHERDMFMAWSLKRSKAVNKSKTVVGVIGKGHMNGVVYALISDQGDLRFRDLVGRESSETWASSVVKGLVRDTVIGLALWALYELLQAAAVHIKL

SEQ ID NO: 66153 - protein, 227 aa, Triticum aestivum
  peptide (1)..(227): Ceres Seq. ID no. 13662657
MFSLGGAKFFGAVNRSINLGGQSALALRLLLAVFSSKISSGANRPFGEEFRAARRVSEDIGAQLVLGDRPIEITLERALKSLSWDEKTKLVISLFRGITSTTDMPQDEKAAVSPYELYEKLSSSYPSLLQPLVHERDMFMAWSLKRSKAVNKSKTVVGVIGKGHMNGVVYALISDQGDLRFRDLVGRESSETWASSVVKGLVRDTVIGLALWALYELLQAAAVHIKL

SEQ ID NO: 66154 - DNA, 1644 bp, Triticum aestivum
  misc_feature (1)..(1644): Ceres Seq. ID no. 13657789
atccaattccaaaaccacgcactagtcgacgacggccacctcgccgccgccgtaacgcgcacggtctcaccttaccactcattaccgcgcttccagttccgtacgcctcatgccgccggccgcgcgggtcaaacctcccaaaacatgaaactcggtgcaatggggtcgtgccgcttgcccccggccatcgcggccgccgcgctggccgcggctgcgctgctggtgctcttccgcgcctccccgtacgggctcgcctacccccgcgcgggcgtccagccagggccgccgctcgtggcgaggggtcccgggagcccgccctccttcgcgtactggatatccggcacgggcggagagggccgcagggtcctcaggctgctcagggcggtgtatcacccgaggaaccggtacctgctgcacctggacgcgggggcgtcgcgggacgagcggacggagctggccgccgctgcgcgggacgaggcggcgtggagggagttctcaaacgtcgacgtggtaggggagagctacgcggtagacaggacgggctcctcggtgctcgccgcggcgctgcacggcgccgccgtgctgctcaggattggggctgactgggactggttcgtcacgctcagctcctgggactatcctctcgtcacgcaggacgatctcttttatgcattttcttctgtaccaaggcacctcaactttattgatcacacaagtaacctcggatggaaagagcatgaaaggtttgaaaaacttattgtcgacgcaagtctatatatggacaagaatacccagccctttcctgcgacagaaacaagacaaatgcctgaggcattcaagatattcacaggctctccatgggtaattctgagtaggaacttcactgaacattgcgtgcatggctgggacaacctcccccgcaggctactgatgtactttgccaacgctgcttactccatggaatcatatttccagactgtcatatgcagttcatctgactttagaaacaccactgtcaacggcgatctacgtttctttgtttgggacgatcctcctgggctggagccgcgtattcttgatgaaacgcatctcgataacatggtgaacagcagcgctgccttcgcaaggcggtttgtggaggaagcaccagtgctgaagaaggttgatgatgagctactgaaccgttcttcggcccagttggttcctggtgtgtggtgccggaatttgggtgaaaagcaaggaggcggggatgtggaggcgtgctcggaatggggcgacattaacgttgtcaggcctgggcgtgctggagagcggttgaggcgcttcatatctgagatcattcatataagaggatgcacggtcgcagcagctagctgaaagccgaacccaccacaagtctggaattctttgtcaagagagcagttaaacaaagaatttaaggaacacattcttcgctgcaggtaaagcacgcgttgctgcagtcgacagttctaccaggctgcataataccactgacgctccttctacacaaactaggtacaagtattttcgaacgaagggaactgtataaagctgtaactgatttgccctttttttaaccatatggataggacatagaataggttacactgcagtagttacagt

SEQ ID NO: 66155 - protein, 458 aa, Triticum aestivum
  peptide (1)..(458): Ceres Seq. ID no. 13657790
IQFQNHALVDDGHLAAAVTRTVSPYHSLPRFQFRTPHAAGRAGQTSQNMKLGAMGSCRLPPAIAAAALAAAALLVLFRASPYGLAYPRAGVQPGPPLVARGPGSPPSFAYWISGTGGEGRRVLRLLRAVYHPRNRYLLHLDAGASRDERTELAAAARDEAAWREFSNVDVVGESYAVDRTGSSVLAAALHGAAVLLRIGADWDWFVTLSSWDYPLVTQDDLFYAFSSVPRHLNFIDHTSNLGWKEHERFEKLIVDASLYMDKNTQPFPATETRQMPEAFKIFTGSPWVILSRNFTEHCVHGWDNLPRRLLMYFANAAYSMESYFQTVICSSSDFRNTTVNGDLRFFVWDDPPGLEPRILDETHLDNMVNSSAAFARRFVEEAPVLKKVDDELLNRSSAQLVPGVWCRNLGEKQGGGDVEACSEWGDINVVRPGRAGERLRRFISEIIHIRGCTVAAAS

SEQ ID NO: 66156 - protein, 410 aa, Triticum aestivum
  peptide (1)..(410): Ceres Seq. ID no. 13657791
MKLGAMGSCRLPPAIAAAALAAAALLVLFRASPYGLAYPRAGVQPGPPLVARGPGSPPSFAYWISGTGGEGRRVLRLLRAVYHPRNRYLLHLDAGASRDERTELAAAARDEAAWREFSNVDVVGESYAVDRTGSSVLAAALHGAAVLLRIGADWDWFVTLSSWDYPLVTQDDLFYAFSSVPRHLNFIDHTSNLGWKEHERFEKLIVDASLYMDKNTQPFPATETRQMPEAFKIFTGSPWVILSRNFTEHCVHGWDNLPRRLLMYFANAAYSMESYFQTVICSSSDFRNTTVNGDLRFFVWDDPPGLEPRILDETHLDNMVNSSAAFARRFVEEAPVLKKVDDELLNRSSAQLVPGVWCRNLGEKQGGGDVEACSEWGDINVVRPGRAGERLRRFISEIIHIRGCTVAAAS

SEQ ID NO: 66157 - protein, 405 aa, Triticum aestivum
  peptide (1)..(405): Ceres Seq. ID no. 13657792
MGSCRLPPAIAAAALAAAALLVLFRASPYGLAYPRAGVQPGPPLVARGPGSPPSFAYWISGTGGEGRRVLRLLRAVYHPRNRYLLHLDAGASRDERTELAAAARDEAAWREFSNVDVVGESYAVDRTGSSVLAAALHGAAVLLRIGADWDWFVTLSSWDYPLVTQDDLFYAFSSVPRHLNFIDHTSNLGWKEHERFEKLIVDASLYMDKNTQPFPATETRQMPEAFKIFTGSPWVILSRNFTEHCVHGWDNLPRRLLMYFANAAYSMESYFQTVICSSSDFRNTTVNGDLRFFVWDDPPGLEPRILDETHLDNMVNSSAAFARRFVEEAPVLKKVDDELLNRSSAQLVPGVWCRNLGEKQGGGDVEACSEWGDINVVRPGRAGERLRRFISEIIHIRGCTVAAAS

SEQ ID NO: 66158 - DNA, 1410 bp, Triticum aestivum
  misc_feature (1)..(1410): Ceres Seq. ID no. 13657609
aatcgaaaaggaaaagtccattcaaccttcggaaaactttctacgccgtagctgcagcactgcacttccgctatgcaccgctcaaccaccattgccaagctcgccttgctcctcctcgccactgcagccatgtcatgcggcttcttcgccgtcgcccatgcgcatgcgcggaagagctgctggccgcgcgagagggacgtgttgctggccttgaagcagggcatcaacgacaccgacggcgtcctcgcctcatggcaaaaactgcgccatgactgctgccgctggacgggcgtcgcctgcagcaacgaaaccggccatgtcaccgagcttgacatcggtctcagctggttgttcggccagataagtccttccttgctttctctccagcatctcgactacctggatctcagcaccacctccctagttggaccaaacggcagcagtgtattcccagatttcttgtcttctttgcacaacttgagacatctcgatctcgcccgcacgccatactctggtagaattcctgctcagctttccaatctttcaaatttggagtatctcgatctcagttggacatccctgcatggtcgtgctcagttcctgttttcttacaaaaacttgagacatctcgatctctccagaatgctcttttctggtacactgccgcgacagctaggcaatctatcaaacttgcaacaccttgacctccgttatatgcaaaatatacacacagcagatgtctcatggataactcatatgcatttcctggaatatcttgacatgagtgacataaatctcagcaccgccgacgtgttccctgtgtccaacacaatcccaactctcaaggacctcattcttagtaactgctcacttccaaatgcaaaccagccgctaaaacacctaaacctcacaagacttgagctgcttgatctcagcagcaactatctaggccatcgaattgatacgagttggttttggaacataacaggcatcacaggtcagggtggacgcggtccggtccggtccgggctttgaccgagccagcctttggaccggccgcggccggtccggtccggaccggaccaaggtggccagcgagcctactatccaggaccggaccgagaggagcaaagctcggccagcccgaatggaccgaatgggaccgatggctgggactctgtttaggctattttccagcctgggagtgctttgttggccattgtttaggctgttttgacgtatttagactgtagctgtacctgggagtgctctattaagcgttttggccattatttagcagtgccctgttgcgctttttggccacaatttaggctgtccaaatttagtgagtgctctgtttctgtataatgactagtatggcataagtaatttggacagcattttatttgc

SEQ ID NO: 66159 - protein, 320 aa, Triticum aestivum
  peptide (1)..(320): Ceres Seq. ID no. 15220613
MHRSTTIAKLALLLLATAAMSCGFFAVAHAHARKSCWPRERDVLLALKQGINDTDGVLASWQKLRHDCCRWTGVACSNETGHVTELDIGLSWLFGQISPSLLSLQHLDYLDLSTTSLVGPNGSSVFPDFLSSLHNLRHLDLARTPYSGRIPAQLSNLSNLEYLDLSWTSLHGRAQFLFSYKNLRHLDLSRMLFSGTLPRQLGNLSNLQHLDLRYMQNIHTADVSWITHMHFLEYLDMSDINLSTADVFPVSNTIPTLKDLILSNCSLPNANQPLKHLNLTRLELLDLSSNYLGHRIDTSWFWNITGITGQGGRGPVRSGL

SEQ ID NO: 66160 - protein, 301 aa, Triticum aestivum
  peptide (1)..(301): Ceres Seq. ID no. 15220614
MSCGFFAVAHAHARKSCWPRERDVLLALKQGINDTDGVLASWQKLRHDCCRWTGVACSNETGHVTELDIGLSWLFGQISPSLLSLQHLDYLDLSTTSLVGPNGSSVFPDFLSSLHNLRHLDLARTPYSGRIPAQLSNLSNLEYLDLSWTSLHGRAQFLFSYKNLRHLDLSRMLFSGTLPRQLGNLSNLQHLDLRYMQNIHTADVSWITHMHFLEYLDMSDINLSTADVFPVSNTIPTLKDLILSNCSLPNANQPLKHLNLTRLELLDLSSNYLGHRIDTSWFWNITGITGQGGRGPVRSGL

SEQ ID NO: 66161 - DNA, 956 bp, Triticum aestivum
  misc_feature (1)..(956): Ceres Seq. ID no. 12620168
acaagtaaaagaaacttcgggtcgccatcctgataaggatctaaagggaaatatgaacttgctgcagcaacttggtatacttccttgtggtgctacggcatggttgagtttcgcacagtcagcacagtctagtgaaggagtaaagttaaatatggtttacgaggttggggagctgtttgagctgggaattcagctttcttatctgctcatactacttggtctgcttggaactggtacattttttgtcatccgccaggttcttgtccgcagggagcttgatctttctgcgaaagacttgcaggaacaagtgagaagtggtgagggaagcgctactgaactatttgagcttggagcagtcatgctccggagaaaattttaccctgcagctatcaaatatctacagcaagcaatccaaaaatgggatagagatgagcaagatcttgcacaggtgtacaatgccctgggggtgagctacaagcgggagaacaaactggacaaggcaatcaagcaattcgagaaggccgtggagctccaaccaggctatgtgacggcatggaacaacctcggcgatgcatatgagcagcagaaggacctcgcgtcagcgctcagggcgttcgaggaggtattgctctttgatccgaacaacaaggtggcaaggccgcgccgagacgacctcaagtcgcgtgtgggcatgtacaagggggtgccggtgaagacgacggacaagcgatagccgccacgggtggacgaattcgtgcctcagttttggacagtagcatttgtaaacatgatgagaagttgtatgtagcatattggcggcgtcatccgtccgatctggccattgtagaatgtttcgaatattagcgcaaaaaaaaagtagaatttgcttttgaggtccgctccaagcccataacagctattttttgcgcttgctaacaaataaattatttgtatcc

SEQ ID NO: 66162 - protein, 243 aa, Triticum aestivum
  peptide (1)..(243): Ceres Seq. ID no. 12620169
QVKETSGRHPDKDLKGNMNLLQQLGILPCGATAWLSFAQSAQSSEGVKLNMVYEVGELFELGIQLSYLLILLGLLGTGTFFVIRQVLVRRELDLSAKDLQEQVRSGEGSATELFELGAVMLRRKFYPAAIKYLQQAIQKWDRDEQDLAQVYNALGVSYKRENKLDKAIKQFEKAVELQPGYVTAWNNLGDAYEQQKDLASALRAFEEVLLFDPNNKVARPRRDDLKSRVGMYKGVPVKTTDKR

SEQ ID NO: 66163 - protein, 226 aa, Triticum aestivum
  peptide (1)..(226): Ceres Seq. ID no. 12620170
MNLLQQLGILPCGATAWLSFAQSAQSSEGVKLNMVYEVGELFELGIQLSYLLILLGLLGTGTFFVIRQVLVRRELDLSAKDLQEQVRSGEGSATELFELGAVMLRRKFYPAAIKYLQQAIQKWDRDEQDLAQVYNALGVSYKRENKLDKAIKQFEKAVELQPGYVTAWNNLGDAYEQQKDLASALRAFEEVLLFDPNNKVARPRRDDLKSRVGMYKGVPVKTTDKR

SEQ ID NO: 66164 - protein, 193 aa, Triticum aestivum
  peptide (1)..(193): Ceres Seq. ID no. 12620171
MVYEVGELFELGIQLSYLLILLGLLGTGTFFVIRQVLVRRELDLSAKDLQEQVRSGEGSATELFELGAVMLRRKFYPAAIKYLQQAIQKWDRDEQDLAQVYNALGVSYKRENKLDKAIKQFEKAVELQPGYVTAWNNLGDAYEQQKDLASALRAFEEVLLFDPNNKVARPRRDDLKSRVGMYKGVPVKTTDKR

SEQ ID NO: 66165 - DNA, 2052 bp, Triticum aestivum
  misc_feature (1)..(2052): Ceres Seq. ID no. 13657610
accctcaccaccaccaccgcccatccatcggtcggctcgccgccaccagtcgagcccgcccgaccccggccatggcgcgggaggagctgtcgacggagatcgtgaaccgcggcgtggagccgtcgggcccggacgccgggtcgccgaccttctcggtgcgcgtgcgccgccggctgcccgacttcttgcagtcggtgaacctcaagtacgtgcggctcggctaccactacctgctgagccacggcgtgtacctggccaccatcccggtgatcgtgctggtgtgcggcgccgaggtgggcagcctcagccgcgacgagctgtggcgcaaggtgtgggacgaggccacctacgacctcgccaccgtgctcgccttcctcgccgtcctcgccttcaccatctccgtctacatcatgtcccgccccaggcccatctacctcatcgacttcgccacctacaagcccgccgacgaactcaaggtgtccaaggcggagttcatcgagctggcgcgcaagtcgggcaagttcgacgaggagagcctggcgttccaggcgcggctgctggccaagtccggcatcggggacgagtcctacatgccgcgctgcgtcttccagcccgacgccaactgcgccaccatgaaggagggccgcgccgaggcctccgccgccatgttcgccgcgctcgacgagctcttcgacaagtgccgcgtccgccccaaggacgtcggcgtgctcgtcgtcaactgcagcctcttcaaccccaccccctccctctccgccatgatcgtcaaccactacaagatgcgcggcaacatcctcagctacaatctggggggcatgggctgcagcgcgggcgtcatctccatcgacctggcgcgtgacatgctccaggccagcggcgctgggctcgccgtcgtggtgagcaccgaggccgtgtcattcacgtggtacgccgggaagcgccggtccatgctcatccccaacgccttcttccgcgcgggcgccgccgccgtgctgctgtcgaaccgccgcagggacttccgccgcgccaagtaccagctggagcacgtggtgcgcacgcacaagggcgccgacgaccgcgccttccgctccgtgtaccaggaggaggacgagcagcggatcaagggcctgtccatcagccgcgacctggtggaggtcggcggccacgcgctcaagaccaacatcaccaccctcggcccgctggtgctgcccttctcggagcagctcctcttcttcgccggcgtgctgttccgccacctctacccgtccaagacgtccaccccgccgccgccggccgccaacggggacacctcggccgccgcgccctacatcccggacttcaagcgcgcgttcgagcacttctgcatgcacgcggccagccgcgacgtgctggagcacctgcagcgcaacctgggcctccgcgacgccgacctggaggcctcccgcgccgcgctgcaccgcttcggcaacacctccagcagcagcatctggtacgagctggcctacctggaggccaagggccgcgtccgccgcggcgaccgcgtgtggcagctcgccttcggctccgggttcaagtgcaacagcgccgtgtggcgcgccgtccgccgcgtgcgccgcccgtccaggagcccgtggctggactgcgtcgaccagtacccggcgcgcatggacgcctgacccgatcgagatggcgaagcaggcgcacgtgctaataattaagcgaggtaaaggaacacgtccgtcgtcgtcgcgcccgcgttgggtaagtgcaggctaatggagatggtgctatcgatttgcatgtaactgcatgcatgcagtgccgctggtttaaggtttgagctttgcttaatttgtgctggtgttgtagcggttatctattgttaaggggtttaatcatagactacgtaccataatgcgcaagtgtgtgtgcgcgctcttgtgaaacttatgtgaacttgattatctacgtgcaatttcatttaaaaaaaaaaaaaaaaagaaaaaaaaaaaaaaaaaagcttatcgataccgt

SEQ ID NO: 66166 - protein, 563 aa, Triticum aestivum
  peptide (1)..(563): Ceres Seq. ID no. 15219868
PHHHHRPSIGRLAATSRARPTPAMAREELSTEIVNRGVEPSGPDAGSPTFSVRVRRRLPDFLQSVNLKYVRLGYHYLLSHGVYLATIPVIVLVCGAEVGSLSRDELWRKVWDEATYDLATVLAFLAVLAFTISVYIMSRPRPIYLIDFATYKPADELKVSKAEFIELARKSGKFDEESLAFQARLLAKSGIGDESYMPRCVFQPDANCATMKEGRAEASAAMFAALDELFDKCRVRPKDVGVLVVNCSLFNPTPSLSAMIVNHYKMRGNILSYNLGGMGCSAGVISIDLARDMLQASGAGLAVVVSTEAVSFTWYAGKRRSMLIPNAFFRAGAAAVLLSNRRRDFRRAKYQLEHVVRTHKGADDRAFRSVYQEEDEQRIKGLSISRDLVEVGGHALKTNITTLGPLVLPFSEQLLFFAGVLFRHLYPSKTSTPPPPAANGDTSAAAPYIPDFKRAFEHFCMHAASRDVLEHLQRNLGLRDADLEASRAALHRFGNTSSSSIWYELAYLEAKGRVRRGDRVWQLAFGSGFKCNSAVWRAVRRVRRPSRSPWLDCVDQYPARMDA

SEQ ID NO: 66167 - protein, 540 aa, Triticum aestivum
  peptide (1)..(540): Ceres Seq. ID no. 15219869
MAREELSTEIVNRGVEPSGPDAGSPTFSVRVRRRLPDFLQSVNLKYVRLGYHYLLSHGVYLATIPVIVLVCGAEVGSLSRDELWRKVWDEATYDLATVLAFLAVLAFTISVYIMSRPRPIYLIDFATYKPADELKVSKAEFIELARKSGKFDEESLAFQARLLAKSGIGDESYMPRCVFQPDANCATMKEGRAEASAAMFAALDELFDKCRVRPKDVGVLVVNCSLFNPTPSLSAMIVNHYKMRGNILSYNLGGMGCSAGVISIDLARDMLQASGAGLAVVVSTEAVSFTWYAGKRRSMLIPNAFFRAGAAAVLLSNRRRDFRRAKYQLEHVVRTHKGADDRAFRSVYQEEDEQRIKGLSISRDLVEVGGHALKTNITTLGPLVLPFSEQLLFFAGVLFRHLYPSKTSTPPPPAANGDTSAAAPYIPDFKRAFEHFCMHAASRDVLEHLQRNLGLRDADLEASRAALHRFGNTSSSSIWYELAYLEAKGRVRRGDRVWQLAFGSGFKCNSAVWRAVRRVRRPSRSPWLDCVDQYPARMDA

SEQ ID NO: 66168 - protein, 427 aa, Triticum aestivum
  peptide (1)..(427): Ceres Seq. ID no. 15219870
MSRPRPIYLIDFATYKPADELKVSKAEFIELARKSGKFDEESLAFQARLLAKSGIGDESYMPRCVFQPDANCATMKEGRAEASAAMFAALDELFDKCRVRPKDVGVLVVNCSLFNPTPSLSAMIVNHYKMRGNILSYNLGGMGCSAGVISIDLARDMLQASGAGLAVVVSTEAVSFTWYAGKRRSMLIPNAFFRAGAAAVLLSNRRRDFRRAKYQLEHVVRTHKGADDRAFRSVYQEEDEQRIKGLSISRDLVEVGGHALKTNITTLGPLVLPFSEQLLFFAGVLFRHLYPSKTSTPPPPAANGDTSAAAPYIPDFKRAFEHFCMHAASRDVLEHLQRNLGLRDADLEASRAALHRFGNTSSSSIWYELAYLEAKGRVRRGDRVWQLAFGSGFKCNSAVWRAVRRVRRPSRSPWLDCVDQYPARMDA

SEQ ID NO: 66169 - DNA, 1778 bp, Triticum aestivum
  misc_feature (1)..(1778): Ceres Seq. ID no. 13657220
acatcctaatcgaaaaataaaatccattcccctataacaaaccgacccaatcgcattcgccagcccccgaatcgcgatcccctccgcacctcggccccgccatggaggtgttctactacctcgtcttcggcggcctcgccgccgtcgtggcggcgctggagctcggcaagtccggcaaggaccgcgtcgccaccccgacggccttcaactccttcaagaacaactacgtcctcgtctactccctcatgatgtctggggactggctgcaggggccctacgtgtactacctctacagccagtacgggttcgacaagggcgacatcggccgcctcttcatcgccggcttcggctcctccatgctcttcggcaccatcgtcgggtcgctcgccgacaagcagggaaggaagagggcgtgcatcacctactgtatcacctacatcctcagctgcatcacgaagcactccccgcagtacaggattctgatgattggccgtgtgcttggaggcattgcaacatcgctgctcttctcggcgttcgagtcgtggctcgtcgcggagcacaacaagagaggttttgatccgcagtggctgtcaataacattctccaaggctatatttcttgggaatggcctagttgccattgtcgcagggctatttgcaaatctactggctgataacttgggttttggccctgtcgctccatttgatgctactgcttgcttcctagcaataggcatggcaatcatcttatcgtcgtggggtgagaactatggagatgcatctgaaggaaaggacttgatggcccagttcaaggttgcagctaaagccattgcttccgatgaaaagattgcattgcttggagccatacagtcattgtttgagggttcaatgtacacttttgttttcttgtggactcctgctttgagcccaaatgaagaagacattcctcatggcttcatatttgccacattcatgctctcctcgatgttgggtagctcaattgcatctcgtctattagctcggaagatgaaggtcgaaggttatatgcagattgtgttctcaatatcagctttcactcttttcctccctgttgttaccaatttcatagtacccccctcagagaaaggtggaagcatctccttcggaggctgtgtacagcttcttggtttctgcatattcgagtcatgtgttggcatattctggccctcaatcatgaagatgagatctcaatatatccccgaggaggcgagaagcactatcatgaacttcttccgcataccacttaacctgtttgtatgtgtggtgctttacaatgtgaatgccttcccaatcgctgtcatgtttggcatgtgctccattttcctattcatcgcagcaattttgcagaggcggctgatgtccgtgtccgaccttcacagatcaactaccgcagagatgacagcagaagatgagccactaaacccttgaaacacaccagcagccattgacgtgaaccgggcatggaacggtctccaacttcatctgcttctctgcagggctgctgaataagatgggaaaccgaaggctgcaacaaaacctcgtttagtttgctttgttaggtgctctcacggtattcagttttgtcgggagagaggacacggctcggcatgtattgagatatatgcactgcacagtagagctttggcatagtaccggatctgtactttccctcctattcttacgtttgctaataggatgatggtatttgtatttaaatccaaccagtctcttgatgaaagc

SEQ ID NO: 66170 - protein, 454 aa, Triticum aestivum
  peptide (1)..(454): Ceres Seq. ID no. 15219860
MEVFYYLVFGGLAAVVAALELGKSGKDRVATPTAFNSFKNNYVLVYSLMMSGDWLQGPYVYYLYSQYGFDKGDIGRLFIAGFGSSMLFGTIVGSLADKQGRKRACITYCITYILSCITKHSPQYRILMIGRVLGGIATSLLFSAFESWLVAEHNKRGFDPQWLSITFSKAIFLGNGLVAIVAGLFANLLADNLGFGPVAPFDATACFLAIGMAIILSSWGENYGDASEGKDLMAQFKVAAKAIASDEKIALLGAIQSLFEGSMYTFVFLWTPALSPNEEDIPHGFIFATFMLSSMLGSSIASRLLARKMKVEGYMQIVFSISAFTLFLPVVTNFIVPPSEKGGSISFGGCVQLLGFCIFESCVGIFWPSIMKMRSQYIPEEARSTIMNFFRIPLNLFVCVVLYNVNAFPIAVMFGMCSIFLFIAAILQRRLMSVSDLHRSTTAEMTAEDEPLNP

SEQ ID NO: 66171 - protein, 406 aa, Triticum aestivum
  peptide (1)..(406): Ceres Seq. ID no. 15219861
MMSGDWLQGPYVYYLYSQYGFDKGDIGRLFIAGFGSSMLFGTIVGSLADKQGRKRACITYCITYILSCITKHSPQYRILMIGRVLGGIATSLLFSAFESWLVAEHNKRGFDPQWLSITFSKAIFLGNGLVAIVAGLFANLLADNLGFGPVAPFDATACFLAIGMAIILSSWGENYGDASEGKDLMAQFKVAAKAIASDEKIALLGAIQSLFEGSMYTFVFLWTPALSPNEEDIPHGFIFATFMLSSMLGSSIASRLLARKMKVEGYMQIVFSISAFTLFLPVVTNFIVPPSEKGGSISFGGCVQLLGFCIFESCVGIFWPSIMKMRSQYIPEEARSTIMNFFRIPLNLFVCVVLYNVNAFPIAVMFGMCSIFLFIAAILQRRLMSVSDLHRSTTAEMTAEDEPLNP

SEQ ID NO: 66172 - protein, 405 aa, Triticum aestivum
  peptide (1)..(405): Ceres Seq. ID no. 15219862
MSGDWLQGPYVYYLYSQYGFDKGDIGRLFIAGFGSSMLFGTIVGSLADKQGRKRACITYCITYILSCITKHSPQYRILMIGRVLGGIATSLLFSAFESWLVAEHNKRGFDPQWLSITFSKAIFLGNGLVAIVAGLFANLLADNLGFGPVAPFDATACFLAIGMAIILSSWGENYGDASEGKDLMAQFKVAAKAIASDEKIALLGAIQSLFEGSMYTFVFLWTPALSPNEEDIPHGFIFATFMLSSMLGSSIASRLLARKMKVEGYMQIVFSISAFTLFLPVVTNFIVPPSEKGGSISFGGCVQLLGFCIFESCVGIFWPSIMKMRSQYIPEEARSTIMNFFRIPLNLFVCVVLYNVNAFPIAVMFGMCSIFLFIAAILQRRLMSVSDLHRSTTAEMTAEDEPLNP

SEQ ID NO: 66173 - DNA, 1725 bp, Triticum aestivum
  misc_feature (1)..(1725): Ceres Seq. ID no. 14301572
aaagcttcacctcccctcaaaaaaaaaagatttaccttcaccggtctctctcgcgccaaccggcggcgctcgtctccctcgccgccgtaagcacggtggcgaagccgaacccaagcgaggtggccaagtagtcggtgagatgctgctagtagagctgctccgctgccagatccaggagtggtacccggcattccgccgccacaccgtccccaccgtcaccatccccctccccgccgccttcctccgctacctcgccggccagcccgcccaccccgtccccgacgcccctcaccaggacgcggaagggcctcccccattcctcctcccgtcgctcgcctccggccgcacccccttcccgccgctccacctcccggaccccgtcgaccacgacgacagctccgacctcttctccgtctgcgacgacgacgacgacgacgagagcccgcccctccccgccttccccgagctggaggccgcggtcgacgcggccatcgccgagctcggcggcgccgcgctccccaagctcaactggagcgcgcccaaggacgccgccttcatgtccgccgacggcaccgtccgctgcacctgcttcgccgaggtcgccatgctgctccgctcctcggactgcgtcgcgcacgacctctcctccgcgcgcccgtcctgccaggacttcgtgtgcgccagggaaggtgttcgacggaatgccggacagggcagtggtgccaaccaggcgggtgctccatcgaatggcggagggagcaccagtggtgctggttctctgagtgatcctcccactgaggatcgcaatgagggaggcaggcaagctgctgccgacagtgatgcttcggaagacgatgttggacaagaaagcggcgatgatagttgggtggacgatgggttccagtactacctcgccctccgcaagtggtacccgggcctgcgccccgaggcagagttccgatgcttcgtgcggggacggaagctggtcggcgtgtcgcagagggacacatctgcttactacccatcgttgcctgggtggagttctgaggtgcagccgaagatcgaggagttcttcgaagaagttgttgagtcgcagtttgcttctcagaattacacatttgatgtgtatgtcagagcagatggccgggtgaagctgattgatttcaatccttggggtggctatacattgccgcttatgtttacatgggaggagcttgaggatgagaagagaggagaggacaagctggagtttagagtggtaatggagcaaggtgcagtgaggccaggattaatgacagcagtgccgtatgatatgacggattggggagaagggagcggctgggatgtttttctgaagaaggctgacaatgaactgaatagacagatggcctcattagctatggattcgtaattgacatctggaacaaagcagcgcttgaggactccagtagttgaacaacttcaaccgtcgcctgtttgtaatgtttcacctgtcaaacgctagaagtaacagccttctttagattgtgatgcaaacctcacggcaatcggccgtttccccccatggcttttgcaatgctagattgctagtatgggagtaccgcatgctgcttcatctcagttttatgatatttacagaaaaatatttgtagtggaagtatatggcccatggctgaaattgcaaactctgaaacatgaatacacattccatatgcctttgctgtt

SEQ ID NO: 66174 - protein, 469 aa, Triticum aestivum
  peptide (1)..(469): Ceres Seq. ID no. 14301573
KLHLPSKKKDLPSPVSLAPTGGARLPRRRKHGGEAEPKRGGQVVGEMLLVELLRCQIQEWYPAFRRHTVPTVTIPLPAAFLRYLAGQPAHPVPDAPHQDAEGPPPFLLPSLASGRTPFPPLHLPDPVDHDDSSDLFSVCDDDDDDESPPLPAFPELEAAVDAAIAELGGAALPKLNWSAPKDAAFMSADGTVRCTCFAEVAMLLRSSDCVAHDLSSARPSCQDFVCAREGVRRNAGQGSGANQAGAPSNGGGSTSGAGSLSDPPTEDRNEGGRQAAADSDASEDDVGQESGDDSWVDDGFQYYLALRKWYPGLRPEAEFRCFVRGRKLVGVSQRDTSAYYPSLPGWSSEVQPKIEEFFEEVVESQFASQNYTFDVYVRADGRVKLIDFNPWGGYTLPLMFTWEELEDEKRGEDKLEFRVVMEQGAVRPGLMTAVPYDMTDWGEGSGWDVFLKKADNELNRQMASLAMDS

SEQ ID NO: 66175 - protein, 423 aa, Triticum aestivum
  peptide (1)..(423): Ceres Seq. ID no. 14301574
MLLVELLRCQIQEWYPAFRRHTVPTVTIPLPAAFLRYLAGQPAHPVPDAPHQDAEGPPPFLLPSLASGRTPFPPLHLPDPVDHDDSSDLFSVCDDDDDDESPPLPAFPELEAAVDAAIAELGGAALPKLNWSAPKDAAFMSADGTVRCTCFAEVAMLLRSSDCVAHDLSSARPSCQDFVCAREGVRRNAGQGSGANQAGAPSNGGGSTSGAGSLSDPPTEDRNEGGRQAAADSDASEDDVGQESGDDSWVDDGFQYYLALRKWYPGLRPEAEFRCFVRGRKLVGVSQRDTSAYYPSLPGWSSEVQPKIEEFFEEVVESQFASQNYTFDVYVRADGRVKLIDFNPWGGYTLPLMFTWEELEDEKRGEDKLEFRVVMEQGAVRPGLMTAVPYDMTDWGEGSGWDVFLKKADNELNRQMASLAMDS

SEQ ID NO: 66176 - protein, 284 aa, Triticum aestivum
  peptide (1)..(284): Ceres Seq. ID no. 14301575
MSADGTVRCTCFAEVAMLLRSSDCVAHDLSSARPSCQDFVCAREGVRRNAGQGSGANQAGAPSNGGGSTSGAGSLSDPPTEDRNEGGRQAAADSDASEDDVGQESGDDSWVDDGFQYYLALRKWYPGLRPEAEFRCFVRGRKLVGVSQRDTSAYYPSLPGWSSEVQPKIEEFFEEVVESQFASQNYTFDVYVRADGRVKLIDFNPWGGYTLPLMFTWEELEDEKRGEDKLEFRVVMEQGAVRPGLMTAVPYDMTDWGEGSGWDVFLKKADNELNRQMASLAMDS

SEQ ID NO: 66177 - DNA, 1866 bp, Triticum aestivum
  misc_feature (1)..(1866): Ceres Seq. ID no. 13657240
gaccaaacccaaagccccgtgttccccatctctcctcccagaaacctcctcttcttcctcctcctcctcctcgccgccgccgccgccaccgccgaggatggcggcgaagcagccgttggcggacgtggaggacgggctcctcgcccacctcaacgcgaacgccgagatccccgactcccggtccttcgcctcctccctcggcgtcccgcacaaagacgtggaggacgtcatcaagaggctcaccgccttccgcatcgttgagagtgcggtacggtaccctccccctccccaattcccccgagcctcgcttcgtccctgccccgatttcccccaagacccaacgagctttgctgcaggacatcaccaaggagacgtgggtgctcaccgatgaggccaaggggtatgccgcgaggggctcccccgaggtgcagctcgtcgcggccatcccgcccgagggtgcctccaagggcgcgctcaaggagagtttgggggacgtgttcgatattggaatgaaggctgcagccaagaacaagtggattggatttgagaagggaaacaaagacctcgtactgagaaaggttgaggataccaatgatgaattgcaagagcagcttataagactggagaatggggaggttattgctgacaaagtaatagatgatttgaagagaagaaagcttgtaacaaaagagaaatctatttggtattcactgaagaaggggcctgaatttgttgcaaagagaaaaacattggcaaccgatgtgacacgagaacatctcaagagtggcgactggaaggatctggaatttaaagattataactatggagctcaaggacaacctattgcgataggatatagccaaccgttgttagaggtccgtgaggcaatccagaacatttttctcgagatggggttcagtgagatgccaacgaacatgtatgtagagagcagcttctggaatttcgatgcactgttccagccacaacagcatcctgctcgtgattcacacgatacctttttcctcaaagcccctgctacaacaacacaattacccgatgactatcttgagaaagtaaagcaagtacatcagtctggtggccatggctccaaaggatatggttacaactggaagcgagatgaagcagagaaaaacctgcttcgtactcacacaactgcagtttcaacaaggatgctatacaagctagcacaggagaaaacttttgctcctaagagatactattctattgatcgtgttttccggaatgaagctgtggaccgaactcatcttgcagaattccaccagatagaaggtcttatttgtgattatggtttgacgcttggtgatctgataggtgtattggaagatttcttctccagactaggcatgtcaaagctgcgtttcaaacctgcctacaacccgtacactgaaccaagcatggaaattttcagctaccacgatggtctgaagaaatgggtggagataggcaactcaggcatgttcaggcctgaaatgttacttcccatgggactgccagagggcgttaatgttatcgcatggggtctttcacttgaaaggccaacaatgattctgtatgggattgacaacatacgtgatctctttgggccaaaggtcgacttcaatctgatcaagagcagcccgatttgccgcttggggctgtagtgtagtgagcttgatagaactttatctggatgtctggatgcgaagcatgtttatttgtggttataactttgaaaaccagtactttgcatttaacagagggagtgcagaaatacacacatgtagctctgaattgcaattttgaggtgttcatgttcgatacaagtagggtcttccatttctatgc

SEQ ID NO: 66178 - protein, 559 aa, Triticum aestivum
  peptide (1)..(559): Ceres Seq. ID no. 15219863
PNPKPRVPHLSSQKPPLLPPPPPRRRRRHRRGWRRSSRWRTWRTGSSPTSTRTPRSPTPGPSPPPSASRTKTWRTSSRGSPPSASLRVRYGTLPLPNSPEPRFVPAPISPKTQRALLQDITKETWVLTDEAKGYAARGSPEVQLVAAIPPEGASKGALKESLGDVFDIGMKAAAKNKWIGFEKGNKDLVLRKVEDTNDELQEQLIRLENGEVIADKVIDDLKRRKLVTKEKSIWYSLKKGPEFVAKRKTLATDVTREHLKSGDWKDLEFKDYNYGAQGQPIAIGYSQPLLEVREAIQNIFLEMGFSEMPTNMYVESSFWNFDALFQPQQHPARDSHDTFFLKAPATTTQLPDDYLEKVKQVHQSGGHGSKGYGYNWKRDEAEKNLLRTHTTAVSTRMLYKLAQEKTFAPKRYYSIDRVFRNEAVDRTHLAEFHQIEGLICDYGLTLGDLIGVLEDFFSRLGMSKLRFKPAYNPYTEPSMEIFSYHDGLKKWVEIGNSGMFRPEMLLPMGLPEGVNVIAWGLSLERPTMILYGIDNIRDLFGPKVDFNLIKSSPICRLGL

SEQ ID NO: 66179 - protein, 390 aa, Triticum aestivum
  peptide (1)..(390): Ceres Seq. ID no. 15219864
MKAAAKNKWIGFEKGNKDLVLRKVEDTNDELQEQLIRLENGEVIADKVIDDLKRRKLVTKEKSIWYSLKKGPEFVAKRKTLATDVTREHLKSGDWKDLEFKDYNYGAQGQPIAIGYSQPLLEVREAIQNIFLEMGFSEMPTNMYVESSFWNFDALFQPQQHPARDSHDTFFLKAPATTTQLPDDYLEKVKQVHQSGGHGSKGYGYNWKRDEAEKNLLRTHTTAVSTRMLYKLAQEKTFAPKRYYSIDRVFRNEAVDRTHLAEFHQIEGLICDYGLTLGDLIGVLEDFFSRLGMSKLRFKPAYNPYTEPSMEIFSYHDGLKKWVEIGNSGMFRPEMLLPMGLPEGVNVIAWGLSLERPTMILYGIDNIRDLFGPKVDFNLIKSSPICRLGL

SEQ ID NO: 66180 - DNA, 1862 bp, Triticum aestivum
  misc_feature (1)..(1862): Ceres Seq. ID no. 14302451
cccatcccctctcttctctatagcttactagcagcagcgctctcttcttgctcttcgctatctagctccactttgctcgttgtcctctccctcttggatcgatccggccttcggcggccatgaattgcgccggggtcgccgatgggttgcctgcaggcgagccggataccggcgtcgtcgaccagccacggaggaggagctgcctgtagcgtagctgagctatagtgctcggtcgatctgctgcttcttgggggcgaggaagaagaataaccgaggcttactctcgacgacaggtgcttcgcacagtcgcgatgtttaggaaggacacgtcggacagaagcatccgtttcaagagaaggggcacaaggcggagccagataatttccggtgacgcacaccatggatccccagacatttgtgaggctctcagtcgggcagcttggcctgaggctccccggcgcaagtgccagaaaggctttccactgcgagatccggctccgaggcttcccggttcagttagctccggtgcctctggaaaattcttcagagtttcatcttgatccgcacgcgaatgcggcggtgttctccctggacgagcccggcctcaaggcgctgccgacgtcgaggtggttccgaaccccggagccgccgtacctcgagatcgctgtgtacgtgagcaggcgcgacggcggcgggcattgcgtcgggttgaagcggcggctggtcggggctgtcagggtggatgtcgggccggagtggcgcgacggcaagcctgtgctgcttcgccatagctggacgggcatcggcagggcggcggagctgcacgtgagagtgagggtggaggctgaccctcggtacgtgttccggttcgaggacgaggtcgcgctgaacccgcaggtggtccagctccatggcggcgccagccagcccatctttagctgcaagttcatccgcgacgtgaggcgggcgtcgcagccggatcatttgggcgggaagtattggtcgagctccggaagcggcgaagagaaggagacggagatggcggggaggaggagggagaggaagggctggaaggtggcgatccacgacctgtccggctccgccgtggccgcggcgttcatggccacgccgttcgtgccggcgacgggctccgacacggtggcgcggtccaacccaggcgcgtggctcatcgtccgcgccgacacaacgggatcgtcggagagctggcagccgtggggccggctggaggcgtggcgggagtgcgctgcgccggcgggcggcaaggacgccgtgtgccttcggctgcatctcctcccggagcggcgggacgcgtgcgtactcgtgtccgagacgcctctgagctgtgataagggcggggagttctccatcgacatggacagacagtcgatcctcccggaggacgcagtggcgtcggagacgacgtcgtcgtcgtactgcgcagcgagcatgggacagtcgtgcgcgggcggcggcttcgtgatgagctgcagcgtgcagggcgaggcggcgacgagcagcaggccgccgctggtgcacctcgccgcgcggcacgtcatgtgcatggaagacgcagccatgttcctcgcgcttgcggctgccgtcgacctcagtgtcaaggcgtgccggccgttccggagcaagacggcggcggctaagaagaagacggctgctggctcctcttcccccgattccctggagctcgacacatagattagctagagctagcagtcctcactcctcagtcaagcatcagatcatccatggtcactctgtaaatccacttgtttcgaccaaacttgttgaaaactctaccagttttttctaggcctaacctgtagacg

SEQ ID NO: 66181 - protein, 443 aa, Triticum aestivum
  peptide (1)..(443): Ceres Seq. ID no. 14302452
MDPQTFVRLSVGQLGLRLPGASARKAFHCEIRLRGFPVQLAPVPLENSSEFHLDPHANAAVFSLDEPGLKALPTSRWFRTPEPPYLEIAVYVSRRDGGGHCVGLKRRLVGAVRVDVGPEWRDGKPVLLRHSWTGIGRAAELHVRVRVEADPRYVFRFEDEVALNPQVVQLHGGASQPIFSCKFIRDVRRASQPDHLGGKYWSSSGSGEEKETEMAGRRRERKGWKVAIHDLSGSAVAAAFMATPFVPATGSDTVARSNPGAWLIVRADTTGSSESWQPWGRLEAWRECAAPAGGKDAVCLRLHLLPERRDACVLVSETPLSCDKGGEFSIDMDRQSILPEDAVASETTSSSYCAASMGQSCAGGGFVMSCSVQGEAATSSRPPLVHLAARHVMCMEDAAMFLALAAAVDLSVKACRPFRSKTAAAKKKTAAGSSSPDSLELDT

SEQ ID NO: 66182 - protein, 230 aa, Triticum aestivum
  peptide (1)..(230): Ceres Seq. ID no. 14302453
MAGRRRERKGWKVAIHDLSGSAVAAAFMATPFVPATGSDTVARSNPGAWLIVRADTTGSSESWQPWGRLEAWRECAAPAGGKDAVCLRLHLLPERRDACVLVSETPLSCDKGGEFSIDMDRQSILPEDAVASETTSSSYCAASMGQSCAGGGFVMSCSVQGEAATSSRPPLVHLAARHVMCMEDAAMFLALAAAVDLSVKACRPFRSKTAAAKKKTAAGSSSPDSLELDT

SEQ ID NO: 66183 - DNA, 1804 bp, Triticum aestivum
  misc_feature (1)..(1804): Ceres Seq. ID no. 14301554
ccaaatccagctgaacccacccacgctctacatcacactcatcagtccccactcctcacaggcaaacgccataccatatcacacgggctagccagccatcccatcatggagaaggcgcagaagcgggtggccatcgtcggcgccggcgcgagcggcctggcggcgtgcaagcacgcgctggagcgcggcctccggccggtcgtattcgagtcctcgggcgccatcggcggcgtgtgggtgcgcgcgctggcgtccacgcgcctgcagacgccgcgcacgctctacgagttctccgacttcccctggccgccggaggtcgccgaggtgttcccggaccacgcccaggccgcggcgtacctgcgctcctacgcggagcggttcggcgtgctggaccgcgtccggttcggatgccgcgtgacaggcatggagtacgccggcgtcggcgaggacgaggtccgggcgtgggaccggtgggccggcgatgggtcggcgttcggggatggccgcggccagtggcggctcaccgtgcagcagcagggtgccggcgacgtcgagacatatgttgcggattttgtgatcctgtgcgccgggagattcagcggcatcccgaatatacccacattccctcccgacaaagggccggagaagttcgacggcacggtgatccgctccatggactactccgacatgggcaccgaaaaggccaccgagctcatcaggggcaagctcgtcaccgtcgtcggctaccagaagtccgctatcgacatcgctgcagagtgcgcaaacacaaacggagccaagtatccatgcacaataatatgtcgaacgaagaggtggatcatacccgactactacgcttggggcgttcccattgcattcttctacctcaaccgcttctcggagctcctagtacacaagccaggagaggggctgctccttagcattcttgctaccttcttatcacccttgagatggttgttctcgaagttcgtcgagagctactacagatgggcggtgcccatggataagcacggcatggtgccagaccacagtttcttccaggccatcagctcttgcttggttgcaatattgccagacaagttctatgacatggttgatcaaggaagcattgttctcaagaaagcaaagagcttcagcttctgcaaacaaggtgtgattgtcgaaggtgattccgcgccgataaagagcgacgtggtcatattcgccaccggatacaagggagaccaaaagctaaaggagatgttggcatcatccttgttcagagacattgtgactggcccaccatccagtattattcctctctacaggcaatgcgtgcatcctaggatcccacagctggcgatcatcggctactccgagagcatagcaaacctgcacacattcgacatgcgctccaaatggttggcgcatttccttgacggggtgtttcagttgcctagcataaaatctatggagatggatataaaggaatgggatgaatacatgaagaggtactctcgtgaatacttccgtcgatcttgcgttggagctctccacatctggtacaatgaccagttgtgccaggacatggggtgtgaacccaggaggaagaaagggttctttgcagattggctgttgccatatcttccatcagattacaaggatgtcggtctgaagaagtgacatgagagatctgtcgtgccatcgccgcgcttaaatcaaacagaaacattgccattccagcgattctgtgctgactattgtacaaactaaatgtcatggaataagctcttcggttgaacct

SEQ ID NO: 66184 - protein, 560 aa, Triticum aestivum
  peptide (1)..(560): Ceres Seq. ID no. 14301555
PNPAEPTHALHHTHQSPLLTGKRHTISHGLASHPIMEKAQKRVAIVGAGASGLAACKHALERGLRPVVFESSGAIGGVWVRALASTRLQTPRTLYEFSDFPWPPEVAEVFPDHAQAAAYLRSYAERFGVLDRVRFGCRVTGMEYAGVGEDEVRAWDRWAGDGSAFGDGRGQWRLTVQQQGAGDVETYVADFVILCAGRFSGIPNIPTFPPDKGPEKFDGTVIRSMDYSDMGTEKATELIRGKLVTVVGYQKSAIDIAAECANTNGAKYPCTIICRTKRWIIPDYYAWGVPIAFFYLNRFSELLVHKPGEGLLLSILATFLSPLRWLFSKFVESYYRWAVPMDKHGMVPDHSFFQAISSCLVAILPDKFYDMVDQGSIVLKKAKSFSFCKQGVIVEGDSAPIKSDVVIFATGYKGDQKLKEMLASSLFRDIVTGPPSSIIPLYRQCVHPRIPQLAIIGYSESIANLHTFDMRSKWLAHFLDGVFQLPSIKSMEMDIKEWDEYMKRYSREYFRRSCVGALHIWYNDQLCQDMGCEPRRKKGFFADWLLPYLPSDYKDVGLKK

SEQ ID NO: 66185 - protein, 525 aa, Triticum aestivum
  peptide (1)..(525): Ceres Seq. ID no. 14301556
MEKAQKRVAIVGAGASGLAACKHALERGLRPVVFESSGAIGGVWVRALASTRLQTPRTLYEFSDFPWPPEVAEVFPDHAQAAAYLRSYAERFGVLDRVRFGCRVTGMEYAGVGEDEVRAWDRWAGDGSAFGDGRGQWRLTVQQQGAGDVETYVADFVILCAGRFSGIPNIPTFPPDKGPEKFDGTVIRSMDYSDMGTEKATELIRGKLVTVVGYQKSAIDIAAECANTNGAKYPCTIICRTKRWIIPDYYAWGVPIAFFYLNRFSELLVHKPGEGLLLSILATFLSPLRWLFSKFVESYYRWAVPMDKHGMVPDHSFFQAISSCLVAILPDKFYDMVDQGSIVLKKAKSFSFCKQGVIVEGDSAPIKSDVVIFATGYKGDQKLKEMLASSLFRDIVTGPPSSIIPLYRQCVHPRIPQLAIIGYSESIANLHTFDMRSKWLAHFLDGVFQLPSIKSMEMDIKEWDEYMKRYSREYFRRSCVGALHIWYNDQLCQDMGCEPRRKKGFFADWLLPYLPSDYKDVGLKK

SEQ ID NO: 66186 - protein, 419 aa, Triticum aestivum
  peptide (1)..(419): Ceres Seq. ID no. 14301557
MEYAGVGEDEVRAWDRWAGDGSAFGDGRGQWRLTVQQQGAGDVETYVADFVILCAGRFSGIPNIPTFPPDKGPEKFDGTVIRSMDYSDMGTEKATELIRGKLVTVVGYQKSAIDIAAECANTNGAKYPCTIICRTKRWIIPDYYAWGVPIAFFYLNRFSELLVHKPGEGLLLSILATFLSPLRWLFSKFVESYYRWAVPMDKHGMVPDHSFFQAISSCLVAILPDKFYDMVDQGSIVLKKAKSFSFCKQGVIVEGDSAPIKSDVVIFATGYKGDQKLKEMLASSLFRDIVTGPPSSIIPLYRQCVHPRIPQLAIIGYSESIANLHTFDMRSKWLAHFLDGVFQLPSIKSMEMDIKEWDEYMKRYSREYFRRSCVGALHIWYNDQLCQDMGCEPRRKKGFFADWLLPYLPSDYKDVGLKK

SEQ ID NO: 66187 - DNA, 1842 bp, Triticum aestivum
  misc_feature (1)..(1842): Ceres Seq. ID no. 14307960
actgccacacaagacacacacatccaatcaacccgagacctcaagtgtcacgactcgagacacaacacttcccccggaccaccatggataaggcatacattgccgtcctcaccatcgccttcctcttcctgctccactacatttcaggcaagatcagcaatggcaggcgcggcaagggcgccgtgcagctgccgccaagccccccggtcatccccttcctcggccatctccacctcgtggagaaaccgttccacgccgcgctgcgccgcctggccgcgcgcctcggcccggtcttctcgctgcggctcggctcgcgccgcgccgtggtggtgtcgtcggcggagtgcgccagggagtgcttcacggagcacgacgtgacgttcgccaaccggccccggttcccgtcgcagctgctcgtgtccttcgacggcgccgcgctcgccacgtccagctacggcccgcactggcgcaacctccgccgcgtcgccgccgtgcagctgctctccgcgcaccgcgtcgcctgcatgtcgggcgtcatcgccggcgaggtgcgcgccatggcgcgccggctgttccgcgccgccgccgccgcccccggcgacgccgcgcgggtccagctgaagcggaggctgttcgagctctccctcagcgtgctcatggagaccatcgcgcagaccaaggggacccggtcggaggccgacgccgacacggacatgtccgtggaggcccaggagttcaagaaggtggtggacgagatcatcccctacctcggcgccgccaacacgtgggactacctgccggtgttgcggtggttcgacgtgttcggcgtgaggaacaagatcctggccgccgtgagcaggagggacgccttcctgcatcgtctcatcgacaacgagcgccggaggctcgacgacgccggcgccgaaggcgacaagaagagcatgatcgccgtgctcctcaatctccagaagacggagccggaggtgtacacccataccatgatcacggccctctgcgcgaatttatttggggccggaacggagaccacgtcgacgacgacggagtgggcgatgtcgctgctgctgaaccacccggaggcgctgaggaaggcgcaggccgagatcgacgcaaccgtcggaaccacccggctggtcaccgccgacgacgtgccgcggctggcctacctgcagtgcatcgtgagcgagacgctgcgactgtacccggcggcgccgatgctgctgccgcaccagtcctcagcggactgcaaggtcggcggctacaacgtgccgagcggcacgatgctgatggtgaacgcgtacgccatccaccgcgacccggcggcatgggagcggccgctggagttcgtcccggagcggttcgagggcgggaaggccgaggggcggttcatgatcccgttcgggatgggccggcggcggtgccccggggagacgctggcgctgcggaccatcggcatggtgctggccacgctggtgcagtgcttcgactgggagcgcgtggacggcgcggaggtggacatgacggagggcggcgggctcaccatccccaaggccgtgccgctcgaggccgtgtgcaggccgcgcccggccatgcgcgacgtgcttcagagcctctgatcgccgagcttgttggcgtaataatgcatggttttgatagcctgctgatgtcgtagcaaataaactagtgagttgtgactttgagagcagagtcaggctagctaccatctgtaaattactcgtaacgaataagggttttgtaagaaccactagccgtagctatcttgcggtagcactgaaccagcaatctgtaatttagcttgcaacc

SEQ ID NO: 66188 - protein, 543 aa, Triticum aestivum
  peptide (1)..(543): Ceres Seq. ID no. 14307961
CHTRHTHPINPRPQVSRLETQHFPRTTMDKAYIAVLTIAFLFLLHYISGKISNGRRGKGAVQLPPSPPVIPFLGHLHLVEKPFHAALRRLAARLGPVFSLRLGSRRAVVVSSAECARECFTEHDVTFANRPRFPSQLLVSFDGAALATSSYGPHWRNLRRVAAVQLLSAHRVACMSGVIAGEVRAMARRLFRAAAAAPGDAARVQLKRRLFELSLSVLMETIAQTKGTRSEADADTDMSVEAQEFKKVVDEIIPYLGAANTWDYLPVLRWFDVFGVRNKILAAVSRRDAFLHRLIDNERRRLDDAGAEGDKKSMIAVLLNLQKTEPEVYTHTMITALCANLFGAGTETTSTTTEWAMSLLLNHPEALRKAQAEIDATVGTTRLVTADDVPRLAYLQCIVSETLRLYPAAPMLLPHQSSADCKVGGYNVPSGTMLMVNAYAIHRDPAAWERPLEFVPERFEGGKAEGRFMIPFGMGRRRCPGETLALRTIGMVLATLVQCFDWERVDGAEVDMTEGGGLTIPKAVPLEAVCRPRPAMRDVLQSL

SEQ ID NO: 66189 - protein, 516 aa, Triticum aestivum
  peptide (1)..(516): Ceres Seq. ID no. 14307962
MDKAYIAVLTIAFLFLLHYISGKISNGRRGKGAVQLPPSPPVIPFLGHLHLVEKPFHAALRRLAARLGPVFSLRLGSRRAVVVSSAECARECFTEHDVTFANRPRFPSQLLVSFDGAALATSSYGPHWRNLRRVAAVQLLSAHRVACMSGVIAGEVRAMARRLFRAAAAAPGDAARVQLKRRLFELSLSVLMETIAQTKGTRSEADADTDMSVEAQEFKKVVDEIIPYLGAANTWDYLPVLRWFDVFGVRNKILAAVSRRDAFLHRLIDNERRRLDDAGAEGDKKSMIAVLLNLQKTEPEVYTHTMITALCANLFGAGTETTSTTTEWAMSLLLNHPEALRKAQAEIDATVGTTRLVTADDVPRLAYLQCIVSETLRLYPAAPMLLPHQSSADCKVGGYNVPSGTMLMVNAYAIHRDPAAWERPLEFVPERFEGGKAEGRFMIPFGMGRRRCPGETLALRTIGMVLATLVQCFDWERVDGAEVDMTEGGGLTIPKAVPLEAVCRPRPAMRDVLQSL

SEQ ID NO: 66190 - protein, 369 aa, Triticum aestivum
  peptide (1)..(369): Ceres Seq. ID no. 14307963
MSGVIAGEVRAMARRLFRAAAAAPGDAARVQLKRRLFELSLSVLMETIAQTKGTRSEADADTDMSVEAQEFKKVVDEIIPYLGAANTWDYLPVLRWFDVFGVRNKILAAVSRRDAFLHRLIDNERRRLDDAGAEGDKKSMIAVLLNLQKTEPEVYTHTMITALCANLFGAGTETTSTTTEWAMSLLLNHPEALRKAQAEIDATVGTTRLVTADDVPRLAYLQCIVSETLRLYPAAPMLLPHQSSADCKVGGYNVPSGTMLMVNAYAIHRDPAAWERPLEFVPERFEGGKAEGRFMIPFGMGRRRCPGETLALRTIGMVLATLVQCFDWERVDGAEVDMTEGGGLTIPKAVPLEAVCRPRPAMRDVLQSL

SEQ ID NO: 66191 - DNA, 1755 bp, Triticum aestivum
  misc_feature (1)..(1755): Ceres Seq. ID no. 14307964
tcaccttcgaaccatttgcttccaagaaacttctcaagaatcccacgccaggcactgccatggatctttccatggctaccggcccggaagactccctcctcctgctcctcctcccggctaccaccctgctcccacctcctcttccaccgcgcaatgggcttcgccccgtcgggcgacgctcactggcgtgccctccgccgtctcgccgcggcgcacctcttcggcccgcgccgcgtggcggcctccgcaccccatcgctcctctattgggacgcgcatgctcggcgacgtcgcctccctcatggcccgccacggcgaagtcgcccctcggcggttcctgcacgcggcgtccctaaaccacgtcatggccgtcgtcttcggcaagcgctacgatgacttcacaagccaagaaggagtcgtcgtggaggagatggtaaacgaagggtacgacctcctcggcacgttcaactgggcagatcacctgccattcctcaagtggctcgacctccagggcgtgcgacgccggtgcaacaggttagtccggcaggtggaggcgtatgtcggtaacatcattcaggagcacaaagcgaggcgcgccagcggatcaggcattgcggatgagctctccggcgacttcgtcgatgtgctcctcggcctcgacggagaagacaagatgtcagagtccgacatgatcgccgttctttgggagatgatctttcgagggacggacacggtggcgatcttgatggagtggatcatggccaggatggtgctgcacccggagatccagtcgaaggcccgggcggagctggacgccgtggtggggcggggcagggccgtgatggacgaggacgtggcgaggctcccctacatccagtgcatcgtcaaggagacgctgcgcatgcacccgccgggcccgctcctctcgtgggcgcggctggccgtgcacgacgcgcacgtcggcggccacctcgtcccggccggcacgacggcgatggtgaacatgtgggccatcgcgcacgacgcggcggtgtggcccgagccggagctgttccggccggagcggttcatggaggaggaggtgagcgtgctgggcagcgacctccgcctggccccgttcggcgccgggcggcgcgtgtgccccggcaagatgctggccctcgccaccgtccacctctggctcgcccagctgctgcaccggttcgagtgggctcccgcgaccgcggcctcggggggcgtcgacctgtcagagcgcctgaagatgtcgctggagatggccacgccgctggtctgcagggccgtggctcgctagggccagagagagctgcacctgcatgctaccgccgccgtctacgttacctagcctgtcggcggcgccagcgttacttgctttattgcctagtatttattggctagccgttggaggctagcttgccagggtctagtagcactactgctttttggtcatctccatgcatgtacggctagctagctccgtctttgcgcggccgatccgttagccattgaaggaagctatagctagccatgggttactcctgctcgaggtcagcgagcaatcgcgcatgctgtcttgatggggtaattttggtcttctagatggagagttattagtgtgttttgtttttgttcgggagaaacatctggtgtctgtgagtgtgagttgtcatgtcgagtcgtagtagcgtggtgcttcaagaaaatttgtagtgagattttgaatattttttaatccgcg

SEQ ID NO: 66192 - protein, 436 aa, Triticum aestivum
  peptide (1)..(436): Ceres Seq. ID no. 14307965
SPSNHLLPRNFSRIPRQALPWIFPWLPARKTPSSCSSSRLPPCSHLLFHRAMGFAPSGDAHWRALRRLAAAHLFGPRRVAASAPHRSSIGTRMLGDVASLMARHGEVAPRRFLHAASLNHVMAVVFGKRYDDFTSQEGVVVEEMVNEGYDLLGTFNWADHLPFLKWLDLQGVRRRCNRLVRQVEAYVGNIIQEHKARRASGSGIADELSGDFVDVLLGLDGEDKMSESDMIAVLWEMIFRGTDTVAILMEWIMARMVLHPEIQSKARAELDAVVGRGRAVMDEDVARLPYIQCIVKETLRMHPPGPLLSWARLAVHDAHVGGHLVPAGTTAMVNMWAIAHDAAVWPEPELFRPERFMEEEVSVLGSDLRLAPFGAGRRVCPGKMLALATVHLWLAQLLHRFEWAPATAASGGVDLSERLKMSLEMATPLVCRAVAR

SEQ ID NO: 66193 - protein, 385 aa, Triticum aestivum
  peptide (1)..(385): Ceres Seq. ID no. 14307966
MGFAPSGDAHWRALRRLAAAHLFGPRRVAASAPHRSSIGTRMLGDVASLMARHGEVAPRRFLHAASLNHVMAVVFGKRYDDFTSQEGVVVEEMVNEGYDLLGTFNWADHLPFLKWLDLQGVRRRCNRLVRQVEAYVGNIIQEHKARRASGSGIADELSGDFVDVLLGLDGEDKMSESDMIAVLWEMIFRGTDTVAILMEWIMARMVLHPEIQSKARAELDAVVGRGRAVMDEDVARLPYIQCIVKETLRMHPPGPLLSWARLAVHDAHVGGHLVPAGTTAMVNMWAIAHDAAVWPEPELFRPERFMEEEVSVLGSDLRLAPFGAGRRVCPGKMLALATVHLWLAQLLHRFEWAPATAASGGVDLSERLKMSLEMATPLVCRAVAR

SEQ ID NO: 66194 - protein, 344 aa, Triticum aestivum
  peptide (1)..(344): Ceres Seq. ID no. 14307967
MLGDVASLMARHGEVAPRRFLHAASLNHVMAVVFGKRYDDFTSQEGVVVEEMVNEGYDLLGTFNWADHLPFLKWLDLQGVRRRCNRLVRQVEAYVGNIIQEHKARRASGSGIADELSGDFVDVLLGLDGEDKMSESDMIAVLWEMIFRGTDTVAILMEWIMARMVLHPEIQSKARAELDAVVGRGRAVMDEDVARLPYIQCIVKETLRMHPPGPLLSWARLAVHDAHVGGHLVPAGTTAMVNMWAIAHDAAVWPEPELFRPERFMEEEVSVLGSDLRLAPFGAGRRVCPGKMLALATVHLWLAQLLHRFEWAPATAASGGVDLSERLKMSLEMATPLVCRAVAR

SEQ ID NO: 66195 - DNA, 1535 bp, Triticum aestivum
  misc_feature (1)..(1535): Ceres Seq. ID no. 13657850
cccacctagaacatcctaatcgataagccgtcgtcctcgtcctcgccttccccatcaagctaaaacctccctcttttcgtcgaatccagccaccatgaaaccctaagaccaccgtcctcccgaatcctccattgccctccccgatgcaggcgttcgcgcgcctctcctcccccgccgcctccagaaaggtgatttcgggcgtctctggagcggtcgcaaggccgtgctaccggacatggcggtggaaggcgcatgcggcgccgctgtcggctccgggcccacccaagggcaagaagagggaatacatatccaagaatgaaaggaaggctaggatgaaggagtttattgagggttatcaggcatcaaatgacggtagatttccgactatgcaaatgattcgtcaaagtgttggagggggtcactacacaattagggatgtactctcggaagtgaagtataaccagataaagtttccgtttgataagtctaaggcagcccagcttcaggagacagctgaaggtgctgagcagtcaaggccagaggaggagagtggaaacagttcatttaactctcagagctttaacggaaatcaggatgaagatgacacgctcctatcccagaaagattctcctgctggcaatacaatcatggaaaacactgaagcttccatatctttggacgcaaaggaggtgaagttaccgctatataactccgaggcagcccagctccatgagacaggtgaatgtgctgagcaatcaaggctcggggaaagcgggagcagtgcattgaacccagatgacacactcctctcccagaaagactctgctatgggcactacaatcatagaaaacaatcaaccattgggatctctagagtcacaagactcctctcattacagtggagaaactgaggttgccaagcaagattcatgtactgcagcagcagatgcaaatgacctgactgtatcgaaacaagcagaaattgatggcatgaagactgaagcacccatatctttggaactggagactaagtcagacaacgggaatcgtcaaggggaaactgaagttaacaaggtgcattcgaacaatgtgaaaaaattccaggatccaactgaaccaactgtatctgatcaaactgaacatgacatagtgatcaaaggaaatgtacttcacagagaagagaaccccgaggtcgaggagcagggatcaagcaagacaagtcttttagggagcctgaaatcgcttgcttctgggatcagaaacttctggagaaatctgtaaatttgtctcattttggcttggagctaacacacatgaagtccccttatttatcattttgtgagcctggagcagcttgtgaagctttgtcaaggctacagagttaatgatccaagtgccccttgtttagtgttttttgcgaggctgaagaaagctgtaaagttttattttttgcactactgaacactggtctgactcctgcaaaaaaaaaaaaaaaaaagcttatcgataccgtcgacctcgagggggggcccggta

SEQ ID NO: 66196 - protein, 378 aa, Triticum aestivum
  peptide (1)..(378): Ceres Seq. ID no. 15219880
MQAFARLSSPAASRKVISGVSGAVARPCYRTWRWKAHAAPLSAPGPPKGKKREYISKNERKARMKEFIEGYQASNDGRFPTMQMIRQSVGGGHYTIRDVLSEVKYNQIKFPFDKSKAAQLQETAEGAEQSRPEEESGNSSFNSQSFNGNQDEDDTLLSQKDSPAGNTIMENTEASISLDAKEVKLPLYNSEAAQLHETGECAEQSRLGESGSSALNPDDTLLSQKDSAMGTTIIENNQPLGSLESQDSSHYSGETEVAKQDSCTAAADANDLTVSKQAEIDGMKTEAPISLELETKSDNGNRQGETEVNKVHSNNVKKFQDPTEPTVSDQTEHDIVIKGNVLHREENPEVEEQGSSKTSLLGSLKSLASGIRNFWRNL

SEQ ID NO: 66197 - protein, 315 aa, Triticum aestivum
  peptide (1)..(315): Ceres Seq. ID no. 15219881
MKEFIEGYQASNDGRFPTMQMIRQSVGGGHYTIRDVLSEVKYNQIKFPFDKSKAAQLQETAEGAEQSRPEEESGNSSFNSQSFNGNQDEDDTLLSQKDSPAGNTIMENTEASISLDAKEVKLPLYNSEAAQLHETGECAEQSRLGESGSSALNPDDTLLSQKDSAMGTTIIENNQPLGSLESQDSSHYSGETEVAKQDSCTAAADANDLTVSKQAEIDGMKTEAPISLELETKSDNGNRQGETEVNKVHSNNVKKFQDPTEPTVSDQTEHDIVIKGNVLHREENPEVEEQGSSKTSLLGSLKSLASGIRNFWRNL

SEQ ID NO: 66198 - protein, 297 aa, Triticum aestivum
  peptide (1)..(297): Ceres Seq. ID no. 15219882
MQMIRQSVGGGHYTIRDVLSEVKYNQIKFPFDKSKAAQLQETAEGAEQSRPEEESGNSSFNSQSFNGNQDEDDTLLSQKDSPAGNTIMENTEASISLDAKEVKLPLYNSEAAQLHETGECAEQSRLGESGSSALNPDDTLLSQKDSAMGTTIIENNQPLGSLESQDSSHYSGETEVAKQDSCTAAADANDLTVSKQAEIDGMKTEAPISLELETKSDNGNRQGETEVNKVHSNNVKKFQDPTEPTVSDQTEHDIVIKGNVLHREENPEVEEQGSSKTSLLGSLKSLASGIRNFWRNL

SEQ ID NO: 66199 - DNA, 1373 bp, Triticum aestivum
  misc_feature (1)..(1373): Ceres Seq. ID no. 13662898
agaacatcctaatcgaaaaacgctctcaagcaacaatctcaagtagtaggctggcagttcttctcttcccattgaaccatctgtacaagggagagaaaatcctgaagcctgactatcatcctaactagctagcttggtagaactatctcattgtgatctcctcatcaactccaaaggtagtcttttttttgagggggactccaaaggtagttaagatcttgcaatgggtggtctctctcttcagcacccgtgggcctttgcctttggcctcctaggcaacgtcatctcgttcatgacctacctggccccactgccgacgttctaccgaatctaccggagcaagtcgacgcaggggttccagtcggtcccttacgtggtggcgctctttagcgcgatgttgtggatctactacgcgctgctcaagtctgacgagtgcctcctcatcaccatcaactccgccggctgtgtcattgagaccatctacatcatcatctacctcacctatgcaccaaagcaagccaagctcttcacggcgaagatcctcctcctcctgaatgtgggtgtgttcggtcttatcctcctcctcaccctactcctgtcggagggcgagaagcgcgtcgtcatgctcgggtgggtttgcgtcggcttctctgtcagcgtcttcatcgcgcccctcagcgtcatccgccttgtggtgcgtacccggagcgtggagttcatgcctttttccctctccctctccctcactgtcagcgccgtcgtctggttcctctacggcctcctcatcaaggacaaatatgttgccctgccaaacattcttgggtttgccttcggtgtgattcaaatggggctttacgccctctaccgcaacgccatgccttcaccggctcccaagcaggtggacgatgctgatgccatcaaggtgcccgagcatgtcatccacatcgctaagcttggcccagcagctgccatcgagctcaacacacacaatcccatggaacgggggatgccaccgccgatggaggataacggcttggcctgcgccagcgacatgaccaaggggggcattgacatggttgagaaagcaacccgcgtcgagcaagtctaggcagtcatgcgttcatgcctaggatatatgcgtgcacttaagccatgatgggcaggggtcgagcaaaggagctatagggagagaaatgcatgcgcgtgagcttgtgatttccactgtcgacgttccattagttgctcgagccagttattttatcctggtcgtattcattagtatgttcatctatcaattccatgtaatggtcttattataaaagttgccattttctaatgaagcatagcaggataagaaaatggcatctcagtcc

SEQ ID NO: 66200 - protein, 294 aa, Triticum aestivum
  peptide (1)..(294): Ceres Seq. ID no. 15220195
MGGLSLQHPWAFAFGLLGNVISFMTYLAPLPTFYRIYRSKSTQGFQSVPYVVALFSAMLWIYYALLKSDECLLITINSAGCVIETIYIIIYLTYAPKQAKLFTAKILLLLNVGVFGLILLLTLLLSEGEKRVVMLGWVCVGFSVSVFIAPLSVIRLVVRTRSVEFMPFSLSLSLTVSAVVWFLYGLLIKDKYVALPNILGFAFGVIQMGLYALYRNAMPSPAPKQVDDADAIKVPEHVIHIAKLGPAAAIELNTHNPMERGMPPPMEDNGLACASDMTKGGIDMVEKATRVEQV

SEQ ID NO: 66201 - protein, 271 aa, Triticum aestivum
  peptide (1)..(271): Ceres Seq. ID no. 15220196
MTYLAPLPTFYRIYRSKSTQGFQSVPYVVALFSAMLWIYYALLKSDECLLITINSAGCVIETIYIIIYLTYAPKQAKLFTAKILLLLNVGVFGLILLLTLLLSEGEKRVVMLGWVCVGFSVSVFIAPLSVIRLVVRTRSVEFMPFSLSLSLTVSAVVWFLYGLLIKDKYVALPNILGFAFGVIQMGLYALYRNAMPSPAPKQVDDADAIKVPEHVIHIAKLGPAAAIELNTHNPMERGMPPPMEDNGLACASDMTKGGIDMVEKATRVEQV

SEQ ID NO: 66202 - protein, 237 aa, Triticum aestivum
  peptide (1)..(237): Ceres Seq. ID no. 15220197
MLWIYYALLKSDECLLITINSAGCVIETIYIIIYLTYAPKQAKLFTAKILLLLNVGVFGLILLLTLLLSEGEKRVVMLGWVCVGFSVSVFIAPLSVIRLVVRTRSVEFMPFSLSLSLTVSAVVWFLYGLLIKDKYVALPNILGFAFGVIQMGLYALYRNAMPSPAPKQVDDADAIKVPEHVIHIAKLGPAAAIELNTHNPMERGMPPPMEDNGLACASDMTKGGIDMVEKATRVEQV

SEQ ID NO: 66203 - DNA, 1632 bp, Triticum aestivum
  misc_feature (1)..(1632): Ceres Seq. ID no. 14308049
atccaatcgccagcctccttgtattcatgcgttggtgcaacttctttcttagcttcgtacgttcagctagctcagtatgaagatcacagtgcggtcatccaagtccatcaagcctgactatggcagcggccacctgatggctccggccacggccaacgtcgtcccgctcacagtgttcgacaaagccaacttcgacatgcacgtctctgtcatctacaccttccacccaccagccccgtcccatgacgtcctcgaggccgggctcgccaaggccctcgccgactaccgcgagtgggccggccgtctcaccctggacgccaacggcaagcgctgcgccatcctactcaacgacgccggtgcgcgattcgtcgaagcgacggccggcgtggcgctcgacagcgtcatgcctctgcagcccactcccgaggtgctgagcctgcacccgaccggcggtggcgacgagctgctgttgatccaggccacgaggttcgcatgcgggtccctcgtcgttggcctgactgggcaccacatggtcaccgacggtggcggctggtgcaacctcatcatcgcgtggggtcaggccacgcgaggcgcctccattgaccctgtcccagtgcacgatcggccgtccttcttcctgccgcgcaacccgcttaagatagagtacgagcaccacagcatcgagttcaagccatacgacgaccgcaatagtacggccggcggcggcgacgacgaggtggtggtagagagggtccacttcagtatggaccacatcgcaaaactgaagtcgcaggcgtcagctgtggccggcacgggccggccgtacagcaccgtgcagtgcgtggtggcgcacctgtggcggtgcatgacgctggcgcgcggcctcgatgggcgtgacgtcaccggtctgttcatcgcagtggacgggcgagcgcggatgagccagcgggtgccggacgggtacaccggcaacgtggtgctctgggcgcggcctacagccaccgcgggggaggtcgtgaacaggccgctgcaccacctggcggagctcatcagcggggcggttgcccggattgacgacgcctacttcaagtctttcatcgacttcgcctgctccggggccgtggaggaggaggggctggtgccgactgctgacccggcggtgacggtgcttagccccaacgtcgaggtggacagctggctgcggatcccgttctatgatctggatctgggcagcggccggcccttcttcttcatgcccagctacctgccagtggagggaggggtcatcctcgtgccttccttctatggcgatgggagcgtggatgcctacgtgccccttttcagccgccacatggacgccttcaagaactgctgcacatccggcctccccaaactctgatttttatcccgggattgtaactctcagtcagtcaatgcggtagccgtctgatctggtgcgatatgattcgtaccatcttctggcgttgtattgctttggtggtcttctgaatggccttctatttgtgcctttgtatgcacaaggagatgcattgtgtgcgtgagtgttttgaaatttgtatttcgctttagctacaggtcagtcgcctgaaaaattaagttagggtcactatc

SEQ ID NO: 66204 - protein, 440 aa, Triticum aestivum
  peptide (1)..(440): Ceres Seq. ID no. 14308050
MKITVRSSKSIKPDYGSGHLMAPATANVVPLTVFDKANFDMHVSVIYTFHPPAPSHDVLEAGLAKALADYREWAGRLTLDANGKRCAILLNDAGARFVEATAGVALDSVMPLQPTPEVLSLHPTGGGDELLLIQATRFACGSLVVGLTGHHMVTDGGGWCNLIIAWGQATRGASIDPVPVHDRPSFFLPRNPLKIEYEHHSIEFKPYDDRNSTAGGGDDEVVVERVHFSMDHIAKLKSQASAVAGTGRPYSTVQCVVAHLWRCMTLARGLDGRDVTGLFIAVDGRARMSQRVPDGYTGNVVLWARPTATAGEVVNRPLHHLAELISGAVARIDDAYFKSFIDFACSGAVEEEGLVPTADPAVTVLSPNVEVDSWLRIPFYDLDLGSGRPFFFMPSYLPVEGGVILVPSFYGDGSVDAYVPLFSRHMDAFKNCCTSGLPKL

SEQ ID NO: 66205 - protein, 420 aa, Triticum aestivum
  peptide (1)..(420): Ceres Seq. ID no. 14308051
MAPATANVVPLTVFDKANFDMHVSVIYTFHPPAPSHDVLEAGLAKALADYREWAGRLTLDANGKRCAILLNDAGARFVEATAGVALDSVMPLQPTPEVLSLHPTGGGDELLLIQATRFACGSLVVGLTGHHMVTDGGGWCNLIIAWGQATRGASIDPVPVHDRPSFFLPRNPLKIEYEHHSIEFKPYDDRNSTAGGGDDEVVVERVHFSMDHIAKLKSQASAVAGTGRPYSTVQCVVAHLWRCMTLARGLDGRDVTGLFIAVDGRARMSQRVPDGYTGNVVLWARPTATAGEVVNRPLHHLAELISGAVARIDDAYFKSFIDFACSGAVEEEGLVPTADPAVTVLSPNVEVDSWLRIPFYDLDLGSGRPFFFMPSYLPVEGGVILVPSFYGDGSVDAYVPLFSRHMDAFKNCCTSGLPKL

SEQ ID NO: 66206 - protein, 400 aa, Triticum aestivum
  peptide (1)..(400): Ceres Seq. ID no. 14308052
MHVSVIYTFHPPAPSHDVLEAGLAKALADYREWAGRLTLDANGKRCAILLNDAGARFVEATAGVALDSVMPLQPTPEVLSLHPTGGGDELLLIQATRFACGSLVVGLTGHHMVTDGGGWCNLIIAWGQATRGASIDPVPVHDRPSFFLPRNPLKIEYEHHSIEFKPYDDRNSTAGGGDDEVVVERVHFSMDHIAKLKSQASAVAGTGRPYSTVQCVVAHLWRCMTLARGLDGRDVTGLFIAVDGRARMSQRVPDGYTGNVVLWARPTATAGEVVNRPLHHLAELISGAVARIDDAYFKSFIDFACSGAVEEEGLVPTADPAVTVLSPNVEVDSWLRIPFYDLDLGSGRPFFFMPSYLPVEGGVILVPSFYGDGSVDAYVPLFSRHMDAFKNCCTSGLPKL

SEQ ID NO: 66207 - DNA, 1681 bp, Triticum aestivum
  misc_feature (1)..(1681): Ceres Seq. ID no. 14307976
aacccgaacagttagacagagaaaaatcctccaagcgcatcgccacccgctgccgcgagccgccgcccgccggccccagccccgccacaggctacagcgcgccgccaccgcctaccccgccggcactcctacccctaccccaagtgcctcccacgctcgctacgttctaccgccggcgacactcgacgccgcggccgttgccggctcccacacccgcgggcctttatctccccggcggccgccgccgccgccctgctcgtccagcgggctggccctgtccatggggcgtacgggctacccgcgcccttcgacgcccgcacgcgcctccttctgcccttccgccgcggacgatgccgacttctctgagtctaatgcgatcctggtggtggccacgccctgcgagagtctgttgctgctcagcccagcgtcttgccgtggcgggcgcctgtcgtcggagctctggttgtcggttccagagtcgggtggttccacacaggggcgcatatcccgttgtgccaccaatcacttaattcggctctcttgagctgcccggcttcggcggcgaagatgatggcgatgcctaggacacaacggccacatgggatgaaactagcagagatgaagaaggcggtggtcgttgggaggagaagattgcccggaagctggaggacgtgcaccagctgcggttgctggacaaccgctacgtttagtggctgagggaattgttgggctacgagaatcagtcgctgataagagggctgaggctgagaagatcaagagggatcagagattgtgctcaattgttggtggtcaggacgtcaggagttatctgaagaaaggactcactatctggttaaatgttccattggatgcccttgcaagaaggattgctgcggtggttcagcgtcactgcccctcctgcatcaacaatctggtgatccatatgcaaaggttcagaagagctattttgtgtacatgagttgctactggcagtggacagattgtctatgcagagtgcgtagagaaaaaaatgctcacatacaaacacaaacgacatccagtaggcgcttggaacacccgacagattgaaagcacagaagcaaagatttccaatacgaggccacgatgcccgacagagatgtagccaatatgtgcccaatccttatttcttgatgttggaacaacaagtgttgaggcagggaaaaggcagcagtagaggcatgggcacttcagaaaagggtgttgactgttctgattgaggccagttgaaggcttccacgtgccacctccttcgcctcctacgccgcgtcgagaaaggcggacacgtgcggtaggagccaagggggaacagggaaaggcggacacgagattcgtgaacccagagaagagaatgtatgcgagcttgtccacctcggcggtgtcagccgccagtgccaccgtgtcccgcctccgcctggcctggtcgcaacaaaagtatgactgcaggtgtggttcattcagttttgaagtttgatttacttgcttgtgcatgtgtgtgtgtattctaagagagagggagagattattctgttctagccagtcgtatttctggacaaatctgctcccctccactccttttttatttgccttaaatctgaacatgaaaagcagttacaaattgagagcaacagagtaaacgttc

SEQ ID NO: 66208 - protein, 180 aa, Triticum aestivum
  peptide (1)..(180): Ceres Seq. ID no. 14307977
TRTVRQRKILQAHRHPLPRAAARRPQPRHRLQRAATAYPAGTPTPTPSASHARYVLPPATLDAAAVAGSHTRGPLSPRRPPPPPCSSSGLALSMGRTGYPRPSTPARASFCPSAADDADFSESNAILVVATPCESLLLLSPASCRGGRLSSELWLSVPESGGSTQGRISRCATNHLIRLS

SEQ ID NO: 66209 - protein, 175 aa, Triticum aestivum
  peptide (1)..(175): Ceres Seq. ID no. 14307978
PEQLDREKSSKRIATRCREPPPAGPSPATGYSAPPPPTPPALLPLPQVPPTLATFYRRRHSTPRPLPAPTPAGLYLPGGRRRRPARPAGWPCPWGVRATRALRRPHAPPSALPPRTMPTSLSLMRSWWWPRPARVCCCSAQRLAVAGACRRSSGCRFQSRVVPHRGAYPVVPPIT

SEQ ID NO: 66210 - protein, 87 aa, Triticum aestivum
  peptide (1)..(87): Ceres Seq. ID no. 14307979
MGRTGYPRPSTPARASFCPSAADDADFSESNAILVVATPCESLLLLSPASCRGGRLSSELWLSVPESGGSTQGRISRCATNHLIRLS

SEQ ID NO: 66211 - DNA, 1134 bp, Triticum aestivum
  misc_feature (1)..(1134): Ceres Seq. ID no. 14301822
acatgctatagtccacaggtccgggcagtccagttttccctccattcccccgcggagaaaaaaaaggggaaccgcgggatttcgccggagatgtcgtcggcggccacgaagctcgccaccgcggccgacgctacctcgacggaggcccaaaccctcgtcttggacatgcgcaaggcgctcagctccatgaagtccctcgccgtggagtacgagagggccggcaagcccgacaaggtgaagcagctggaggacgcggtgcaggagctggtggcctcgtacgaggactgcgcgtacctcgccgaggcggtgaagaaggtgcccggggcgtaccagccgtccgaccaggcgactgatttcagaaagctgatcgatgcggaggttgagaaagtcaaggggacctcgcgatcgtcgggacacaaggaccagctcatacggcagttcaaagaggctgtttgggatgttcaccatgcaggtcaaccgatgcctggtgatgaacaagaggaacttgttatgactagcacccagaacaacatcctaaatacagtatgcccattgactatgaagcctatagtcgacttggaaaatcctgttcgctgcatcgattgcaggcacatctatgacaaggatccaatcctgaggtacatccggacgaacaaagctccgaattgccccattgcaggctgcccggcggtcctgcaaccggcgaagatcgtctgcgacaccttccttcgtatggagatcgaggagctgcgggcgtcgggcccggccgctccgaacgcctctgagatagaggatatctcggaccacgacgaggacgaggacgaggatccgatggacgaagacgatgacgagtgatacgcgtctggagaaaccaaccttggtggattcttggtattttgtagggatgatgataggtgttggtactctgttttcaggtcgcactggtatgtcgtcgtgtgtggaatcgggggatgtggctcccctggcaattagcttaaccaacgtaacaagcttagctatgaggatatttattcttgttctgccctgcttttcatcagtctgcagtgctcgttcgtttgtctgattggtgatgatttggtgagactgaatgaccccaatctaaaaatatttcac

SEQ ID NO: 66212 - protein, 284 aa, Triticum aestivum
  peptide (1)..(284): Ceres Seq. ID no. 14301823
TCYSPQVRAVQFSLHSPAEKKKGNRGISPEMSSAATKLATAADATSTEAQTLVLDMRKALSSMKSLAVEYERAGKPDKVKQLEDAVQELVASYEDCAYLAEAVKKVPGAYQPSDQATDFRKLIDAEVEKVKGTSRSSGHKDQLIRQFKEAVWDVHHAGQPMPGDEQEELVMTSTQNNILNTVCPLTMKPIVDLENPVRCIDCRHIYDKDPILRYIRTNKAPNCPIAGCPAVLQPAKIVCDTFLRMEIEELRASGPAAPNASEIEDISDHDEDEDEDPMDEDDDE

SEQ ID NO: 66213 - protein, 254 aa, Triticum aestivum
  peptide (1)..(254): Ceres Seq. ID no. 14301824
MSSAATKLATAADATSTEAQTLVLDMRKALSSMKSLAVEYERAGKPDKVKQLEDAVQELVASYEDCAYLAEAVKKVPGAYQPSDQATDFRKLIDAEVEKVKGTSRSSGHKDQLIRQFKEAVWDVHHAGQPMPGDEQEELVMTSTQNNILNTVCPLTMKPIVDLENPVRCIDCRHIYDKDPILRYIRTNKAPNCPIAGCPAVLQPAKIVCDTFLRMEIEELRASGPAAPNASEIEDISDHDEDEDEDPMDEDDDE

SEQ ID NO: 66214 - protein, 229 aa, Triticum aestivum
  peptide (1)..(229): Ceres Seq. ID no. 14301825
MRKALSSMKSLAVEYERAGKPDKVKQLEDAVQELVASYEDCAYLAEAVKKVPGAYQPSDQATDFRKLIDAEVEKVKGTSRSSGHKDQLIRQFKEAVWDVHHAGQPMPGDEQEELVMTSTQNNILNTVCPLTMKPIVDLENPVRCIDCRHIYDKDPILRYIRTNKAPNCPIAGCPAVLQPAKIVCDTFLRMEIEELRASGPAAPNASEIEDISDHDEDEDEDPMDEDDDE

SEQ ID NO: 66215 - DNA, 926 bp, Triticum aestivum
  misc_feature (1)..(926): Ceres Seq. ID no. 14301874
ccgtgtctccctccctccctccctctccaccgcccccctagtctgacaccgccaaaatcccaccgcgccacgctgatggcttcgccgccgacgggacccgcggcgccggcgggcttggagagcatggaggggctcgccctcgacatcatcatcgccaaggccggcgcgcgccccgcggccgcgctcgcctgcgccagcacgcacctgcgcgccgccgtggccgaggacgccgtctggcgcagcttctgcgcccgagacctcggcctcgacgcgcccctcgaccccgaggaccgcccgctcccctccttcaaggtacgtgcatctgctgtctttgtgccagaacatcctcgtcgggggcatttgggcacacatctgtacagctattccatccgcctgtcagttcctgaggcatgcatgctaggtggggtttacttttcttcctgccagcttcactcacgccactggatcatccgatgtaaagacacggttgtttcggatatgcatggggaaggtgttattggggagcaccctttacttttaccagggcaggacgagtttgtctatgagagctgcacgccgctgaatggcagtagtggatctgtggagggctcttttacatttgtgcctgggaggttgacccagccagaaggaaaaccattcgacgtcacggtggctccgttccctctggaagtacccgactacatcttctgagcatagtatgtgcacctaataacagtgtagtatcttggtagaaacaccgaacatatctctagtactctgtctgctgtagcaaagttgctctgcctggagttgatcttgtcgatgtaatgttaactaaaggacgcaaatggttgtcgtgcgccgaccttcttccggttcctggctgtggccctaaaggaatctgtagcaggtggagcttgtttgtt

SEQ ID NO: 66216 - protein, 236 aa, Triticum aestivum
  peptide (1)..(236): Ceres Seq. ID no. 14301875
PCLPPSLPLHRPPSLTPPKSHRATLMASPPTGPAAPAGLESMEGLALDIIIAKAGARPAAALACASTHLRAAVAEDAVWRSFCARDLGLDAPLDPEDRPLPSFKVRASAVFVPEHPRRGHLGTHLYSYSIRLSVPEACMLGGVYFSSCQLHSRHWIIRCKDTVVSDMHGEGVIGEHPLLLPGQDEFVYESCTPLNGSSGSVEGSFTFVPGRLTQPEGKPFDVTVAPFPLEVPDYIF

SEQ ID NO: 66217 - protein, 211 aa, Triticum aestivum
  peptide (1)..(211): Ceres Seq. ID no. 14301876
MASPPTGPAAPAGLESMEGLALDIIIAKAGARPAAALACASTHLRAAVAEDAVWRSFCARDLGLDAPLDPEDRPLPSFKVRASAVFVPEHPRRGHLGTHLYSYSIRLSVPEACMLGGVYFSSCQLHSRHWIIRCKDTVVSDMHGEGVIGEHPLLLPGQDEFVYESCTPLNGSSGSVEGSFTFVPGRLTQPEGKPFDVTVAPFPLEVPDYIF

SEQ ID NO: 66218 - protein, 195 aa, Triticum aestivum
  peptide (1)..(195): Ceres Seq. ID no. 14301877
MEGLALDIIIAKAGARPAAALACASTHLRAAVAEDAVWRSFCARDLGLDAPLDPEDRPLPSFKVRASAVFVPEHPRRGHLGTHLYSYSIRLSVPEACMLGGVYFSSCQLHSRHWIIRCKDTVVSDMHGEGVIGEHPLLLPGQDEFVYESCTPLNGSSGSVEGSFTFVPGRLTQPEGKPFDVTVAPFPLEVPDYIF

SEQ ID NO: 66219 - DNA, 775 bp, Triticum aestivum
  misc_feature (1)..(775): Ceres Seq. ID no. 13598028
atcggtccatctccatcgctctctcctcttctacctcgccggccagccttctccttggatctcgtcgcagcacggcaacggcaacggcaatggtggtctcgtacacgcaggagcacgtgtacctccacccctggcaccgggtcaccgcggcggcgtggcgcaagttcaccgacccggcggcgctctcccacatcctggacgtgcagacgctgtcccgggacgtcgacccgcgcgccggccggctccacgccgtgcgggccatcgcgggccggcccccgccgctcccgctcctcctccgcggcctcgcggccaccgccggcgccggcgacgtggtgctctgcgtggagcgcacctccgtggacgcggccgcgcgcgccatgcgggtggtctcccgcaacgccacgttccggcggctggtggacgtggaggagcggtgcagctacgcgccccacccggagcggccggacgagtggacggtgttcacgcaggagacgagcatccggtgcgcgccgctggcggccgtgtcggccacggtggccgagatggtggagcggcggtgcgccgagagcttcgcgcagaacgccgccagggggcaggaggtcgtcgagaggatctgcgacggcctcgcgctcgccggccgcgtgccaggaccctcccctgccgacggagaagaaccgtagagacagagcactgcgcagagcatgctcgctctctgttatttactgatgtgtaaatactggctgggaggcaataagaagtgaaattctgtaaattc

SEQ ID NO: 66220 - protein, 243 aa, Triticum aestivum
  peptide (1)..(243): Ceres Seq. ID no. 13598029
SVHLHRSLLFYLAGQPSPWISSQHGNGNGNGGLVHAGARVPPPLAPGHRGGVAQVHRPGGALPHPGRADAVPGRRPARRPAPRRAGHRGPAPAAPAPPPRPRGHRRRRRRGALRGAHLRGRGRARHAGGLPQRHVPAAGGRGGAVQLRAPPGAAGRVDGVHAGDEHPVRAAGGRVGHGGRDGGAAVRRELRAERRQGAGGRREDLRRPRARRPRARTLPCRRRRTVETEHCAEHARSLLFTDV

SEQ ID NO: 66221 - protein, 241 aa, Triticum aestivum
  peptide (1)..(241): Ceres Seq. ID no. 13598030
IGPSPSLSPLLPRRPAFSLDLVAARQRQRQWWSRTRRSTCTSTPGTGSPRRRGASSPTRRRSPTSWTCRRCPGTSTRAPAGSTPCGPSRAGPRRSRSSSAASRPPPAPATWCSAWSAPPWTRPRAPCGWSPATPRSGGWWTWRSGAATRPTRSGRTSGRCSRRRRASGARRWRPCRPRWPRWWSGGAPRASRRTPPGGRRSSRGSATASRSPAACQDPPLPTEKNRRDRALRRACSLSVIY

SEQ ID NO: 66222 - protein, 225 aa, Triticum aestivum
  peptide (1)..(225): Ceres Seq. ID no. 13598031
RSISIALSSSTSPASLLLGSRRSTATATAMVVSYTQEHVYLHPWHRVTAAAWRKFTDPAALSHILDVQTLSRDVDPRAGRLHAVRAIAGRPPPLPLLLRGLAATAGAGDVVLCVERTSVDAAARAMRVVSRNATFRRLVDVEERCSYAPHPERPDEWTVFTQETSIRCAPLAAVSATVAEMVERRCAESFAQNAARGQEVVERICDGLALAGRVPGPSPADGEEP

SEQ ID NO: 66223 - protein, 196 aa, Triticum aestivum
  peptide (1)..(196): Ceres Seq. ID no. 13598032
MVVSYTQEHVYLHPWHRVTAAAWRKFTDPAALSHILDVQTLSRDVDPRAGRLHAVRAIAGRPPPLPLLLRGLAATAGAGDVVLCVERTSVDAAARAMRVVSRNATFRRLVDVEERCSYAPHPERPDEWTVFTQETSIRCAPLAAVSATVAEMVERRCAESFAQNAARGQEVVERICDGLALAGRVPGPSPADGEEP

SEQ ID NO: 66224 - DNA, 1808 bp, Triticum aestivum
  misc_feature (1)..(1808): Ceres Seq. ID no. 15170167
gtttctccctgtctcagtccctagctaccaccaccgcagcgtgcgcagccatggacgcggccacctcgacgacgctcctctacggggcgctgctcgcggctgctttcctctacgtcgccaccatccagcgtggccgcggcaggggcgaaggcggcctgccgccgggccccaggggcctgccgctcttgggcagcctcctgtccctcgacccggacctgcacacctacttcgccggcctcgccaacaagtacagccccatcttctccatccgactcggctccaagctgggtattgtcatcacctccccggcgctggcccgcgaggtgctgcgcgacaacgacctcgtcttctccaaccgggacatcccggacgccgcgcgctccatctcctacggcggtggccagaacatcgtctggaaccccgtcggtcccacctggcgtctgctccgccgcgtctgcgtccgcgagatgctcagccctgctggcctgcagaatgtgcacggcctccgccgccgcgagttcagggccacgctcgcgcacctgcactccatggccagcgccggcatgccggttgacgtcggcgcccagatgttcctcaccaccatgaacgtcatcaccggcacgctgtggggaggcaacatagggaccgagagcgagcggacggcggtgggcaaggagttccgggagcttgtcgcggagatcaccgagatgctcggcgcacccaacgtgtcagacttcttcccggcgctggcgccgttcgacctgcagggaatccggaagaagtcggacgcgctcaaggagcggttcgacgagatcttcggcaggatcatagagaagagggtcgaggccgaccacgccggcggcgacacggcggaagacttcctcgaatacatgctcaagatggagaaggaaggtggcgacgggaaggccgccttcaccatgaccaacgtcaaggccctgctcatggatatggtggttgggggcacagagacgacgtcgaacacggtggaatgggccatggcggagatgctacaaaaccgggggatactgcggaaggtgcgggaggaactcgacgcggtggttggtatcgatggcgtggtggaggaatcggatctcccgcagctgcactatctgcatctggtggtcaaggagacgctccggctgcacccggcgctgccgctcatggtgccgcactgccccagcgaagacacgaccgtcggcggccaccgcgtcccggcgggaagccgcgtgtttgtcaacgcgtgggcgatcatgagggaccccgctgcgtggaaggatccggcgaagttcatcccggagaggttcgcctctcaggcgagcgacggtgacagcgggcggaaggtggacttcaccggcagcgagctggactacgtgccgttcgggtcggggaggaggatctgcgcgggcatcgccatggccgagaggatgacggcatactctgtggccatgctgctgcaggccttcgactgggagctgccggagggagcggcgctggacctgacagagaagttcggcatcgtcatgaagaaggccacgccgctggtcgccgttccgacgccgaggctttccagacccgagctctattccgcatagatagctgatcctactccatgaccatgactccgtgctcgaatcagttcagcctgcagtacatttcccctctcgtgctgttggtccaaacaaaagtttgcttttctacggtttcaattgtctgcttcttctgtagtagcactagcagtgtgcagacagcatctattatatctatatacctattacaatatttatatg

SEQ ID NO: 66225 - protein, 536 aa, Triticum aestivum
  peptide (1)..(536): Ceres Seq. ID no. 15170168
FSLSQSLATTTAACAAMDAATSTTLLYGALLAAAFLYVATIQRGRGRGEGGLPPGPRGLPLLGSLLSLDPDLHTYFAGLANKYSPIFSIRLGSKLGIVITSPALAREVLRDNDLVFSNRDIPDAARSISYGGGQNIVWNPVGPTWRLLRRVCVREMLSPAGLQNVHGLRRREFRATLAHLHSMASAGMPVDVGAQMFLTTMNVITGTLWGGNIGTESERTAVGKEFRELVAEITEMLGAPNVSDFFPALAPFDLQGIRKKSDALKERFDEIFGRIIEKRVEADHAGGDTAEDFLEYMLKMEKEGGDGKAAFTMTNVKALLMDMVVGGTETTSNTVEWAMAEMLQNRGILRKVREELDAVVGIDGVVEESDLPQLHYLHLVVKETLRLHPALPLMVPHCPSEDTTVGGHRVPAGSRVFVNAWAIMRDPAAWKDPAKFIPERFASQASDGDSGRKVDFTGSELDYVPFGSGRRICAGIAMAERMTAYSVAMLLQAFDWELPEGAALDLTEKFGIVMKKATPLVAVPTPRLSRPELYSA

SEQ ID NO: 66226 - protein, 520 aa, Triticum aestivum
  peptide (1)..(520): Ceres Seq. ID no. 15170169
MDAATSTTLLYGALLAAAFLYVATIQRGRGRGEGGLPPGPRGLPLLGSLLSLDPDLHTYFAGLANKYSPIFSIRLGSKLGIVITSPALAREVLRDNDLVFSNRDIPDAARSISYGGGQNIVWNPVGPTWRLLRRVCVREMLSPAGLQNVHGLRRREFRATLAHLHSMASAGMPVDVGAQMFLTTMNVITGTLWGGNIGTESERTAVGKEFRELVAEITEMLGAPNVSDFFPALAPFDLQGIRKKSDALKERFDEIFGRIIEKRVEADHAGGDTAEDFLEYMLKMEKEGGDGKAAFTMTNVKALLMDMVVGGTETTSNTVEWAMAEMLQNRGILRKVREELDAVVGIDGVVEESDLPQLHYLHLVVKETLRLHPALPLMVPHCPSEDTTVGGHRVPAGSRVFVNAWAIMRDPAAWKDPAKFIPERFASQASDGDSGRKVDFTGSELDYVPFGSGRRICAGIAMAERMTAYSVAMLLQAFDWELPEGAALDLTEKFGIVMKKATPLVAVPTPRLSRPELYSA

SEQ ID NO: 66227 - protein, 381 aa, Triticum aestivum
  peptide (1)..(381): Ceres Seq. ID no. 15170170
MLSPAGLQNVHGLRRREFRATLAHLHSMASAGMPVDVGAQMFLTTMNVITGTLWGGNIGTESERTAVGKEFRELVAEITEMLGAPNVSDFFPALAPFDLQGIRKKSDALKERFDEIFGRIIEKRVEADHAGGDTAEDFLEYMLKMEKEGGDGKAAFTMTNVKALLMDMVVGGTETTSNTVEWAMAEMLQNRGILRKVREELDAVVGIDGVVEESDLPQLHYLHLVVKETLRLHPALPLMVPHCPSEDTTVGGHRVPAGSRVFVNAWAIMRDPAAWKDPAKFIPERFASQASDGDSGRKVDFTGSELDYVPFGSGRRICAGIAMAERMTAYSVAMLLQAFDWELPEGAALDLTEKFGIVMKKATPLVAVPTPRLSRPELYSA

SEQ ID NO: 66228 - DNA, 1207 bp, Triticum aestivum
  misc_feature (1)..(1207): Ceres Seq. ID no. 14303704
aaaaccctaaactcaaccccgcacctccgccatgcgaggccgccatcatctgcttggcttcctccgccgcgccgcggcaggctccttctccgcggcccgccatgctgattctctctccctcctacaccccatcccgccgggaaatggcgccgccgttcccatcagcacccgcttcctctcctcgcgcaccggcggcgccgcgcggagcctaatcgaggacgaggctgacctcagcgactgggtcagcgacatcaaggccgactccttcaaccttggtctcagcagcggcgacgagcgcgaggcctccacccgcaaacccgctgcctccaggggaggccgaagagggagggattcggggggaccgccgacgaggtcgaggtttgatggcggtgagttcggcggagagagacgcggcggggattttggcggtgataggcgcggtggtcggttcggcggcgatagtcgtggtggtcggtttggtggcgacaggcgtggtggtcgattcggcagcgatagtcgtggtggtcggttcgggggcgataggcctggctctgatcgaagggggagggtggtgagttctgatctcagtgatgatggtgaatctgggtttggttctgcgaggggaaggcgagggcggggcgggatgtcatcgggtgtgtcacacaggggagggaggtatggtgatttggatgatgaagaatctgggattgggtctcccaggggaaggcgaggtcgtggtgggaggacaacagatttgtcaggtagaggacgcaggggaagcgatggccgcctccaccgtcgcatccaaggccctggccctcgtcgccatcctgtcggtcgccgccttctccgtcgtctccgcccaggaggccccggcgcccagccccgtgtccgccgccggcgtcgcgatgccgtccctcgccgctgcgctcgtcgcctccggtgccgccttcctcttcgccgccgttcgccactgaagagactgcctccgtcttccccgtcgacctacctagtacaaccacatatagatccatttatttatcactagtgatttgttcgttcgtgtcattttgcccagatctgctactgtgtgtcactcggtgatggtgattagtatctccttattagtagagattgtacccgtgtgcttgtagatactatttatccggtttgatctagtattcgtatgatcgctccatttagtttt

SEQ ID NO: 66229 - protein, 338 aa, Triticum aestivum
  peptide (1)..(338): Ceres Seq. ID no. 14303705
MRGRHHLLGFLRRAAAGSFSAARHADSLSLLHPIPPGNGAAVPISTRFLSSRTGGAARSLIEDEADLSDWVSDIKADSFNLGLSSGDEREASTRKPAASRGGRRGRDSGGPPTRSRFDGGEFGGERRGGDFGGDRRGGRFGGDSRGGRFGGDRRGGRFGSDSRGGRFGGDRPGSDRRGRVVSSDLSDDGESGFGSARGRRGRGGMSSGVSHRGGRYGDLDDEESGIGSPRGRRGRGGRTTDLSGRGRRGSDGRLHRRIQGPGPRRHPVGRRLLRRLRPGGPGAQPRVRRRRRDAVPRRCARRLRCRLPLRRRSPLKRLPPSSPSTYLVQPHIDPFIYH

SEQ ID NO: 66230 - DNA, 1448 bp, Triticum aestivum
  misc_feature (1)..(1448): Ceres Seq. ID no. 13657914
gtttgaccggcacacggtacagggctagaagaacggcggcaagcacggagccatttttttctcgtttatttactacggcggggagcacagggctatcgggagcatctcctccgcgcactccccgccgtgtcccattcgccgatgcttcgccgtcgcccatattcatcttccaagaagctcactcctccgctgccatagccgcccgccgcgccatccttgattccttgccgcatcgtttcgcccgtcagatggaccctgaatccgaggtcacgttcgagttcgtgccggtgatccggcagtacaggagcggccgcgtcgagcgcctgctccccgtagaccccgtcccgccctccgtcgacgccgccaccggagtcgcctcaagggacgtcgtcttcgacccggccaccggcgcgtgggcccgcctctacctccccgcgcgccctcccggcggcgcgggcgacaggctccccatcatggtgtacctccatggaggcggcctcgtcggcggctcggccgcggacgggcccgagcacgcgttcctcaaccgcctgtgcgcccgcgcgcgcgtcctggtcgtgtccgtcgagtaccgcctcgcgccggagcaccccgtcccggcctgctacgacgacgcgtgggccgcgctccggtgggccgccgagggcgccgacccgtggctccgggaccgcggcgaccgcggccggatgttcgtggtcgggtacagcgccggcggcaacgttgcccacaacgtggcgctccgcgcgggctcggaggccggcgcgctcccccgcggcgcccgggtcaggggcatcgggctcctgcacccatacttcctctcggccgagaaggccgacggcgagacggagcagtcgtggctgaggggcaagctggaggagctgtggccgttcgcgtgcggcggccgcaccgccgggctggacgacccgcgggtcaacccggtggccgacggggcgccgagcttgcggcggctcggttgcgaccgcgtcctcgtctgcgtcgccgaggacgagctgcggctccggggcaaggcgtaccacgacggactgctggggagcgggtgggcggagggcgacgttgagctgctcgactccatcggcgaggaccaccagttcttcctccgggagcccccgagcgcgacggcgctggttctcatggaccggctggccgcgctcctcgccgccggcgcgaaccagcagtagaccagacgtcaggcgctggtactagtgtgtttggtgttgtactagtactctgttctactccgcgtgtatctggaattttagggtcccgataactgccacacgtgtggtgtatcgggtagttgtgccacacgcctcgtgtggcatggacagcaaccagcccacacacctacgtgtgagcaaaacaactaatgttcacacacatctttttccaaaaaaaaaaaaaaaaaagct

SEQ ID NO: 66231 - protein, 404 aa, Triticum aestivum
  peptide (1)..(404): Ceres Seq. ID no. 15219890
LTGTRYRARRTAASTEPFFSRLFTTAGSTGLSGASPPRTPRRVPFADASPSPIFIFQEAHSSAAIAARRAILDSLPHRFARQMDPESEVTFEFVPVIRQYRSGRVERLLPVDPVPPSVDAATGVASRDVVFDPATGAWARLYLPARPPGGAGDRLPIMVYLHGGGLVGGSAADGPEHAFLNRLCARARVLVVSVEYRLAPEHPVPACYDDAWAALRWAAEGADPWLRDRGDRGRMFVVGYSAGGNVAHNVALRAGSEAGALPRGARVRGIGLLHPYFLSAEKADGETEQSWLRGKLEELWPFACGGRTAGLDDPRVNPVADGAPSLRRLGCDRVLVCVAEDELRLRGKAYHDGLLGSGWAEGDVELLDSIGEDHQFFLREPPSATALVLMDRLAALLAAGANQQ

SEQ ID NO: 66232 - protein, 322 aa, Triticum aestivum
  peptide (1)..(322): Ceres Seq. ID no. 15219891
MDPESEVTFEFVPVIRQYRSGRVERLLPVDPVPPSVDAATGVASRDVVFDPATGAWARLYLPARPPGGAGDRLPIMVYLHGGGLVGGSAADGPEHAFLNRLCARARVLVVSVEYRLAPEHPVPACYDDAWAALRWAAEGADPWLRDRGDRGRMFVVGYSAGGNVAHNVALRAGSEAGALPRGARVRGIGLLHPYFLSAEKADGETEQSWLRGKLEELWPFACGGRTAGLDDPRVNPVADGAPSLRRLGCDRVLVCVAEDELRLRGKAYHDGLLGSGWAEGDVELLDSIGEDHQFFLREPPSATALVLMDRLAALLAAGANQQ

SEQ ID NO: 66233 - protein, 247 aa, Triticum aestivum
  peptide (1)..(247): Ceres Seq. ID no. 15219892
MVYLHGGGLVGGSAADGPEHAFLNRLCARARVLVVSVEYRLAPEHPVPACYDDAWAALRWAAEGADPWLRDRGDRGRMFVVGYSAGGNVAHNVALRAGSEAGALPRGARVRGIGLLHPYFLSAEKADGETEQSWLRGKLEELWPFACGGRTAGLDDPRVNPVADGAPSLRRLGCDRVLVCVAEDELRLRGKAYHDGLLGSGWAEGDVELLDSIGEDHQFFLREPPSATALVLMDRLAALLAAGANQQ

SEQ ID NO: 66234 - DNA, 1948 bp, Triticum aestivum
  misc_feature (1)..(1948): Ceres Seq. ID no. 14301490
atctctccctccttccccctctctctctctctctctctctgacgactctgacgacttgctagctagctcctccggctcaacggaagctagcgatcgccatagcctctgcgactgctgcacccgcacttgaacaagaagaagcagcagcagaagcagaattattagaggcgcaaaggcttgcgtgcggtctcaaggaaccccgaaaaaggccgagaagaaaagaagataaaaggtagttgagtagtcttgcacgcgtccatgggttgcggcttatcgacgccggacaacgacggcgggggcggcgcgcggaggaagcaggggagcgtgggggacgtcgtcgtcttcctcccggggctccgggcgcccatgggcgtggacttgtcccaggcgctcgcggggcgcctggacaagggcgccgtggagaggctgtcggccctgagagcgcgcgtcgtcgacatggcaatgcaagaatcggcggtggccctgaagcccaggcggaaggccgccgcacggcaaggatctagcactgccaatctcttgcaggcgctggaagactacttgccacttctgctaggattggtgaaagaaggtggtgagttgaggcacagcgtgcagtttgtgtggactaaccaagaggacaaggccgaggagacggccatggcggatgcatggtacgaggtgctgtccgtgctgcatttgatggccatggtctgcttgctgcaggccaactccctgctccttccaagggcttacggcgatggttacgggccacaggtctctgaagagagcagacgtgccactgtcgacgttttcttgaaagcatctggctacttggactgcgcaattcgacaagtgctcccacagataccatcagaactaaggagacaacttccagtagacctggctgaaggcaacctcaaagctcttagcctgcaagctctcggtcagggtgttgacatgcagcttgggctggcaatcgatagcccaaaggccacactagctgtaaaaaggcgcttagcttgtgagatggtcaaatattggcaccaggttcaggagagcattccagatcttcctgtgtccgacggatgggggaaaaaacatctactatttgtcaaatggaagtacgtcgaagcgaagtctgcagcatactacttccatggtttgattcttgacgaaggaaacagtgagaaatctcacggaatggcaatagcagcattggaagcttcggaggaatttctgaaagaaagcaaaagggcctctgaagttttccatgcaactcctccaacatctaggagccccactccatttggaacagctaagtatctgtttgacaagatcccgaaagaggcttcaagcaaggtccggatcaaccaggacctatataccccagaaagggtcattggagcaccacccccgttgccggatttctcgttggcactaacacctgaagactatgatcttcctccattagacccactttggaacaaagaagacggccaccagtaagtgtacattcagcattcagcaagagtgtcttctgatgggaaggctctggcgctactgagaaagcaacgaccaggattctgccatgcggaggccggacacgacgcaaaggaagtgtacaaagatatgttccgacaaaaaaaatttgatgtcggcaaactggaagcaaattttagaaaggcctgaagatatctgaagagcatttttacagttaaatcttctctgacaatggaaacacattgtcaaaagcttgctttccaacaattcctgtaaaaattatatttccaatgagcgccatggttcctttttcttaggattttctgaacatggcttagttttggggccattctgagcctattaatgtggtaaatttgccaaacatgatcctgatcttcattcaatgcttgagacagaagcagcaacgatgaaatttaaactactcaac

SEQ ID NO: 66235 - protein, 415 aa, Triticum aestivum
  peptide (1)..(415): Ceres Seq. ID no. 14301491
MGCGLSTPDNDGGGGARRKQGSVGDVVVFLPGLRAPMGVDLSQALAGRLDKGAVERLSALRARVVDMAMQESAVALKPRRKAAARQGSSTANLLQALEDYLPLLLGLVKEGGELRHSVQFVWTNQEDKAEETAMADAWYEVLSVLHLMAMVCLLQANSLLLPRAYGDGYGPQVSEESRRATVDVFLKASGYLDCAIRQVLPQIPSELRRQLPVDLAEGNLKALSLQALGQGVDMQLGLAIDSPKATLAVKRRLACEMVKYWHQVQESIPDLPVSDGWGKKHLLFVKWKYVEAKSAAYYFHGLILDEGNSEKSHGMAIAALEASEEFLKESKRASEVFHATPPTSRSPTPFGTAKYLFDKIPKEASSKVRINQDLYTPERVIGAPPPLPDFSLALTPEDYDLPPLDPLWNKEDGHQ

SEQ ID NO: 66236 - protein, 379 aa, Triticum aestivum
  peptide (1)..(379): Ceres Seq. ID no. 14301492
MGVDLSQALAGRLDKGAVERLSALRARVVDMAMQESAVALKPRRKAAARQGSSTANLLQALEDYLPLLLGLVKEGGELRHSVQFVWTNQEDKAEETAMADAWYEVLSVLHLMAMVCLLQANSLLLPRAYGDGYGPQVSEESRRATVDVFLKASGYLDCAIRQVLPQIPSELRRQLPVDLAEGNLKALSLQALGQGVDMQLGLAIDSPKATLAVKRRLACEMVKYWHQVQESIPDLPVSDGWGKKHLLFVKWKYVEAKSAAYYFHGLILDEGNSEKSHGMAIAALEASEEFLKESKRASEVFHATPPTSRSPTPFGTAKYLFDKIPKEASSKVRINQDLYTPERVIGAPPPLPDFSLALTPEDYDLPPLDPLWNKEDGHQ

SEQ ID NO: 66237 - protein, 349 aa, Triticum aestivum
  peptide (1)..(349): Ceres Seq. ID no. 14301493
MAMQESAVALKPRRKAAARQGSSTANLLQALEDYLPLLLGLVKEGGELRHSVQFVWTNQEDKAEETAMADAWYEVLSVLHLMAMVCLLQANSLLLPRAYGDGYGPQVSEESRRATVDVFLKASGYLDCAIRQVLPQIPSELRRQLPVDLAEGNLKALSLQALGQGVDMQLGLAIDSPKATLAVKRRLACEMVKYWHQVQESIPDLPVSDGWGKKHLLFVKWKYVEAKSAAYYFHGLILDEGNSEKSHGMAIAALEASEEFLKESKRASEVFHATPPTSRSPTPFGTAKYLFDKIPKEASSKVRINQDLYTPERVIGAPPPLPDFSLALTPEDYDLPPLDPLWNKEDGHQ

SEQ ID NO: 66238 - DNA, 1715 bp, Triticum aestivum
  misc_feature (1)..(1715): Ceres Seq. ID no. 12779893
atccatccatccctccccgcgatccgctcccgtccgcaggctccccctcctcctccgttcctcttcctccccctggccccggccgtctccgaccccgcgttgcttcttcttccctcactgctcgagtctggaaccagggaggagtatctagaggagagatggcggcggagagggtcaaggacgtcggcatcctcgccatggacatctacttcccgcccaactgcgtcctccaggaagaattggaagctcatgatggcgtgagcaaagggaagtacaccattgggcttgggcaggatagcatggccttttgcactgaagtggaggatgtcatttcaatgagcttgacagtggtgaagactctcctgaaaaattataacatcgatccaaagtgcattggtcgtttggaagttggcagtgaaactgtaatagacaagagcaagtctataaagacatggttgatgcaaatatttgaggagtgtggcaatactgatattgaaggagttgattcctcaaacgcatgttatggtggaacagctgctttgtttaattgtgttaattgggttgagagcaactcatgggatggacgttatgggctcgttgtttgcacagacagcgcggtttatgctgaagggccggctcgtcctactggcggtgcagctgctattgcaatgctgattggaccaaatgctcctatttcattggaaagcaaatttagagggtcacatatggcacatgtttatgacttttacaagcctgatcttgcgagcgaatatccggtggtcgatgggaagctgtcacagacatgctatctcatggcactggattcttgctacaagaccttttgcaaaaggtacgaaaagattgaagggaagccattttcaatcgtcgacgcagattcttttgtatttcattctccatacaacaagcttgtacagaaaagttttgctcgtttatactacaatgacttcttgagaagctgcagcattgttgacaaagactcgagagaaaaattggagccctactcgggcctgtcatccgaagaaagctatcagagtcgggaccttgagaaggtttgtcagcaagttgcgaagcctctgtatgataccaaggttcaaccaacaacattgatcccaaagcaactcgggaacatgtatacggcgtcactctatgctgcttttgcatcagttgtccacaataaacgcgatgctctggtgggccagaggatcgtcatgttctcttacggcagtggcatgacatcgacaatgttctccttcaaaatcaacgaatgccagcatccgttcagcctatcaaacattgcaaacatactggatatctccaacaagttggagtctaggcatgtggttccgccgaagaaattcgtcgaggcactgaagctgatggagcaccgctacggcgccaaggacttcgtcaccagccaggacacgcgcttgctcgtcccaggcacctactacctcacccttgtcgactccatgtaccgccggttctacgccgtgaaaggcgacgctgccgccactccggtaaccaatggccattgactgattgcccttgctcagcctgaagctgcaataagcgccgcaggcgctcttagattatttatctggcagggaaggggaagggaagggtggagcttgcccagattaatctctctgtaaacttgttctaagtttgtaaagttagatagtgctgccattgcc

SEQ ID NO: 66239 - protein, 517 aa, Triticum aestivum
  peptide (1)..(517): Ceres Seq. ID no. 12779894
PSIPPRDPLPSAGSPSSSVPLPPPGPGRLRPRVASSSLTARVWNQGGVSRGEMAAERVKDVGILAMDIYFPPNCVLQEELEAHDGVSKGKYTIGLGQDSMAFCTEVEDVISMSLTVVKTLLKNYNIDPKCIGRLEVGSETVIDKSKSIKTWLMQIFEECGNTDIEGVDSSNACYGGTAALFNCVNWVESNSWDGRYGLVVCTDSAVYAEGPARPTGGAAAIAMLIGPNAPISLESKFRGSHMAHVYDFYKPDLASEYPVVDGKLSQTCYLMALDSCYKTFCKRYEKIEGKPFSIVDADSFVFHSPYNKLVQKSFARLYYNDFLRSCSIVDKDSREKLEPYSGLSSEESYQSRDLEKVCQQVAKPLYDTKVQPTTLIPKQLGNMYTASLYAAFASVVHNKRDALVGQRIVMFSYGSGMTSTMFSFKINECQHPFSLSNIANILDISNKLESRHVVPPKKFVEALKLMEHRYGAKDFVTSQDTRLLVPGTYYLTLVDSMYRRFYAVKGDAAATPVTNGH

SEQ ID NO: 66240 - protein, 465 aa, Triticum aestivum
  peptide (1)..(465): Ceres Seq. ID no. 12779895
MAAERVKDVGILAMDIYFPPNCVLQEELEAHDGVSKGKYTIGLGQDSMAFCTEVEDVISMSLTVVKTLLKNYNIDPKCIGRLEVGSETVIDKSKSIKTWLMQIFEECGNTDIEGVDSSNACYGGTAALFNCVNWVESNSWDGRYGLVVCTDSAVYAEGPARPTGGAAAIAMLIGPNAPISLESKFRGSHMAHVYDFYKPDLASEYPVVDGKLSQTCYLMALDSCYKTFCKRYEKIEGKPFSIVDADSFVFHSPYNKLVQKSFARLYYNDFLRSCSIVDKDSREKLEPYSGLSSEESYQSRDLEKVCQQVAKPLYDTKVQPTTLIPKQLGNMYTASLYAAFASVVHNKRDALVGQRIVMFSYGSGMTSTMFSFKINECQHPFSLSNIANILDISNKLESRHVVPPKKFVEALKLMEHRYGAKDFVTSQDTRLLVPGTYYLTLVDSMYRRFYAVKGDAAATPVTNGH

SEQ ID NO: 66241 - protein, 452 aa, Triticum aestivum
  peptide (1)..(452): Ceres Seq. ID no. 12779896
MDIYFPPNCVLQEELEAHDGVSKGKYTIGLGQDSMAFCTEVEDVISMSLTVVKTLLKNYNIDPKCIGRLEVGSETVIDKSKSIKTWLMQIFEECGNTDIEGVDSSNACYGGTAALFNCVNWVESNSWDGRYGLVVCTDSAVYAEGPARPTGGAAAIAMLIGPNAPISLESKFRGSHMAHVYDFYKPDLASEYPVVDGKLSQTCYLMALDSCYKTFCKRYEKIEGKPFSIVDADSFVFHSPYNKLVQKSFARLYYNDFLRSCSIVDKDSREKLEPYSGLSSEESYQSRDLEKVCQQVAKPLYDTKVQPTTLIPKQLGNMYTASLYAAFASVVHNKRDALVGQRIVMFSYGSGMTSTMFSFKINECQHPFSLSNIANILDISNKLESRHVVPPKKFVEALKLMEHRYGAKDFVTSQDTRLLVPGTYYLTLVDSMYRRFYAVKGDAAATPVTNGH

SEQ ID NO: 66242 - DNA, 2088 bp, Triticum aestivum
  misc_feature (1)..(2088): Ceres Seq. ID no. 14302875
cctgccggaaacgaaacaccattcgtcgctccctcgcctcccatcagcgcgcactagtccttccctgcctcctcctcttctcgggcgcgcgccgcctctgccctgcctcggcaacgacagcaaacaccggctagccagccaagaaagaggcgccgacatggccatcccgctccaggcgaagaagcagcaggagaacggaagcaagggcggccaaggcagccacgtggacggcggcgacgacaacccttcggcggcggaggagctgcgggagctgtggcgcatggcggcgccgatcacagcgctcaactgcgtggtgtacctgcgcgccatggtgtccgtgctctgcctgggccgcctcggcccgcttgacctcgccggcggcgcgctcgcgatcgggctcaccaacatcactggccacagtgtgctcttcggcctcgcgtccgggttggagccgctctgcgcgcaggcctacggctcccgcaactacgacctgctcacgctctccctccaccgcgccgtgctgctgctcgccatcgccgccgtccccatcgcgctgctctggctcaacgtcggccccatcctggtcgcgctcggccaggacccagccatctccgcctccgccgccgcatacgccgcgtgggcgctcccggacctcgccgcgctggccgtgctccagccgctccgcgtctaccttaggtcccagggcatcaccaagcccatggccgcctgctccgccgccgccgtcgcgctgcacatcccgctcaactttctcctcgtcttccgcatgggcttcggcgtgcgcggcgtcgcggcagcgcaggcgctcacaaacacaaacatggtgctcttcctgctcgcctacgtccgctgggcgggtgcgtgcgacgacacgtggaggggcttcgcgcggcccgccgccgtagccagcgggctcggcggcctcgtccgcctcgccgtgcccagctgcatcggcgtctgcctcgagtggtggtggtacgaggtcgtcaccgtgctcgccggctaccttgccaaccccaccgccgccgtcggcgccgcgggagtcctcatccagacaaccagcctgatgtacaccgtgcccatggcgctcgccgcctgcgtctccacccgggtgggcaacgagctcggcgccgggaagccgcggcgtgcgcggatggcggcgacggtggcgctgtggtgcgcagcgggcgtgggcctcgcgcacgtggcgtggacggcggccttcagcgcgcagtgggtgtcgctcttcacccgggagccgtcggtggtgctgctggcgtcggcggcgatgccgctgctggggctgtgcgagctgggcaactgcccgcagaccacggggtgcggcgtgctgcgcggcacagccaggcccgccgtgggcgcccgcatcaacctgctctccttctacctcgtcggcacgcccgtggcggtgctgctggcgttcgggcacgggccgctgtccgggttccgcgggctgtggtacgggctgctgtccgcgcaggccgcctgcgtggctctggtgctggtcgccgtcgtgtggcgcaccgactggcgcgtcgaggccatgcgcgcgcggaagctgaccggcaccggcgcggacacgacggcgacggccaccgagggggaggagcaggaggagatgaggcgcctcgtggccggcaacggcctggaggcggacgtcgacgtgtagcgagccgttcctttcggtggaaccacctagtttagctctacgtgcggtgcatcgcggtgacatgctaaaattaagccagactagccattccactcgtagggcaggcatagcatattgcagcaccgagtagctggctagctttagttattgtggtgagccacacagctcacagatttgctgctgcatgcatgcttgcagctgggcctaagcggtggtgtgttcgcattgaagtagtacggttgctgcttggagaaatgggctagctagctagcaagctaatcaagctagagatcttgatcgagctaagcaagttcattccaagttacacgcacttcattttctgtatgggctaaacaagttcattagcgcttgattttgggatt

SEQ ID NO: 66243 - protein, 567 aa, Triticum aestivum
  peptide (1)..(567): Ceres Seq. ID no. 14302876
LPETKHHSSLPRLPSARTSPSLPPPLLGRAPPLPCLGNDSKHRLASQERGADMAIPLQAKKQQENGSKGGQGSHVDGGDDNPSAAEELRELWRMAAPITALNCVVYLRAMVSVLCLGRLGPLDLAGGALAIGLTNITGHSVLFGLASGLEPLCAQAYGSRNYDLLTLSLHRAVLLLAIAAVPIALLWLNVGPILVALGQDPAISASAAAYAAWALPDLAALAVLQPLRVYLRSQGITKPMAACSAAAVALHIPLNFLLVFRMGFGVRGVAAAQALTNTNMVLFLLAYVRWAGACDDTWRGFARPAAVASGLGGLVRLAVPSCIGVCLEWWWYEVVTVLAGYLANPTAAVGAAGVLIQTTSLMYTVPMALAACVSTRVGNELGAGKPRRARMAATVALWCAAGVGLAHVAWTAAFSAQWVSLFTREPSVVLLASAAMPLLGLCELGNCPQTTGCGVLRGTARPAVGARINLLSFYLVGTPVAVLLAFGHGPLSGFRGLWYGLLSAQAACVALVLVAVVWRTDWRVEAMRARKLTGTGADTTATATEGEEQEEMRRLVAGNGLEADVDV

SEQ ID NO: 66244 - protein, 515 aa, Triticum aestivum
  peptide (1)..(515): Ceres Seq. ID no. 14302877
MAIPLQAKKQQENGSKGGQGSHVDGGDDNPSAAEELRELWRMAAPITALNCVVYLRAMVSVLCLGRLGPLDLAGGALAIGLTNITGHSVLFGLASGLEPLCAQAYGSRNYDLLTLSLHRAVLLLAIAAVPIALLWLNVGPILVALGQDPAISASAAAYAAWALPDLAALAVLQPLRVYLRSQGITKPMAACSAAAVALHIPLNFLLVFRMGFGVRGVAAAQALTNTNMVLFLLAYVRWAGACDDTWRGFARPAAVASGLGGLVRLAVPSCIGVCLEWWWYEVVTVLAGYLANPTAAVGAAGVLIQTTSLMYTVPMALAACVSTRVGNELGAGKPRRARMAATVALWCAAGVGLAHVAWTAAFSAQWVSLFTREPSVVLLASAAMPLLGLCELGNCPQTTGCGVLRGTARPAVGARINLLSFYLVGTPVAVLLAFGHGPLSGFRGLWYGLLSAQAACVALVLVAVVWRTDWRVEAMRARKLTGTGADTTATATEGEEQEEMRRLVAGNGLEADVDV

SEQ ID NO: 66245 - protein, 474 aa, Triticum aestivum
  peptide (1)..(474): Ceres Seq. ID no. 14302878
MAAPITALNCVVYLRAMVSVLCLGRLGPLDLAGGALAIGLTNITGHSVLFGLASGLEPLCAQAYGSRNYDLLTLSLHRAVLLLAIAAVPIALLWLNVGPILVALGQDPAISASAAAYAAWALPDLAALAVLQPLRVYLRSQGITKPMAACSAAAVALHIPLNFLLVFRMGFGVRGVAAAQALTNTNMVLFLLAYVRWAGACDDTWRGFARPAAVASGLGGLVRLAVPSCIGVCLEWWWYEVVTVLAGYLANPTAAVGAAGVLIQTTSLMYTVPMALAACVSTRVGNELGAGKPRRARMAATVALWCAAGVGLAHVAWTAAFSAQWVSLFTREPSVVLLASAAMPLLGLCELGNCPQTTGCGVLRGTARPAVGARINLLSFYLVGTPVAVLLAFGHGPLSGFRGLWYGLLSAQAACVALVLVAVVWRTDWRVEAMRARKLTGTGADTTATATEGEEQEEMRRLVAGNGLEADVDV

SEQ ID NO: 66246 - DNA, 1487 bp, Triticum aestivum
  misc_feature (1)..(1487): Ceres Seq. ID no. 14301542
ccaccagggcttccgcggcaaccagcagaacaccgccaagccctcggtcgacatccagcccgactggaccatcctcgagcagatccccttcgccaacttcaccaagctctccttcgccgtcgccgaccagcccgaggacctgctcgtctgcggcgccgtcgactcgtacgaccgcgcctacgaccgcgtcaaccccaagacggcccgccgcctcgagcgcttcaagaaccgccagttcttcaagatcaccaccaccgacgaccccatcatccgccgcctcgccgaggaggacaaggccaccgtcttcgccaccgacgccatcctcgccgccctcatgtgcacgccccgcagcatcctctcctgggacattgtcgtgcagcgcgtcggcaacaagctcttcttcgacaagcgcgagggctcccagctcgatctgctcactgtcaacgagactgcgcaggagcagctccctgagaacaaggatgacatcaattccgcgccggcccttgctgtcgaggccacctacatcaaccagaacttctcgcagcaggtgctggtgcgtgatggcgagaaggttacctttgatgagcctaacccgtttgcctctgagaatgaggaggcggcgcctgtttgctaccgttatcgccgctggaagctggatgatgatattagcatcattgcccgctgtgaagtgcatgctgctggtgttgatcccagtggtgctcgccagttcctcacgcttaatgcactcaatgagtttgatcctaagattactggtgttgactggaagcagaagctcgagtcccagcgtggtgctgtgcttgctacagagctcaagaacaatgccaacaagctcgctcgctggactgcccaggctttactttctggtgctgacatgatgaagttgggttatgtgtcacgtgtgcacccccgcgaccacttcaaccactccatactcactgtgatgggctacaagccaagggattttgctacccagatcaacctcaacactgcaaacatgtggggcattgtcaagtcgattgtggacatctgcatgaagtttgaagagggaaagtatgtgcttgtgaaagatcctgccaagccacagatgaggatttatcaggttcctaatgatgcatttgagaatgattatgttgaagagccacttccagaggaggagcagattcgtccggctacagatgatgtcgatgctactgcacaggagatggatgctgctgccgaggcagaggctaataaagcaactactcagggtggtgagggtgagaagagtgcagatgctgctgctgcttgaagggtataatgggccatctttgctttatctagataatgtgtcttttctgttttatgacctgtttttgtggattaaagagttgaactgccttgtcttgatacagtggtcttgttttggtccatgagaaaacttggtactcttaaatttcatgcttagatgtgctaagcttagcacctac

SEQ ID NO: 66247 - protein, 435 aa, Triticum aestivum
  peptide (1)..(435): Ceres Seq. ID no. 14301543
HQGFRGNQQNTAKPSVDIQPDWTILEQIPFANFTKLSFAVADQPEDLLVCGAVDSYDRAYDRVNPKTARRLERFKNRQFFKITTTDDPIIRRLAEEDKATVFATDAILAALMCTPRSILSWDIVVQRVGNKLFFDKREGSQLDLLTVNETAQEQLPENKDDINSAPALAVEATYINQNFSQQVLVRDGEKVTFDEPNPFASENEEAAPVCYRYRRWKLDDDISIIARCEVHAAGVDPSGARQFLTLNALNEFDPKITGVDWKQKLESQRGAVLATELKNNANKLARWTAQALLSGADMMKLGYVSRVHPRDHFNHSILTVMGYKPRDFATQINLNTANMWGIVKSIVDICMKFEEGKYVLVKDPAKPQMRIYQVPNDAFENDYVEEPLPEEEQIRPATDDVDATAQEMDAAAEAEANKATTQGGEGEKSADAAAA

SEQ ID NO: 66248 - protein, 324 aa, Triticum aestivum
  peptide (1)..(324): Ceres Seq. ID no. 14301544
MCTPRSILSWDIVVQRVGNKLFFDKREGSQLDLLTVNETAQEQLPENKDDINSAPALAVEATYINQNFSQQVLVRDGEKVTFDEPNPFASENEEAAPVCYRYRRWKLDDDISIIARCEVHAAGVDPSGARQFLTLNALNEFDPKITGVDWKQKLESQRGAVLATELKNNANKLARWTAQALLSGADMMKLGYVSRVHPRDHFNHSILTVMGYKPRDFATQINLNTANMWGIVKSIVDICMKFEEGKYVLVKDPAKPQMRIYQVPNDAFENDYVEEPLPEEEQIRPATDDVDATAQEMDAAAEAEANKATTQGGEGEKSADAAAA

SEQ ID NO: 66249 - protein, 297 aa, Triticum aestivum
  peptide (1)..(297): Ceres Seq. ID no. 14301545
TRASAATSRTPPSPRSTSSPTGPSSSRSPSPTSPSSPSPSPTSPRTCSSAAPSTRTTAPTTASTPRRPAASSASRTASSSRSPPPTTPSSAASPRRTRPPSSPPTPSSPPSCARPAASSPGTLSCSASATSSSSTSARAPSSICSLSTRLRRSSSLRTRMTSIPRRPLLSRPPTSTRTSRSRCWCVMARRLPLMSLTRLPLRMRRRRLFATVIAAGSWMMILASLPAVKCMLLVLIPVVLASSSRLMHSMSLILRLLVLTGSRSSSPSVVLCLLQSSRTMPTSSLAGLPRLYFLVLT

SEQ ID NO: 66250 - DNA, 1592 bp, Triticum aestivum
  misc_feature (1)..(1592): Ceres Seq. ID no. 15179824
accaatcatttcctcttcactctcgctcctccttttctgccttgcaaccaaagccccatcccttgattcgatcgatcgttcgggatcctcctctcgcgcgcttctaggacctgtccctcgaagcttcttcttcttctccttggacttgtgcttggtatggcgcagacgaccgtggtggtgccggaggtgggcatgactgcggccgcgcccacggcgtgctcctgccctggttcgctgttcccctacccgccgccgcgtgccgggatggccgtgagccgcaagtgcctgcgggcggcgcaggcggagcttggcgccgggatgctcagtggcctggtcgagtccatgcgggcgtcctcccccacgcacgccagggccgccgccgccctctccgccggcgtcgacgacgagcacgccgcctggatggcgaggcacccgtccgccctgggaaagttcgaggagatcgtggccgcgtccaaggggaagcagatcgtcatgttcctggactacgacggcacgctgtcccccatcgtcgatgaccccgacgccgccttcatgagcgagacgatgcggatggcagtgcgcagcgtggccaagcacttcccgacggcgatcgtcagcggtcggtgccgcgacaaggtgtttgatttcgtgaagctggcggagctctactacgccggcagccacggcatggacatcaagggcccggccaaatcctcaaagtccaaggccaaaggagttctcttccaaccggcaagcgagttcctgcccatgatagaagaggtgcatcaacggctgatagaggagacgaagcacgtagccggggccaaggtggagaacaacaagttctgcgtgtcagttcacttcagatgcgtcgacgaaaagagctggggcgcgctggcggagacggtgaagggcgtgatgcgggagtaccccaagctgcgcatgtcgcaggggcggatggtgttcgaggtgcggcccaccatcaagtgggacaagggcaaggccctcgagttcctgctcgagtcgctgggcttcgccgactgccccaacgtgctgcccgtctacatcggcgacgaccgcaccgacgaggacgccttcaaggtgctgcgccggcggggccagggcgtcgggatcctcgtctccaagcaccccaaggacaccagcgcctccttctcgctgcaggagccggccgaggtcatggagttcctgctccgcctcgtcgagtggaagcagctctccaaggcgcgcctcaggctgcggcgacaggccgacgcctgatcggacgacaaggatcggccggccggcgccggcgggctggactaattatttcactgctacgtgtagcttagctagttaatgaatcccctgctcgtccgaacaaagccaaaggctacgtacgtggatgggaagaaggaacgtactatggcgaacctgtggctgtggagcattgttgcgccacatgttgtcttctaattaaccgcccttctttttgtggggatgtataccgtacctaccgattatgcatgcatgtaaattacctttgtccacgtacaaggggaggaaccatggaataaagaaagagaaacatgagc

SEQ ID NO: 66251 - protein, 373 aa, Triticum aestivum
  peptide (1)..(373): Ceres Seq. ID no. 15179825
MAQTTVVVPEVGMTAAAPTACSCPGSLFPYPPPRAGMAVSRKCLRAAQAELGAGMLSGLVESMRASSPTHARAAAALSAGVDDEHAAWMARHPSALGKFEEIVAASKGKQIVMFLDYDGTLSPIVDDPDAAFMSETMRMAVRSVAKHFPTAIVSGRCRDKVFDFVKLAELYYAGSHGMDIKGPAKSSKSKAKGVLFQPASEFLPMIEEVHQRLIEETKHVAGAKVENNKFCVSVHFRCVDEKSWGALAETVKGVMREYPKLRMSQGRMVFEVRPTIKWDKGKALEFLLESLGFADCPNVLPVYIGDDRTDEDAFKVLRRRGQGVGILVSKHPKDTSASFSLQEPAEVMEFLLRLVEWKQLSKARLRLRRQADA

SEQ ID NO: 66252 - protein, 361 aa, Triticum aestivum
  peptide (1)..(361): Ceres Seq. ID no. 15179826
MTAAAPTACSCPGSLFPYPPPRAGMAVSRKCLRAAQAELGAGMLSGLVESMRASSPTHARAAAALSAGVDDEHAAWMARHPSALGKFEEIVAASKGKQIVMFLDYDGTLSPIVDDPDAAFMSETMRMAVRSVAKHFPTAIVSGRCRDKVFDFVKLAELYYAGSHGMDIKGPAKSSKSKAKGVLFQPASEFLPMIEEVHQRLIEETKHVAGAKVENNKFCVSVHFRCVDEKSWGALAETVKGVMREYPKLRMSQGRMVFEVRPTIKWDKGKALEFLLESLGFADCPNVLPVYIGDDRTDEDAFKVLRRRGQGVGILVSKHPKDTSASFSLQEPAEVMEFLLRLVEWKQLSKARLRLRRQADA

SEQ ID NO: 66253 - protein, 337 aa, Triticum aestivum
  peptide (1)..(337): Ceres Seq. ID no. 15179827
MAVSRKCLRAAQAELGAGMLSGLVESMRASSPTHARAAAALSAGVDDEHAAWMARHPSALGKFEEIVAASKGKQIVMFLDYDGTLSPIVDDPDAAFMSETMRMAVRSVAKHFPTAIVSGRCRDKVFDFVKLAELYYAGSHGMDIKGPAKSSKSKAKGVLFQPASEFLPMIEEVHQRLIEETKHVAGAKVENNKFCVSVHFRCVDEKSWGALAETVKGVMREYPKLRMSQGRMVFEVRPTIKWDKGKALEFLLESLGFADCPNVLPVYIGDDRTDEDAFKVLRRRGQGVGILVSKHPKDTSASFSLQEPAEVMEFLLRLVEWKQLSKARLRLRRQADA

SEQ ID NO: 66254 - DNA, 2581 bp, Triticum aestivum
  misc_feature (1)..(2581): Ceres Seq. ID no. 14303684
aaaaatgatgcgcgaccccagtcctactctccccagttgttactcccagccagcagcaccgtccagggcccggccgcacgctacaactagaaccaaccccagccccggtgcagtgcacagccagtgtagctaggctctctcgcagcgagagcaggacgcaggacggctagctagctttgatcggccggccggatcggagtgctcgtgtgtcgggggccatggccggcgccgcgggcgacagggcggaaggtgtgggcggtggcggggactggccgccgttcgccggcgacgccttcgcggagtactcgtcgtcggtgttcgcggagctcggtggatggtcggatggccttggcgcgggcgccggggagctgccgccgctggatctgccggcggcgagcgcgtccgggccggtcccgatggcgcggtcggacgagatcatgccggccgcgtcaggcgagcccgcaggcgccgcctcctcctgctccagcggcgacggcgccgcagccgccgcggagaacgccgacaagccgcaggaggccgccgacgcagcgagcatgaagccggcggcggcggcagggaagaaggggcagaagcgggcgcggcagcagcggttcgccttcgtgaccaagagcgaagttgatcacctcgaggatgggtacagatggaggaagtatgggcagaaagccgtcaagaacagccctttcccaaggagctactaccggtgcaccaacagcaagtgcaccgtgaagaagcgggtggagcggtcgtcggaggacccctccgtggtgatcaccacctacgagggccagcactgccaccaccagacctccttccagcgcggcggcatgcacttccacggcgccgccaccgttgcgctcgccgagcagatgtcgttcgtgtcaactcagcagctgtacaacctgccgcccctgcgccgacaacagatgaatcctgcatcgtcggagtccgccgttagctccgtgccgccgtctttgcagcagctcaacggcggcgacgaactgcgaaggtcaactagctatagccccacggcgtccgcggtgcagacaccgtcgtcgtcgttggtgcctccggacgtttcctttgacatgggactgcttggcgacatcgtgcctccaggagtaagaaatggatgaagatctataatggtaattattttaagataataggtttataagcgagaacggctacggtgtggacgagctcgtgcgctcccgctaactggacgaacgactccatgacgcgtagcacagcgtatttactgctatggtgtgcattgacgtcgagtacaggtgctccaccgtccaaactaacccgaaagtagcggctcagcttcgtgttgttccgttggaacatgaatgtcggagtggcccataaccgaatgccgccgtcaactttcgctactgagatggcgtcctccgaaagggtacttgggtgcccaactctcaaaagtaaatgggtacccatgtttgggcccatggttgtctcagcgtcgctgaccagtaaaagaaatatatcttccttctcccatagccgcctacagagcaggagctcatggcgatgcagatgtcgacatagccgcctacagagcaggagctcatggcgatgcagatatcggccgctggaggtgttgaagtcgagtttttgtcagatcccgtcgacagatttccactgcgagatctcgctgccgcacagcccttggttgcttacgagatgtacaaatccatggagtgtgagcctgctgagtccagcattggtgatgtggagacgctccggtcaacagtaattgcaatgcgattgccttgtctgcagcagcatctgagcattctacgggcaaagacacccctgaagccccaggctggaggaagagaatgcgagtcggaagttcatctagcgagcgccacccatgcgctgacaggatgagtgctttggaagcaacactaagaagctatgcagagaaaaaaaatggcactgtcgtagttcctactatggggacaaaatttgattctcttgaagaagcctgctagaacatgttcctggatgtgcatggatgcagaaaatgtccttgggatatagagctggaaatctgggacttagggtgttctagagcatccatgccatccaagtgagaggagaatatcctttgtctttaggacatgcttgctgaacatgcaagttcgctagacgaaggatgggtataactgatgaagctttatgcagtctattggcacccatctcatacagagctattgccgagagcgcctttgcatctgacgtcgtgcgccagagttggtcataggggaccacacgcagcttgatcagctcgacatggtcccgcaggcccgtttccttcccttggagagcctaaggctggccatagtgggggtaacataacctgtaacatgcacttgggactagcaaatatgtttatgtggcacataattaaagaggagagagagggttagagtaacataggtagataccatatcatgttaaatgctatgctactttgtgtcatgcatggcaataaatatgatcatctatgatactactttatgttact

SEQ ID NO: 66255 - protein, 311 aa, Triticum aestivum
  peptide (1)..(311): Ceres Seq. ID no. 14303685
MAGAAGDRAEGVGGGGDWPPFAGDAFAEYSSSVFAELGGWSDGLGAGAGELPPLDLPAASASGPVPMARSDEIMPAASGEPAGAASSCSSGDGAAAAAENADKPQEAADAASMKPAAAAGKKGQKRARQQRFAFVTKSEVDHLEDGYRWRKYGQKAVKNSPFPRSYYRCTNSKCTVKKRVERSSEDPSVVITTYEGQHCHHQTSFQRGGMHFHGAATVALAEQMSFVSTQQLYNLPPLRRQQMNPASSESAVSSVPPSLQQLNGGDELRRSTSYSPTASAVQTPSSSLVPPDVSFDMGLLGDIVPPGVRNG

SEQ ID NO: 66256 - protein, 245 aa, Triticum aestivum
  peptide (1)..(245): Ceres Seq. ID no. 14303686
MARSDEIMPAASGEPAGAASSCSSGDGAAAAAENADKPQEAADAASMKPAAAAGKKGQKRARQQRFAFVTKSEVDHLEDGYRWRKYGQKAVKNSPFPRSYYRCTNSKCTVKKRVERSSEDPSVVITTYEGQHCHHQTSFQRGGMHFHGAATVALAEQMSFVSTQQLYNLPPLRRQQMNPASSESAVSSVPPSLQQLNGGDELRRSTSYSPTASAVQTPSSSLVPPDVSFDMGLLGDIVPPGVRNG

SEQ ID NO: 66257 - protein, 238 aa, Triticum aestivum
  peptide (1)..(238): Ceres Seq. ID no. 14303687
MPAASGEPAGAASSCSSGDGAAAAAENADKPQEAADAASMKPAAAAGKKGQKRARQQRFAFVTKSEVDHLEDGYRWRKYGQKAVKNSPFPRSYYRCTNSKCTVKKRVERSSEDPSVVITTYEGQHCHHQTSFQRGGMHFHGAATVALAEQMSFVSTQQLYNLPPLRRQQMNPASSESAVSSVPPSLQQLNGGDELRRSTSYSPTASAVQTPSSSLVPPDVSFDMGLLGDIVPPGVRNG

SEQ ID NO: 66258 - DNA, 1809 bp, Triticum aestivum
  misc_feature (1)..(1809): Ceres Seq. ID no. 13657780
agctcccgtcactttccccctctggtcgagggtttcctctgccctgttacgttccccactccaatccaatggcgacgaccagcaacaagaaaatggcgtcgccgtcgcctatgacggacatgcccgaccagctcctcgccgagatcttcctccggctgcccaccccacaagacctcgcccgcgcctccgccgtttgcctcaccttccgccgaatctccaccgacaggtccttcctccgctgcttccgctgcctccacgcaccaccacttctcggattcctcgaccgcgacggcttccacccagccctaacctccacccccgccgttcgcgcggccgccgtcgccgccgatttcaccttatccttcctcccctaccaccgccgctggaccgtgcaggacgtccgcgacggccgcgtcctcctctgccgcagcatcggaaaacatgggcagcccccggtcttcagagatctcgcggtgtgcgaccccttgcaccggcgctacgtcctgctccccccgctacctcacgacctggctgctttgcttgggcaccctttccccccggtaaccgaggcctgctgcaagcgcttcctcgttcccctcggtgaggaggaggcagcggctggagacacaacattcatagtcatcttgatggcatattgcaaaaccagtctggctgcctttgtcttctcttccagcaacgatcaatggcaagctactgcatccaaggatttgagtgatttggcccttgacgagggcgacatggaggagatgtcaagggtccagccttttattcccatgcgccattatgcttatggctgtttctactgggactgggtgcaattcgggatgaagaagttgctcttgcttgacaccacgaacatggagttctccactgctgacctcccaccaggagaatggagcaaggaaggtatagccattgtggaggcaggggaaggcaggctcgggatctttggtttccatggtggacttgcatccaatctcagctatacagctgcacggaccaaaggcgagagtcccagccagtggcagatggagaagacaatctcactagattctggctacaaatattgtatcagagacgcaacacagaggtacttgctcttgacaaggatagaagcatcatctccaaataatcaccttgttggatatttctcaatggatatcaagacgttgcagcttcagagggtttatgagaaacagcactataagtatccgacatacgcatatatcaacttcccaccatcattgttgtcttcaaggagaatatgaagtggtttgacagagccatacccatacgtaatcatatcagcattcttaattcaaagcgaccatggtttcaacagcttggagttctcacatacgtgatcacgttgcctacaaaacaacaagatctacattgccttgcttggtggtggccatgtcaatgttttggttattaggtctaacatcaatgtggaatttccctgcctaagaatgtgactttgatattaggagttcaagtcaatttttcttcttcattatttgttagagttgctaaaacaggtacaatctgactagtggcagaacgatcacaacggaactgataaccaacataaggacaatwtaagcagcaccagcatgcagttggagggactcggttctttgttgctgctgctgctgtacggtgaagggtaggcagcaaaataggtttgtagagctgtagaaagaggtgagtggaagtcctaaatggtgctcatgtttggatcgccgaagtaccgataatttgtggaatcttgaatatgctgtwtgg

SEQ ID NO: 66259 - protein, 428 aa, Triticum aestivum
  peptide (1)..(428): Ceres Seq. ID no. 15219877
LPSLSPSGRGFPLPCYVPHSNPMATTSNKKMASPSPMTDMPDQLLAEIFLRLPTPQDLARASAVCLTFRRISTDRSFLRCFRCLHAPPLLGFLDRDGFHPALTSTPAVRAAAVAADFTLSFLPYHRRWTVQDVRDGRVLLCRSIGKHGQPPVFRDLAVCDPLHRRYVLLPPLPHDLAALLGHPFPPVTEACCKRFLVPLGEEEAAAGDTTFIVILMAYCKTSLAAFVFSSSNDQWQATASKDLSDLALDEGDMEEMSRVQPFIPMRHYAYGCFYWDWVQFGMKKLLLLDTTNMEFSTADLPPGEWSKEGIAIVEAGEGRLGIFGFHGGLASNLSYTAARTKGESPSQWQMEKTISLDSGYKYCIRDATQRYLLLTRIEASSPNNHLVGYFSMDIKTLQLQRVYEKQHYKYPTYAYINFPPSLLSSRRI

SEQ ID NO: 66260 - protein, 406 aa, Triticum aestivum
  peptide (1)..(406): Ceres Seq. ID no. 15219878
MATTSNKKMASPSPMTDMPDQLLAEIFLRLPTPQDLARASAVCLTFRRISTDRSFLRCFRCLHAPPLLGFLDRDGFHPALTSTPAVRAAAVAADFTLSFLPYHRRWTVQDVRDGRVLLCRSIGKHGQPPVFRDLAVCDPLHRRYVLLPPLPHDLAALLGHPFPPVTEACCKRFLVPLGEEEAAAGDTTFIVILMAYCKTSLAAFVFSSSNDQWQATASKDLSDLALDEGDMEEMSRVQPFIPMRHYAYGCFYWDWVQFGMKKLLLLDTTNMEFSTADLPPGEWSKEGIAIVEAGEGRLGIFGFHGGLASNLSYTAARTKGESPSQWQMEKTISLDSGYKYCIRDATQRYLLLTRIEASSPNNHLVGYFSMDIKTLQLQRVYEKQHYKYPTYAYINFPPSLLSSRRI

SEQ ID NO: 66261 - protein, 398 aa, Triticum aestivum
  peptide (1)..(398): Ceres Seq. ID no. 15219879
MASPSPMTDMPDQLLAEIFLRLPTPQDLARASAVCLTFRRISTDRSFLRCFRCLHAPPLLGFLDRDGFHPALTSTPAVRAAAVAADFTLSFLPYHRRWTVQDVRDGRVLLCRSIGKHGQPPVFRDLAVCDPLHRRYVLLPPLPHDLAALLGHPFPPVTEACCKRFLVPLGEEEAAAGDTTFIVILMAYCKTSLAAFVFSSSNDQWQATASKDLSDLALDEGDMEEMSRVQPFIPMRHYAYGCFYWDWVQFGMKKLLLLDTTNMEFSTADLPPGEWSKEGIAIVEAGEGRLGIFGFHGGLASNLSYTAARTKGESPSQWQMEKTISLDSGYKYCIRDATQRYLLLTRIEASSPNNHLVGYFSMDIKTLQLQRVYEKQHYKYPTYAYINFPPSLLSSRRI

SEQ ID NO: 66262 - DNA, 1780 bp, Triticum aestivum
  misc_feature (1)..(1780): Ceres Seq. ID no. 15170163
agattcaaagcgatcgttcaaagccatggcagggcactcgcccactctccctcatcttgtcttacttgagcaccggcagccatcatccgcctcccattaagaactccagaccgtcaccatggctgcctcttctcctcccaagtcccaacccatcactatggggcctcttccgccgctcgtattagcactctttctcctacctctcctctacttgttcttcaggggcggtagcaagggacgatcgacacagggagcaagaaacgctcccgggccgccgaaacagcttcccgtgctcggcaacctcctgcagctcggcggccggccacaccggtacttccagtcgctcacccagaagtacgggccggtggtgcaggtgcagctcggccgcgtgcggatggtcgtcgtcgcgtcgcctgaggcggccaaggaggttctccggacgaacgacctgcactgctgcagccgcccaaattcaccaggtgcgaggatgctgagctacaacttcctcgacgtggctttcggcccctacagcgactactggcgcgagatgcggaagctcctcgtgctggagctgctgagcgtgaggcgcgtccagtccttcgcctacgcccgggccgcagaggtggaccgccttgtctcctccctcgccggcacccctccgggcaccccggtcgacctcagcgagcagctgtacgcgctctcggacggcatcatcggcacggtggccttcgggaagatgtacgggtcggagtcgttcgagaggaccagcttccagcggatgatggacgagacgctgcgggtgctcggcagcttcacgttcgaggacttcttcccgtcgtcggcgctcgcacggtgggcggacgccctcaccggcgtggcgtcgcggcggcggagggtcttcctcaggatcgataggttcttcgacgcggtcatcgacaagcacctcgagccggggaggctggcggccggggtgcaggaggacatggtcgacgcgctggtgaagatgtggagggatcaagatggggctctggcgctgacgcgtgataacatcaagggaatcctgatggatacattcgccggtgggatcgacacttgcgctgtgacgacgatctggatcatggcggagctgatgaggaacccaagggtgatgcggaaggcgcagtcggaggtacgcgccgcggtggggaacaaatccagagtgtacgaagaagacgcccagggcctcaagtacctcaagatgatagtgaaggagaacttcaggctccacccgccggggcctctgctgatcccaagagagaccatgcagagctgcgaggtcgccggctacagcgtgcccgcgggcaccaggatacacgtcaacgtctgggccatggggagagacccggagatatgggacaggccggaggagttcttccccgagcggttcgaggacgcgcaggttgatttcagggggctgcacttcgagctccttccgttcgggtcgggacgaagggcctgccctgccgtcgccatgggcgtggccaatgtggaggtcgtgctggccaacctgttgtattgcttcgactgggagcttcccgagggcgtgaaggaggacgacgtcgatatggaggaaacagggcagcttgttttcagcaagaaggtggctcttgagcttgtgccagttaagcggtagtgatatctttttttagtgatatcttttttttgagattctagtgatatctcatatgtttcaaatgccacctagtgcttcctcaataaactaaacagtagtttaaatccc

SEQ ID NO: 66263 - protein, 517 aa, Triticum aestivum
  peptide (1)..(517): Ceres Seq. ID no. 15170164
MAASSPPKSQPITMGPLPPLVLALFLLPLLYLFFRGGSKGRSTQGARNAPGPPKQLPVLGNLLQLGGRPHRYFQSLTQKYGPVVQVQLGRVRMVVVASPEAAKEVLRTNDLHCCSRPNSPGARMLSYNFLDVAFGPYSDYWREMRKLLVLELLSVRRVQSFAYARAAEVDRLVSSLAGTPPGTPVDLSEQLYALSDGIIGTVAFGKMYGSESFERTSFQRMMDETLRVLGSFTFEDFFPSSALARWADALTGVASRRRRVFLRIDRFFDAVIDKHLEPGRLAAGVQEDMVDALVKMWRDQDGALALTRDNIKGILMDTFAGGIDTCAVTTIWIMAELMRNPRVMRKAQSEVRAAVGNKSRVYEEDAQGLKYLKMIVKENFRLHPPGPLLIPRETMQSCEVAGYSVPAGTRIHVNVWAMGRDPEIWDRPEEFFPERFEDAQVDFRGLHFELLPFGSGRRACPAVAMGVANVEVVLANLLYCFDWELPEGVKEDDVDMEETGQLVFSKKVALELVPVKR

SEQ ID NO: 66264 - protein, 504 aa, Triticum aestivum
  peptide (1)..(504): Ceres Seq. ID no. 15170165
MGPLPPLVLALFLLPLLYLFFRGGSKGRSTQGARNAPGPPKQLPVLGNLLQLGGRPHRYFQSLTQKYGPVVQVQLGRVRMVVVASPEAAKEVLRTNDLHCCSRPNSPGARMLSYNFLDVAFGPYSDYWREMRKLLVLELLSVRRVQSFAYARAAEVDRLVSSLAGTPPGTPVDLSEQLYALSDGIIGTVAFGKMYGSESFERTSFQRMMDETLRVLGSFTFEDFFPSSALARWADALTGVASRRRRVFLRIDRFFDAVIDKHLEPGRLAAGVQEDMVDALVKMWRDQDGALALTRDNIKGILMDTFAGGIDTCAVTTIWIMAELMRNPRVMRKAQSEVRAAVGNKSRVYEEDAQGLKYLKMIVKENFRLHPPGPLLIPRETMQSCEVAGYSVPAGTRIHVNVWAMGRDPEIWDRPEEFFPERFEDAQVDFRGLHFELLPFGSGRRACPAVAMGVANVEVVLANLLYCFDWELPEGVKEDDVDMEETGQLVFSKKVALELVPVKR

SEQ ID NO: 66265 - protein, 425 aa, Triticum aestivum
  peptide (1)..(425): Ceres Seq. ID no. 15170166
MVVVASPEAAKEVLRTNDLHCCSRPNSPGARMLSYNFLDVAFGPYSDYWREMRKLLVLELLSVRRVQSFAYARAAEVDRLVSSLAGTPPGTPVDLSEQLYALSDGIIGTVAFGKMYGSESFERTSFQRMMDETLRVLGSFTFEDFFPSSALARWADALTGVASRRRRVFLRIDRFFDAVIDKHLEPGRLAAGVQEDMVDALVKMWRDQDGALALTRDNIKGILMDTFAGGIDTCAVTTIWIMAELMRNPRVMRKAQSEVRAAVGNKSRVYEEDAQGLKYLKMIVKENFRLHPPGPLLIPRETMQSCEVAGYSVPAGTRIHVNVWAMGRDPEIWDRPEEFFPERFEDAQVDFRGLHFELLPFGSGRRACPAVAMGVANVEVVLANLLYCFDWELPEGVKEDDVDMEETGQLVFSKKVALELVPVKR

SEQ ID NO: 66266 - DNA, 1351 bp, Triticum aestivum
  misc_feature (1)..(1351): Ceres Seq. ID no. 15225236
acctcattgatttgttttttcttccagctgttcgacactcgtctgtcacggcgacgggatgaactgacgctgcacggatctcagagaggaaccggatcccttcctccctccgaacggcagctcggcagctcaactcaacccaacccagcccagccgtcgtcgacccgagagaatctgcgaggagcagcagcggagaggaagaagacggtggtctctctccgccatggccagctcgtctgccgacccggagaagctcatggccaaggccgacaaactaaccaaactgagctttacaagatggaatgctgattggaagagtgctaccgccttgtacgaacaagctgcaattgcttatagattcagaaaggacaatgagaaagcaaaggatgcatttgagaaggcttcaaaaggacaagaaatgatctcatcaccgtgggatgctgctaagcatatggaaaatgctggtgctttagcaaaggagcttggactatggaatgaagtttcggacttttatcgcagagcatcagaattttaccgtgaatgtggaagatcacaacctgcctctgatgctcttgcaaagggtgccagtgccttggaagataaagctccagaagaagcaactaaattgtatgatgacgcttgcacacttctagaagaagatggaaaggagcagatggcttttgacttgtaccgtgctgctgcaagtttatatgtgaagcttgagaagtactcggatgccgctgcattccatttaagacttggttcagctgctgataagtgcaatgccgtcaacagccaatgcaaggcctatctgagtgcaatcattatctacctttatgcacatgattttcaacaagctcagaaatgctacaatgattgctcagaggttcaaggcttcctgagtagtgaccagaatcgatgtgcaatgaaactgttgtctgcttatgaggaaggtgatgctgaagaaatcaagcgtgctgctcaatcaagtgccattaatcacctcgaccatgtggtaattcggctcgcaaggaagctaccaacaggtgacctgcaggccatcaagaaagatgtaggaggcgacgacggggattccttggacgaggatgacctaacctgatcccaaactggctggcgagatgcagagagaaccacaatcaatcgagtgactacgccattgatgaacaggaaaggttgtaaaaacacattctggaatcgcatagaaagttgtaggcttcatctgtatcatggatttcgatccccttgttttcgttgtttcggatctgtgcacatacaccctacatctgtactgctggattgctgttgttgcgatattcttattggtttggtt

SEQ ID NO: 66267 - protein, 298 aa, Triticum aestivum
  peptide (1)..(298): Ceres Seq. ID no. 15225237
MASSSADPEKLMAKADKLTKLSFTRWNADWKSATALYEQAAIAYRFRKDNEKAKDAFEKASKGQEMISSPWDAAKHMENAGALAKELGLWNEVSDFYRRASEFYRECGRSQPASDALAKGASALEDKAPEEATKLYDDACTLLEEDGKEQMAFDLYRAAASLYVKLEKYSDAAAFHLRLGSAADKCNAVNSQCKAYLSAIIIYLYAHDFQQAQKCYNDCSEVQGFLSSDQNRCAMKLLSAYEEGDAEEIKRAAQSSAINHLDHVVIRLARKLPTGDLQAIKKDVGGDDGDSLDEDDLT

SEQ ID NO: 66268 - protein, 287 aa, Triticum aestivum
  peptide (1)..(287): Ceres Seq. ID no. 15225238
MAKADKLTKLSFTRWNADWKSATALYEQAAIAYRFRKDNEKAKDAFEKASKGQEMISSPWDAAKHMENAGALAKELGLWNEVSDFYRRASEFYRECGRSQPASDALAKGASALEDKAPEEATKLYDDACTLLEEDGKEQMAFDLYRAAASLYVKLEKYSDAAAFHLRLGSAADKCNAVNSQCKAYLSAIIIYLYAHDFQQAQKCYNDCSEVQGFLSSDQNRCAMKLLSAYEEGDAEEIKRAAQSSAINHLDHVVIRLARKLPTGDLQAIKKDVGGDDGDSLDEDDLT

SEQ ID NO: 66269 - protein, 233 aa, Triticum aestivum
  peptide (1)..(233): Ceres Seq. ID no. 15225239
MISSPWDAAKHMENAGALAKELGLWNEVSDFYRRASEFYRECGRSQPASDALAKGASALEDKAPEEATKLYDDACTLLEEDGKEQMAFDLYRAAASLYVKLEKYSDAAAFHLRLGSAADKCNAVNSQCKAYLSAIIIYLYAHDFQQAQKCYNDCSEVQGFLSSDQNRCAMKLLSAYEEGDAEEIKRAAQSSAINHLDHVVIRLARKLPTGDLQAIKKDVGGDDGDSLDEDDLT

SEQ ID NO: 66270 - DNA, 1880 bp, Triticum aestivum
  misc_feature (1)..(1880): Ceres Seq. ID no. 13658728
agaacatcctaatcgaaaaaaggcccatctgagcccattccccattcccccaaaccctcaccctcctccgccggcatcgaaccgccggagcggccgcgccaccatgcaccacctcctccctcctcgcggctgcctgctccgacgcctgtccacggccgccgagaccgccgcagcctcgccccatccaccgcggcgcccgctggccgattcactctaccgccgcgtcactgccgtatggaacccgcgcctcccgctgactcccgtgctggagcaatgggcggtcacggagggccgggccgtcgagaagaacaacctcatgtgcatcgtcaagaagcccgtccgcatccgccgcttatcccacgcgctcgagctttcaatgtggatgaccgaccggcggtacatgtacctgtcgcctggcgacgtcgcgtaccggctggagctgatcagcaaggtgcagggccccgagagtgccgtgaactactggaagggcttgtcgatccaggtgaagaactctcattgctacggctccctcctgaaatgctatgcggaggcaaagtccgtagacgaggccgaaaagctcttcgcggagatgcaggacttgggaatgatgagatcatatccttacaatgtgatgatgaagctttactgggagaccgggcaggttgagagggtgcacgccatgtacaggaccatggaagagagcggcatcaagcctgatgtcttcagtatcaacattctgttgacggtgctcgcagctgctgggaattttgatggcattgaggaaattatcaagaaggtcgacccgaagatcgtgaattggcactcacatgccattgtagccagggccttcatggaagccgggcagcaaggaaaggccttgcgagctatccaggaatcagaaaagcagataggtcggaaggatgagagggttgcatatgggttcttgctttccatgtttgctgatttgggaatgagtagtgaggcggaccgggtttggaatgtctacaagtccaaagtgccggcatgcaactcgatgtacatgtgcaggataactgcgctgcttaagatgaatgacattgatggtgctgagaaagcctttggagagtgggaaagtaggtatgttcaccatgatatccacttaacaaacttactgctaaatgcttactgtgccaaaggtcttatggagaaggcagaagctctcctggatgaagccatcgccaaagggaggacacctcaccgtagtacttggtatagtttggctagtggatttttccaggacggccaggtgtcgaaggcggtggatatgacaaggaaagctcttgcttgtgcgtcttctcgatgggaacctgacctaacaaatgtgctaatgagcctggaacatttcatggagcaaaagaatgttgaagcagccgaggagatggcaagcctgctacggaatttagtacctttgacaagggatgtttaccacattttactgcagacatatgttcatgcaggacaaccagtgtcagatttacttgatcgcatgaaaaaagatggttttgaggctgatgaagaaacagataaaatcatcgctggaatatgccagtagatatccgcatcttcctatcactaagcaatttcgttggttgtttatttcccatggcaggtagctgctaaaccatccaattattaattagtttgacttccttccactgcttagtgcttatctaagacactgtaattctttaatcttctatatgacggtgtcacagggcagtggggatgtcaaatatattcttagagtatgttcatttgaaaaaaaaaaaaaaaaaagcttatcgataccgtcgacctcgagggggggcccggtacccaataaagtgggaacgggagggggg

SEQ ID NO: 66271 - protein, 529 aa, Triticum aestivum
  peptide (1)..(529): Ceres Seq. ID no. 15220659
EHPNRKKAHLSPFPIPPNPHPPPPASNRRSGRATMHHLLPPRGCLLRRLSTAAETAAASPHPPRRPLADSLYRRVTAVWNPRLPLTPVLEQWAVTEGRAVEKNNLMCIVKKPVRIRRLSHALELSMWMTDRRYMYLSPGDVAYRLELISKVQGPESAVNYWKGLSIQVKNSHCYGSLLKCYAEAKSVDEAEKLFAEMQDLGMMRSYPYNVMMKLYWETGQVERVHAMYRTMEESGIKPDVFSINILLTVLAAAGNFDGIEEIIKKVDPKIVNWHSHAIVARAFMEAGQQGKALRAIQESEKQIGRKDERVAYGFLLSMFADLGMSSEADRVWNVYKSKVPACNSMYMCRITALLKMNDIDGAEKAFGEWESRYVHHDIHLTNLLLNAYCAKGLMEKAEALLDEAIAKGRTPHRSTWYSLASGFFQDGQVSKAVDMTRKALACASSRWEPDLTNVLMSLEHFMEQKNVEAAEEMASLLRNLVPLTRDVYHILLQTYVHAGQPVSDLLDRMKKDGFEADEETDKIIAGICQ

SEQ ID NO: 66272 - protein, 495 aa, Triticum aestivum
  peptide (1)..(495): Ceres Seq. ID no. 15220660
MHHLLPPRGCLLRRLSTAAETAAASPHPPRRPLADSLYRRVTAVWNPRLPLTPVLEQWAVTEGRAVEKNNLMCIVKKPVRIRRLSHALELSMWMTDRRYMYLSPGDVAYRLELISKVQGPESAVNYWKGLSIQVKNSHCYGSLLKCYAEAKSVDEAEKLFAEMQDLGMMRSYPYNVMMKLYWETGQVERVHAMYRTMEESGIKPDVFSINILLTVLAAAGNFDGIEEIIKKVDPKIVNWHSHAIVARAFMEAGQQGKALRAIQESEKQIGRKDERVAYGFLLSMFADLGMSSEADRVWNVYKSKVPACNSMYMCRITALLKMNDIDGAEKAFGEWESRYVHHDIHLTNLLLNAYCAKGLMEKAEALLDEAIAKGRTPHRSTWYSLASGFFQDGQVSKAVDMTRKALACASSRWEPDLTNVLMSLEHFMEQKNVEAAEEMASLLRNLVPLTRDVYHILLQTYVHAGQPVSDLLDRMKKDGFEADEETDKIIAGICQ

SEQ ID NO: 66273 - protein, 424 aa, Triticum aestivum
  peptide (1)..(424): Ceres Seq. ID no. 15220661
MCIVKKPVRIRRLSHALELSMWMTDRRYMYLSPGDVAYRLELISKVQGPESAVNYWKGLSIQVKNSHCYGSLLKCYAEAKSVDEAEKLFAEMQDLGMMRSYPYNVMMKLYWETGQVERVHAMYRTMEESGIKPDVFSINILLTVLAAAGNFDGIEEIIKKVDPKIVNWHSHAIVARAFMEAGQQGKALRAIQESEKQIGRKDERVAYGFLLSMFADLGMSSEADRVWNVYKSKVPACNSMYMCRITALLKMNDIDGAEKAFGEWESRYVHHDIHLTNLLLNAYCAKGLMEKAEALLDEAIAKGRTPHRSTWYSLASGFFQDGQVSKAVDMTRKALACASSRWEPDLTNVLMSLEHFMEQKNVEAAEEMASLLRNLVPLTRDVYHILLQTYVHAGQPVSDLLDRMKKDGFEADEETDKIIAGICQ

SEQ ID NO: 66274 - DNA, 1034 bp, Triticum aestivum
  misc_feature (1)..(1034): Ceres Seq. ID no. 12620190
cttttttcttcgcacggatagacggacctccgactcccgtgagtccgctgggcgtggtgcgccatgacccccgccctgcttcccctcgccccctcgcctccttatccaaagccaccacggctatgcctcaaacccacccccgcgcgcccgctctaccggtgcgacgccacacgccgcgacttcgctatctacaccgcctccgctgccgcagccgcagccgcaatgagcctcgccgccgctactgcggcagatgaggcgctcccttcggcgtcacagtcaccgacgcctcaccctccaaacggcggggctacctcgttgctggtcggcatcgcaaacacgaggtcgtggtcgcagtactacggcagcggcttctccatccgcgtgccgccgtccttcgacaacatcttggagcccgaggatttcagcgccgccatgacctattatggcgacaaggccaaggtcagggcgtacgcagctcggttcgcatctccagataggtcagaacttgtaagcgtggtaatcaagccatctaatcagctcaagatcacattcctagaggccaaagatataacggagttgggcactctaaaggaggcgtccaagttatttgtacctggcggtgcgaaaatatactcagctcgaacaattaaagttaaggatcaggagggtatcaggacgtattacttctacgaatttcggtttgacagacaacatgttgctctaatggccaccgtggatagtgggaagacatatatcgctgccgccactgctccagagacgaggtgggagacggatggagtgacattgcgttcggctgctgtatctatgtctctcacatgatctacactagtgtcaaaaatgctcttatatttgttagacctttcagcctgagcattgatagttgtggatgacactaggagagttgggacaattttcgttggtttatttctcacacaatgccatgccaacctgaggggttggggatacatatttataggctgctagccagccaaggcatatgctaagatgctgcc

SEQ ID NO: 66275 - protein, 258 aa, Triticum aestivum
  peptide (1)..(258): Ceres Seq. ID no. 12620191
MTPALLPLAPSPPYPKPPRLCLKPTPARPLYRCDATRRDFAIYTASAAAAAAAMSLAAATAADEALPSASQSPTPHPPNGGATSLLVGIANTRSWSQYYGSGFSIRVPPSFDNILEPEDFSAAMTYYGDKAKVRAYAARFASPDRSELVSVVIKPSNQLKITFLEAKDITELGTLKEASKLFVPGGAKIYSARTIKVKDQEGIRTYYFYEFRFDRQHVALMATVDSGKTYIAAATAPETRWETDGVTLRSAAVSMSLT

SEQ ID NO: 66276 - protein, 205 aa, Triticum aestivum
  peptide (1)..(205): Ceres Seq. ID no. 12620192
MSLAAATAADEALPSASQSPTPHPPNGGATSLLVGIANTRSWSQYYGSGFSIRVPPSFDNILEPEDFSAAMTYYGDKAKVRAYAARFASPDRSELVSVVIKPSNQLKITFLEAKDITELGTLKEASKLFVPGGAKIYSARTIKVKDQEGIRTYYFYEFRFDRQHVALMATVDSGKTYIAAATAPETRWETDGVTLRSAAVSMSLT

SEQ ID NO: 66277 - protein, 135 aa, Triticum aestivum
  peptide (1)..(135): Ceres Seq. ID no. 12620193
MTYYGDKAKVRAYAARFASPDRSELVSVVIKPSNQLKITFLEAKDITELGTLKEASKLFVPGGAKIYSARTIKVKDQEGIRTYYFYEFRFDRQHVALMATVDSGKTYIAAATAPETRWETDGVTLRSAAVSMSLT

SEQ ID NO: 66278 - DNA, 1619 bp, Triticum aestivum
  misc_feature (1)..(1619): Ceres Seq. ID no. 12779909
ccaatccatagccgccacaccctccctcctcctatttcctccctcgtctgccgccgccacgccctccctcctcgtcgccctgtctctgcccagctttgccgcctcccacgcgctcgtcctctcatctcccatggaggggaggggtgaggatgttgggaaaggaggaagccggagatgaggaggtcgatgcaggggacgccatggatggtcggggcgctggctcctcctttccccatgccacggctgcccagatccggcgatcccctcccactccggcatccaggttggaggcattggcgtgaaggtgtcgtgagttatctgcaagggcattgttctgacgtgctcctccatgtctcccgcgagttcttggtgtggcgatcatggctccagatagcataaaatcgacatcatgggtgtcggtgcagaatgacggaggagcgggagaagcaggagctgctcggacgcgctagcgccagtgagatcttccagcatgcgccgacggacaagccggcattcacgctggcccagatcaaggaggcaatcccgcctcactactttcagtgctcgttgatcaagtccttctcctatgtggtctatgacctcgtcatcagcgcgtccctcctgtacgccgggttggtctggatcccagcactctcgagcatgcaatagctgggcgcctgtccgctctactgggtgcctcattttgattttcttaccttggtgggtttgtattcagaaaattaatttgcctatttttgctttttaatctgtgttgggagaaagatgttcctctttgttgagaaaatgtttattgtatggaccatacaaggttctttctccaaatgttattgtgtggtgcaactatgatctattttccttgtgcagaggtctgtgacgaggcagacaggtggcgggcggcaacaataggggttggcggatgctccgagaccaatagcctacttagtgatgggaaggaggatctgacaagttaacccccacaattgtgttgttggaggacttctgcgagctcagtaaaataatgaatcttcatctccgatgttttctctcgaaaatggagcgcggatcgcaggagcaaggagctggtcgagtgtagtgaacaaacaatcaacgcggcacatttggaagttgtgagagctgtgaatggcaccggtcttgtcatactaatgagcaggagcaccggccacattactcttcatgccactctgagcagtcggttgctacttgagattgatttccatgttgaaggaaagggagaccagattgagttcctgtatatgcaagaagaaggggcattgtcgtggttgttgctgaaggtgttggtcaggagctgattaccgggactgatgacaagaacgaagagcaagatgagtatgtcaacatgttgttccttaacgttggccttcttctataaagttcacatgcaactctcctccatggttagaaaaaactaatttaaacgttttgtttctttgatggttactcatttctcttaccattgttgtatcaaaacaattttattttcgctgatggccgcttgggctcattttcgaagagaatgagatgtggaataaactactctaaaatggttggttccctcc

SEQ ID NO: 66279 - protein, 80 aa, Triticum aestivum
  peptide (1)..(80): Ceres Seq. ID no. 12779910
MTEEREKQELLGRASASEIFQHAPTDKPAFTLAQIKEAIPPHYFQCSLIKSFSYVVYDLVISASLLYAGLVWIPALSSMQ

SEQ ID NO: 66280 - protein, 74 aa, Triticum aestivum
  peptide (1)..(74): Ceres Seq. ID no. 12779911
MRRSMQGTPWMVGALAPPFPMPRLPRSGDPLPLRHPGWRHWREGVVSYLQGHCSDVLLHVSREFLVWRSWLQIA

SEQ ID NO: 66281 - protein, 70 aa, Triticum aestivum
  peptide (1)..(70): Ceres Seq. ID no. 12779912
MQGTPWMVGALAPPFPMPRLPRSGDPLPLRHPGWRHWREGVVSYLQGHCSDVLLHVSREFLVWRSWLQIA

SEQ ID NO: 66282 - DNA, 2913 bp, Triticum aestivum
  misc_feature (1)..(2913): Ceres Seq. ID no. 14302891
aaaactctcctcctcctcctccgtctcccagaccaaacgccgcccctctcctccacctcctcccccctcatccatggcgatggcgacctctcacttgcccgactaaacaaacaagcaagctcacgcaagcgcgcacccagacccactgagagcccggacaaaggggtcaagaagacaaggaagaggcgccggtagccactagccactcgtccggcatcccgaggtcgaccatggagaagttcctgttcgaggagctggccggggacgccgtgcgggagctgctgcgcgcggtgcagggcaccttcctgtgccgctccaccgccgagcgcctgcgccggaacgtcgagccgctgctgcccctcgtgcagcagaacggccgccacgcgctccggagcaacgccgagctgggcgagctcgccgtgcagctcagggaggcgctcgacctcgcgcgccgcgccgccgccgccccgcgctggaacgtgtaccgcaccgcgcagctggcccgcaggatggaggccgccgacaagggcatcgagcgctggctggcgcgccacgcccccgcgcacgtgctcgacggcgtgcgccgcctccgcgacgaggccgaggcccgcatcggccgcctcgagcgccgcgtcgaggaggtcgccgcgctgcaggcagcccccacgatcccgcccgccatgtcccttcccgtcgcactgccgccgccgccctccaagggcatggcgatggcggtagaggtggcgccgccgaccaaggccatggggatgccgatggaggtggcgccaccgaccaagggcatggggattccgatggatttcgagttcccgtgcgaggaggagagcaaggacgccggcttggtgggaagcggcgtcaaggtgggcaaggagagagtgaaggagatggtgatgagcagcgggggcggctgggaggtcgtcggcatctgcggcatgggcggcagcggcaagaccacgctcgccatggagatctataaggatcaaaagatccaaggctacttcaacaacagggtcttctttgagacggtctcacagtccgcaaatctggagaccatcaagatgaagctgtgggagcagatcagcagcaatattgtgcttggtgcatataaccagataccggaatggcagctcaagttagggccgagggaccgaggaccagtccttgttatacttgatgatgtgtggtctctctcacagctcgaggagctggtcttcaagttccctggctgcaaaacccttgtcgtatcaaggttgaagttccccacgttagtctcccggacttacgaaatgaaattactcggcgaagaggaggctctctctgtcttctgcagtgctgccttcggtcaggagtctgttcctcagactgctgacaagaaactggttaagcaggttgctgccgagtgcagagggcttcctctagctctcaaggttatcggcgcatccttgcgtgatcagcctcctatgatatggttgagcgcgaagaaccgcttgtcacgaggagagtctatatcggactcacatgagaccaaactcctcgagagaatggcagcaagtgtcgagtgcttgtcgggaaaggttagggaatgtttccttgacctgggttgcttcccagaggataagaagatccctcttgatgtgttgatcaatatttggatggagatacatgatcttgacaagccagatgctttcgccatcctcatggagctatcgaacaagaacctgcttaccctagttaatgatgcacagaataaagctggagatttatacagtaactatcatgactactcagtgacgcaacatgatgtgttgcgtgatctggcacttcacatgagcggtcgtgattctctgaacaaaaggaggcggttagtgatgccaagaagagaagaatcgcttccgagagattggcagaggaataaggaccttccctttgaagctcagattgtttctattcatacaggtgagatgaaagaatctgactggttccagatgagcttccccaaggcagaagttcttatcctcaacttcgcctcaagtgtatactacctcccgtcgttcattgcaacaatgcagaacctgaaggccctggtgctgatcaactatggtactaccagtgcaacccttgacaatttatctgccttcaccacactgagtgacctgaggagtctttggctggaaaagattacgctcccgccactgccgaaaagcacgatcccactgaagaacctgcgcaagatatccctcgtcctttgtgagctgaacaacagtctaagaggatcaacaatggatctctccatgacgtttccgcgcttatccaacctcaccatcgaccattgcgtagatctgaaggagctgccacctagtgtatgtgaaatcagctctctggaaagcatctccttgtcaaactgccatgacctcacagagctgccatatgagctgggcaagctgcactgcctgagcatcttgcgggtgtacgcctgcccggcactgtggaagcttccaccgtcggtatgcagcctgaagaggctgaaatacctggacatatcgcagtgcattaaccttacagaccttccagaagagcttggccacctgacaaacctagagaagatcgacatgcgggaatgctcgcggttgaggagcctccctaggtcctcctcgtcgttgaagtccctcgggcacgtcgtgtgcgacgaggaaacggcgatgctgtggagggaagccgagcaggtcatcccggacctccgtgtgcaggtagcagaagagtgttacaacctggactggcttgtagactgatgttctggatgctctctgcctccaggctcaccatgtacaaatgatgtgtatatgtttccctgcttaaatgcaggatgggtagtcaatacactgttcagttttgacg

SEQ ID NO: 66283 - protein, 858 aa, Triticum aestivum
  peptide (1)..(858): Ceres Seq. ID no. 14302892
MEKFLFEELAGDAVRELLRAVQGTFLCRSTAERLRRNVEPLLPLVQQNGRHALRSNAELGELAVQLREALDLARRAAAAPRWNVYRTAQLARRMEAADKGIERWLARHAPAHVLDGVRRLRDEAEARIGRLERRVEEVAALQAAPTIPPAMSLPVALPPPPSKGMAMAVEVAPPTKAMGMPMEVAPPTKGMGIPMDFEFPCEEESKDAGLVGSGVKVGKERVKEMVMSSGGGWEVVGICGMGGSGKTTLAMEIYKDQKIQGYFNNRVFFETVSQSANLETIKMKLWEQISSNIVLGAYNQIPEWQLKLGPRDRGPVLVILDDVWSLSQLEELVFKFPGCKTLVVSRLKFPTLVSRTYEMKLLGEEEALSVFCSAAFGQESVPQTADKKLVKQVAAECRGLPLALKVIGASLRDQPPMIWLSAKNRLSRGESISDSHETKLLERMAASVECLSGKVRECFLDLGCFPEDKKIPLDVLINIWMEIHDLDKPDAFAILMELSNKNLLTLVNDAQNKAGDLYSNYHDYSVTQHDVLRDLALHMSGRDSLNKRRRLVMPRREESLPRDWQRNKDLPFEAQIVSIHTGEMKESDWFQMSFPKAEVLILNFASSVYYLPSFIATMQNLKALVLINYGTTSATLDNLSAFTTLSDLRSLWLEKITLPPLPKSTIPLKNLRKISLVLCELNNSLRGSTMDLSMTFPRLSNLTIDHCVDLKELPPSVCEISSLESISLSNCHDLTELPYELGKLHCLSILRVYACPALWKLPPSVCSLKRLKYLDISQCINLTDLPEELGHLTNLEKIDMRECSRLRSLPRSSSSLKSLGHVVCDEETAMLWREAEQVIPDLRVQVAEECYNLDWLVD

SEQ ID NO: 66284 - protein, 765 aa, Triticum aestivum
  peptide (1)..(765): Ceres Seq. ID no. 14302893
MEAADKGIERWLARHAPAHVLDGVRRLRDEAEARIGRLERRVEEVAALQAAPTIPPAMSLPVALPPPPSKGMAMAVEVAPPTKAMGMPMEVAPPTKGMGIPMDFEFPCEEESKDAGLVGSGVKVGKERVKEMVMSSGGGWEVVGICGMGGSGKTTLAMEIYKDQKIQGYFNNRVFFETVSQSANLETIKMKLWEQISSNIVLGAYNQIPEWQLKLGPRDRGPVLVILDDVWSLSQLEELVFKFPGCKTLVVSRLKFPTLVSRTYEMKLLGEEEALSVFCSAAFGQESVPQTADKKLVKQVAAECRGLPLALKVIGASLRDQPPMIWLSAKNRLSRGESISDSHETKLLERMAASVECLSGKVRECFLDLGCFPEDKKIPLDVLINIWMEIHDLDKPDAFAILMELSNKNLLTLVNDAQNKAGDLYSNYHDYSVTQHDVLRDLALHMSGRDSLNKRRRLVMPRREESLPRDWQRNKDLPFEAQIVSIHTGEMKESDWFQMSFPKAEVLILNFASSVYYLPSFIATMQNLKALVLINYGTTSATLDNLSAFTTLSDLRSLWLEKITLPPLPKSTIPLKNLRKISLVLCELNNSLRGSTMDLSMTFPRLSNLTIDHCVDLKELPPSVCEISSLESISLSNCHDLTELPYELGKLHCLSILRVYACPALWKLPPSVCSLKRLKYLDISQCINLTDLPEELGHLTNLEKIDMRECSRLRSLPRSSSSLKSLGHVVCDEETAMLWREAEQVIPDLRVQVAEECYNLDWLVD

SEQ ID NO: 66285 - protein, 708 aa, Triticum aestivum
  peptide (1)..(708): Ceres Seq. ID no. 14302894
MSLPVALPPPPSKGMAMAVEVAPPTKAMGMPMEVAPPTKGMGIPMDFEFPCEEESKDAGLVGSGVKVGKERVKEMVMSSGGGWEVVGICGMGGSGKTTLAMEIYKDQKIQGYFNNRVFFETVSQSANLETIKMKLWEQISSNIVLGAYNQIPEWQLKLGPRDRGPVLVILDDVWSLSQLEELVFKFPGCKTLVVSRLKFPTLVSRTYEMKLLGEEEALSVFCSAAFGQESVPQTADKKLVKQVAAECRGLPLALKVIGASLRDQPPMIWLSAKNRLSRGESISDSHETKLLERMAASVECLSGKVRECFLDLGCFPEDKKIPLDVLINIWMEIHDLDKPDAFAILMELSNKNLLTLVNDAQNKAGDLYSNYHDYSVTQHDVLRDLALHMSGRDSLNKRRRLVMPRREESLPRDWQRNKDLPFEAQIVSIHTGEMKESDWFQMSFPKAEVLILNFASSVYYLPSFIATMQNLKALVLINYGTTSATLDNLSAFTTLSDLRSLWLEKITLPPLPKSTIPLKNLRKISLVLCELNNSLRGSTMDLSMTFPRLSNLTIDHCVDLKELPPSVCEISSLESISLSNCHDLTELPYELGKLHCLSILRVYACPALWKLPPSVCSLKRLKYLDISQCINLTDLPEELGHLTNLEKIDMRECSRLRSLPRSSSSLKSLGHVVCDEETAMLWREAEQVIPDLRVQVAEECYNLDWLVD

SEQ ID NO: 66286 - DNA, 2283 bp, Triticum aestivum
  misc_feature (1)..(2283): Ceres Seq. ID no. 13658707
catcctaatcgaaaacmmycmtcccgttaaaacttyatyrwrttsmkcwtgctggggctgctgctgctgctgcttcttcttcttctctctccccaccgcctcccccttcctcatcctcctctctcagtccgaagccgattacttagcagcttgccttcgtcttcctctcctgcggttcctggagctacgtcttctcggcccctgccctttggttcgccgctccgctctcccccttctgccgcaaagggggacactcatggcgagtctagtaagtacgtttatcaccgcttgggttaaggaattcctgtggttttttggccgagaaggtgctcttcacggcgcttccttcccagattggttcagtttggttgttgcacggcgccgtggtgagctagggcgccccactgctattgatttccgccgcttggtgtcctccccaaattcgagatcctcctgttgagatcttgcgatccgacgcgcggtttcttgcttcttgcgaattggatttcctgattgatctggaaatctttttgaagcttcgtgttggattcatggagttgcagtgcaaactagtactgactggttcgtgttcttgtgctgctctgttttgttgcaggtagttctggcatcgctgcttaccgtaattgggctcgcgcagggggaggcgcaatgtgcgcggtacagcgggcggccgcggccacatagcgtgaccatcactgagtttggggccgtcggcgacggcctgaccgtcaatacggtgcccttccagaacgccatcttctacctgcggtcctttgccgacaagggcggcgcacagctgtacgtgcccaaggggcggtggctcaccggcagcttcaacctcaccagccacctcacccttttcctggagaaggacgctgtcatcatcggcaccgaggatgtgacacaatggccaattgtggaacctttgccatcatatggccaaggaattgatcttccgggtgcaaggcatcgcagcttaataaatgggcacaatgttaccgatgtcataattacagggaacaatggaatcgtagacggccagggtttgatatggtggaactggtttcgctcgaataaattgaattatagccggcctcatcttgtggagtttgagtattcggaagaaattgtgatttcgaacttgacattcttagattccccagcatggggtatacatcctgtgtattgcagcaatgtaacaatcagtaatgtcacaatcgagactgaattggatgctccactcaccaatggaattgtcccagattcatgctcgaatctgtgcattgaggacagcataattagtgtcggtcatgatgccatctcattaaaaagtgggtgggacaactatggcattacatttggaaggccaacctcagacattcacattagtagagtggatctgcaagcctcactgggagctgctcttgcatttggcagtgagatgtctggtgggatctcggatgttcatgttgatcacctttatattcatggttcatccaaaggtatctccttcaggacagcaccaggccgtggtggttatataagggatgcgatagtatcaaatgtccagatggaagatgtccatgttgcaatcgagttcaccggcgattggtcaagccatcctgatgaacattttgatttgtctgcactcccggagatcagtggaatcaccttaaaagacatggttggaataaacatttcgtttgcaggagttttgtcgggaatcgatggcgatcctttcaccaatatctgcctctccaatatcaatttcaccatagctgattcagcgcattctgcctcttggtcttgctccaacgtttctggatactccgagtcggtatttcccgaggcttgttctgacctccacagtcaatcatcaaattcctccatctgctcatccacccttaggtaccatgccctcgcgacagcgtaaatgcatatagcacccaatattcatcctttcatgtttctgtccatgtacaatctggagacatcaagctgtagcttcatcaccatctttccccccaaaaaattctcttccgttataggtgcatcaaagaatcatcgggcttcgtacagtcagctttgaggctcataatacaaaaatttggctggcgtccttgatgagtccagagaggtgtttccttgtacagttacatttgttcattcaatctgtaagaaattttgtccggtaggttgtctgagtccaaagagttggtttatattgttgtttattttattgccatatataaaataaacatt

SEQ ID NO: 66287 - protein, 163 aa, Triticum aestivum
  peptide (1)..(163): Ceres Seq. ID no. 15219913
MSGGISDVHVDHLYIHGSSKGISFRTAPGRGGYIRDAIVSNVQMEDVHVAIEFTGDWSSHPDEHFDLSALPEISGITLKDMVGINISFAGVLSGIDGDPFTNICLSNINFTIADSAHSASWSCSNVSGYSESVFPEACSDLHSQSSNSSICSSTLRYHALATA

SEQ ID NO: 66288 - protein, 152 aa, Triticum aestivum
  peptide (1)..(152): Ceres Seq. ID no. 15219914
  misc_feature (6)..(6): Xaa is any aa, unknown or other
  misc_feature (7)..(7): Xaa is any aa, unknown or other
  misc_feature (12)..(12): Xaa is any aa, unknown or other
  misc_feature (13)..(13): Xaa is any aa, unknown or other
  misc_feature (14)..(14): Xaa is any aa, unknown or other
  misc_feature (15)..(15): Xaa is any aa, unknown or other
  misc_feature (16)..(16): Xaa is any aa, unknown or other
ILIENXXPVKTXXXXXCWGCCCCCFFFFSLPTASPFLILLSQSEADYLAACLRLPLLRFLELRLLGPCPLVRRSALPLLPQRGTLMASLVSTFITAWVKEFLWFFGREGALHGASFPDWFSLVVARRRGELGRPTAIDFRRLVSSPNSRSSC

SEQ ID NO: 66289 - protein, 120 aa, Triticum aestivum
  peptide (1)..(120): Ceres Seq. ID no. 15219915
MEDVHVAIEFTGDWSSHPDEHFDLSALPEISGITLKDMVGINISFAGVLSGIDGDPFTNICLSNINFTIADSAHSASWSCSNVSGYSESVFPEACSDLHSQSSNSSICSSTLRYHALATA

SEQ ID NO: 66290 - DNA, 2306 bp, Triticum aestivum
  misc_feature (1)..(2306): Ceres Seq. ID no. 13590691
actccaaacccaaaccaactcaacgcgcacacgcgcccccgagacgccaccagaccgccaccatccgcagctcaggcccgaccgacgcggctcggctcagcagtcggcgtcgtctcctctcccccgctcccccgctcccccctccaccgcctcgatcccgcccgcccgcggccgcgcgatcggatccggccagatcccgcgccggcggccatggagaacctgatctcgctcgtcaacaagctgcagcgcgcctgcacggcgctcggcgaccacggcgaggagagcgccctccccaccctctgggactcgctgccgtccatcgccgtcgtcggcggccagagttcgggcaaatcttcggtgctggagagcgttgttggaaaggatttcctgcccaggggctcaggcattgtcacccgtcgcccgctggttctgcaactccataggattgatggagacagggagtatgcagagttcatgcatgtccccaggaagagattcaccgattttgccatggtgaggaaggagatagctgacgaaactgacagacaaactggccatggaaagggaatatcatctgttcccatccatctaagcatattttctccaaacgttgtgaatttgactcttattgatcttcctgggcttactaaagttgctgttgagggtcagccggagagtatcgttcaggaaattgaaaacatggttcgagcattcattgaaaagcccaactgcatcattctggctgtttctccagccaatcaggatcttgcaacttctgatgctatcaagatttcacgggaagttgacccaaaaggtgaacggacctttggtgtgctcacgaaaattgatttaatggacaagggtactgatgctgttgatatactggaaggaagagcttacaggctccaatttccatggattggtgttgtcaatcgatcccagcaagatatcaacaagagtgtggacatgattgctgctaggcgtagagagcgtgactatttcgcaaacacaccagaatacaagcatctcgctcataggatgggatcagaacatttagcaaagagtctatcaaagcatttggagtctgttattaaatcaagaatcccgggtctccagtctcttataacgaagacagttgcagagctggaaactgaacttactcgtcttggaaagcccattgctaatgatgctggaggaaagctgtacacgattatggaaatatgccgcatgtttgatggcatctacaaagagcatctggatggagtgcgccctggtggtgagaaaatttaccatgtctttgacaatcagtttcctgtggcaattaaacggttgcagtttgataagcaactgtcaatggaaaatgtgaggaagctcataacggaagctgatggataccagcctcacttgatagctccagagcaaggatatcggcgcctcatagaatcttgtcttgttagtatcagaggtcctgccgaggcagctgttgacacggtccatggaatcctaaaggaactagtccacaaggctataaatgaaactcatgagctcaagcagttccccactcttcgtgtggaagttggcaatgcagcttttgagtcgttggaaagaatgagggacgaaagcaagaagaacacattaaagctagttgatatggaaacaagctacttaactgtagattttttcaggaagcttcctcaggatgttgagaagggtggaaatccaagccactctatttttgatagatataatgattcttatctaagacgaattgggacaactgttctggcatatgttaacatggtatcttcaacattgaggaactccatcccaaaatctattgtgtactgccaagtccgtgaggcaaagcgctcattgctcgaccacttctttactgagctgggagcaagagagattaggcaactttcgaagctccttgacgaggaccccgcggtcatggagcggaggacaaacctcgccaagaggctggagctataccggagcgcccaagcagagatcgacgcagttgcatggtcaaaataattttttgtcgacttatcgttccgtagtgtgtgttcacctttactccttgtttggtgacatgtctccccttattctgagggtcatatatagctgattctttcttcccgttctaggtcatattatattcttattagatgacagcagctgtgaggtgtgtcatgtgtttgtgcttttgctccttgtgcttgaggatctctctctaggggggacacctttctgctgtaccttgtctgtatcacgtacgagttcatgttattatgatttcc

SEQ ID NO: 66291 - protein, 679 aa, Triticum aestivum
  peptide (1)..(679): Ceres Seq. ID no. 15220998
TPNPNQLNAHTRPRDATRPPPSAAQARPTRLGSAVGVVSSPPLPRSPLHRLDPARPRPRDRIRPDPAPAAMENLISLVNKLQRACTALGDHGEESALPTLWDSLPSIAVVGGQSSGKSSVLESVVGKDFLPRGSGIVTRRPLVLQLHRIDGDREYAEFMHVPRKRFTDFAMVRKEIADETDRQTGHGKGISSVPIHLSIFSPNVVNLTLIDLPGLTKVAVEGQPESIVQEIENMVRAFIEKPNCIILAVSPANQDLATSDAIKISREVDPKGERTFGVLTKIDLMDKGTDAVDILEGRAYRLQFPWIGVVNRSQQDINKSVDMIAARRRERDYFANTPEYKHLAHRMGSEHLAKSLSKHLESVIKSRIPGLQSLITKTVAELETELTRLGKPIANDAGGKLYTIMEICRMFDGIYKEHLDGVRPGGEKIYHVFDNQFPVAIKRLQFDKQLSMENVRKLITEADGYQPHLIAPEQGYRRLIESCLVSIRGPAEAAVDTVHGILKELVHKAINETHELKQFPTLRVEVGNAAFESLERMRDESKKNTLKLVDMETSYLTVDFFRKLPQDVEKGGNPSHSIFDRYNDSYLRRIGTTVLAYVNMVSSTLRNSIPKSIVYCQVREAKRSLLDHFFTELGAREIRQLSKLLDEDPAVMERRTNLAKRLELYRSAQAEIDAVAWSK

SEQ ID NO: 66292 - protein, 609 aa, Triticum aestivum
  peptide (1)..(609): Ceres Seq. ID no. 15220999
MENLISLVNKLQRACTALGDHGEESALPTLWDSLPSIAVVGGQSSGKSSVLESVVGKDFLPRGSGIVTRRPLVLQLHRIDGDREYAEFMHVPRKRFTDFAMVRKEIADETDRQTGHGKGISSVPIHLSIFSPNVVNLTLIDLPGLTKVAVEGQPESIVQEIENMVRAFIEKPNCIILAVSPANQDLATSDAIKISREVDPKGERTFGVLTKIDLMDKGTDAVDILEGRAYRLQFPWIGVVNRSQQDINKSVDMIAARRRERDYFANTPEYKHLAHRMGSEHLAKSLSKHLESVIKSRIPGLQSLITKTVAELETELTRLGKPIANDAGGKLYTIMEICRMFDGIYKEHLDGVRPGGEKIYHVFDNQFPVAIKRLQFDKQLSMENVRKLITEADGYQPHLIAPEQGYRRLIESCLVSIRGPAEAAVDTVHGILKELVHKAINETHELKQFPTLRVEVGNAAFESLERMRDESKKNTLKLVDMETSYLTVDFFRKLPQDVEKGGNPSHSIFDRYNDSYLRRIGTTVLAYVNMVSSTLRNSIPKSIVYCQVREAKRSLLDHFFTELGAREIRQLSKLLDEDPAVMERRTNLAKRLELYRSAQAEIDAVAWSK

SEQ ID NO: 66293 - protein, 521 aa, Triticum aestivum
  peptide (1)..(521): Ceres Seq. ID no. 15221000
MHVPRKRFTDFAMVRKEIADETDRQTGHGKGISSVPIHLSIFSPNVVNLTLIDLPGLTKVAVEGQPESIVQEIENMVRAFIEKPNCIILAVSPANQDLATSDAIKISREVDPKGERTFGVLTKIDLMDKGTDAVDILEGRAYRLQFPWIGVVNRSQQDINKSVDMIAARRRERDYFANTPEYKHLAHRMGSEHLAKSLSKHLESVIKSRIPGLQSLITKTVAELETELTRLGKPIANDAGGKLYTIMEICRMFDGIYKEHLDGVRPGGEKIYHVFDNQFPVAIKRLQFDKQLSMENVRKLITEADGYQPHLIAPEQGYRRLIESCLVSIRGPAEAAVDTVHGILKELVHKAINETHELKQFPTLRVEVGNAAFESLERMRDESKKNTLKLVDMETSYLTVDFFRKLPQDVEKGGNPSHSIFDRYNDSYLRRIGTTVLAYVNMVSSTLRNSIPKSIVYCQVREAKRSLLDHFFTELGAREIRQLSKLLDEDPAVMERRTNLAKRLELYRSAQAEIDAVAWSK

SEQ ID NO: 66294 - DNA, 1564 bp, Triticum aestivum
  misc_feature (1)..(1564): Ceres Seq. ID no. 13658911
gtcagcaaaccttctccccacccccacccccccgccccgccgcgggagcgctccgcggccgccatggcgtctcctccgggcccggggtctgccaaccgcgcgctctcctcctcatcgagggggccgctctcgcccttccccggcggcgcgggcccgttcctccggcatcaacatcctcccggcggcgactccgacggcggcgcctcgttcgacgaagatgacgacgacgatgacgaggaggaggaggatggggaggatcaggacgccgagctggcggcccgcagctcgcagcagcgacgcgccgcctctccaggtgatcactgacgctgttgcttgctggttcacgcagcaagaatcgggcggcctgtggtgaatggggagaatggagggagtcaaatccaggaagggcagcaatggcagctgtacagctgtggaaccgagcagcatgaccgcgcttcgtctagaggggacgaagaacctggttctgttcccagggagatgagggtggaggatggatatggggttattgggagaagagagggaggccctgcatctagctactgggacctgctcagagcgcacctttcggacccgttgacaggtattctcatggacgacgcaatgattctttcatgtggccattcttatggaagtagtgggatgcagcatatctacagaatgaaagcttgtggtaaatgtggtcagccaatcaccgagaactccattcgaccaaacctggctcttggccttgcagtccaggcatttagacgagaggaagagtcggcaaaaacgttgaaaagaaaaagagaccgcctggaacaggtatacacttttttccgggtctatgttactgaatgcccgaacatggacagttgaacatgttacacgatgttcttaaatctgttctctctgtaaaatgaggacaaatgtggcaacgatgacccgggtccagctgaggtttcaagaggcaaaggtgtccagtatcctttcgctgtcttcgaccgggtgataatcaagggaaacaagaggaccccggagcggttcgtggggcgcgtcgcggtggtgacggctcagtgcttgaatggatggtacgtggtgaagaccctggacaacgcggagagcgtgaagctgcagtaccgttcgctggcgaagttcgtcgacggcggcggcggcgagcctcctgccgtggcctccaacagttcccagaacacaagctggttgtgacttggaaggtacaaaagcagatcatgctgagcacaagcacagaatcagatctccaggcccccatcttttgctgtttccaggaggaggcaaacagtagagtgaggaacattatccttttttggtagccaatcacagtgtcaatctttatggtgctcctctttcctttcctttttctttttgtggcagcaactaggtaccatgtggtgtcagtcagtgtccttgtgatgtgaggctttgtagaatgctaccattccagtacacccttatccaggctgctgtgataaatcaggaagcaatcatggtgccaccaaagggcaaccaccaacacaaaagtttggtg

SEQ ID NO: 66295 - protein, 125 aa, Triticum aestivum
  peptide (1)..(125): Ceres Seq. ID no. 13658912
MRVEDGYGVIGRREGGPASSYWDLLRAHLSDPLTGILMDDAMILSCGHSYGSSGMQHIYRMKACGKCGQPITENSIRPNLALGLAVQAFRREEESAKTLKRKRDRLEQVYTFFRVYVTECPNMDS

SEQ ID NO: 66296 - protein, 123 aa, Triticum aestivum
  peptide (1)..(123): Ceres Seq. ID no. 13658913
SANLLPTPTPPPRRGSAPRPPWRLLRARGLPTARSPPHRGGRSRPSPAARARSSGINILPAATPTAAPRSTKMTTTMTRRRRMGRIRTPSWRPAARSSDAPPLQVITDAVACWFTQQESGGLW

SEQ ID NO: 66297 - protein, 107 aa, Triticum aestivum
  peptide (1)..(107): Ceres Seq. ID no. 13658914
VSKPSPHPHPPAPPRERSAAAMASPPGPGSANRALSSSSRGPLSPFPGGAGPFLRHQHPPGGDSDGGASFDEDDDDDDEEEEDGEDQDAELAARSSQQRRAASPGDH

SEQ ID NO: 66298 - DNA, 1849 bp, Triticum aestivum
  misc_feature (1)..(1849): Ceres Seq. ID no. 13502874
caaaacataacctcggtaattttgatccggagaaatgaagttgttaaaatacatatgtctgataacttcttcataaatagcattgtatttttatgcaccacagacctaggtggccgacggggtggtctggccgtccggcacacgcctaaacgggtctggcctcacacaaacgcaaaccgcaaagttttatttataagcaggcccttctgagcttgcacgtggacctcacctggtggcactgctactgctgcctcctgcacttggggacaaggcgcagcggagccagcggcggcgtgatcagtcccggcgcctcgttcatgtctagacgtgcctcggcggggatttccccagtcgaagtggcgcacaaggctgcagagcgcgatctccagcaccggcatcgcgaagctgatgccggggcagagccgccggccggcgccgaacgggaggagctggtagtcgttcccccgcaggtccacgccctgcgcgctgccgccgcccaggaatcgctccggccagaactcctccgccgttgctccccacgccgccgggtccctcccgatcgcccacgcgttgacgaagagcgcagtctcagctgggatctcgtagccctgcacgaccgccgcggtcgtcgactggtgcgggatgaggagcggtgccgccgggtggagccggagcacctccttcagcaccgccctgaggtactccatcctgctcaggtcgtcttcctcgatggtcggtttgccttcggtgactcgatctatctcgtcctgcagcttggctattgcccgcgggttcccgacgagctccgccatggcccattccaacgtgaccgatgctgtgtctgtcccgccggctatcatgtccttgatgaggcttttgatgcgatcgttggtgagctcgagtccggcggcgccttcttccctaagccgcagcaggacgtcgaggaagctctcctcccctgcgccgttgtctggcttcttctcaaggtgctctgcgattatctctgataggaacttgtcccactgttcgagctcggcgtcgagcctcttctcgagacccgtcgcccacctaaccaccttcgccgccgcgtcggggagcacgtcacccgcctggagccccgacatgatcgctgcggagttacccaaaagcttttttagcttctcggccgtggcacctgcggcgccggtggtcgcgcgggtgaccaccgcgttgctgtaggcggacaggagctccctcagctccacaatctcacccgcctccgcggcgcggcgcaccccggcgacgagggcggccgcctcggcggcccgcacgggggcgaacgagtcggcacggcgcggggagaggaggtggacgacggccatcttcttgctgcggcgccaggcgtcgccgtagggtgcgaaggagacgttggtggagccgtacgtcagcttgtcggccggcgcgctgggcacgcgggaggcgaaggcgaggtcgtggttcttgtacaggcccgccgccgcggccgccgtggaaaccaccagcgtccgcctgcgcccgagctgcaacagcaggaggccgccatcggtgccgtaccgagcgtgcagctcgcgcaaggagcggtgcgggtggcggccaaggaggtggaggtggccgagcagcggacgcgacggcggcgagggcgggagcttgccacttctgctgcctcgagccttccaaacgacgtagcagaaggtcaagagcaccgcgacgaggacggcgtacggagacatcctccttccgccggaaatgtgttgtccgattcaacggaaaaatgtgttgcctggaactggaaacatatcgtgcggcgttgtgtgcgggtatgcggcgttgt

SEQ ID NO: 66299 - protein, 229 aa, Triticum aestivum
  peptide (1)..(229): Ceres Seq. ID no. 13502875
MSRRASAGISPVEVAHKAAERDLQHRHREADAGAEPPAGAEREELVVVPPQVHALRAAAAQESLRPELLRRCSPRRRVPPDRPRVDEERSLSWDLVALHDRRGRRLVRDEERCRRVEPEHLLQHRPEVLHPAQVVFLDGRFAFGDSIYLVLQLGYCPRVPDELRHGPFQRDRCCVCPAGYHVLDEAFDAIVGELESGGAFFPKPQQDVEEALLPCAVVWLLLKVLCDYL

SEQ ID NO: 66300 - protein, 191 aa, Triticum aestivum
  peptide (1)..(191): Ceres Seq. ID no. 13502876
MRSGAAGWSRSTSFSTALRYSILLRSSSSMVGLPSVTRSISSCSLAIARGFPTSSAMAHSNVTDAVSVPPAIMSLMRLLMRSLVSSSPAAPSSLSRSRTSRKLSSPAPLSGFFSRCSAIISDRNLSHCSSSASSLFSRPVAHLTTFAAASGSTSPAWSPDMIAAELPKSFFSFSAVAPAAPVVARVTTALL

SEQ ID NO: 66301 - protein, 162 aa, Triticum aestivum
  peptide (1)..(162): Ceres Seq. ID no. 13502877
MVGLPSVTRSISSCSLAIARGFPTSSAMAHSNVTDAVSVPPAIMSLMRLLMRSLVSSSPAAPSSLSRSRTSRKLSSPAPLSGFFSRCSAIISDRNLSHCSSSASSLFSRPVAHLTTFAAASGSTSPAWSPDMIAAELPKSFFSFSAVAPAAPVVARVTTALL

SEQ ID NO: 66302 - DNA, 1662 bp, Triticum aestivum
  misc_feature (1)..(1662): Ceres Seq. ID no. 13658411
ttttagagttcaggattgaaacataaacttttgaaggctggaccatatacaaactcactgaaaaagagacccctcgcgtcgctcccgcgagcgaccgaggggataaccctagccgccggcgcgcgtccctcctcccccctcccccccctcgccgccgcctgtccgcgccgccgggcaaagcccggtgggtgctggcggcggcggggccctttctctccccgctcgtggaggctggcgcgggcgggctctcccgggcgacggcgcggcgcggatccggggcgcggcggcgcatggctgcgctcggcgtcggtgtgcggcacggcaggcctggcgcggagggctggacgcgggtgggtgacgcgcttgtgcccgagacggcggtggcttcggcgcggtcagatctggctcaagacggcgcgggctgcgggcggcgcgggctgcaggtggccacctctctgtcgtggtcgcggcaggtggtggtgacttcgcggcagttggtggtggtggtgcgggccggaggttggggacgacggccgcggcggctctttcggatccgacctcccggctgcgtgggccgagaaggcttgggctgtgggcagcggccctgaccgaggccccctcggctggtcggggtggcggcgcactggcggtggctgcgggggttcgttcccggcggctgctgtggtggtggcaggttgattgcggcggcggccagattttcctggcgtcggcccgtctgtaggctgcctgtatcggccctcgacccctttcctcggcgtccgttcgcttctctcccggagggctggccttctcccggctgcggtccatcatccgtcttgcacccggtgccataggaccgagctggtctcgcgcccggcagcaggaccggctcgtctcgcgcccggcagcaggactgcgctcgtctcgcgcccggcagcaggaccggcccgtctcgtgcccggcggcaggactgtgctcgtctcgcgcccgatgtagcaggacggctcgatggaggcttgttgtggccagcctattgggtctcggcgttgggaccggccaggggtgtgaaaggcggatcctttccgcccgtctctacggtgggggtagcggtggggctcgggggacttggtgtcagggtcttggattccggggcggcggccttggtggtggtggcgcggtgctcatgggcagagctcgtgccttggtgctgcccggctaccacggccgtgtgggcggcgtggtagccggggtgtggcgttcggtggcggtgaaggttggccggggtgaaaacctactctatcttcggacggactggcgacggcgaagatcgctcccttcttgaaggcgtcgtcgcggctatcactgcccgtcgtggtgctccaggggaaactctgatcctcggatcgggcggtggcgactctccagtgccgtatccttcctgaaggcaccgccttggagcccacgattcgtcatatgcggccttacttcttcggatgaagccctcggcggctcttgtagtgctagggtgtgtgttgctgcgctcagcgcctatgtatcatgccttgggtgcgtgtgtgtgtgtttgtggtgggtgtgtgcggttgtaccgggcgttgtggatctttgctttatatataaagcggggcgaaagcctttttcggt

SEQ ID NO: 66303 - protein, 105 aa, Triticum aestivum
  peptide (1)..(105): Ceres Seq. ID no. 15220635
MAALGVGVRHGRPGAEGWTRVGDALVPETAVASARSDLAQDGAGCGRRGLQVATSLSWSRQVVVTSRQLVVVVRAGGWGRRPRRLFRIRPPGCVGREGLGCGQRP

SEQ ID NO: 66304 - protein, 56 aa, Triticum aestivum
  peptide (1)..(56): Ceres Seq. ID no. 15220636
MKPSAALVVLGCVLLRSAPMYHALGACVCVCGGCVRLYRALWIFALYIKRGESLFR

SEQ ID NO: 66305 - protein, 52 aa, Triticum aestivum
  peptide (1)..(52): Ceres Seq. ID no. 15220637
MGRARALVLPGYHGRVGGVVAGVWRSVAVKVGRGENLLYLRTDWRRRRSLPS

SEQ ID NO: 66306 - DNA, 2214 bp, Triticum aestivum
  misc_feature (1)..(2214): Ceres Seq. ID no. 13658720
acagacccgagtctccacccatcccggccactctcgtacggacccgaccgtctacgccggcgtcgccgccgccggagctccagtccgccgcccgctaactcagcgcaaactccagtatcattacaaacccgagatagcaggcgccaaccaccacctcgcatcccgtgccccctccccctcgcggaatccccccgccccccgtcgcctgtgctagggttgcagccgtattcctccggcttttgtttcccgggacacagggaagatgtcgtcgacgcagaagaagaagagcaactataaggagaagatggcgcggcggaaggaggagaacaaaaaagaagaaccagagacaccaaggtaccgagatcgtgcaaaggagcgtcgtgaagatcaaaaccctgactatgaacctacagagcttggttcgtttcatgccgtggcacctcctggagcagatttgaggctagaagatgcccaaaagatttcaattgagaaaagcaaataccttggaggcgatctggagcatactcatttggtcaaagggttggattttgctctacttaacaaagtacggagtgaaattgacaagaagcctgatgcagaggatgggaaggatgccaaggcgagggaaacaaaagaagaccgggcggtctcattccgcactgcaattgcaaagtctgtctaccagtggactgtaaagcaacaacaaagcatgataaaggcgaatgacatgtttcttcctggccggatggcatttatttacaatatggaggatggacttaacagtgatattccaacaactcttcacaggagcaaagctgattgccctgtcccagaggaaatggtcactgtcagcgtagatggctctgtacttgacaggattgccaaaatcatgtcataccttagacttggatcatcagggaaggtattgaagaagaagaaaaaggaaagggatacaaaagggaagagtaatttggcaggcggtgtctacaatgaggtagtaagacctgcccaaagtgatggttctgttcagaaacaccagtcagaaaaggatatgccaccaccacccccacccccacgaaagagtaacttcagtgaaaaggagaaacattctgtccctgttgctagagcagatgacgatgacatattcattggagatggagttgactatactgttcctaacaaggaaatgagccagagccccatctccgaagatatggatgaatccccacgtatccatcagaatcagtccaatttgaatgaacctgtgtatggtcctattcaaccatccgaacctgctcaagcttggcaacagccaatggatggttatgatgctatgcaagcccaaatggcagctgctggataccaaggcgagtggtcaggctatcagtatgcggaacagcagctggcttatccagaacagtacatgcaacagggtactgtgggatacgatgtgttagttgacccaaatatatctcaggatccaaggttgatgactcaagcagacaaggataagggtctaggttctgtcttcaagcgtgatgatgacaggcttaagcagctgagggaaaaagatgcgcgggagaaagacccaaattttatttcagatagttactctgagtgttatcctggttaccagggttataatcaagagattgcagggagtgacgatgaagatgatttgtcaaagatggatatgggtggacgggcgaagggccgtcttcaccgctgggactttgagacggaagaagagtgggcgaaatacaacgatcagaaggaagccatgccaaaggcggcattccagtttggtgtgaagatgcaggatggcaggaagaccaggaagcagaacaaggatcagaagctcagcaacgacctcaacaagatcaacaagatcctggcgaggaagaagggcgataaagatggaggcgaagggcattatgatgacgatctacccagcgggaagaaacagcgagcttgatctaactggtcatccattttttttccgtctgtcttgttggaactgtgaaacggccatgcttttgtgagctgaaaccattaggtccgtagcctgtagtttcatttttgatggacattagtcttgcatggtattcgttgtagaatatgtaacccagatggtyccmcctactcaggtcaggcaaaagtaccacacatgacatgagawgyyaarccmtgtwaaattgtgggrgrcgrttytgk

SEQ ID NO: 66307 - protein, 570 aa, Triticum aestivum
  peptide (1)..(570): Ceres Seq. ID no. 15220656
MSSTQKKKSNYKEKMARRKEENKKEEPETPRYRDRAKERREDQNPDYEPTELGSFHAVAPPGADLRLEDAQKISIEKSKYLGGDLEHTHLVKGLDFALLNKVRSEIDKKPDAEDGKDAKARETKEDRAVSFRTAIAKSVYQWTVKQQQSMIKANDMFLPGRMAFIYNMEDGLNSDIPTTLHRSKADCPVPEEMVTVSVDGSVLDRIAKIMSYLRLGSSGKVLKKKKKERDTKGKSNLAGGVYNEVVRPAQSDGSVQKHQSEKDMPPPPPPPRKSNFSEKEKHSVPVARADDDDIFIGDGVDYTVPNKEMSQSPISEDMDESPRIHQNQSNLNEPVYGPIQPSEPAQAWQQPMDGYDAMQAQMAAAGYQGEWSGYQYAEQQLAYPEQYMQQGTVGYDVLVDPNISQDPRLMTQADKDKGLGSVFKRDDDRLKQLREKDAREKDPNFISDSYSECYPGYQGYNQEIAGSDDEDDLSKMDMGGRAKGRLHRWDFETEEEWAKYNDQKEAMPKAAFQFGVKMQDGRKTRKQNKDQKLSNDLNKINKILARKKGDKDGGEGHYDDDLPSGKKQRA

SEQ ID NO: 66308 - protein, 556 aa, Triticum aestivum
  peptide (1)..(556): Ceres Seq. ID no. 15220657
MARRKEENKKEEPETPRYRDRAKERREDQNPDYEPTELGSFHAVAPPGADLRLEDAQKISIEKSKYLGGDLEHTHLVKGLDFALLNKVRSEIDKKPDAEDGKDAKARETKEDRAVSFRTAIAKSVYQWTVKQQQSMIKANDMFLPGRMAFIYNMEDGLNSDIPTTLHRSKADCPVPEEMVTVSVDGSVLDRIAKIMSYLRLGSSGKVLKKKKKERDTKGKSNLAGGVYNEVVRPAQSDGSVQKHQSEKDMPPPPPPPRKSNFSEKEKHSVPVARADDDDIFIGDGVDYTVPNKEMSQSPISEDMDESPRIHQNQSNLNEPVYGPIQPSEPAQAWQQPMDGYDAMQAQMAAAGYQGEWSGYQYAEQQLAYPEQYMQQGTVGYDVLVDPNISQDPRLMTQADKDKGLGSVFKRDDDRLKQLREKDAREKDPNFISDSYSECYPGYQGYNQEIAGSDDEDDLSKMDMGGRAKGRLHRWDFETEEEWAKYNDQKEAMPKAAFQFGVKMQDGRKTRKQNKDQKLSNDLNKINKILARKKGDKDGGEGHYDDDLPSGKKQRA

SEQ ID NO: 66309 - protein, 421 aa, Triticum aestivum
  peptide (1)..(421): Ceres Seq. ID no. 15220658
MIKANDMFLPGRMAFIYNMEDGLNSDIPTTLHRSKADCPVPEEMVTVSVDGSVLDRIAKIMSYLRLGSSGKVLKKKKKERDTKGKSNLAGGVYNEVVRPAQSDGSVQKHQSEKDMPPPPPPPRKSNFSEKEKHSVPVARADDDDIFIGDGVDYTVPNKEMSQSPISEDMDESPRIHQNQSNLNEPVYGPIQPSEPAQAWQQPMDGYDAMQAQMAAAGYQGEWSGYQYAEQQLAYPEQYMQQGTVGYDVLVDPNISQDPRLMTQADKDKGLGSVFKRDDDRLKQLREKDAREKDPNFISDSYSECYPGYQGYNQEIAGSDDEDDLSKMDMGGRAKGRLHRWDFETEEEWAKYNDQKEAMPKAAFQFGVKMQDGRKTRKQNKDQKLSNDLNKINKILARKKGDKDGGEGHYDDDLPSGKKQRA

SEQ ID NO: 66310 - DNA, 1374 bp, Triticum aestivum
  misc_feature (1)..(1374): Ceres Seq. ID no. 13662634
actcaattacggacccctcaaatcaaaacccaaacacaaaaccctgtcgcgctctgaccgaccgtcataccgcctaccatggcctccctctcgccgtcaccgccccgccgcacacccaccgccggcgggaggcagtcccccttcttccgcgacctcgcccctgccatcccttcccaccggacctccgggtccctcgacccctcatccacgccgcccccgccgccgccccttttcaccctcgacgaccgcctatacgcacaggatttctcccctgatcgatccgcctccaacctcctccccgtcgctccatccccatccccacccacacgcgcttcctccggcaatcgccctccctcgtgggaccgttcccgcgccgttccccccggtccgtgctcgctgagtgactggctcgtggagccggcccgtaaagaggtcctcgcgctgcccccgccatcgccgcctcctactcgtgcggcgaacgcggaggtgcgatcgccggtgattccgttgcctgcgccgtctaggacggctccatcagcgaccgtcacgggggccgacggggaggagtgggtcaccgtgttcggattcaccgcgagggagaccaaccttgttctgcgagagtttgggaagtgtggagtgatactgagacactgctctggcccaagagatggtaattggcttcacatattgtatcagcaccaatatgatgctcgaagggcccttgaaaagaatggaatccagctgtttagtggtgttgcaattggggttaaaattactgatccagtgcagcggcaaatggatgagaagatgagtgagagcaattataagggcttcatggtctccttgccttcgaaatcatctatacagaatgcaggggcatcaagcaatttaggagatctcccacgtccctatgacccaaaagctggcagaaatgttaacagagacatggggtgttcaacaggaagtgttgccatgccagcaaaatcagtattggcgaaaactatggacttgatttttggcatttgatatgcagtgctggagattctatgatatttttctacccttgctcgtcgcttctgtggattctctttttgtcaatgcatgtgctgatctgcgagttccttatttctagttctagtgtctgaagatggtattgtttttcactgcagttgaagtagttcttttccccagcatctgagcatatctattcctgggttctgttgtgtagtatttgcaatgtgaaacgtttgcgttggcaatgtaatatactacagtacctttctaaagtggcgagaggtgtaaaagggttttgatgattatacatggtgttatactcagaccagaaatgatggccagtcatttttcattgcttcg

SEQ ID NO: 66311 - protein, 315 aa, Triticum aestivum
  peptide (1)..(315): Ceres Seq. ID no. 15220711
MASLSPSPPRRTPTAGGRQSPFFRDLAPAIPSHRTSGSLDPSSTPPPPPPLFTLDDRLYAQDFSPDRSASNLLPVAPSPSPPTRASSGNRPPSWDRSRAVPPGPCSLSDWLVEPARKEVLALPPPSPPPTRAANAEVRSPVIPLPAPSRTAPSATVTGADGEEWVTVFGFTARETNLVLREFGKCGVILRHCSGPRDGNWLHILYQHQYDARRALEKNGIQLFSGVAIGVKITDPVQRQMDEKMSESNYKGFMVSLPSKSSIQNAGASSNLGDLPRPYDPKAGRNVNRDMGCSTGSVAMPAKSVLAKTMDLIFGI

SEQ ID NO: 66312 - DNA, 1720 bp, Triticum aestivum
  misc_feature (1)..(1720): Ceres Seq. ID no. 13663426
atcgaaaaattactttcgaaaatgctggcgctcacttccttatccccgcgcccggcgcgcccttccccgtctccggccacgcctcctcaccgccggccgccgccgcctcgcggccgtatccgccccacatacgccgtagccacggccgcgtccgacggcggcggcgcggccgacgactaccactccaccatccgctccctaaactcgcacggccgccgccacgtcccccgcaaatccctcggccagaactacatgctgaacgcgagggtgaacgaggagctggtggcggcggcgggggtggaggagggggacgtcgtgctcgagataggccccgggacgggctctctcaccgccgcgctgctcgccgccggcgccaccatcgtcgccgtcgagaaggataagcatatggctacccttgtgagagataggtttggatccacagagcaattgaaggtcattgaagaagatattacaaaatttcacgttcactcccattttctccctatcctggaggagaaatctcatggcaagaaaaaatacgccaaggttgtgtcaaacttaccattcaatgtcagcactgaagttgtcaaacaaattcttccaatgggagatgttttctctgtcatggtgctcatgcttcaggatgaagcggcactacgccttgcaaatgcttcaatacaaacaccagagtaccgacctatcaatgtgtttgtgaatttctactctgaacctgaatacaagttcaaagtagagagggccaactttttccctcaaccgacggttgatggtggcgttataaggtttaaaataaaggatgctggggagtatccgcttgttagttctaacaaaagtttcttttcaatggtgaactccgcgttcaatgggaagcgcaagatgcttcggaaatcacttcaacacctatattcttctgctgacattgaggctgctctgaccaatatcggtcttccgcctacggctagaccgtctgaactggggatggatgatttcgtgaggttgcacaatcacctgggaaaagtatgaccacccctgcgtttcaaaatgcgtatggaatcatcttattggtttgctcgctggactaagcatgccgctgaagtgatttggttcacagctagagcgcactgcagcttgcagattatgcttgctgacagtgaccgcctagtattctccagcagtcccacagccttcaccgcaacataatcggtggcacagcttcagcccacggcgctcttgcatggagatgatcatagtgattgtgatccctattcaaaaccaatgataatatgcaggacatgatttggtcacacaggaatcgcagtttttttccttatcgcagatagcatccctgcaagagtgaagatacgcaggcgttgcatgtgtataatttactggaattatctatcctcttgtactaatcttcgcaagttggaggcagaaatgtagagatcaaatgtctgtcagaacaatctgaagatcaggcaaagatgctagctgctcatagtaaattgccaagagtatttttatgtgttgacatagatggtagatagaggtacggccgttgctttttgagcttaagttttggctataaactacaacgaaacgtgcagatgctcgatgtttgattgtgcagcattctaatacctttttgcctggcagcgtgtcgctgtgatgcaacatacagttactgccagttattttcctg

SEQ ID NO: 66313 - protein, 346 aa, Triticum aestivum
  peptide (1)..(346): Ceres Seq. ID no. 15220718
IEKLLSKMLALTSLSPRPARPSPSPATPPHRRPPPPRGRIRPTYAVATAASDGGGAADDYHSTIRSLNSHGRRHVPRKSLGQNYMLNARVNEELVAAAGVEEGDVVLEIGPGTGSLTAALLAAGATIVAVEKDKHMATLVRDRFGSTEQLKVIEEDITKFHVHSHFLPILEEKSHGKKKYAKVVSNLPFNVSTEVVKQILPMGDVFSVMVLMLQDEAALRLANASIQTPEYRPINVFVNFYSEPEYKFKVERANFFPQPTVDGGVIRFKIKDAGEYPLVSSNKSFFSMVNSAFNGKRKMLRKSLQHLYSSADIEAALTNIGLPPTARPSELGMDDFVRLHNHLGKV

SEQ ID NO: 66314 - protein, 339 aa, Triticum aestivum
  peptide (1)..(339): Ceres Seq. ID no. 15220719
MLALTSLSPRPARPSPSPATPPHRRPPPPRGRIRPTYAVATAASDGGGAADDYHSTIRSLNSHGRRHVPRKSLGQNYMLNARVNEELVAAAGVEEGDVVLEIGPGTGSLTAALLAAGATIVAVEKDKHMATLVRDRFGSTEQLKVIEEDITKFHVHSHFLPILEEKSHGKKKYAKVVSNLPFNVSTEVVKQILPMGDVFSVMVLMLQDEAALRLANASIQTPEYRPINVFVNFYSEPEYKFKVERANFFPQPTVDGGVIRFKIKDAGEYPLVSSNKSFFSMVNSAFNGKRKMLRKSLQHLYSSADIEAALTNIGLPPTARPSELGMDDFVRLHNHLGKV

SEQ ID NO: 66315 - protein, 262 aa, Triticum aestivum
  peptide (1)..(262): Ceres Seq. ID no. 15220720
MLNARVNEELVAAAGVEEGDVVLEIGPGTGSLTAALLAAGATIVAVEKDKHMATLVRDRFGSTEQLKVIEEDITKFHVHSHFLPILEEKSHGKKKYAKVVSNLPFNVSTEVVKQILPMGDVFSVMVLMLQDEAALRLANASIQTPEYRPINVFVNFYSEPEYKFKVERANFFPQPTVDGGVIRFKIKDAGEYPLVSSNKSFFSMVNSAFNGKRKMLRKSLQHLYSSADIEAALTNIGLPPTARPSELGMDDFVRLHNHLGKV

SEQ ID NO: 66316 - DNA, 1387 bp, Triticum aestivum
  misc_feature (1)..(1387): Ceres Seq. ID no. 13658922
ctaatcgaaaactttcttcccgtacgtccgcaggatcggtcaagatggctaacaccgacgctcttagctttttcaaggatttcatggccggtggcatctctgccgctgtgtccaaaaccgccgtcgctcccatcgagcgtgtgaagctgctcctgcaggttcaggcagcatccacccagattgccgccgacaagcagtacaaaggcattgttgactgctttgtccgtatccccaaggagcagggagctctcagcttctggcgtggtaaccttgccaacgtcatcagatacttccccacccaggctcttaacttcgccttcaaagatatctacaagcagattttccttggaggtgtcgacaagaacacccagttctggcgttactttgctggtaacctggcctctggtggtgctgctggtgcctcttccctctgcattgtctaccctcttgacttcgcccgtactcgtcttgctgctgatattggcaagggaccagctgaccgtcagttcagtggtcttggtgactgcctgaagaagaccttcaagtctgatggcctcgttggcatgtaccgtggattcggtgtgtcagtccagggtatcattatctaccgtgctgcctacttcggcttcttcgacactgccaagggcatgctccccaaccctaagaccactcccttcctggtctcatgggctattgctcagactgtcaccactgttgctggtattgcctcttatcccttcgacaccgtccgtcggcgcatgatgatgcaggctggccgtaagaaggctgatatcatgtacactggcaccctcgactgctgggccaagatcgccaagaatgagggtactggtgccttcttcaagggtgccttctccaacgttctcagaggcactggtggtgctcttgtgctggtgttctacgatgagatcaagaagctcctctaaattaattaggaatagattttaggtagaagtgcaggcatccagagttgcgagatctgactcaacattccacattcctgagatcaattcggtagaggatctgcagcttctataaactggtgtagtgcatttcatgtgcaaatgcagaccatgtcagtgttctgatcaagttgaccccatgtgtacaaagtcagatttgcatcttggcttacacttcaatagcagaatttcaattttaaaatctcgaaccatgacttttaggtttgttttactcagtattcattgctcgatcgggaagagctagagaggccgaaagtgaagtaaaatggaagaattaccaaagacattccatccttcatggctgtaccagtgtttcatcaagatggaatggtgattgcaagagattttactgtaactgtccaacaataaataaaagttgatattac

SEQ ID NO: 66317 - protein, 313 aa, Triticum aestivum
  peptide (1)..(313): Ceres Seq. ID no. 15219938
NRKLSSRTSAGSVKMANTDALSFFKDFMAGGISAAVSKTAVAPIERVKLLLQVQAASTQIAADKQYKGIVDCFVRIPKEQGALSFWRGNLANVIRYFPTQALNFAFKDIYKQIFLGGVDKNTQFWRYFAGNLASGGAAGASSLCIVYPLDFARTRLAADIGKGPADRQFSGLGDCLKKTFKSDGLVGMYRGFGVSVQGIIIYRAAYFGFFDTAKGMLPNPKTTPFLVSWAIAQTVTTVAGIASYPFDTVRRRMMMQAGRKKADIMYTGTLDCWAKIAKNEGTGAFFKGAFSNVLRGTGGALVLVFYDEIKKLL

SEQ ID NO: 66318 - protein, 299 aa, Triticum aestivum
  peptide (1)..(299): Ceres Seq. ID no. 15219939
MANTDALSFFKDFMAGGISAAVSKTAVAPIERVKLLLQVQAASTQIAADKQYKGIVDCFVRIPKEQGALSFWRGNLANVIRYFPTQALNFAFKDIYKQIFLGGVDKNTQFWRYFAGNLASGGAAGASSLCIVYPLDFARTRLAADIGKGPADRQFSGLGDCLKKTFKSDGLVGMYRGFGVSVQGIIIYRAAYFGFFDTAKGMLPNPKTTPFLVSWAIAQTVTTVAGIASYPFDTVRRRMMMQAGRKKADIMYTGTLDCWAKIAKNEGTGAFFKGAFSNVLRGTGGALVLVFYDEIKKLL

SEQ ID NO: 66319 - protein, 286 aa, Triticum aestivum
  peptide (1)..(286): Ceres Seq. ID no. 15219940
MAGGISAAVSKTAVAPIERVKLLLQVQAASTQIAADKQYKGIVDCFVRIPKEQGALSFWRGNLANVIRYFPTQALNFAFKDIYKQIFLGGVDKNTQFWRYFAGNLASGGAAGASSLCIVYPLDFARTRLAADIGKGPADRQFSGLGDCLKKTFKSDGLVGMYRGFGVSVQGIIIYRAAYFGFFDTAKGMLPNPKTTPFLVSWAIAQTVTTVAGIASYPFDTVRRRMMMQAGRKKADIMYTGTLDCWAKIAKNEGTGAFFKGAFSNVLRGTGGALVLVFYDEIKKLL

SEQ ID NO: 66320 - DNA, 1931 bp, Triticum aestivum
  misc_feature (1)..(1931): Ceres Seq. ID no. 13662745
ctttccttcgcttcttcctctcccgactcttcccgactccttcggttcctcaccggtcacccccacccctcaggtctgaaaccctctcgcgccgccgccgtcgccgtccccgtcctccctctcgtcgcgcctccgccggcctttcagtttagggtgggatcatgtcttctgcaatggagtcatcgtaccttcctgctactactgagtcaattgaaaaggctcaggaggctaaggatgcttcagagtcaatttcaatcctttaccgtgtgatccaagacccgtcttcatctgcagatgcactgagaataaaagagcttgcgattaccaaccttacaaactacctcactaaagagaaccgtgctgaggatctgcgtaatctcttgacccagctgaggccatttttctcactgattcccaaggccaagactgcaaaaattgtccgtggaatcattgatgccgtcgccaagattcctggaacatctgatcttcagatctcgctctgcaaggagatggtggaatggacgcgtgcagagaaacgtacgttcctcaggcagcgtgtggaggcaaggttagcggcccttcttttggagaatcaagagtacactgaagccctgaccctccttactggacttatcaaggaagtcaggagacttgatgacaagttgcttcttgtggacattgaccttttggaaagcaaactccacttctctctgagaaacctgcctaaggccaaagcttcactgaccgctgcaagaacagcggcgaatgccatttatgttccaccagctcagcagggcactattgatctgcagagtggaatccttcatgcggaagagaaggactacaaaactgcttacagctacttctttgaagcattcgaggctttcaacgcactggacgacccaagagctatcttcagcttgaagtacatgctcttgtgcaagataatggtcaaccatgctgacgatgttgctggaataatctcatctaaggccagcctgaagtatgtgggtcctgatgttgatgctatgaaagccgtagcggatgcctactctaagagatctctcaagtactttgaaaccgcccttcgtgattacaaagcccagcttgaggaggaccctattgtccacaggcatctttcatctctgtatgatacccttctggagcagaacctctgcaggttgattgagccctactcgagggtggagattgagcatgttgctcagatgattgaattgccagttgaccatgtggagaagaagctgtcacaaatgatccttgacaagaaatttgctggtactctagatcaaggtgctggttgcctcattatctttgaggagatgaaaacagaggccatcttccctgccacactcgaaactatttcaaacgttgggaaggttgtggacagtctttacatgaggtctgcgaagatcatggcttgaacactagtacccacatgatagtttatctgttggctatggtttcatcttttaaaagttatattagtgtctttcaagacatttaatcctgtcagtttgacactttaatctgcaatgttgggttttttagttaaaaaaatctaccttgctatgattggcgtgtaccttgaaaactagatggttcaagatgaaccatgttatgctgccgcgacattcttttgtgataattttccattagctttttttttggcctgtgtattgctgaatatacaatgctggaaaaaaaaaaaaaaaaaaaaaaaaaaaaaaaaaaaaaaaaaaaaaaaaaaaaaaaaaaaaaaaaaaamccmwaaaaaaaaaaaaaargtttttycwwyccccccaacccccgggggggggccccnggaacccanattcccccaaaarggrrgccaaataacccscccccytggccctgccttttwaaaaccttcgggawtggaaaaaccctgg

SEQ ID NO: 66321 - protein, 426 aa, Triticum aestivum
  peptide (1)..(426): Ceres Seq. ID no. 15220181
MSSAMESSYLPATTESIEKAQEAKDASESISILYRVIQDPSSSADALRIKELAITNLTNYLTKENRAEDLRNLLTQLRPFFSLIPKAKTAKIVRGIIDAVAKIPGTSDLQISLCKEMVEWTRAEKRTFLRQRVEARLAALLLENQEYTEALTLLTGLIKEVRRLDDKLLLVDIDLLESKLHFSLRNLPKAKASLTAARTAANAIYVPPAQQGTIDLQSGILHAEEKDYKTAYSYFFEAFEAFNALDDPRAIFSLKYMLLCKIMVNHADDVAGIISSKASLKYVGPDVDAMKAVADAYSKRSLKYFETALRDYKAQLEEDPIVHRHLSSLYDTLLEQNLCRLIEPYSRVEIEHVAQMIELPVDHVEKKLSQMILDKKFAGTLDQGAGCLIIFEEMKTEAIFPATLETISNVGKVVDSLYMRSAKIMA

SEQ ID NO: 66322 - protein, 422 aa, Triticum aestivum
  peptide (1)..(422): Ceres Seq. ID no. 15220182
MESSYLPATTESIEKAQEAKDASESISILYRVIQDPSSSADALRIKELAITNLTNYLTKENRAEDLRNLLTQLRPFFSLIPKAKTAKIVRGIIDAVAKIPGTSDLQISLCKEMVEWTRAEKRTFLRQRVEARLAALLLENQEYTEALTLLTGLIKEVRRLDDKLLLVDIDLLESKLHFSLRNLPKAKASLTAARTAANAIYVPPAQQGTIDLQSGILHAEEKDYKTAYSYFFEAFEAFNALDDPRAIFSLKYMLLCKIMVNHADDVAGIISSKASLKYVGPDVDAMKAVADAYSKRSLKYFETALRDYKAQLEEDPIVHRHLSSLYDTLLEQNLCRLIEPYSRVEIEHVAQMIELPVDHVEKKLSQMILDKKFAGTLDQGAGCLIIFEEMKTEAIFPATLETISNVGKVVDSLYMRSAKIMA

SEQ ID NO: 66323 - protein, 310 aa, Triticum aestivum
  peptide (1)..(310): Ceres Seq. ID no. 15220183
MVEWTRAEKRTFLRQRVEARLAALLLENQEYTEALTLLTGLIKEVRRLDDKLLLVDIDLLESKLHFSLRNLPKAKASLTAARTAANAIYVPPAQQGTIDLQSGILHAEEKDYKTAYSYFFEAFEAFNALDDPRAIFSLKYMLLCKIMVNHADDVAGIISSKASLKYVGPDVDAMKAVADAYSKRSLKYFETALRDYKAQLEEDPIVHRHLSSLYDTLLEQNLCRLIEPYSRVEIEHVAQMIELPVDHVEKKLSQMILDKKFAGTLDQGAGCLIIFEEMKTEAIFPATLETISNVGKVVDSLYMRSAKIMA

SEQ ID NO: 66324 - DNA, 1055 bp, Triticum aestivum
  misc_feature (1)..(1055): Ceres Seq. ID no. 13662746
ccrtttaamcwagaacatcctaatcgaaaaacgaggcggagttgaaattccacacggcctctctcttcgccttcgcctgccccctctcgtgctcgcgagccgcgtcaaaaccctagccaccttctgcccaccacatgcaccgcggcagcgaccgctccggcgacccctccggccccgcgggcggcgctcgcagcggcgcggacggcagattcgcgcgcggaccctcgcgctggtccggcggcggcgggggtagccccccgccccaccgctcctcccgcggcgggagcagcgacggcggcggaggcggaggcggaggcgggaggttccatccgtaccgtgcgccgtctgaatacgttgttggcggtggtggaactggagggtacagaggcggcggcggcggcggcggcgacttcggtgagacggccggtggagcgaggagccgctacggaggcggtggcgggggaggccgtggagactactcagatcatgataacaaaagtggttatgttaaactttttgttggatcagttccaagaacagcaaatgaagatgatgttcgacctttattcgaggatcatggagatgttcttgaagttgctttgatcagggataggaaaactggtgaacaacaaggtgagccataagtatatttttcttatattatcaatataccagtatcgctttcttttcaggttctgagagtattaggagcaacaaggttgcatcttctttcagttagatttggcggttgttgaattttgtttcctgcgcttccgttctgtttcttcgtctgggttaatagaaggcaagaaaggaagcagctaactcttggctggttactgtaatctaactaggctccaccctgctggtacataaggtagcagatttgaacaaacaactttgttcaggtcatagcaatcttgtgcttgttgccgtgttcaatgtagtatgaccagaaataactaagggtgctgtgttactgttgcatctatttgttttgaatgcgatgcaaaaggccagaggacctcctaatgaattaagattaacttttcatt

SEQ ID NO: 66325 - protein, 169 aa, Triticum aestivum
  peptide (1)..(169): Ceres Seq. ID no. 15220184
MHRGSDRSGDPSGPAGGARSGADGRFARGPSRWSGGGGGSPPPHRSSRGGSSDGGGGGGGGGRFHPYRAPSEYVVGGGGTGGYRGGGGGGGDFGETAGGARSRYGGGGGGGRGDYSDHDNKSGYVKLFVGSVPRTANEDDVRPLFEDHGDVLEVALIRDRKTGEQQGEP

SEQ ID NO: 66326 - DNA, 1470 bp, Triticum aestivum
  misc_feature (1)..(1470): Ceres Seq. ID no. 13658153
aaaactacttccccatttatcttttcctttcctatctatctggttcctgcagattcaagatctcgagttttgctctgctccaagcaaagccatggcctccgaacagatggtgcatatgagtcaaggacaaggggaaactagctatgctcgcaactccagtttccagaaggctgagcagaacaggatgaaatccctcatagaagcggtcatcgccgacttatgcggcagcagcagtaccttgttgcatggaaaggtagtaatcgcggacttgggatgctcctccggcccaaatgcgctagcactggtatcaactgccatcaatgccatccacagccaatgccttcacttacagcagccaccacctgaagtatgcgtgctactcaacgacctgcctgacaatgacttcaacacggtggtgaagagcttggtcacgctccttcaaagcaaggatcctgttgtcctgaccggtgtcataccggggtcgttttacgagcggctctttactagtgactccttgcatcttgtatgcgcgtccaacagcttgcaatggctctcaaaggctcctgaggatctaacgagaaatcgcatcccagcgttcgatactgatgaacatgttaggcatgaaaggctcccaatcgtccgtgaggcttatgcacatcagttcagggaagatttcacacttttcctgcagctgagagccaaagaattggtctcgggaggccgaatggttatttccctagtagggacgcgttctaatgtaattgcttccaaattctttcttttcccaggaattgtagctcaaattctaagtgtcatggtcactgagggtgtgatcgacaaagaaaagtttgattctttctatgtgcccgtgcatggaccttccggcgaagaggtgagagaaatcattgaagaagagggctccttttccaccagggagatgcgggtgcacgaccctacgaccgaaatgaacactgctctgagcaccccaaggaagttcgtcaataatctgagagccttattcgagccgataatagtccagcattttggagacattatggatgaatttgtgaggactgcggagctgcactggagcctggatccggatgggagcttgcaagaggagcgggccagaacctctcgagctacgctggttgtatccctcgcaaaggtgtcatgatgaagtaaaggtgcctgaagattacatgcaccgaatttcataaaattgtactattgcttactttgaagcaacaatgtgtgcccatttaattgtgtgaactactgtagtagtggtgttccgtgaatgtactcatggatgcaccaaatgaacttccatctcgcatataaataagcaaaatgccgttgcgtgtgcaatgtggtgtgatgtatggtgtgcacaaattcagccagacatttgtgtcatgtatctgttttagtaagatctgcaatgagagtgaagcagccagaaattcc

SEQ ID NO: 66327 - protein, 391 aa, Triticum aestivum
  peptide (1)..(391): Ceres Seq. ID no. 13658154
KLLPHLSFPFLSIWFLQIQDLEFCSAPSKAMASEQMVHMSQGQGETSYARNSSFQKAEQNRMKSLIEAVIADLCGSSSTLLHGKVVIADLGCSSGPNALALVSTAINAIHSQCLHLQQPPPEVCVLLNDLPDNDFNTVVKSLVTLLQSKDPVVLTGVIPGSFYERLFTSDSLHLVCASNSLQWLSKAPEDLTRNRIPAFDTDEHVRHERLPIVREAYAHQFREDFTLFLQLRAKELVSGGRMVISLVGTRSNVIASKFFLFPGIVAQILSVMVTEGVIDKEKFDSFYVPVHGPSGEEVREIIEEEGSFSTREMRVHDPTTEMNTALSTPRKFVNNLRALFEPIIVQHFGDIMDEFVRTAELHWSLDPDGSLQEERARTSRATLVVSLAKVS

SEQ ID NO: 66328 - protein, 361 aa, Triticum aestivum
  peptide (1)..(361): Ceres Seq. ID no. 13658155
MASEQMVHMSQGQGETSYARNSSFQKAEQNRMKSLIEAVIADLCGSSSTLLHGKVVIADLGCSSGPNALALVSTAINAIHSQCLHLQQPPPEVCVLLNDLPDNDFNTVVKSLVTLLQSKDPVVLTGVIPGSFYERLFTSDSLHLVCASNSLQWLSKAPEDLTRNRIPAFDTDEHVRHERLPIVREAYAHQFREDFTLFLQLRAKELVSGGRMVISLVGTRSNVIASKFFLFPGIVAQILSVMVTEGVIDKEKFDSFYVPVHGPSGEEVREIIEEEGSFSTREMRVHDPTTEMNTALSTPRKFVNNLRALFEPIIVQHFGDIMDEFVRTAELHWSLDPDGSLQEERARTSRATLVVSLAKVS

SEQ ID NO: 66329 - protein, 356 aa, Triticum aestivum
  peptide (1)..(356): Ceres Seq. ID no. 13658156
MVHMSQGQGETSYARNSSFQKAEQNRMKSLIEAVIADLCGSSSTLLHGKVVIADLGCSSGPNALALVSTAINAIHSQCLHLQQPPPEVCVLLNDLPDNDFNTVVKSLVTLLQSKDPVVLTGVIPGSFYERLFTSDSLHLVCASNSLQWLSKAPEDLTRNRIPAFDTDEHVRHERLPIVREAYAHQFREDFTLFLQLRAKELVSGGRMVISLVGTRSNVIASKFFLFPGIVAQILSVMVTEGVIDKEKFDSFYVPVHGPSGEEVREIIEEEGSFSTREMRVHDPTTEMNTALSTPRKFVNNLRALFEPIIVQHFGDIMDEFVRTAELHWSLDPDGSLQEERARTSRATLVVSLAKVS

SEQ ID NO: 66330 - DNA, 2009 bp, Triticum aestivum
  misc_feature (1)..(2009): Ceres Seq. ID no. 14303109
agcaattattctcctccgctacctccgcggtggccagcacaccacaccacaccacgcttcccttgccttgctcccccacctccacacccatctcattcccccctctccccatccccaatggcgccgacctccgagccctagatagatcccccgcgcgcagccgcatggcggagcacgccgcccgccacctccgccgccgcggccccgtcgccggctggtgctgctccttcgccggcgtcccgcccagccccgaccaccgcctccacccccaccgcaccctctcccacgccgccgcgccgccaaccgcaggatctgtgtgcaccggcggcgagggcccgcggaagcaaccacagctgccgcccaaatccccctcctccttccacggctctccctcctccaagctggcgggcctcatcgactacccgcgccggatcctctccccgggccgcgtctcccccatcgaccccgacgcccacccccctcctcctccgacccccaaccccaccgaccagccgcagcacccggagcagcagcagccgccgccgatggccccgttcgtcgcggtgcgggaggaggaggaggaggggcagggggacgggctggatctgaggctctgcctccgcgggagggacggcgccaccggctgcgtcatggacctcgactccgccgtgctctgcgggagcagcgccttcttcgccgccatggcgcccgagcccaacgcctctggtgccggggcccggaggatcgaggtcgacggggtcgacaacgtcgccgccttcagggacgccgtcgagctcatgttccatgccgacgctccgcggtggctcgccagggccggcgtctcgcgagccatcgccgtcctcgaggtggcttcctcgattatgtttgacaaaggaatcagatcatgtttggagtacattgaagcagttccatggaatgagaatgaggaagagaagctaaagcacctctttgctagatgcactttcgatgaagcgttatcaaaagatgtattggcaagattgcaaacacaaccgtctagcagctcggaagacctgactggtcagctcatccaatctgtcaccagcagcacaaacaacagtgcaagaaaagatatgcagtctttgatcaatggtcttctaagcaagagctcagtatatcaaaaggatttgtctggattaaacaaaaggagcctataccagatttgctgctcgtgtctaaacctactggtggaactttttaaggaagactcggagccaaaatgcggcacagaccaggcactgaaagttaggcacaataataaacccatgattgaaagagtgagcaagcaaagtgagaacctcagctggctatttgagatcctggtcaacaatgatatggcagagaatttcgtcgtgctgtgggccggacaagacgatctcatcaggatgcacgagcaagcatcgccaatgttcaggtacgagctaagccggatatcagcgggcgtgttcatcgctctcgggcaagggaaagtgcagtgcccgagcgatctgaggagccaactgttccggggatggttcacgccgatgttaaccgatttcggttggctccaaaggtgctccaaggggctggatgcgagagcgctggaggatagcctggggcaagcccttctcaccctcccgctccgggagcagcagagcctgttcgaggaatggttccagtgcttcgcgtctagtggcgcggaatgcccgaaccttagccgagccttccaggtatggtggcgaaggtcattcgctagatagatttgtcggtagagcccctgcagcagcagaagcctatgagatattgcttggtccgcgtgagttatatcggtatttgtagtgtgtgtatgaatgtaagataagatgaattcctgttagcctgtagagttgaatttttgtttatgatcttggctcggttcttcccagtgtatgcactacttgacaaaaccacaattcccagagtcagcaatagaattgttgtagaattgcttc

SEQ ID NO: 66331 - protein, 591 aa, Triticum aestivum
  peptide (1)..(591): Ceres Seq. ID no. 14303110
QLFSSATSAVASTPHHTTLPLPCSPTSTPISFPPLPIPNGADLRALDRSPARSRMAEHAARHLRRRGPVAGWCCSFAGVPPSPDHRLHPHRTLSHAAAPPTAGSVCTGGEGPRKQPQLPPKSPSSFHGSPSSKLAGLIDYPRRILSPGRVSPIDPDAHPPPPPTPNPTDQPQHPEQQQPPPMAPFVAVREEEEEGQGDGLDLRLCLRGRDGATGCVMDLDSAVLCGSSAFFAAMAPEPNASGAGARRIEVDGVDNVAAFRDAVELMFHADAPRWLARAGVSRAIAVLEVASSIMFDKGIRSCLEYIEAVPWNENEEEKLKHLFARCTFDEALSKDVLARLQTQPSSSSEDLTGQLIQSVTSSTNNSARKDMQSLINGLLSKSSVYQKDLSGLNKRSLYQICCSCLNLLVELFKEDSEPKCGTDQALKVRHNNKPMIERVSKQSENLSWLFEILVNNDMAENFVVLWAGQDDLIRMHEQASPMFRYELSRISAGVFIALGQGKVQCPSDLRSQLFRGWFTPMLTDFGWLQRCSKGLDARALEDSLGQALLTLPLREQQSLFEEWFQCFASSGAECPNLSRAFQVWWRRSFAR

SEQ ID NO: 66332 - protein, 537 aa, Triticum aestivum
  peptide (1)..(537): Ceres Seq. ID no. 14303111
MAEHAARHLRRRGPVAGWCCSFAGVPPSPDHRLHPHRTLSHAAAPPTAGSVCTGGEGPRKQPQLPPKSPSSFHGSPSSKLAGLIDYPRRILSPGRVSPIDPDAHPPPPPTPNPTDQPQHPEQQQPPPMAPFVAVREEEEEGQGDGLDLRLCLRGRDGATGCVMDLDSAVLCGSSAFFAAMAPEPNASGAGARRIEVDGVDNVAAFRDAVELMFHADAPRWLARAGVSRAIAVLEVASSIMFDKGIRSCLEYIEAVPWNENEEEKLKHLFARCTFDEALSKDVLARLQTQPSSSSEDLTGQLIQSVTSSTNNSARKDMQSLINGLLSKSSVYQKDLSGLNKRSLYQICCSCLNLLVELFKEDSEPKCGTDQALKVRHNNKPMIERVSKQSENLSWLFEILVNNDMAENFVVLWAGQDDLIRMHEQASPMFRYELSRISAGVFIALGQGKVQCPSDLRSQLFRGWFTPMLTDFGWLQRCSKGLDARALEDSLGQALLTLPLREQQSLFEEWFQCFASSGAECPNLSRAFQVWWRRSFAR

SEQ ID NO: 66333 - protein, 410 aa, Triticum aestivum
  peptide (1)..(410): Ceres Seq. ID no. 14303112
MAPFVAVREEEEEGQGDGLDLRLCLRGRDGATGCVMDLDSAVLCGSSAFFAAMAPEPNASGAGARRIEVDGVDNVAAFRDAVELMFHADAPRWLARAGVSRAIAVLEVASSIMFDKGIRSCLEYIEAVPWNENEEEKLKHLFARCTFDEALSKDVLARLQTQPSSSSEDLTGQLIQSVTSSTNNSARKDMQSLINGLLSKSSVYQKDLSGLNKRSLYQICCSCLNLLVELFKEDSEPKCGTDQALKVRHNNKPMIERVSKQSENLSWLFEILVNNDMAENFVVLWAGQDDLIRMHEQASPMFRYELSRISAGVFIALGQGKVQCPSDLRSQLFRGWFTPMLTDFGWLQRCSKGLDARALEDSLGQALLTLPLREQQSLFEEWFQCFASSGAECPNLSRAFQVWWRRSFAR

SEQ ID NO: 66334 - DNA, 1745 bp, Triticum aestivum
  misc_feature (1)..(1745): Ceres Seq. ID no. 13663413
aatcgaaagtagcacaccaccgcccagcgcagctcccgagacaccgcatttctcgtctcctctcgctctccgtccaagcaagaagtcaggacgaacacgtcacattcgaccatggacatgcccacggcggcgtgctcaccgtcctcgtcggcgccgcctccgccgtcgtcgtccggcgtcgatgtggccgttgacgcgcggacagaagaggtccggcggcgcctgctcctcgatgccgccatcgacggcaacctcgacctccttgccaggatggcgctggggttgctgccgccggcgcctagcgccacgggcgcggacgccaccgccggcgtctggtcgacgtgcggcagggcgctgcacctggccgcgaccaacggcaggaccgacgtctgccgctacctggtccaggacctcggcatccccgtcgacgccctctccgatgagcgcgagacgccgctgctcctggcggccaccttcggccacaccgccacggcggcctggctcctggagcgcggcgccagcccgcgcgccccggacgtcgacggcgagaccccgctccactgggccgcttacaacggggatcgcgacctggcgatgctgctcctgtgcaagggcgccgacgtgggcgcggcgaacccccggggcacagcgctccacgtcgccgccatgcgggggtgcccggaagtcatccgtgtcctgctgcgccacggcgccgatcccaacaagttcgccagccgtgtcttcacgcccttggtctcatcgcttcttggtggctccgtggaatgcatgaagctgctcattgaggctggggctaatgttcatgccggtggattcagtggagcgacccctctgttgttagcgtgcagccgccgtcgcaacatcggattcgtcaagtgcttgttgaaggctggagcagatccgaaccttcctgacgaacttggtaggttgccgatagaaattgctgcggtccaaggtggaaaaagacttgttcaacttctgtttcctgtgacccgatgccctccaaacatggttggctggagtgttgctggcatcatgagttatgtgaattctgctgcttacaaggagcgggtgagaaaggactcttgtaagaggaaagctgaactaaaactagaagggaacaaggcctacgaaaccaaggactacgacacggctatacttatgtacaacatggcattgaagtttgatgacccaaaggacatagacgcctccatatatgcaaacaagagcctctgttggctgcgccttggtgtgggcgacgaggcgctttcggacgcccaggcctgcatcaggttatggcctgactgggggaaaggctactaccgccaaggcgaggccttccgcttcctgcaggactacgccagcgcttacaccgcgtttgtcaaggcatcggagcttgatccgcagaaccccaagatcgccaacgccctccgggatctcttggagcgcacgaagggcgcctcggtttcacggtgcttggagggaggggtgcaaggacgaagtcaggttctgtctgggccgtgtgatcaagcagtccaagggcagggctcttttgtgcaggcagtaggtagaggtcagccactatccagtggccagtaggaaaatggtgaagcggtgtgaaaactgtggcgggagtcggaggatgtatagttgtttttcggagaaagtctaaaaaaaaccttgaacttggagtcgaaagctaaatcaaaccccgaacttctaatccg

SEQ ID NO: 66335 - protein, 501 aa, Triticum aestivum
  peptide (1)..(501): Ceres Seq. ID no. 13663414
MDMPTAACSPSSSAPPPPSSSGVDVAVDARTEEVRRRLLLDAAIDGNLDLLARMALGLLPPAPSATGADATAGVWSTCGRALHLAATNGRTDVCRYLVQDLGIPVDALSDERETPLLLAATFGHTATAAWLLERGASPRAPDVDGETPLHWAAYNGDRDLAMLLLCKGADVGAANPRGTALHVAAMRGCPEVIRVLLRHGADPNKFASRVFTPLVSSLLGGSVECMKLLIEAGANVHAGGFSGATPLLLACSRRRNIGFVKCLLKAGADPNLPDELGRLPIEIAAVQGGKRLVQLLFPVTRCPPNMVGWSVAGIMSYVNSAAYKERVRKDSCKRKAELKLEGNKAYETKDYDTAILMYNMALKFDDPKDIDASIYANKSLCWLRLGVGDEALSDAQACIRLWPDWGKGYYRQGEAFRFLQDYASAYTAFVKASELDPQNPKIANALRDLLERTKGASVSRCLEGGVQGRSQVLSGPCDQAVQGQGSFVQAVGRGQPLSSGQ

SEQ ID NO: 66336 - protein, 499 aa, Triticum aestivum
  peptide (1)..(499): Ceres Seq. ID no. 13663415
MPTAACSPSSSAPPPPSSSGVDVAVDARTEEVRRRLLLDAAIDGNLDLLARMALGLLPPAPSATGADATAGVWSTCGRALHLAATNGRTDVCRYLVQDLGIPVDALSDERETPLLLAATFGHTATAAWLLERGASPRAPDVDGETPLHWAAYNGDRDLAMLLLCKGADVGAANPRGTALHVAAMRGCPEVIRVLLRHGADPNKFASRVFTPLVSSLLGGSVECMKLLIEAGANVHAGGFSGATPLLLACSRRRNIGFVKCLLKAGADPNLPDELGRLPIEIAAVQGGKRLVQLLFPVTRCPPNMVGWSVAGIMSYVNSAAYKERVRKDSCKRKAELKLEGNKAYETKDYDTAILMYNMALKFDDPKDIDASIYANKSLCWLRLGVGDEALSDAQACIRLWPDWGKGYYRQGEAFRFLQDYASAYTAFVKASELDPQNPKIANALRDLLERTKGASVSRCLEGGVQGRSQVLSGPCDQAVQGQGSFVQAVGRGQPLSSGQ

SEQ ID NO: 66337 - protein, 448 aa, Triticum aestivum
  peptide (1)..(448): Ceres Seq. ID no. 13663416
MALGLLPPAPSATGADATAGVWSTCGRALHLAATNGRTDVCRYLVQDLGIPVDALSDERETPLLLAATFGHTATAAWLLERGASPRAPDVDGETPLHWAAYNGDRDLAMLLLCKGADVGAANPRGTALHVAAMRGCPEVIRVLLRHGADPNKFASRVFTPLVSSLLGGSVECMKLLIEAGANVHAGGFSGATPLLLACSRRRNIGFVKCLLKAGADPNLPDELGRLPIEIAAVQGGKRLVQLLFPVTRCPPNMVGWSVAGIMSYVNSAAYKERVRKDSCKRKAELKLEGNKAYETKDYDTAILMYNMALKFDDPKDIDASIYANKSLCWLRLGVGDEALSDAQACIRLWPDWGKGYYRQGEAFRFLQDYASAYTAFVKASELDPQNPKIANALRDLLERTKGASVSRCLEGGVQGRSQVLSGPCDQAVQGQGSFVQAVGRGQPLSSGQ

SEQ ID NO: 66338 - DNA, 942 bp, Triticum aestivum
  misc_feature (1)..(942): Ceres Seq. ID no. 15179828
acctacccccgttcccccaaaacccaggtacccaggctttccctctgcgagccccccgagccctaagctccagcgagcccctatggcggcgcaggagatcaaggacgccgtgcaggcttacacgggcctctcacccgcggccgccttcaccgtgctggctctcatgctcgccacctacctcatcgtctccaccctcttcgtcgccccagacgccgccgcttccgcaccggcggctcatccccagccgcctcagcagcagaagcaggtgacggaggcggaggcggaggcggaggagccgttcgtgccgctgtttccggaccctgtgcaggtgggcgagatcacgctcgagcagctcagggcgtatgacggcaaggatccagccaagtccatcctcatcgccatccgcggtcaggtctacgacgtctcgcgcgggaggctgttttatggacctcaaggaccatactccttgtttgccgggagggatgcatctcgggccctggcattgatgtcatttgaccttaatgacctgactggagacttggaaggcctgagcccagacgaactggaggttttacaagactgggaagagaagtttaaagagaggtaccctgtggtgggccatcttccttgtgagaaaggcaacagctgatgctcagcctgatcacgaggaagagaaggcctaactctgtgtctgggttcttgtctcgttgcctgtaagttcttgtgtcttttactactggactgcgagcggtagagagatctaatgcgctgacaggtgatgttgtttgtatgtgtgctgcatgagtgtgtgtgactaatgcacctgctttactactactactttggttggtgtgtgtcagtgtgtgggaggaattttgagtgacagagaaaccttggcgctgaaaggccgtgctttagattcgtgccataatccaattcacc

SEQ ID NO: 66339 - protein, 215 aa, Triticum aestivum
  peptide (1)..(215): Ceres Seq. ID no. 15179829
PTPVPPKPRYPGFPSASPPSPKLQRAPMAAQEIKDAVQAYTGLSPAAAFTVLALMLATYLIVSTLFVAPDAAASAPAAHPQPPQQQKQVTEAEAEAEEPFVPLFPDPVQVGEITLEQLRAYDGKDPAKSILIAIRGQVYDVSRGRLFYGPQGPYSLFAGRDASRALALMSFDLNDLTGDLEGLSPDELEVLQDWEEKFKERYPVVGHLPCEKGNS

SEQ ID NO: 66340 - protein, 188 aa, Triticum aestivum
  peptide (1)..(188): Ceres Seq. ID no. 15179830
MAAQEIKDAVQAYTGLSPAAAFTVLALMLATYLIVSTLFVAPDAAASAPAAHPQPPQQQKQVTEAEAEAEEPFVPLFPDPVQVGEITLEQLRAYDGKDPAKSILIAIRGQVYDVSRGRLFYGPQGPYSLFAGRDASRALALMSFDLNDLTGDLEGLSPDELEVLQDWEEKFKERYPVVGHLPCEKGNS

SEQ ID NO: 66341 - protein, 161 aa, Triticum aestivum
  peptide (1)..(161): Ceres Seq. ID no. 15179831
MLATYLIVSTLFVAPDAAASAPAAHPQPPQQQKQVTEAEAEAEEPFVPLFPDPVQVGEITLEQLRAYDGKDPAKSILIAIRGQVYDVSRGRLFYGPQGPYSLFAGRDASRALALMSFDLNDLTGDLEGLSPDELEVLQDWEEKFKERYPVVGHLPCEKGNS

SEQ ID NO: 66342 - DNA, 764 bp, Triticum aestivum
  misc_feature (1)..(764): Ceres Seq. ID no. 15227264
gttcgttccgaccgttcatttgcatcccctttccttccgctggcgcgagggacgggataatggcggcagcgtgctccctctcccccctccctctcgcgccgcctgtggcacccaggccagcgctcttctcgaggtgcgtcgctgctccgcgccgtggtaggaatgccgggggaggcaccgggcgcttgcgcctcgccaggaggctgcgcccgcctgccgccgccatcgaagaggtggagcagaccgaggccatgatgagggtggctgcggacgacgatagcatcaccgccaccgtggtgtcggtgctgctcacggtctcgttcgtcggcctctccctcctcaccatcggggtgatctatctggcggtgcaggacttcttgcagaagagggagagcgagaagtttgagagggaggaagctgagagacagaaagaggaggcgaggcagaagagggccaaagcgaggggaaagaaaagaaatcgacgatgactgcttcttcagtaacctcagtgtgagaactcatggctggttcttctgtaacctggatcattctccggggtatgatttttgtgctggtttcgtgtcattctgacgttctggggcccctttctcatcgtagttcagttcagatgagttccatttcctgtcagttattcaggctgtgaatcgtgagtaaaagtgttatgtactgcaaaatacatggtaaattatatctcaaaaccgacgccgaccgaataaacctgatgcatgcggtcttcggtcctg

SEQ ID NO: 66343 - protein, 161 aa, Triticum aestivum
  peptide (1)..(161): Ceres Seq. ID no. 15227265
SFRPFICIPFPSAGARDGIMAAACSLSPLPLAPPVAPRPALFSRCVAAPRRGRNAGGGTGRLRLARRLRPPAAAIEEVEQTEAMMRVAADDDSITATVVSVLLTVSFVGLSLLTIGVIYLAVQDFLQKRESEKFEREEAERQKEEARQKRAKARGKKRNRR

SEQ ID NO: 66344 - protein, 142 aa, Triticum aestivum
  peptide (1)..(142): Ceres Seq. ID no. 15227266
MAAACSLSPLPLAPPVAPRPALFSRCVAAPRRGRNAGGGTGRLRLARRLRPPAAAIEEVEQTEAMMRVAADDDSITATVVSVLLTVSFVGLSLLTIGVIYLAVQDFLQKRESEKFEREEAERQKEEARQKRAKARGKKRNRR

SEQ ID NO: 66345 - DNA, 1366 bp, Triticum aestivum
  misc_feature (1)..(1366): Ceres Seq. ID no. 15170103
accctctcccggcccattacattacacgaaagcaaagcatacctgagcagagctgcggcagagcttcgagctgaggccttgtggagtagtcaaacattgagagaacgaaaatggcacggagcccagctcaaatcgctatccggttgatcgctctgctccttctgcttccagtggcgtggtcggcgacgttcacgatgaccaacaactgcggctacacggtgtggccggggctgctgtcgggcgcaggcacggcgccgctgtcgacgacggggttcgcgctggcgcagggcgcgtcggcgactgtgaccgcgccggcgagctggtccgggcgcatgtgggcgcgcacgctctgcgccgaggacgctgccggcaagttcacctgcgccacgggcgactgcggctcgggcgcgctccagtgcaacggcggtggcgctgcgccgccggcctcgcttgtggagttcacgctcgacggctccggtggcatggacttcttcgacgtcagcctggtcgacggctacaacctgccgatgctggtcgtaccgcagggcgctgccactgccgccgccgccagctccacgagcgggcccaagtgcatggccaccggctgcctcgtcgacctgaacgccgcgtgcccggccgcgctgaaggtcacgtcgacgggtgccgccagcagcgcggtcggcgggagcgccatggcgtgccgcagcgcgtgcgaggcgttcggctccccggagtactgctgcagcggcgcgtacgggagccccaacacgtgccggccgtcggcgtactcgcagtacttcaagagcgcgtgcccccgcgcctacagctacgcgtacgacgactccacctccaccttcacctgcgccgccggcaccaactacgccatcaccttctgcccaagcaccaccagtgggaagtacaccgacgagaacccgcaggctgccggcgtgccgcccacgaacggcacgatggtgtaccgcggcggcgagcagttctcaacgggcggcggcgcctccattgccgcccatgcgtcgcagctcctcctcgcggtggccgtcgccgtcgctctgctcctactgtaagcgctggccatgcgtgcaatggcggcaacagcgtacgtactcccgcctctcgaggtgtccttatccggccggcctcttttggcgtgacggaggcagagataatactcgagcggagcacaggagaagggcgggcgggcaagatcaaagtttgacagtgccgctactgatgactgataaaacaaggatatcttacagtagtgtcgtagacttaggttaatgtttactctctacgcttctttgatttgttgagcggaaatgatgatgtgttcattgttcgtcgtgat

SEQ ID NO: 66346 - protein, 323 aa, Triticum aestivum
  peptide (1)..(323): Ceres Seq. ID no. 15170104
MARSPAQIAIRLIALLLLLPVAWSATFTMTNNCGYTVWPGLLSGAGTAPLSTTGFALAQGASATVTAPASWSGRMWARTLCAEDAAGKFTCATGDCGSGALQCNGGGAAPPASLVEFTLDGSGGMDFFDVSLVDGYNLPMLVVPQGAATAAAASSTSGPKCMATGCLVDLNAACPAALKVTSTGAASSAVGGSAMACRSACEAFGSPEYCCSGAYGSPNTCRPSAYSQYFKSACPRAYSYAYDDSTSTFTCAAGTNYAITFCPSTTSGKYTDENPQAAGVPPTNGTMVYRGGEQFSTGGGASIAAHASQLLLAVAVAVALLLL

SEQ ID NO: 66347 - protein, 295 aa, Triticum aestivum
  peptide (1)..(295): Ceres Seq. ID no. 15170105
MTNNCGYTVWPGLLSGAGTAPLSTTGFALAQGASATVTAPASWSGRMWARTLCAEDAAGKFTCATGDCGSGALQCNGGGAAPPASLVEFTLDGSGGMDFFDVSLVDGYNLPMLVVPQGAATAAAASSTSGPKCMATGCLVDLNAACPAALKVTSTGAASSAVGGSAMACRSACEAFGSPEYCCSGAYGSPNTCRPSAYSQYFKSACPRAYSYAYDDSTSTFTCAAGTNYAITFCPSTTSGKYTDENPQAAGVPPTNGTMVYRGGEQFSTGGGASIAAHASQLLLAVAVAVALLLL

SEQ ID NO: 66348 - protein, 249 aa, Triticum aestivum
  peptide (1)..(249): Ceres Seq. ID no. 15170106
MWARTLCAEDAAGKFTCATGDCGSGALQCNGGGAAPPASLVEFTLDGSGGMDFFDVSLVDGYNLPMLVVPQGAATAAAASSTSGPKCMATGCLVDLNAACPAALKVTSTGAASSAVGGSAMACRSACEAFGSPEYCCSGAYGSPNTCRPSAYSQYFKSACPRAYSYAYDDSTSTFTCAAGTNYAITFCPSTTSGKYTDENPQAAGVPPTNGTMVYRGGEQFSTGGGASIAAHASQLLLAVAVAVALLLL

SEQ ID NO: 66349 - DNA, 1725 bp, Triticum aestivum
  misc_feature (1)..(1725): Ceres Seq. ID no. 13657939
attactacgactgcctttcccttcttccaagcaaaccgctcttcgcgtctcaggttcctccgcacaccgctccgccacagtcgacggatcggaaccgcagacccgcccccgccaccaaaccctagcccgccgccccgccgcccgcgatgtcggccgcggccgtcgcgccgagccctgcggcgccgctcccgtcggcgcccccgccgtcctaccccgcggcgccccccgccccctccgccgaggacgacgacgacctctacggccgcctcaagtccctccagcgccacatggagttcgtcgagatccaggaggagtacgtcaaggacgagcagaagaacctgaagcgcgagctgctgcgcgcgcaggaggaggtcaagcggatccagtccgtgccgctcgtcatcggccagttcatggagatggtcgacggcaacaacggcatcgtcggctccaccaccggcagcaactactacgtgcgcatcctcagcaccatcaaccgcgagctgctcaagccctccgcctccgtcgccctgcaccgccactccaacgccctcgtcgacgtgctgccccccgaggccgactccagcatctcgctcctcgcctcgtcggagaagcccaacgtcctgtactcggacattggaggatgtgatatccaaaaacaagaaattcgggaggcagttgagctaccattgacacaccatgaattgtacaagcagattggtattgatccaccaagaggggtgctgctctatggtcctccaggcactggcaagaccatgcttgctaaagctgtggcgcatcacactactgctgcttttatcagagtggttggttcagagtttgtgcagaagtacttgggtgagggcccaaggatggttcgagatgtattccgcttagctaaagagaatgccccggctataatattcattgatgaggttgatgctatagccactgctcgattcgatgctcagaccggggctgaccgagaagttcagcgtattctgatggagctactgaatcagatggatggatttgatcaaacagtgaatgtgaaggttataatggcaaccaatcgggcagatactctagatcctgctctgttgcgtccaggaagactggacaggaaaatcgagttccccctgccggaccggaggcagaagaggcttgttttccaagtttgtactgctaagatgaacttgagtgacgaggttgatttggaagattatgtctccagacctgataaaatcagtgctgctgatatcactgctatttgccaggaagctggcatgcatgctgtccgcaaaaatcggtatgttatcctccccaaggacttcgagaagggttaccgaaccaacgtcaagaagcctgagtcagactttgacttctacaaataaggcagcaaacttttaaagaggatgctttatttcctacaggcgacatgattaacactctagatgaatttgtggatagtcgcctgatagtaatatcgttgtatccccgtgctcgtgtagtttgcacgttcagtctcaccagtgttgttaagctacttgtctgtacaattccttcctaaagtttcgcttgaccattttgcgcttttggaggctgtgatttgtcttccaaaggagaatcgagtacccccttttcgttcttaaagtttaaagtgcattaatctttttgattgaatttcgaaaaaaaaaaaaaaaaaagcttatcgataccgtcgac

SEQ ID NO: 66350 - protein, 415 aa, Triticum aestivum
  peptide (1)..(415): Ceres Seq. ID no. 13657940
MSAAAVAPSPAAPLPSAPPPSYPAAPPAPSAEDDDDLYGRLKSLQRHMEFVEIQEEYVKDEQKNLKRELLRAQEEVKRIQSVPLVIGQFMEMVDGNNGIVGSTTGSNYYVRILSTINRELLKPSASVALHRHSNALVDVLPPEADSSISLLASSEKPNVLYSDIGGCDIQKQEIREAVELPLTHHELYKQIGIDPPRGVLLYGPPGTGKTMLAKAVAHHTTAAFIRVVGSEFVQKYLGEGPRMVRDVFRLAKENAPAIIFIDEVDAIATARFDAQTGADREVQRILMELLNQMDGFDQTVNVKVIMATNRADTLDPALLRPGRLDRKIEFPLPDRRQKRLVFQVCTAKMNLSDEVDLEDYVSRPDKISAADITAICQEAGMHAVRKNRYVILPKDFEKGYRTNVKKPESDFDFYK

SEQ ID NO: 66351 - protein, 368 aa, Triticum aestivum
  peptide (1)..(368): Ceres Seq. ID no. 13657941
MEFVEIQEEYVKDEQKNLKRELLRAQEEVKRIQSVPLVIGQFMEMVDGNNGIVGSTTGSNYYVRILSTINRELLKPSASVALHRHSNALVDVLPPEADSSISLLASSEKPNVLYSDIGGCDIQKQEIREAVELPLTHHELYKQIGIDPPRGVLLYGPPGTGKTMLAKAVAHHTTAAFIRVVGSEFVQKYLGEGPRMVRDVFRLAKENAPAIIFIDEVDAIATARFDAQTGADREVQRILMELLNQMDGFDQTVNVKVIMATNRADTLDPALLRPGRLDRKIEFPLPDRRQKRLVFQVCTAKMNLSDEVDLEDYVSRPDKISAADITAICQEAGMHAVRKNRYVILPKDFEKGYRTNVKKPESDFDFYK

SEQ ID NO: 66352 - protein, 326 aa, Triticum aestivum
  peptide (1)..(326): Ceres Seq. ID no. 13657942
MEMVDGNNGIVGSTTGSNYYVRILSTINRELLKPSASVALHRHSNALVDVLPPEADSSISLLASSEKPNVLYSDIGGCDIQKQEIREAVELPLTHHELYKQIGIDPPRGVLLYGPPGTGKTMLAKAVAHHTTAAFIRVVGSEFVQKYLGEGPRMVRDVFRLAKENAPAIIFIDEVDAIATARFDAQTGADREVQRILMELLNQMDGFDQTVNVKVIMATNRADTLDPALLRPGRLDRKIEFPLPDRRQKRLVFQVCTAKMNLSDEVDLEDYVSRPDKISAADITAICQEAGMHAVRKNRYVILPKDFEKGYRTNVKKPESDFDFYK

SEQ ID NO: 66353 - DNA, 2048 bp, Triticum aestivum
  misc_feature (1)..(2048): Ceres Seq. ID no. 15169490
atactaaacctaatcccatatagcctagcctaatcgagcacaccgccgccgccgccgcgccggttcagcgctgccctcacatcgccggcagcccagccctcacgctgcggccgtggcgccgtcctctacgccctccgtcgccgccgtcctctacgcccctctgccgccgccgaagctctccacggcaacaaccctctccaccgtcgacggcaccctgtagtcttgcacgcctccgacttctgcacccgaaaattattatccaacacatacgatagagacaggctgagattgttaaatggcaaagagaaagatgggttcagaagaggacatacgtggaaaaacggtgaaaagaaagggaccgaggcttcagctgactagcctgccaacggaaattctctgttgtatcttgtcgcaactgccgataaaagaagctgtgcggactagcatactgtaggaacagtggagatgtctttggcgttgccactcgaatctagcattcagtcttatatcaatgttgccagcagttcctcgtaatcgtatcattggagcgctaaaacttgatgataataaactgaggaagcaagagtttattcagagagttgatgcagtcctagagaaacacagtggtgcaggggttgacaggattcagtttcgtgctccatttgataataagcatagagaccagatagaaagatgggtgaactttgctactgcctcgaaggcgaagcagattattttcgatttctcgaccgccagcgacataagtcggccatgtaacttcgatttgcatcttcttgatgatagtaaaagtttaagcttgcggtctataaaactctgctctgtttctctaaaggtgcccgtgggattcaagggttttcagaaccttaaatcgacttacctagcagacacaaatattactgatgatggtcttcaacatttgatgtccaactgcagtgttctagagttccttggaattgcaggttgtgcaatgcttacaacgttgcaaatatctcatccttcaaacacacttaagcatttgcatgtatatgactgctgtttgcttcaagggatggagttaaactttggtctggtaagacttgagtacagaggtctgccgattgtgttatcgcctcctggaaccttgcttctaacaaatatgtgcataaagttggagggtatttgtacttctcttgaatacatcttcaccaaacttcgtgataatgtgcctcgtctcgaggttctgaatctaaaatgccaggagtataagatgactacattgccaggaaagctgcatgagtttgtttatttgaagcacctgatattggagttaacttttgagagctgtcagagagggaagactgatatccttcaatttgcctgccttctggttgctgctccttccttagaaaagcttgaatttcatatgtggctgcgctggggtcgggaacggtatagagccgaggacgggagtctccggagccttccttcccagccacactcccatctcaggtcggtcgatatcacggggttttacggcgagaaggaccggctggagcttgtgctccacatcctcagagattccgttgcgctggagtcgatgaaggtagatccaagccctgtggttgctgctgatgttaaccgacttgggggactggggagcatgcatgttcctcattttgtggatggctatgaagtcgcccttgagttcctctgcagcagagaccgtcgcaatgttgtccatggcgcgagccccgatatcatcgagagggcccgacgtgggtcttcccccctgagtccacgcaacagtagtgcaaaggcatcctggcaacgtgtgaagagggtgaagcgattgtcgcggccttcctccagccgaggagcttcctgaagctgctctatataccggcaagtacctggaaacagacgagaagcaaaagaatccagctctgccgacgtaatagagccgtcgtgttgtgggttccctgaggttgctatattttctggctttgttgtgttaaaaaaacttcaatgatttcagcaacttttgtgtc

SEQ ID NO: 66354 - protein, 457 aa, Triticum aestivum
  peptide (1)..(457): Ceres Seq. ID no. 15169491
MLPAVPRNRIIGALKLDDNKLRKQEFIQRVDAVLEKHSGAGVDRIQFRAPFDNKHRDQIERWVNFATASKAKQIIFDFSTASDISRPCNFDLHLLDDSKSLSLRSIKLCSVSLKVPVGFKGFQNLKSTYLADTNITDDGLQHLMSNCSVLEFLGIAGCAMLTTLQISHPSNTLKHLHVYDCCLLQGMELNFGLVRLEYRGLPIVLSPPGTLLLTNMCIKLEGICTSLEYIFTKLRDNVPRLEVLNLKCQEYKMTTLPGKLHEFVYLKHLILELTFESCQRGKTDILQFACLLVAAPSLEKLEFHMWLRWGRERYRAEDGSLRSLPSQPHSHLRSVDITGFYGEKDRLELVLHILRDSVALESMKVDPSPVVAADVNRLGGLGSMHVPHFVDGYEVALEFLCSRDRRNVVHGASPDIIERARRGSSPLSPRNSSAKASWQRVKRVKRLSRPSSSRGAS

SEQ ID NO: 66355 - protein, 314 aa, Triticum aestivum
  peptide (1)..(314): Ceres Seq. ID no. 15169492
MSNCSVLEFLGIAGCAMLTTLQISHPSNTLKHLHVYDCCLLQGMELNFGLVRLEYRGLPIVLSPPGTLLLTNMCIKLEGICTSLEYIFTKLRDNVPRLEVLNLKCQEYKMTTLPGKLHEFVYLKHLILELTFESCQRGKTDILQFACLLVAAPSLEKLEFHMWLRWGRERYRAEDGSLRSLPSQPHSHLRSVDITGFYGEKDRLELVLHILRDSVALESMKVDPSPVVAADVNRLGGLGSMHVPHFVDGYEVALEFLCSRDRRNVVHGASPDIIERARRGSSPLSPRNSSAKASWQRVKRVKRLSRPSSSRGAS

SEQ ID NO: 66356 - protein, 298 aa, Triticum aestivum
  peptide (1)..(298): Ceres Seq. ID no. 15169493
MLTTLQISHPSNTLKHLHVYDCCLLQGMELNFGLVRLEYRGLPIVLSPPGTLLLTNMCIKLEGICTSLEYIFTKLRDNVPRLEVLNLKCQEYKMTTLPGKLHEFVYLKHLILELTFESCQRGKTDILQFACLLVAAPSLEKLEFHMWLRWGRERYRAEDGSLRSLPSQPHSHLRSVDITGFYGEKDRLELVLHILRDSVALESMKVDPSPVVAADVNRLGGLGSMHVPHFVDGYEVALEFLCSRDRRNVVHGASPDIIERARRGSSPLSPRNSSAKASWQRVKRVKRLSRPSSSRGAS

SEQ ID NO: 66357 - DNA, 1357 bp, Triticum aestivum
  misc_feature (1)..(1357): Ceres Seq. ID no. 13657872
accaatcatttcctcctcactctcgcttctccttttctgccttccaaccgaagccccatcccttgattccatccatcgttcgggatcctcctcctctcgcgcgcttctaggacccgtccgccctgggcaagttcgaggagatcgtggccgcgtccaaggggaagcagatcgtcatgttcctggactacgacggcacgctgtcccccatcgtcgatgaccccgacgccgccttcatgagcgagacgatgcggatggccgtgcgcagcgtggccaagcacttcccgacggcgatcgtcagcggtcggtgccgcgacaaggtgtttgatttcgtgaagctggcggagctctactacgccggcagccacggcatggacatcaagggcccggccaagtcctcaaagtccaaggccaaaggagttctcttccaaccagcaagcgagttcctgcccatgatagaagaggtgcatcagcggctgatagaggagacgaagcacgtagccggggccaaggtggagaacaacaagttctgcgtgtccgtccacttcagatgcgtcgacgaaaagagctggggcgcgctggcggagacggtgaagggcgtgatgcgggagtacccgaagctgcgcatgtcgcaggggcggatggtgttcgaggtgcggcccaccatcaagtgggacaagggcaaggccctcgagttcctgctcgagtcgctgggcttcgccgactgccccaacgtgctccccgtctacatcggcgacgaccgcaccgacgaggacgccttcaaggtgctgcgccggcggggccagggcgtcgggatcctcgtctccaagcaccccaaggacaccagcgcctccttctcgctgcaggagccggccgaggtcatggagttcctgctccgcctcgtcgagtggaagcagctctccaaggcgcgcctcaggctgcggcggcaggccgacgcctgatcggacgacgaggatcggccggccggcgggaatggccgaactaattatttcactgctacgtgtagcttagctagttaatgaaaatcccctgcttgctcatccgaacaaagccaaaggctacgtacgtggatgggaagaaggaacgtactacggcgaacctgcggagcattgttgcgccacatgttgtgttctaattaaccgtccttctttttctggggatgtataccgtacctaccgattatgcatgcatgtaaattacctttgtccacgtacaaggggaggaaccatggaataaacaaagagaaatctgagtaaataacaaaaaaaaaaaaaaaaaagcttatcgataccgtygaccaacacaataaagttggaacgggagggggggcccggtaccc

SEQ ID NO: 66358 - protein, 261 aa, Triticum aestivum
  peptide (1)..(261): Ceres Seq. ID no. 15219883
MFLDYDGTLSPIVDDPDAAFMSETMRMAVRSVAKHFPTAIVSGRCRDKVFDFVKLAELYYAGSHGMDIKGPAKSSKSKAKGVLFQPASEFLPMIEEVHQRLIEETKHVAGAKVENNKFCVSVHFRCVDEKSWGALAETVKGVMREYPKLRMSQGRMVFEVRPTIKWDKGKALEFLLESLGFADCPNVLPVYIGDDRTDEDAFKVLRRRGQGVGILVSKHPKDTSASFSLQEPAEVMEFLLRLVEWKQLSKARLRLRRQADA

SEQ ID NO: 66359 - protein, 241 aa, Triticum aestivum
  peptide (1)..(241): Ceres Seq. ID no. 15219884
MSETMRMAVRSVAKHFPTAIVSGRCRDKVFDFVKLAELYYAGSHGMDIKGPAKSSKSKAKGVLFQPASEFLPMIEEVHQRLIEETKHVAGAKVENNKFCVSVHFRCVDEKSWGALAETVKGVMREYPKLRMSQGRMVFEVRPTIKWDKGKALEFLLESLGFADCPNVLPVYIGDDRTDEDAFKVLRRRGQGVGILVSKHPKDTSASFSLQEPAEVMEFLLRLVEWKQLSKARLRLRRQADA

SEQ ID NO: 66360 - protein, 237 aa, Triticum aestivum
  peptide (1)..(237): Ceres Seq. ID no. 15219885
MRMAVRSVAKHFPTAIVSGRCRDKVFDFVKLAELYYAGSHGMDIKGPAKSSKSKAKGVLFQPASEFLPMIEEVHQRLIEETKHVAGAKVENNKFCVSVHFRCVDEKSWGALAETVKGVMREYPKLRMSQGRMVFEVRPTIKWDKGKALEFLLESLGFADCPNVLPVYIGDDRTDEDAFKVLRRRGQGVGILVSKHPKDTSASFSLQEPAEVMEFLLRLVEWKQLSKARLRLRRQADA

SEQ ID NO: 66361 - DNA, 1951 bp, Triticum aestivum
  misc_feature (1)..(1951): Ceres Seq. ID no. 13657873
aactccaaaagagcagataagcccctcttcgtcccgcggtgcttcggctccgaaggcagccaccccgcaccgccggcggagccaccaacgccaccatcccaccgcaccgcccccatggcctccgccgcctccctcgccgtctcccaccacctcctccccgccgcgcccgcccgctcgcagccccgtccgcccgcccgcctcgtccgcctcccccgcacccgcctccgggtcgccgccatctcctcgtccccctcgcccccctcgcggcgcgaccgcgccgcggccggcctcgagcggtgcctggccgcgactccggcgccggccttcgccccgccggagatgaagggcgggagccagcgcgggtcgttcggggccgccacgctccagaaggccaagctcgacctctcccaaaagaggctcaaaggcgtccagcccgagctggcatctggtggtggtggtggagacaatgggaaacgaattggctatggtggtggtaatagtggagatgatgatggtgatgatgatgattacttcgaagactctgacgatggagatgaagaaagtggatttttcagaaggcgtataattatacaagagctttttaagagggagtttgttgatgccgttcttcaagagtggtacaaaacaatgagtaatttgccagctggtttgcgtcaagctcatgagatgggtttggtcagctcttctcagatggtcaaatatttgtcaatgtttggaaggcccacaaaggctagatatttctctcgagcctttccggacttcttctcaagagaccttgttggaagaatgcttgcagatccatctttcctgcataagatgacctttgagttgctagctaccgttagtacatctgtttgttgggagatgaaaaatcgcaaggagaggttccaagaagaatgggatttggtgtttctcaatgtagttactgccacagtttgcaatttagctgttttcagttcacttgcgccatgccgctcatatatgatccagaaacttcccaataacatatttgagaagagctatcctttcatgagacagtttggtcttctaagaagaacccagtccctcttcagcaaggctgctgagctttgcctaggtgggctaattgttggctccattcaaggtggtctatcgaatatcctttctgctggaagagaaagacggttgtcgatgactgttccttctatcagcaacaatgctcttagttatggagcttattatgggctttatgcaaatctgcggtatcaaattttatgtggtcttgatagatcaatggcaaaccattttgatgtccttggtgttacaatctttttcggcacagcgatgaggttgctgaatattcaaattggggagctatcgagacgtgcctggcttggtgagggagcagatctgcttaactcggataatttgttgagaacatacaatggcccagcagcagagcttggcatcaatcaacaggcagagtggttcatgtccaagaatgcaattgtatctggcttagaacttctaggcatcaagtatggtgcacctaaagatgcctctccaaagcttcggcgaaaaagaattgtccgaaagaagtagggtggatgagggaaagcctaactatacaaacgctgagctcgatggttttgatacccatgctggaacagttttgcctcagttccgccatgccttgtgttgcctatcgaagtaggatggatgaggggaaaattgtaacttgtgttctagttgcaatttggggccaagatcaaaggctttcaattttttactcggaggcgattcggccggttcgctgaaggtccttaccattcttctgtattgttttgagcaaaagtagacctccaaagttctaactgtaatttctagattatagatagtatgttattcactatatattttcttcattctttttgaaatggtgttttacttc

SEQ ID NO: 66362 - protein, 533 aa, Triticum aestivum
  peptide (1)..(533): Ceres Seq. ID no. 13657874
NSKRADKPLFVPRCFGSEGSHPAPPAEPPTPPSHRTAPMASAASLAVSHHLLPAAPARSQPRPPARLVRLPRTRLRVAAISSSPSPPSRRDRAAAGLERCLAATPAPAFAPPEMKGGSQRGSFGAATLQKAKLDLSQKRLKGVQPELASGGGGGDNGKRIGYGGGNSGDDDGDDDDYFEDSDDGDEESGFFRRRIIIQELFKREFVDAVLQEWYKTMSNLPAGLRQAHEMGLVSSSQMVKYLSMFGRPTKARYFSRAFPDFFSRDLVGRMLADPSFLHKMTFELLATVSTSVCWEMKNRKERFQEEWDLVFLNVVTATVCNLAVFSSLAPCRSYMIQKLPNNIFEKSYPFMRQFGLLRRTQSLFSKAAELCLGGLIVGSIQGGLSNILSAGRERRLSMTVPSISNNALSYGAYYGLYANLRYQILCGLDRSMANHFDVLGVTIFFGTAMRLLNIQIGELSRRAWLGEGADLLNSDNLLRTYNGPAAELGINQQAEWFMSKNAIVSGLELLGIKYGAPKDASPKLRRKRIVRKK

SEQ ID NO: 66363 - protein, 495 aa, Triticum aestivum
  peptide (1)..(495): Ceres Seq. ID no. 13657875
MASAASLAVSHHLLPAAPARSQPRPPARLVRLPRTRLRVAAISSSPSPPSRRDRAAAGLERCLAATPAPAFAPPEMKGGSQRGSFGAATLQKAKLDLSQKRLKGVQPELASGGGGGDNGKRIGYGGGNSGDDDGDDDDYFEDSDDGDEESGFFRRRIIIQELFKREFVDAVLQEWYKTMSNLPAGLRQAHEMGLVSSSQMVKYLSMFGRPTKARYFSRAFPDFFSRDLVGRMLADPSFLHKMTFELLATVSTSVCWEMKNRKERFQEEWDLVFLNVVTATVCNLAVFSSLAPCRSYMIQKLPNNIFEKSYPFMRQFGLLRRTQSLFSKAAELCLGGLIVGSIQGGLSNILSAGRERRLSMTVPSISNNALSYGAYYGLYANLRYQILCGLDRSMANHFDVLGVTIFFGTAMRLLNIQIGELSRRAWLGEGADLLNSDNLLRTYNGPAAELGINQQAEWFMSKNAIVSGLELLGIKYGAPKDASPKLRRKRIVRKK

SEQ ID NO: 66364 - protein, 420 aa, Triticum aestivum
  peptide (1)..(420): Ceres Seq. ID no. 13657876
MKGGSQRGSFGAATLQKAKLDLSQKRLKGVQPELASGGGGGDNGKRIGYGGGNSGDDDGDDDDYFEDSDDGDEESGFFRRRIIIQELFKREFVDAVLQEWYKTMSNLPAGLRQAHEMGLVSSSQMVKYLSMFGRPTKARYFSRAFPDFFSRDLVGRMLADPSFLHKMTFELLATVSTSVCWEMKNRKERFQEEWDLVFLNVVTATVCNLAVFSSLAPCRSYMIQKLPNNIFEKSYPFMRQFGLLRRTQSLFSKAAELCLGGLIVGSIQGGLSNILSAGRERRLSMTVPSISNNALSYGAYYGLYANLRYQILCGLDRSMANHFDVLGVTIFFGTAMRLLNIQIGELSRRAWLGEGADLLNSDNLLRTYNGPAAELGINQQAEWFMSKNAIVSGLELLGIKYGAPKDASPKLRRKRIVRKK

SEQ ID NO: 66365 - DNA, 1618 bp, Triticum aestivum
  misc_feature (1)..(1618): Ceres Seq. ID no. 14303177
cccaccaccccgcgcatttattcccctcccgtcctccccccgcgccatgccgtcgcgcccctcctctcctcccacgcccgcctccccgcccgtccgacaccgcccgtcccacgctggcgccgccccccgccgccgtcgccgtcgccgcaacgatgccggagcctgacgacgagggggcggggcagcagcagccaaaggcggggcccgcgctcgagggcctcgtggtggggagctactgccacgacgtgctcctccagggcggccgcgtcgtgggcgagacgctcggcggggcggcggccttcgtctccaccgtgctcgacgccgcctcgcccccggaggcctccttctccgtcgtgtccaaggtcgggcccgacttcgcctacgcctccgcgccggcgcccgcgcggcaccccccgctgctctgccccgcgcggcccaccacctccttccacgcccggttctccgacgccgccgcgtccgcgcacgcgcccgacaggcagctcaggcgcgtccacgcctgcgatccgatctaccccgatgacctccccgaccgccgcttcgcctacggcctcgccgtcggcgtcgccggggaggtgctgccggagacgctcgagcggatgattcggctctgccgcgcggtgctcgtggacgcgcaggcgctgatccgggccttcggcgccgagggcgacggcagcggcgctgccgtccgccacgtggcgctggagggcacgccgtacgcgcggcttctgcagcgggtggcgttcctcaaggcgtcgtcggaggaggcgccgtacgtgggggtggagacggcgagacggcgctgctgcgtgatcgtgacggaggggagggacgggtgccggctttattgggacggcggggaggcacgcgtggcgccgttccccgccgtccaggtggatcctacaggtgccggagacagctatctcgccggtttcgcggccggtctgctttgggggctctcagctacggacgccgcgctgcttggtaacttcttcggcgcagctgctgtctcccaagtcggcgttcccaccttccatcccaagatgttgcaggctgtcaaacggatactcgaggacaaggcgataccatggtctagtccatgtataaacggcaccaccttcaccttccagagatcgattatgcacgatgagctacacgcgtccctggaagaagcggcgaggctgatgcgcgagcagtcaccaccagcaactgagaatggtgatggtattctctcggcacaagagccgacttcaccgccaagtggatgctgacctgaagttcactgcgaaataatgggaaactgccctcccagattttacattgagatctgtacagccaacagacgaaatagattgctcggccagagcttacactcatgaactgtgttgaatagggttctactcagacagtttctcatttgtcaggcaaagcaaaagagcgagttagcatatggagcaccattctgtaatactgagattgagcttgtttcggctgggctgtacataccgccccttcaagttccccctataattttgtagttcatgagatccaacaaaagtactcgtattatggaggcaaatttacacatggttttaaagtt

SEQ ID NO: 66366 - protein, 428 aa, Triticum aestivum
  peptide (1)..(428): Ceres Seq. ID no. 14303178
HHPAHLFPSRPPPAPCRRAPPLLPRPPPRPSDTARPTLAPPPAAVAVAATMPEPDDEGAGQQQPKAGPALEGLVVGSYCHDVLLQGGRVVGETLGGAAAFVSTVLDAASPPEASFSVVSKVGPDFAYASAPAPARHPPLLCPARPTTSFHARFSDAAASAHAPDRQLRRVHACDPIYPDDLPDRRFAYGLAVGVAGEVLPETLERMIRLCRAVLVDAQALIRAFGAEGDGSGAAVRHVALEGTPYARLLQRVAFLKASSEEAPYVGVETARRRCCVIVTEGRDGCRLYWDGGEARVAPFPAVQVDPTGAGDSYLAGFAAGLLWGLSATDAALLGNFFGAAAVSQVGVPTFHPKMLQAVKRILEDKAIPWSSPCINGTTFTFQRSIMHDELHASLEEAARLMREQSPPATENGDGILSAQEPTSPPSGC

SEQ ID NO: 66367 - protein, 378 aa, Triticum aestivum
  peptide (1)..(378): Ceres Seq. ID no. 14303179
MPEPDDEGAGQQQPKAGPALEGLVVGSYCHDVLLQGGRVVGETLGGAAAFVSTVLDAASPPEASFSVVSKVGPDFAYASAPAPARHPPLLCPARPTTSFHARFSDAAASAHAPDRQLRRVHACDPIYPDDLPDRRFAYGLAVGVAGEVLPETLERMIRLCRAVLVDAQALIRAFGAEGDGSGAAVRHVALEGTPYARLLQRVAFLKASSEEAPYVGVETARRRCCVIVTEGRDGCRLYWDGGEARVAPFPAVQVDPTGAGDSYLAGFAAGLLWGLSATDAALLGNFFGAAAVSQVGVPTFHPKMLQAVKRILEDKAIPWSSPCINGTTFTFQRSIMHDELHASLEEAARLMREQSPPATENGDGILSAQEPTSPPSGC

SEQ ID NO: 66368 - protein, 223 aa, Triticum aestivum
  peptide (1)..(223): Ceres Seq. ID no. 14303180
MIRLCRAVLVDAQALIRAFGAEGDGSGAAVRHVALEGTPYARLLQRVAFLKASSEEAPYVGVETARRRCCVIVTEGRDGCRLYWDGGEARVAPFPAVQVDPTGAGDSYLAGFAAGLLWGLSATDAALLGNFFGAAAVSQVGVPTFHPKMLQAVKRILEDKAIPWSSPCINGTTFTFQRSIMHDELHASLEEAARLMREQSPPATENGDGILSAQEPTSPPSGC

SEQ ID NO: 66369 - DNA, 1713 bp, Triticum aestivum
  misc_feature (1)..(1713): Ceres Seq. ID no. 14303091
cccagagaatctttcccccccttccttcctcactccctttctctttcctgacctcaccctacctcatccccctttctttatccccctccctctctccctctgctgacaggggagtgagtgagtgagtgaggcgagcgagtgatggcacggggaggagctcgcgccgtcgcgccggcggctctgctgctcctgcttctcctcgcggcaggcggcggtgtgcattgcctgaggtcaagggcggagagcggcgccacggtcctggagctgcggcaccacgccagcctcggctcaggcggcaggagcggcagcgcggaggaggcccgcggcgtcctggcctccgacgccgccagggtctcgtcgctgcagcggcgcatcggcagctacggcctgatcaggtcgtcggacgcggcgtccaagctggcgcaggtgcccgtcacctctggcgccaggctgcggacgctcaactacgtggccaccgtgggcatcggcggcggcgaggccacggtgatcgtggacacggccagcgagctcacctgggtgcagtgcaagccctgcgacgcctgccacgaccagcaggagccgctcttcgacccgtcggcgtcgccgtcctacgccgccgtgccgtgcaactcctcctcctgcgacgcgctgcgggtggccaccgggatgtccggcggccaggcgtgcgaccagccggcggcctgcagctacgcgctcagctaccgcgacgggtcctactcccgcggcgtgctggcgcacgacaggctgagcctggccggcgaggacatcgagggcttcgtgttcggctgcggcaccagcaaccagggcccgttcgggggcacgtcggggctgatggggctcggccggagcccgctctcgctgatatcccagaccacggagcagttcggcggcgtgttctcctactgcctgccgccgaaggagtccggctcgtcgggctccctcgtcctcggcgacgacgcctcggcgtaccgcaactccacgccgatcgtgtacaccgcgatggtcaccgacccgctgcaggggcccttctacatggtcaacctgaccgggatcagcgtgggcggcgaggaggtgcagtccccgggcttctcggccggcggcggcggcggcgggagggccatcgtggactcgggcacgatcatcacgagcctggtgccgtcggtgtacgcggcggtgcggggcgagttcgtgaggcagctggcggagtacccgcgggcgccggccttctccatcctggacacctgcttcgacctgacggggctgagggaggtgcaggtgccgagcctgaggctggcgttcgacggcggcgcggaggtggaggtggactccaagggcgtgctgtacgtggtcgccggcgacgcctcccaggtgtgcctggccctggccgccctcgggtccgaggacgacaccccgatcatcggcaactaccagcagaagaacctgcgggtggtcttcgacaccgccgcgtcccagatcgggttcgcgcaggagacctgtgattacatttgatttgaccgtggatcatcgggagctgcgtgtgcgtgtgtgcgcgtgtgaatatcctatagttggggatttgttttggaatcacctctggtgattggcttttttatttttatttttttgagttgtggtgatcggcaattggcaatacggtatttagttattggcaaatgtacaagcgtttgtagc

SEQ ID NO: 66370 - protein, 462 aa, Triticum aestivum
  peptide (1)..(462): Ceres Seq. ID no. 14303092
MARGGARAVAPAALLLLLLLAAGGGVHCLRSRAESGATVLELRHHASLGSGGRSGSAEEARGVLASDAARVSSLQRRIGSYGLIRSSDAASKLAQVPVTSGARLRTLNYVATVGIGGGEATVIVDTASELTWVQCKPCDACHDQQEPLFDPSASPSYAAVPCNSSSCDALRVATGMSGGQACDQPAACSYALSYRDGSYSRGVLAHDRLSLAGEDIEGFVFGCGTSNQGPFGGTSGLMGLGRSPLSLISQTTEQFGGVFSYCLPPKESGSSGSLVLGDDASAYRNSTPIVYTAMVTDPLQGPFYMVNLTGISVGGEEVQSPGFSAGGGGGGRAIVDSGTIITSLVPSVYAAVRGEFVRQLAEYPRAPAFSILDTCFDLTGLREVQVPSLRLAFDGGAEVEVDSKGVLYVVAGDASQVCLALAALGSEDDTPIIGNYQQKNLRVVFDTAASQIGFAQETCDYI

SEQ ID NO: 66371 - protein, 287 aa, Triticum aestivum
  peptide (1)..(287): Ceres Seq. ID no. 14303093
MSGGQACDQPAACSYALSYRDGSYSRGVLAHDRLSLAGEDIEGFVFGCGTSNQGPFGGTSGLMGLGRSPLSLISQTTEQFGGVFSYCLPPKESGSSGSLVLGDDASAYRNSTPIVYTAMVTDPLQGPFYMVNLTGISVGGEEVQSPGFSAGGGGGGRAIVDSGTIITSLVPSVYAAVRGEFVRQLAEYPRAPAFSILDTCFDLTGLREVQVPSLRLAFDGGAEVEVDSKGVLYVVAGDASQVCLALAALGSEDDTPIIGNYQQKNLRVVFDTAASQIGFAQETCDYI

SEQ ID NO: 66372 - DNA, 1373 bp, Triticum aestivum
  misc_feature (1)..(1373): Ceres Seq. ID no. 13659033
ctagaacatcctaatcgaaaaatagacccaccccatgcgtgctagagatgttccagtcccctccgttttgctcatcctcttggcgctctccgtcgtcgtcacgcaggcgcccttcttccgggctcggcgcctgattagcgatgacggcggtggccgcgctacggcttgcaccaaggacgccgcctcctgtgactgcgattactctgatgggaaatgggtgaggagccgctccactgatgctatgccatacggggaggactgcccgttcctcgaccccggcttccgctgcgtgcaaaatgggcggaatgactcgtcctttcgacactggcgttggcaacctcgccgcggcagctgccacctccctaagttcaatgcgacggatatgctggagaggagccggaacggccggatcgtgttcgtcggtgactccattggccgcaaccagtgggagtccatgttgtgcatgctcgccgccgccgtgcctgccggttcgaggatatacgagcagttcggtaagcccctgagccggcacaaaggctatctatccatggtctttgcggactacaacctctccgtggagtactaccgtgcacccatgcttgtcatggttgatcgcctccctccggcgagcgatggtgccatcaagagggccatccggcttgacgcactaccgcggcatgccgcccgctgggctggcgctgacgtgctcatcctcaacacgggccactggtggaacctacacaagaccatcaaatctggaaactatttcacggtgggcgatcggttcaacatgacaacggacattaaggaagcattccgacggtctctccagacggtgaaagattgggcactaaccaatccacgactctccaagagcagctacatcttctttaggagctattctccatcgcactacgacaacgggacatgggacacaggtggctcttgcgcggaccaatgggatccgctaacgatgattaccagtgaaagtgaccagcatgagcacttgtggatcaacacaatgatctcaagtgcggcacagagcatgaggagacggcatggaatgaacaaagatgcggttttcttgaacataacgtacatgacgggcatgaggggggacgggcacccgtcgaggcaccgggagcccgagacgccatcggatgccccagaggattgcagccactggtgcctgccgggtgtgccggacacgtggaaccagatgatgtacgggcacctcgtgtccatgggattcgacatgaggtcaattaagagataggtagatgcatgatatatgtgtggttgtgtgtgcatgtataatgtgtggaaggcaagattggaccagtgctagtcataattaatttaactttatcgtg

SEQ ID NO: 66373 - protein, 413 aa, Triticum aestivum
  peptide (1)..(413): Ceres Seq. ID no. 13659034
MRARDVPVPSVLLILLALSVVVTQAPFFRARRLISDDGGGRATACTKDAASCDCDYSDGKWVRSRSTDAMPYGEDCPFLDPGFRCVQNGRNDSSFRHWRWQPRRGSCHLPKFNATDMLERSRNGRIVFVGDSIGRNQWESMLCMLAAAVPAGSRIYEQFGKPLSRHKGYLSMVFADYNLSVEYYRAPMLVMVDRLPPASDGAIKRAIRLDALPRHAARWAGADVLILNTGHWWNLHKTIKSGNYFTVGDRFNMTTDIKEAFRRSLQTVKDWALTNPRLSKSSYIFFRSYSPSHYDNGTWDTGGSCADQWDPLTMITSESDQHEHLWINTMISSAAQSMRRRHGMNKDAVFLNITYMTGMRGDGHPSRHREPETPSDAPEDCSHWCLPGVPDTWNQMMYGHLVSMGFDMRSIKR

SEQ ID NO: 66374 - protein, 344 aa, Triticum aestivum
  peptide (1)..(344): Ceres Seq. ID no. 13659035
MPYGEDCPFLDPGFRCVQNGRNDSSFRHWRWQPRRGSCHLPKFNATDMLERSRNGRIVFVGDSIGRNQWESMLCMLAAAVPAGSRIYEQFGKPLSRHKGYLSMVFADYNLSVEYYRAPMLVMVDRLPPASDGAIKRAIRLDALPRHAARWAGADVLILNTGHWWNLHKTIKSGNYFTVGDRFNMTTDIKEAFRRSLQTVKDWALTNPRLSKSSYIFFRSYSPSHYDNGTWDTGGSCADQWDPLTMITSESDQHEHLWINTMISSAAQSMRRRHGMNKDAVFLNITYMTGMRGDGHPSRHREPETPSDAPEDCSHWCLPGVPDTWNQMMYGHLVSMGFDMRSIKR

SEQ ID NO: 66375 - protein, 297 aa, Triticum aestivum
  peptide (1)..(297): Ceres Seq. ID no. 13659036
MLERSRNGRIVFVGDSIGRNQWESMLCMLAAAVPAGSRIYEQFGKPLSRHKGYLSMVFADYNLSVEYYRAPMLVMVDRLPPASDGAIKRAIRLDALPRHAARWAGADVLILNTGHWWNLHKTIKSGNYFTVGDRFNMTTDIKEAFRRSLQTVKDWALTNPRLSKSSYIFFRSYSPSHYDNGTWDTGGSCADQWDPLTMITSESDQHEHLWINTMISSAAQSMRRRHGMNKDAVFLNITYMTGMRGDGHPSRHREPETPSDAPEDCSHWCLPGVPDTWNQMMYGHLVSMGFDMRSIKR

SEQ ID NO: 66376 - DNA, 1683 bp, Triticum aestivum
  misc_feature (1)..(1683): Ceres Seq. ID no. 13657964
ttctgccgctcctgaatctccgccgcccgcgtgctccccggcacccaggaaacggccatgccgacgaccctagagggcggccccgccgccgcgccaccgctgccccgcgcgcgcgtggagctggagctggagctcccgctcggcgcggcgccgttcgacctggaagcggccgtgtgcagccacgggctgttcatgatggcgcccaaccgctgggacccggcctcccgcgcgctcctccgcccgctccgcctcgcctccgaccgctccaggtccctgctcgcccgcgtctcccgccaccccgcgcgcccctcccgctccctcctcgtctccctcttcggcgccgacgccctctccccgctcgaccaggactgcatcctcgagcaagtgcggcggatgctgcggctgtcggaggaggacggcagggtggtggcggagttccaggcgatgcacgccgccgcgagggaggcggggttcggccgcatcttccgctcgcccacgctgttcgaggacatggtcaagtgcatcctcctctgcaattgccaatggacaagaacattggcaatggctactgcgctgtgcgagcttcagttggagttgagacattcatctggtactgaagttcttgagttaaggacacctccaatcagggagcttaaaaggaagcgcggcaagaatcggaatgtccgtgtcaagctagaaacaaagtttaccgagttggagtgcttggaggatccaagagtagaaaccgcggaggatgcaagagtggcaactggtactagcgatgtcataacacatttggaaacggatgaaaaatcggctagcttgccccaagttgcgcctgaaacaggcagtgcatgtcagtcatttgattcttcagagctcagcttggaaggttgcattggagatttccctactccggaagaattggcgtatctggatgaagacttcttagcgaaatgctgtaaccttggatatcgagcggagcggattgtgttgcttgcacgcagcattgtggaaggaaaggtatgcctacaaaatcttgaagaaatgcagaaaatgtctttaccagctacagaagagctatctactatcccgtctacctatgaaagactgaataacgagttaaccactatctccggattcggccctttcactcgtgccaatgtgctcatgtgcatgggatttttccacatgatcccagctgataccgagacaattaggcatttaaagcagtgtcataaaattgcaagcaccatcaaatctgttcatatggaattggataaaatctacggcgagtatgctccatttcagttcttagcatactggttcgagctatggggcttctatgacaagcaatttgggaagatcgctgagatggatccgtccacatataggctatttactgcaagcgctttaaagaagcaacatcggttagttaggaaatagagcctttctttcgtttgtgaaaggggccctgccaaaatcaacttacaacatagaggaattttgagattgttgtagttgctgcctgttctagtaagcagaaagtccgtagcctattttccccttcatgaatgcatctcatactttaggggaacagagtcctgcaagtttttagtttgtagcattccagactgaactaatgtgttatcaggtacttcaattaatttagtggtcaacttt

SEQ ID NO: 66377 - protein, 462 aa, Triticum aestivum
  peptide (1)..(462): Ceres Seq. ID no. 13657965
MPTTLEGGPAAAPPLPRARVELELELPLGAAPFDLEAAVCSHGLFMMAPNRWDPASRALLRPLRLASDRSRSLLARVSRHPARPSRSLLVSLFGADALSPLDQDCILEQVRRMLRLSEEDGRVVAEFQAMHAAAREAGFGRIFRSPTLFEDMVKCILLCNCQWTRTLAMATALCELQLELRHSSGTEVLELRTPPIRELKRKRGKNRNVRVKLETKFTELECLEDPRVETAEDARVATGTSDVITHLETDEKSASLPQVAPETGSACQSFDSSELSLEGCIGDFPTPEELAYLDEDFLAKCCNLGYRAERIVLLARSIVEGKVCLQNLEEMQKMSLPATEELSTIPSTYERLNNELTTISGFGPFTRANVLMCMGFFHMIPADTETIRHLKQCHKIASTIKSVHMELDKIYGEYAPFQFLAYWFELWGFYDKQFGKIAEMDPSTYRLFTASALKKQHRLVRK

SEQ ID NO: 66378 - protein, 417 aa, Triticum aestivum
  peptide (1)..(417): Ceres Seq. ID no. 13657966
MMAPNRWDPASRALLRPLRLASDRSRSLLARVSRHPARPSRSLLVSLFGADALSPLDQDCILEQVRRMLRLSEEDGRVVAEFQAMHAAAREAGFGRIFRSPTLFEDMVKCILLCNCQWTRTLAMATALCELQLELRHSSGTEVLELRTPPIRELKRKRGKNRNVRVKLETKFTELECLEDPRVETAEDARVATGTSDVITHLETDEKSASLPQVAPETGSACQSFDSSELSLEGCIGDFPTPEELAYLDEDFLAKCCNLGYRAERIVLLARSIVEGKVCLQNLEEMQKMSLPATEELSTIPSTYERLNNELTTISGFGPFTRANVLMCMGFFHMIPADTETIRHLKQCHKIASTIKSVHMELDKIYGEYAPFQFLAYWFELWGFYDKQFGKIAEMDPSTYRLFTASALKKQHRLVRK

SEQ ID NO: 66379 - protein, 416 aa, Triticum aestivum
  peptide (1)..(416): Ceres Seq. ID no. 13657967
MAPNRWDPASRALLRPLRLASDRSRSLLARVSRHPARPSRSLLVSLFGADALSPLDQDCILEQVRRMLRLSEEDGRVVAEFQAMHAAAREAGFGRIFRSPTLFEDMVKCILLCNCQWTRTLAMATALCELQLELRHSSGTEVLELRTPPIRELKRKRGKNRNVRVKLETKFTELECLEDPRVETAEDARVATGTSDVITHLETDEKSASLPQVAPETGSACQSFDSSELSLEGCIGDFPTPEELAYLDEDFLAKCCNLGYRAERIVLLARSIVEGKVCLQNLEEMQKMSLPATEELSTIPSTYERLNNELTTISGFGPFTRANVLMCMGFFHMIPADTETIRHLKQCHKIASTIKSVHMELDKIYGEYAPFQFLAYWFELWGFYDKQFGKIAEMDPSTYRLFTASALKKQHRLVRK

SEQ ID NO: 66380 - DNA, 1692 bp, Triticum aestivum
  misc_feature (1)..(1692): Ceres Seq. ID no. 14307912
tagctagctagtgttatccgttagccgatgccgttggctggctttcgatcgatcacacgagacatgtggaaaccacgggcggccatgtattcagttcgtcgttagcgcgcgcgtagcagatagaagatggacgccttggcggggctctcggcccttgccgcggtggcgctgctgctgctgtacagcgtgcaccggtggaggagccctcggtgcaacggccggctcccgccggggtctatgggcctcccgctcgtcggcgagacgttccagttcttctccccggacgcctccttggacatccctcgcttcatccgacacaggctcacgaggtacggcccgatcttcaagacgagcgtggtggggcacccgatggtggtgtcggcggaccaggagctgaaccacatggtgttccagcaggagggggagctgttccagagctggtacccggactcgttcgtggagatcctcggccgcgataacgtcggggagcagaagggcaccatgttcaagtacctcaagaacatagttctcaggtacttcggcccggagagccttaaggagtccatccttggcgacgtcgagcgcgccgtctgcagctcgctctgcacctggtccaccctgccggccgtcgagctcaaagaagccgtctccaccatggtgtttgaactttccgcgagcaagctgctgggcctggagccgtcgaggtccaaggttctacggaagagcttcttcgacttcgtcagagggctcatctccttcccgctctacttgccaggaacagcctactacgcatgcatgcagggacggatgagtgtaatggaggtgctgcagcaggtgctggaggagaggacgagatcggctgaggcggccggaggacgggaagcacggtgccacggcgacttcctggactacgtcgtgcaggagatcaccaaggagaagcctgtcctgacggagggaatggcgctggacctcctgtttgtgctcctcttcgccagcttccacacgacgtcgctggccatcaccctggccgtcaagctcctcaccgagcaccctcgcgtcctggaggagctcacggtggagcatgaaacgattctgaacgagcgtgaggcaggcggcgagtctgatggcgacagagttacatggaaagagtacaaatccatgacattcacatcccaggtgataaacgagacggtccgactggccaacattgcgcctggcatcttcagaaagacactgaaagatgtacagttcagaggatacacaattccagctggatggggagtgatggtctgccctctcgcggtgcaccttaatccagatatttaccctgaccccctcaccttcaatccttcaaggttcaaggataaactagaggcaaaccgtgggttaagacacttcatggctttcggaggaggtctccggtcctgtgttggggcagacttcagcaagctacaaatggccattttccttcactttcttgtcaccaaatataggtggatacaactaggtggaggcaagatagtccggtgtccagggctggaatttcctgatggttacctcattcagatcagacagagagattaatcagcacctgctttcaagtcatgctagcagtaggaaaagcttatatctcacgtgtacaattgttctagcatgttgtttgatgaaataacacttgtgcagaagtattac

SEQ ID NO: 66381 - protein, 485 aa, Triticum aestivum
  peptide (1)..(485): Ceres Seq. ID no. 14307913
MDALAGLSALAAVALLLLYSVHRWRSPRCNGRLPPGSMGLPLVGETFQFFSPDASLDIPRFIRHRLTRYGPIFKTSVVGHPMVVSADQELNHMVFQQEGELFQSWYPDSFVEILGRDNVGEQKGTMFKYLKNIVLRYFGPESLKESILGDVERAVCSSLCTWSTLPAVELKEAVSTMVFELSASKLLGLEPSRSKVLRKSFFDFVRGLISFPLYLPGTAYYACMQGRMSVMEVLQQVLEERTRSAEAAGGREARCHGDFLDYVVQEITKEKPVLTEGMALDLLFVLLFASFHTTSLAITLAVKLLTEHPRVLEELTVEHETILNEREAGGESDGDRVTWKEYKSMTFTSQVINETVRLANIAPGIFRKTLKDVQFRGYTIPAGWGVMVCPLAVHLNPDIYPDPLTFNPSRFKDKLEANRGLRHFMAFGGGLRSCVGADFSKLQMAIFLHFLVTKYRWIQLGGGKIVRCPGLEFPDGYLIQIRQRD

SEQ ID NO: 66382 - protein, 448 aa, Triticum aestivum
  peptide (1)..(448): Ceres Seq. ID no. 14307914
MGLPLVGETFQFFSPDASLDIPRFIRHRLTRYGPIFKTSVVGHPMVVSADQELNHMVFQQEGELFQSWYPDSFVEILGRDNVGEQKGTMFKYLKNIVLRYFGPESLKESILGDVERAVCSSLCTWSTLPAVELKEAVSTMVFELSASKLLGLEPSRSKVLRKSFFDFVRGLISFPLYLPGTAYYACMQGRMSVMEVLQQVLEERTRSAEAAGGREARCHGDFLDYVVQEITKEKPVLTEGMALDLLFVLLFASFHTTSLAITLAVKLLTEHPRVLEELTVEHETILNEREAGGESDGDRVTWKEYKSMTFTSQVINETVRLANIAPGIFRKTLKDVQFRGYTIPAGWGVMVCPLAVHLNPDIYPDPLTFNPSRFKDKLEANRGLRHFMAFGGGLRSCVGADFSKLQMAIFLHFLVTKYRWIQLGGGKIVRCPGLEFPDGYLIQIRQRD

SEQ ID NO: 66383 - protein, 404 aa, Triticum aestivum
  peptide (1)..(404): Ceres Seq. ID no. 14307915
MVVSADQELNHMVFQQEGELFQSWYPDSFVEILGRDNVGEQKGTMFKYLKNIVLRYFGPESLKESILGDVERAVCSSLCTWSTLPAVELKEAVSTMVFELSASKLLGLEPSRSKVLRKSFFDFVRGLISFPLYLPGTAYYACMQGRMSVMEVLQQVLEERTRSAEAAGGREARCHGDFLDYVVQEITKEKPVLTEGMALDLLFVLLFASFHTTSLAITLAVKLLTEHPRVLEELTVEHETILNEREAGGESDGDRVTWKEYKSMTFTSQVINETVRLANIAPGIFRKTLKDVQFRGYTIPAGWGVMVCPLAVHLNPDIYPDPLTFNPSRFKDKLEANRGLRHFMAFGGGLRSCVGADFSKLQMAIFLHFLVTKYRWIQLGGGKIVRCPGLEFPDGYLIQIRQRD

SEQ ID NO: 66384 - DNA, 1728 bp, Triticum aestivum
  misc_feature (1)..(1728): Ceres Seq. ID no. 14302883
attcttttcttcccactcccccctgcccttccgccaaagcgtcagccgccgccttgccatacctcgtcgtcaccgccggcgccgcgacctcaatcccgcgccctccgccaccttcttggggacgcgcgtcgacgccgccgccgccgccgttccccttcttccccggcctccgggacatcctgctgctgcctccacctcgtcccagtctttggccactgggcctccttccttcgttcgagttggacatggcatcatctgctaccatcagttcagttggcgctcaggccgctctggtttcaaagccaaggaatcatggtatcagtggcttaaaggcatcctcatcaattagcttcgaattgggatcctcattcctgggcaagaccgggtctcttcgggcatctgtaaccacaagggttgcgccaaaggcgaagtccgcggctcggatactaccggaggcatcttacaaagtggcggtacttggtgctgctgggggcatcggccaaccattgggcttgttgatcaagatgtcccctctggtctcagaactgcgcctgtacgatattgcgaatgtcaagggagtcgccgctgatctcagccactgcaacacaccctctcaggttatggacttcactggccctgcagaattggccagctgcttgaaaggtgtggatgttgttgtcatccccgccggggtcccaagaaagccagggatgactcgtgacgaccttttcaacatcaatgcgggcatcgtcaagtcacttatcgaggctgttgcagacaattgccctggggcctttatccatattatcagcaacccagtcaactccacagtgccgattgctgctgagattctgaaaaagaagggtgtctacaatcccaagaagctttttggggtttccaccctagatgttgtccgggctaacacatttgtagctcagaagaagggcctcaagctcattgatgttgatgtcccagttgttggtggtcatgctggaattacaatcctgcctttgttgtcaaagacgagaccatctgtcaccttcacggacgaggaaactgaacagctgacgaagaggatacagaacgctgggacagaggtggtggaggcgaaagcgggtgctggatctgctaccctgtccatggcttatgctgctgccagatttgtcgagtcttcgctccgcgcactggctggtgatccagatgtttacgagtgcacgtatgttcagtctgagttaactgagctgccattctttgcgtccagagttaagcttgggaagaatggtgttgagtccatcatttcttctgacctggagggaataaccgagtatgaggccagtgcacttgaggcattgaagcctgagctgaaggccagcattgagaagggcattgagtttgcgcacaaacaacagggagctgctgcctctgtttgagtgaggagaatgataattccatatgaagaggacaaaggcaaactgattgtccttttctagttttgcagcctagagtgtggacatgtagcactatgccctggagcagctatatttctgaattgttggtcagtttattatgattccagtttacatgagggcgtgaagccccaaacgtgcaccctgttctgggtccttgttttgtttgacacataaattttggtcctgttccacctgctgttcttgtagcttcctaagttgacgaactgtggaataataataaagcccatctttgatcgtt

SEQ ID NO: 66385 - protein, 475 aa, Triticum aestivum
  peptide (1)..(475): Ceres Seq. ID no. 14302884
SFLPTPPCPSAKASAAALPYLVVTAGAATSIPRPPPPSWGRASTPPPPPFPFFPGLRDILLLPPPRPSLWPLGLLPSFELDMASSATISSVGAQAALVSKPRNHGISGLKASSSISFELGSSFLGKTGSLRASVTTRVAPKAKSAARILPEASYKVAVLGAAGGIGQPLGLLIKMSPLVSELRLYDIANVKGVAADLSHCNTPSQVMDFTGPAELASCLKGVDVVVIPAGVPRKPGMTRDDLFNINAGIVKSLIEAVADNCPGAFIHIISNPVNSTVPIAAEILKKKGVYNPKKLFGVSTLDVVRANTFVAQKKGLKLIDVDVPVVGGHAGITILPLLSKTRPSVTFTDEETEQLTKRIQNAGTEVVEAKAGAGSATLSMAYAAARFVESSLRALAGDPDVYECTYVQSELTELPFFASRVKLGKNGVESIISSDLEGITEYEASALEALKPELKASIEKGIEFAHKQQGAAASV

SEQ ID NO: 66386 - protein, 394 aa, Triticum aestivum
  peptide (1)..(394): Ceres Seq. ID no. 14302885
MASSATISSVGAQAALVSKPRNHGISGLKASSSISFELGSSFLGKTGSLRASVTTRVAPKAKSAARILPEASYKVAVLGAAGGIGQPLGLLIKMSPLVSELRLYDIANVKGVAADLSHCNTPSQVMDFTGPAELASCLKGVDVVVIPAGVPRKPGMTRDDLFNINAGIVKSLIEAVADNCPGAFIHIISNPVNSTVPIAAEILKKKGVYNPKKLFGVSTLDVVRANTFVAQKKGLKLIDVDVPVVGGHAGITILPLLSKTRPSVTFTDEETEQLTKRIQNAGTEVVEAKAGAGSATLSMAYAAARFVESSLRALAGDPDVYECTYVQSELTELPFFASRVKLGKNGVESIISSDLEGITEYEASALEALKPELKASIEKGIEFAHKQQGAAASV

SEQ ID NO: 66387 - protein, 301 aa, Triticum aestivum
  peptide (1)..(301): Ceres Seq. ID no. 14302886
MSPLVSELRLYDIANVKGVAADLSHCNTPSQVMDFTGPAELASCLKGVDVVVIPAGVPRKPGMTRDDLFNINAGIVKSLIEAVADNCPGAFIHIISNPVNSTVPIAAEILKKKGVYNPKKLFGVSTLDVVRANTFVAQKKGLKLIDVDVPVVGGHAGITILPLLSKTRPSVTFTDEETEQLTKRIQNAGTEVVEAKAGAGSATLSMAYAAARFVESSLRALAGDPDVYECTYVQSELTELPFFASRVKLGKNGVESIISSDLEGITEYEASALEALKPELKASIEKGIEFAHKQQGAAASV

SEQ ID NO: 66388 - DNA, 1523 bp, Triticum aestivum
  misc_feature (1)..(1523): Ceres Seq. ID no. 14303094
acctctctcgacacaccaccgcaacccaacccaccccaccccaccccaccccaccccttcccgtctcaaaaccctaatcccaacgccgccgcggcgccgccgatcaagccgacgacaggcagcccccctatccggccgctccgtacgcacgcccctgcccgtcgcgcgcagatcggcggccgtccaccgcgaccgtgggccgccgcggggctagatttagattccgatttcggggcccctagccgccgggatttcctcgcgtccccgggcaaggtaggagagactatggtgggcggaggcaggaggggaggcgcggcggacgaggccaagctcaacaccggcaacgtgttcgcggcgctcgagaccctcaagaagaagaagaagggcgacaaggccaaggggggctcctccaagggagggaagcagggggacgagcccacgccgcagcagcagaaggagctcttctgggcgcccgccccgctcaacaccaagtcgtgggccgacgtcgaggacgacgacgacgacgactacttcgccaccaccgcgccccccgcgcccatctgggggaacgaccacgccgccgccaaaacggccaaggaggaggaggaggacgaggtcgatgctgtccacgccgccctgccggaggaaattgaaagtgaggatgaggagcatgatgatgaggctgaggatggtgctgaggatgaacctgagcatgaagtggaagctgctgatcctgatgtgaagaaagttgcagcagcacctaaagagacagaaaggcagctgtccaaaaaggagttgaaaaagaaggagctggctgaacttgatgctgtgttagctgagttgggaatttctgaaaacacaagcgatgctgcgcaagatggaaacaacaatgctgagaagaaaggtgcgagccaagctggtgatggagagagaaaggaagacgcacctgcccctttagagagcaagaatgccaagaagaagaagaacaagaaggacaagagcgcaaaggaggcaaaggaagctgaagtgtcggaggaggctgccagtgcagaacccgaggaagacacggctgtggatgtcaaggagcgcctaaagaagatggcgtcgatgaagaagaagaagtcgggcaaggagacggacacagctgcaaagatcgccgcggcagaggcggcagccaggaccgccaggctcgcggcggcaaagaagaaggagaagagccattacaaccagcaacccgtgcggtaaaaacgcgacgggccgcccaagttttgagatgctcctgagtttcgataatgaatgatccccttgttcgttttggacccgtcgcaataaactttttccccatccagtcctccccagagttgtgtatttatggtgaccatggagcgcctttctgatattcggtttcggaattctggaaggccttcgtggtcaccagaacggtcgttgtaattgtgttttgaattgtgttgatccggttgaacttatgatagacaacaacatggccaacagggcctcttggg

SEQ ID NO: 66389 - protein, 414 aa, Triticum aestivum
  peptide (1)..(414): Ceres Seq. ID no. 14303095
TSLDTPPQPNPPHPTPPHPFPSQNPNPNAAAAPPIKPTTGSPPIRPLRTHAPARRAQIGGRPPRPWAAAGLDLDSDFGAPSRRDFLASPGKVGETMVGGGRRGGAADEAKLNTGNVFAALETLKKKKKGDKAKGGSSKGGKQGDEPTPQQQKELFWAPAPLNTKSWADVEDDDDDDYFATTAPPAPIWGNDHAAAKTAKEEEEDEVDAVHAALPEEIESEDEEHDDEAEDGAEDEPEHEVEAADPDVKKVAAAPKETERQLSKKELKKKELAELDAVLAELGISENTSDAAQDGNNNAEKKGASQAGDGERKEDAPAPLESKNAKKKKNKKDKSAKEAKEAEVSEEAASAEPEEDTAVDVKERLKKMASMKKKKSGKETDTAAKIAAAEAAARTARLAAAKKKEKSHYNQQPVR

SEQ ID NO: 66390 - protein, 319 aa, Triticum aestivum
  peptide (1)..(319): Ceres Seq. ID no. 14303096
MVGGGRRGGAADEAKLNTGNVFAALETLKKKKKGDKAKGGSSKGGKQGDEPTPQQQKELFWAPAPLNTKSWADVEDDDDDDYFATTAPPAPIWGNDHAAAKTAKEEEEDEVDAVHAALPEEIESEDEEHDDEAEDGAEDEPEHEVEAADPDVKKVAAAPKETERQLSKKELKKKELAELDAVLAELGISENTSDAAQDGNNNAEKKGASQAGDGERKEDAPAPLESKNAKKKKNKKDKSAKEAKEAEVSEEAASAEPEEDTAVDVKERLKKMASMKKKKSGKETDTAAKIAAAEAAARTARLAAAKKKEKSHYNQQPVR

SEQ ID NO: 66391 - DNA, 814 bp, Triticum aestivum
  misc_feature (1)..(814): Ceres Seq. ID no. 12627109
attttttttccccctcttaccgacacgaacccggcggccaaatttagggttttgctcccgcaatctccccccgaagccgccgccttcttcccgcgccggcagcgatccaactccgcgtctccatccgccgatccggactttttttcaatctccggatctcgctcaagatgcttcccctctcgctcctcaagaccgcccaggggcatcccatgctcgtggagctcaagaacggcgagacctacaatggtcacttggtgaactgcgacacgtggatgaacatccacctccgggaggttatttgcacctcgaaggatggtgataagttttggaggatgccggagtgctatattcgtgggaacacaatcaagtatcttcgggttcctgatgaggtgattgacaaggttcaagaggaaacttctaagagtagatcagataggaagccaccaggtgttggccgcggaagaggaagaggagacatcggcactaagcccgggggcagaggaatcgggcgtggccaagatgatggcaaaggtggtggccgtggaaggggtgggattggaagtaaaggtggcaacaaaggcggacgtggtcgtgggtaagacggatcttgagatgcgagaatgccgctttttaaggcctgtagttgtggtgttgcatagattgcttaggacatgaaaaactttggagctggaattgctgggttttgtggtatggtatggcaaaccgtttgtgtggtctgaagttaccgaggaggagttggctgtcacctgtttgtgttgttcgaaacagttcacttaatattttgggtatgggc

SEQ ID NO: 66392 - protein, 143 aa, Triticum aestivum
  peptide (1)..(143): Ceres Seq. ID no. 12627110
MLPLSLLKTAQGHPMLVELKNGETYNGHLVNCDTWMNIHLREVICTSKDGDKFWRMPECYIRGNTIKYLRVPDEVIDKVQEETSKSRSDRKPPGVGRGRGRGDIGTKPGGRGIGRGQDDGKGGGRGRGGIGSKGGNKGGRGRG

SEQ ID NO: 66393 - protein, 129 aa, Triticum aestivum
  peptide (1)..(129): Ceres Seq. ID no. 12627111
MLVELKNGETYNGHLVNCDTWMNIHLREVICTSKDGDKFWRMPECYIRGNTIKYLRVPDEVIDKVQEETSKSRSDRKPPGVGRGRGRGDIGTKPGGRGIGRGQDDGKGGGRGRGGIGSKGGNKGGRGRG

SEQ ID NO: 66394 - protein, 108 aa, Triticum aestivum
  peptide (1)..(108): Ceres Seq. ID no. 12627112
MNIHLREVICTSKDGDKFWRMPECYIRGNTIKYLRVPDEVIDKVQEETSKSRSDRKPPGVGRGRGRGDIGTKPGGRGIGRGQDDGKGGGRGRGGIGSKGGNKGGRGRG

SEQ ID NO: 66395 - DNA, 1889 bp, Triticum aestivum
  misc_feature (1)..(1889): Ceres Seq. ID no. 14307916
actagtatataacaattcactcccatccaccaaccacaccaagaatcgcgagcgagcttgggatccggcttgaagttgccatggaggcggccgccgagctggcgcagcgcctgcgggccgcggccaacgaccggctggcggggcaggagccgctcctcctcgtcgccgcgccgctgctcgcgctcctcgccgcgcgcgccgtccacgccgccgccgccgacgtcgccgaccgcggcctccgcaccgtcctcatcaccctcgccatggccgccgtcaagttggtgccgggggtcagcggatacatcgccgccgagaagagcaaggttgttgagcagttgcagtcaggcagcgcgtccagcaagaagaacctgcgaaccgagctgcccgccgtcggggatcccgacggagtcatagacgagctccaggcgctcaaagacaaggatgtgagatggcagggcaaatgctccggcaccgtttatatcgctgggagcgagtctgaaggccatttttcacttataaacaaggcctactctatgttttcacacacaaatccactgcatcaggatgtattcaagagtgtggcacagttagaggctgaagtagtagcaatgacagctgctttgcttggcagcaaagaaaaggcgtctggtggacaaatttgtggcaatatgacgtcaggcgggactgaaagcatattgttggccgtcaaaacatcacgcgattatatgcaatcaaagaagggaatcacaaagcccgaaattataattgctgaatcagctcattctgcctatgacaaagctgctcaatatttcaatattaaagtgcggcgtgtacctgtgaataaagaatttcttgcagatgtaaaaggattcaaacggtgcataaatggaaacaccataatgatggttggatctgcaccaggatttccccatggtttaattgatcccatcgaggaacttggggagttggcttcacaatatggtatttgcttgcatgttgatctatgccttggtggcttcgtattgcctttcgcccgtaagcttgggtatcctattcctccttttgatttttctgtcaaaggtgttacgtcgatctcaacagatgttcataagtatgggctagccccaaaaggcaccagtactgtcctatacaggaatcatgaaattagaaagcaccaatttgttgctgtgacggaatggactggtgggctctatatttcccctactatggctggaagcaggccaggtggactagtcgcaggagcttgggctgcgatgatgtctcttggattgaatggttatttggaaagtactggtaaaatcatggaagtctcaaggaagatacaaaaaggaattgatgatatctcaggtttatttgtgattgggaagccagacatgaccgtcgtggcctttgggtcggacgcagtcgacatatttgaggtgaatgacataatgtcatcaaaaggatggcacctcaatgctcttcagagacccaacagtctgcacatctgcgtgacgcttcaacacacggctatctatgaggaattcctcaaggacctcgaggattctgtgaacacagtgaaagcgaatccagggcctatcagcggggggatggctccgatctacggcgcggctgggaagatgccggacagaggcacggtcaaggagttgcttgtggagttcatggacagctcttgctaaccattgactataccccattggttggtcatctctctgtaacatgcatatgtacaagccgcagtgacagtgttgtgtgatcttctatatttggtttggctcaaaactgaaggcacacaacacaatgcctccaatatagacatgtatctatgtatcagttacattggtcgcaataaagttacattttcagcc

SEQ ID NO: 66396 - protein, 539 aa, Triticum aestivum
  peptide (1)..(539): Ceres Seq. ID no. 14307917
MEAAAELAQRLRAAANDRLAGQEPLLLVAAPLLALLAARAVHAAAADVADRGLRTVLITLAMAAVKLVPGVSGYIAAEKSKVVEQLQSGSASSKKNLRTELPAVGDPDGVIDELQALKDKDVRWQGKCSGTVYIAGSESEGHFSLINKAYSMFSHTNPLHQDVFKSVAQLEAEVVAMTAALLGSKEKASGGQICGNMTSGGTESILLAVKTSRDYMQSKKGITKPEIIIAESAHSAYDKAAQYFNIKVRRVPVNKEFLADVKGFKRCINGNTIMMVGSAPGFPHGLIDPIEELGELASQYGICLHVDLCLGGFVLPFARKLGYPIPPFDFSVKGVTSISTDVHKYGLAPKGTSTVLYRNHEIRKHQFVAVTEWTGGLYISPTMAGSRPGGLVAGAWAAMMSLGLNGYLESTGKIMEVSRKIQKGIDDISGLFVIGKPDMTVVAFGSDAVDIFEVNDIMSSKGWHLNALQRPNSLHICVTLQHTAIYEEFLKDLEDSVNTVKANPGPISGGMAPIYGAAGKMPDRGTVKELLVEFMDSSC

SEQ ID NO: 66397 - protein, 478 aa, Triticum aestivum
  peptide (1)..(478): Ceres Seq. ID no. 14307918
MAAVKLVPGVSGYIAAEKSKVVEQLQSGSASSKKNLRTELPAVGDPDGVIDELQALKDKDVRWQGKCSGTVYIAGSESEGHFSLINKAYSMFSHTNPLHQDVFKSVAQLEAEVVAMTAALLGSKEKASGGQICGNMTSGGTESILLAVKTSRDYMQSKKGITKPEIIIAESAHSAYDKAAQYFNIKVRRVPVNKEFLADVKGFKRCINGNTIMMVGSAPGFPHGLIDPIEELGELASQYGICLHVDLCLGGFVLPFARKLGYPIPPFDFSVKGVTSISTDVHKYGLAPKGTSTVLYRNHEIRKHQFVAVTEWTGGLYISPTMAGSRPGGLVAGAWAAMMSLGLNGYLESTGKIMEVSRKIQKGIDDISGLFVIGKPDMTVVAFGSDAVDIFEVNDIMSSKGWHLNALQRPNSLHICVTLQHTAIYEEFLKDLEDSVNTVKANPGPISGGMAPIYGAAGKMPDRGTVKELLVEFMDSSC

SEQ ID NO: 66398 - protein, 388 aa, Triticum aestivum
  peptide (1)..(388): Ceres Seq. ID no. 14307919
MFSHTNPLHQDVFKSVAQLEAEVVAMTAALLGSKEKASGGQICGNMTSGGTESILLAVKTSRDYMQSKKGITKPEIIIAESAHSAYDKAAQYFNIKVRRVPVNKEFLADVKGFKRCINGNTIMMVGSAPGFPHGLIDPIEELGELASQYGICLHVDLCLGGFVLPFARKLGYPIPPFDFSVKGVTSISTDVHKYGLAPKGTSTVLYRNHEIRKHQFVAVTEWTGGLYISPTMAGSRPGGLVAGAWAAMMSLGLNGYLESTGKIMEVSRKIQKGIDDISGLFVIGKPDMTVVAFGSDAVDIFEVNDIMSSKGWHLNALQRPNSLHICVTLQHTAIYEEFLKDLEDSVNTVKANPGPISGGMAPIYGAAGKMPDRGTVKELLVEFMDSSC

SEQ ID NO: 66399 - DNA, 1077 bp, Triticum aestivum
  misc_feature (1)..(1077): Ceres Seq. ID no. 13657647
gaaaagaccccacagccgggaggaggagcccatcccgtcccaccccaccgccgcggccaaaaaccaatcacgcctcccggcggcggcccgcgcggcgccggccatggcggacgccgtcaagcagccgctcctccaccaccagcagccctacgcgtacccgtcgcacgccgcgtcggcctcctcccccgcgctcccctccgtgccccactccgggaccgccacccccacccccggggccgggggcgccgcctccgcctccttcgccgggggccgccgcttcccgggcggccttgacgtgcccaacctcaagaagcgcggcggcggcacgcgcagctggatccgcgtcgaggccgccacggcctccgtgcagacgctggaggtcgacaaggccaccatgatgcgccgctgcgagctccccgcccgcgacctccgcctcctcgacccgctcttcgtctacccctccaccgtcctcggccgcgagcgcgccatcgtcgtcaacctcgagcagatccgctgcgtcatcaccgccgacgaggtgctcctcctcaactccctcgacagctacgtcttccagtacgccgccgagctgcagcgccgcctcctccagcgcgccgagggcgacgagctccccttcgagttccgcgccctcgagctcgccctcgaggccgcctgctccttcctcgacgcccaggcagcagaattggaaattgaagcatatcccttactggatgagctaacatcaaaaattagtactctaaatctgaaacgtgttcggcggctaaaaagtagactagttgctctgaccagaagagtccagaaggtcagggatgaaatagaacagctaatggatgatgatggagatatggctgagatgtatcttaccgagaaaaagatgaggatggaatcatcatctgtgtttggtgatcaatcattggcgaccttcaacgcggcagccgctgggacttcagtttcagctcctgtgtctccagtgtcttcacccacagaatcacggaaattggagaaaacctacagcttgtgtagatgtttaaacacaataaagttggaactggagggggg

SEQ ID NO: 66400 - protein, 358 aa, Triticum aestivum
  peptide (1)..(358): Ceres Seq. ID no. 13657648
KRPHSREEEPIPSHPTAAAKNQSRLPAAARAAPAMADAVKQPLLHHQQPYAYPSHAASASSPALPSVPHSGTATPTPGAGGAASASFAGGRRFPGGLDVPNLKKRGGGTRSWIRVEAATASVQTLEVDKATMMRRCELPARDLRLLDPLFVYPSTVLGRERAIVVNLEQIRCVITADEVLLLNSLDSYVFQYAAELQRRLLQRAEGDELPFEFRALELALEAACSFLDAQAAELEIEAYPLLDELTSKISTLNLKRVRRLKSRLVALTRRVQKVRDEIEQLMDDDGDMAEMYLTEKKMRMESSSVFGDQSLATFNAAAAGTSVSAPVSPVSSPTESRKLEKTYSLCRCLNTIKLELEG

SEQ ID NO: 66401 - protein, 324 aa, Triticum aestivum
  peptide (1)..(324): Ceres Seq. ID no. 13657649
MADAVKQPLLHHQQPYAYPSHAASASSPALPSVPHSGTATPTPGAGGAASASFAGGRRFPGGLDVPNLKKRGGGTRSWIRVEAATASVQTLEVDKATMMRRCELPARDLRLLDPLFVYPSTVLGRERAIVVNLEQIRCVITADEVLLLNSLDSYVFQYAAELQRRLLQRAEGDELPFEFRALELALEAACSFLDAQAAELEIEAYPLLDELTSKISTLNLKRVRRLKSRLVALTRRVQKVRDEIEQLMDDDGDMAEMYLTEKKMRMESSSVFGDQSLATFNAAAAGTSVSAPVSPVSSPTESRKLEKTYSLCRCLNTIKLELEG

SEQ ID NO: 66402 - protein, 227 aa, Triticum aestivum
  peptide (1)..(227): Ceres Seq. ID no. 13657650
MMRRCELPARDLRLLDPLFVYPSTVLGRERAIVVNLEQIRCVITADEVLLLNSLDSYVFQYAAELQRRLLQRAEGDELPFEFRALELALEAACSFLDAQAAELEIEAYPLLDELTSKISTLNLKRVRRLKSRLVALTRRVQKVRDEIEQLMDDDGDMAEMYLTEKKMRMESSSVFGDQSLATFNAAAAGTSVSAPVSPVSSPTESRKLEKTYSLCRCLNTIKLELEG

SEQ ID NO: 66403 - DNA, 1291 bp, Triticum aestivum
  misc_feature (1)..(1291): Ceres Seq. ID no. 13658400
aaaacaaagaactactctccccacagctcccatccctggttccaccggccccgacctcgacctcgaccacactcttctgcttccccaggtcttccaatccaccagcctctccgccgcgaaaccctagcccccctgagccaccccccgtcgaggccgctggcggatggcgaaggcgtgaccggcgcggacagcaccccgttcccgccctcagccccgcatctgatgttcctctcccgcatcgtcctgcgcgacctggactccatcgactcccccgcctccatggcgacctccaagaaggtggtgacgcgcgacgagtgggagcgcaagctccgcgacgtcaagatccgcaaggaggacatgaaccgcctcgtcatgaacttcctcgtcaccgagggcttcgtcgacgccgccgacaagttccgcgtcgagtccggcacccaaccggacatcgacctggccaccatcacggatcggatggaggtgaaaaaggcggttcagtcagggaatgtccaggaggcaatcgagaagatcaacgatcttaaccccacgattctggatacaaatcccgaattatacttccatctccagcagcaaaaattaatagagttgattcgtgcggggaagataaatgaagctttggagtttgctcaagaagaacttgcaccaagaggcgaagaaaatcaaacctttctggaggaaatagagaaaactgtagcactgttggtttttgaagatgtaaaaaattgcccatatggtgaactgttggacgtttctcaacgcttaaagacggcaagtgaagttaacgctgccattctcacaagccaaagtcacgagaaagatccaaagctccccagtctgttgaagatgttgatttggactcaaaaccagctgaacgaaaaggcggcatatcctcgaatcaacaacttatccaccgccgcactggaagatccagcaatatgagctgctgtccaaagtgttggagtgttgactatggagcttaggcaccagcagcagccatgtctgcatgtacactatctgtcgtaggtctgttgttcgtttcatcaatgttctagcttaatgcaaaaaaaaaaaaccagatagataatcctgctctctcctgtcgtataggttgttcttgtcatttttttttgaaaacagagataaatgttgcatttgattgttgtttacaaactatgtgttgttgaattattggcgataatgtgttgcacaccattcatgtgttctgctggaatgatgcaaagcaaggcatcaagttcagcttgcctactgt

SEQ ID NO: 66404 - protein, 319 aa, Triticum aestivum
  peptide (1)..(319): Ceres Seq. ID no. 15220632
KTKNYSPHSSHPWFHRPRPRPRPHSSASPGLPIHQPLRRETLAPLSHPPSRPLADGEGVTGADSTPFPPSAPHLMFLSRIVLRDLDSIDSPASMATSKKVVTRDEWERKLRDVKIRKEDMNRLVMNFLVTEGFVDAADKFRVESGTQPDIDLATITDRMEVKKAVQSGNVQEAIEKINDLNPTILDTNPELYFHLQQQKLIELIRAGKINEALEFAQEELAPRGEENQTFLEEIEKTVALLVFEDVKNCPYGELLDVSQRLKTASEVNAAILTSQSHEKDPKLPSLLKMLIWTQNQLNEKAAYPRINNLSTAALEDPAI

SEQ ID NO: 66405 - protein, 245 aa, Triticum aestivum
  peptide (1)..(245): Ceres Seq. ID no. 15220633
MFLSRIVLRDLDSIDSPASMATSKKVVTRDEWERKLRDVKIRKEDMNRLVMNFLVTEGFVDAADKFRVESGTQPDIDLATITDRMEVKKAVQSGNVQEAIEKINDLNPTILDTNPELYFHLQQQKLIELIRAGKINEALEFAQEELAPRGEENQTFLEEIEKTVALLVFEDVKNCPYGELLDVSQRLKTASEVNAAILTSQSHEKDPKLPSLLKMLIWTQNQLNEKAAYPRINNLSTAALEDPAI

SEQ ID NO: 66406 - protein, 226 aa, Triticum aestivum
  peptide (1)..(226): Ceres Seq. ID no. 15220634
MATSKKVVTRDEWERKLRDVKIRKEDMNRLVMNFLVTEGFVDAADKFRVESGTQPDIDLATITDRMEVKKAVQSGNVQEAIEKINDLNPTILDTNPELYFHLQQQKLIELIRAGKINEALEFAQEELAPRGEENQTFLEEIEKTVALLVFEDVKNCPYGELLDVSQRLKTASEVNAAILTSQSHEKDPKLPSLLKMLIWTQNQLNEKAAYPRINNLSTAALEDPAI

SEQ ID NO: 66407 - DNA, 1802 bp, Triticum aestivum
  misc_feature (1)..(1802): Ceres Seq. ID no. 13657707
atccacacacactccactgcgcacaattccaccatcagcaatgcctcctcccctccgcctcctcgccctcctcctcctcctccacctccccttcgccctctcctcccgccaccaccacaaagccccggcgccgccgccccggaaggtgcctcctccggcggccaactacgcggcgccgctccccgtcctcctcgcctgcaacgccacccgcttccggcccgcctgcgtcgccacgctctccgccgccaacgtcaccgccgcgtcctccccctccgacctcctcggcgccacgctctccgcgctccgcgcccgcctcccgccggccgtctccaccgcgcgctccgtcctcgcctcctccaagaacgtcaacctcacgaccgccgccaccaactgcctcaccgccctctccctctcctcgcaccgcctcgagccgccgccctcgccgtcggcgctcatgcccgcctccgcctcgctcctccacctctacgactgctggtccgcctacaagtacgtcaacttctcccggaccatctacgatgccatggcgtacctcaacgacaccatcaccgtcaacagcaactacatctccatgctcgccgcgctgaagcggtacggcgacgacacgtccgtctgggcgccgccgcagacggagcgcgacgggtactggccttcgcccgcggcgtcgggggccgacgtggacgcgctcggcgtgcccaaggggctccccgcggacgcgacggtgtgcggcgccgggtgcgactacaggacagtgcgggaggcggtggcggccgcgccggacaacgggggcaagaggttcgtggtgtacgtgaaggcaggcgtgtacaaggagacggtgagcgtgccgtgggagaagaccaacctggtgctggtcggcgacggcatggggaagacggtcatcaccggcgacctcaacgcggacacgcccggcgtgtccacgttcaacacggccacyktaggcgtgctcgcggacggcttcatggcgcgcgacctgacgatcgcgaacacggcggggccggacgcgcaccaggcggtggcgttccggtccacgggcgaccgcacggtgctggacacggtggagctgctggggcaccaggacacgctgtacgtgcacgccatgcgccagttctacacccgctgccgcgtggccggcacggtggacttcgtcttcggcaactcggccgccgtgctccacgacagcgacctcgtcgtgctgccccggcagctgcggccggagaagggcgagacggacgcgctgacggcgcagggccgcaccgacccggcgcagcccacggggatcgtgctccggggctgccgcgtcaacggcagcgacgagtacatggccttctaccggcagaagcccggcgtgcaccacgtgttcctcggccggccatggaaggagtactcccgcacggtgttcgtcgggtgcacgatggctgagatcgtgcggcccgaggggtggatgccatggagcggcgacttcgcgctcaagacgctctactacggggagtatgatagcgccggccctggcgccggcgggcggggaggcggcagggtggcgtggagcagccaggtgcccaaggagcgcgtcgacgtytacagcgtcgccagcttcatacagggggacgagtggatacccaaagtgaagtagtgggctttttggtcctggtagcatacataatcgagctggcgtgagctcgtgggccggtcggcggtgatcgtgccactcggtcacggatgtactgcagtcgttgcagttatgcaaatgcagtggtgcctaacgc

SEQ ID NO: 66408 - protein, 555 aa, Triticum aestivum
  peptide (1)..(555): Ceres Seq. ID no. 15220615
  misc_feature (324)..(324): Xaa is any aa, unknown or other
  misc_feature (325)..(325): Xaa is any aa, unknown or other
  misc_feature (538)..(538): Xaa is any aa, unknown or other
STHTPLRTIPPSAMPPPLRLLALLLLLHLPFALSSRHHHKAPAPPPRKVPPPAANYAAPLPVLLACNATRFRPACVATLSAANVTAASSPSDLLGATLSALRARLPPAVSTARSVLASSKNVNLTTAATNCLTALSLSSHRLEPPPSPSALMPASASLLHLYDCWSAYKYVNFSRTIYDAMAYLNDTITVNSNYISMLAALKRYGDDTSVWAPPQTERDGYWPSPAASGADVDALGVPKGLPADATVCGAGCDYRTVREAVAAAPDNGGKRFVVYVKAGVYKETVSVPWEKTNLVLVGDGMGKTVITGDLNADTPGVSTFNTAXXGVLADGFMARDLTIANTAGPDAHQAVAFRSTGDRTVLDTVELLGHQDTLYVHAMRQFYTRCRVAGTVDFVFGNSAAVLHDSDLVVLPRQLRPEKGETDALTAQGRTDPAQPTGIVLRGCRVNGSDEYMAFYRQKPGVHHVFLGRPWKEYSRTVFVGCTMAEIVRPEGWMPWSGDFALKTLYYGEYDSAGPGAGGRGGGRVAWSSQVPKERVDXYSVASFIQGDEWIPKVK

SEQ ID NO: 66409 - protein, 542 aa, Triticum aestivum
  peptide (1)..(542): Ceres Seq. ID no. 15220616
  misc_feature (311)..(311): Xaa is any aa, unknown or other
  misc_feature (312)..(312): Xaa is any aa, unknown or other
  misc_feature (525)..(525): Xaa is any aa, unknown or other
MPPPLRLLALLLLLHLPFALSSRHHHKAPAPPPRKVPPPAANYAAPLPVLLACNATRFRPACVATLSAANVTAASSPSDLLGATLSALRARLPPAVSTARSVLASSKNVNLTTAATNCLTALSLSSHRLEPPPSPSALMPASASLLHLYDCWSAYKYVNFSRTIYDAMAYLNDTITVNSNYISMLAALKRYGDDTSVWAPPQTERDGYWPSPAASGADVDALGVPKGLPADATVCGAGCDYRTVREAVAAAPDNGGKRFVVYVKAGVYKETVSVPWEKTNLVLVGDGMGKTVITGDLNADTPGVSTFNTAXXGVLADGFMARDLTIANTAGPDAHQAVAFRSTGDRTVLDTVELLGHQDTLYVHAMRQFYTRCRVAGTVDFVFGNSAAVLHDSDLVVLPRQLRPEKGETDALTAQGRTDPAQPTGIVLRGCRVNGSDEYMAFYRQKPGVHHVFLGRPWKEYSRTVFVGCTMAEIVRPEGWMPWSGDFALKTLYYGEYDSAGPGAGGRGGGRVAWSSQVPKERVDXYSVASFIQGDEWIPKVK

SEQ ID NO: 66410 - protein, 485 aa, Triticum aestivum
  peptide (1)..(485): Ceres Seq. ID no. 15220617
  misc_feature (325)..(325): Xaa is any aa, unknown or other
IHTHSTAHNSTISNASSPPPPRPPPPPPPPLRPLLPPPPQSPGAAAPEGASSGGQLRGAAPRPPRLQRHPLPARLRRHALRRQRHRRVLPLRPPRRHALRAPRPPPAGRLHRALRPRLLQERQPHDRRHQLPHRPLPLLAPPRAAALAVGAHARLRLAPPPLRLLVRLQVRQLLPDHLRCHGVPQRHHHRQQQLHLHARRAEAVRRRHVRLGAAADGARRVLAFARGVGGRRGRARRAQGAPRGRDGVRRRVRLQDSAGGGGGRAGQRGQEVRGVREGRRVQGDGERAVGEDQPGAGRRRHGEDGHHRRPQRGHARRVHVQHGHXRRARGRLHGARPDDREHGGAGRAPGGGVPVHGRPHGAGHGGAAGAPGHAVRARHAPVLHPLPRGRHGGLRLRQLGRRAPRQRPRRAAPAAAAGEGRDGRADGAGPHRPGAAHGDRAPGLPRQRQRRVHGLLPAEARRAPRVPRPAMEGVLPHGVRRVHDG

SEQ ID NO: 66411 - DNA, 2043 bp, Triticum aestivum
  misc_feature (1)..(2043): Ceres Seq. ID no. 13500446
aaaaagctcgcagtgggcccgccccacatccatcttcctccgctccgctggaaaatacacagacgagatgcgagactagctagggtttacactctacactctcctccgaatcgaatcaaagaagcggcggcactctcctctcctccgctgcggaccaggcggccgcggagctgaatttgttcgatggaggacctaccagaggctctgctgacagagattctcaagaggatcaccaggacaagtgatctcaagtcttttacccttgtgtcaaagcagctctgcaagatagagggggatcaaaggggtgctatccatgttggttccggtgtttgcactgctacaaaagcactggcatcattgtgcgcccggttcccaaatctgcggaaagtggaaatcgattactctggctggatacctggacatggaaagcagctggacaacaaaggcctctctgtgttttcatctcactgttcctcgctgattgacctcaccttaagcttctgctcatgcatcgatgactctgggcttgcttgtttagcttattgcaagacattggtgtctctcaggctcaactccgcaccagaaataacgtcagttgggcttttctcggttgcagttggttgcacaaatctatctgctctccaccttactgattgcgagaacatcgacaatgtagagtggctggaataccttggtaggcatggatcgttagaagagcttgtggtgaagaattgcaaaggaatcaatcatcatgacttcctaaagtttgattctggatggatgaagctccagaagtttgagtttgagaggaaaagagaaagatttgattgtcttccaggtgatgtgatctatgactccttgtacgatgctcacagtatggatgcatatgatttctgctgtgagagcttgaaggatttaaggttggcgcatattaaaacttggcccgaagtaggacttcgtattctcctagggaagtgtaaagcattggagaagctttgccttgagtatgttcatgccctaaatgacaatgacatgattgcattgtctcggagctgcagcaaccttaaaagcatcttacttaggctcaacctgcagcgctactctagtgatgtcagctattgtgaaaccaggacgtcatttactgatgccagcctttacgctctagccctcaactgtcgtatgcttcagatggttgacctcagctttacaggatgttcccctgactggccatcagaaataggattcacacagcagggttttctggtgctcattcggtcctgcccgattcgcgttctcgtgctcaacaacgccaacttctttgatgacgaggggatgaaggccctgtcatcctcaccacatctggagacgctcgagcttatattgtgtcatgcggtaactgatgccgggatgcacttcattgcgcacaccccatgcttgagcaatcttacacttcgggtgtgtcatcacattactgatgttggagtggctgaactggggcgtgcacataagttagagtctttggtcattgagtattgtggtgaggtctctccgcaagctgcgcaggttgttgccaagtcagttcactactccaaggactgttcagatgcccttatgaagagaattggtcttggcatctattgatgaagtggtctccaaaattttcagtatgaatttgctgctcaagccattaagttgttcagtgtgcatcattgcacaaggctctgcatcatccgacctagattcacttgtctggactttctattgccttctacctttactatatgatttttctgtatgacagtctaatgatgatctttggatggcatctggtgaatggtgaatggaactttagtactgtagtaagcaccacttgtgtattactatgaaccgtaattctggttgcttaattcctactctctgtagccgtatcgaaaccggcataagtaggccccaagattcccagtttgtgctgtggggggcactatatgacagtttggtgtacttatttgtattatttaagcaaatgtcatgaactcctttttg

SEQ ID NO: 66412 - protein, 485 aa, Triticum aestivum
  peptide (1)..(485): Ceres Seq. ID no. 13500447
MEDLPEALLTEILKRITRTSDLKSFTLVSKQLCKIEGDQRGAIHVGSGVCTATKALASLCARFPNLRKVEIDYSGWIPGHGKQLDNKGLSVFSSHCSSLIDLTLSFCSCIDDSGLACLAYCKTLVSLRLNSAPEITSVGLFSVAVGCTNLSALHLTDCENIDNVEWLEYLGRHGSLEELVVKNCKGINHHDFLKFDSGWMKLQKFEFERKRERFDCLPGDVIYDSLYDAHSMDAYDFCCESLKDLRLAHIKTWPEVGLRILLGKCKALEKLCLEYVHALNDNDMIALSRSCSNLKSILLRLNLQRYSSDVSYCETRTSFTDASLYALALNCRMLQMVDLSFTGCSPDWPSEIGFTQQGFLVLIRSCPIRVLVLNNANFFDDEGMKALSSSPHLETLELILCHAVTDAGMHFIAHTPCLSNLTLRVCHHITDVGVAELGRAHKLESLVIEYCGEVSPQAAQVVAKSVHYSKDCSDALMKRIGLGIY

SEQ ID NO: 66413 - protein, 286 aa, Triticum aestivum
  peptide (1)..(286): Ceres Seq. ID no. 13500448
MKLQKFEFERKRERFDCLPGDVIYDSLYDAHSMDAYDFCCESLKDLRLAHIKTWPEVGLRILLGKCKALEKLCLEYVHALNDNDMIALSRSCSNLKSILLRLNLQRYSSDVSYCETRTSFTDASLYALALNCRMLQMVDLSFTGCSPDWPSEIGFTQQGFLVLIRSCPIRVLVLNNANFFDDEGMKALSSSPHLETLELILCHAVTDAGMHFIAHTPCLSNLTLRVCHHITDVGVAELGRAHKLESLVIEYCGEVSPQAAQVVAKSVHYSKDCSDALMKRIGLGIY

SEQ ID NO: 66414 - protein, 254 aa, Triticum aestivum
  peptide (1)..(254): Ceres Seq. ID no. 13500449
MDAYDFCCESLKDLRLAHIKTWPEVGLRILLGKCKALEKLCLEYVHALNDNDMIALSRSCSNLKSILLRLNLQRYSSDVSYCETRTSFTDASLYALALNCRMLQMVDLSFTGCSPDWPSEIGFTQQGFLVLIRSCPIRVLVLNNANFFDDEGMKALSSSPHLETLELILCHAVTDAGMHFIAHTPCLSNLTLRVCHHITDVGVAELGRAHKLESLVIEYCGEVSPQAAQVVAKSVHYSKDCSDALMKRIGLGIY

SEQ ID NO: 66415 - DNA, 1438 bp, Triticum aestivum
  misc_feature (1)..(1438): Ceres Seq. ID no. 12784459
ttcctcccatcggcacgcccatcccgctcctctcataatcctgagagtttcttcttttgttttatttttctttcttggtaggagtaacaatagttttggctctcctcctttctctctccctgtatccaaggagagaaatccagaggcgaagcttcagggtttgtaaattttccggatctaatcaactaaccaaaaaaacccaaaaaagaaaccatgagccacttcgccgccatgaagagccccgtcccggtcgccgccgctgccgccaccgacgcgaagagcccgctcttctgccccaagccgcgccgcccggtcgcgcccctccggtgccaccagagcagccactccgacgcgggcgccggcatggatctgctcgacctcctcctgtcaaagggcgacgagagcaatctttcggcggcgtccccgcagccgccgctgttctgtggctcgcctccgcggcgggcttcgaacccggtggtccacgacagccggttcggcatggactgcccgtccagtcccctgccggtcacgccagcgccggtggtggtccgtcccaccccacgcccggcgggaccgccgatatcgccccgttcctcggctgggtgcgctcgcgtgttccagccagccgtccgcgtcgagggttttgactgcctcgacggtggccgtagcggccgtggccatggcatcgccgccatggtctagatgcacatacaacatcgaataaccaggaaatcttctcccctcagtagtgcaaaagctttggagggagagagatgagagtgaggaggagatgagtgagaggagcttaagtccaaaatttaacccctaaaaactatataatccatcagtcaaatcccataagtataatgagtctaggtaattttaccacaaatctttttgtatgtaaataaatttcaggttcagatgcaggtgcccttcttgtaaatttgggagctctagtttgggggggatggggtagaagaaatctagagggcggggatcagggacagagggcacaagaaacacaaagtttagccctcttgtatgaatcatttttttcatgagtccctttgccttccttctggattagtcattcaattaggttggagggagggaggggttgggaattagttaggtacctgtcctagttcatctgtcatcatgcttatttttggtttatgatggaattgtttttgtccatgcaaccaagaaatccaaagccaccaaggccatggagatgtgtacaaaagagtggctacaagaagagaagagagagcagctaggtttaagtcaagtcaatgagtgagttgtgtgaaaggcatgaatgatgtattcgtggtatcgttttctctgtatatgtaatatatcgtttcattgaagcaatatgtgtaatatctcatgccatgattatcaccagcccttgtgatatcttttattg

SEQ ID NO: 66416 - protein, 162 aa, Triticum aestivum
  peptide (1)..(162): Ceres Seq. ID no. 12784460
MSHFAAMKSPVPVAAAAATDAKSPLFCPKPRRPVAPLRCHQSSHSDAGAGMDLLDLLLSKGDESNLSAASPQPPLFCGSPPRRASNPVVHDSRFGMDCPSSPLPVTPAPVVVRPTPRPAGPPISPRSSAGCARVFQPAVRVEGFDCLDGGRSGRGHGIAAMV

SEQ ID NO: 66417 - protein, 156 aa, Triticum aestivum
  peptide (1)..(156): Ceres Seq. ID no. 12784461
MKSPVPVAAAAATDAKSPLFCPKPRRPVAPLRCHQSSHSDAGAGMDLLDLLLSKGDESNLSAASPQPPLFCGSPPRRASNPVVHDSRFGMDCPSSPLPVTPAPVVVRPTPRPAGPPISPRSSAGCARVFQPAVRVEGFDCLDGGRSGRGHGIAAMV

SEQ ID NO: 66418 - protein, 112 aa, Triticum aestivum
  peptide (1)..(112): Ceres Seq. ID no. 12784462
MDLLDLLLSKGDESNLSAASPQPPLFCGSPPRRASNPVVHDSRFGMDCPSSPLPVTPAPVVVRPTPRPAGPPISPRSSAGCARVFQPAVRVEGFDCLDGGRSGRGHGIAAMV

SEQ ID NO: 66419 - DNA, 1737 bp, Triticum aestivum
  misc_feature (1)..(1737): Ceres Seq. ID no. 13658640
cccggcctcgtcgtcccccctccccccgcgcgtcccggcgtcgccacccgcgcccgccagaggatctccgataatttaacctgtgcgtgttgtcgctgtcgcttaaacatcgacaacctttggcgtagctgacctcattgcgtttggaatcgattcatttgttgtgtctggctygtatatgagctcacaagtatccacatcgcggggtttacatcccccagagaaaattatgacgtacgagtcccctcacacatggccactgtcggtgcctacgagcaaggctgaggcaggtagcagcgatgaccaggaggttaggctgttgtcggtttcttggaatcaggattgtggttgcttcgctgccggcacaagcaatggcttcagaatctttaactgcgaccctttcaaggagactttcaggagggatctgaagagtggtgggtttgggatagttgagatgctgttccgctgcaacatccttgctcttgtaggtggcggctccaatatgcattatccgcccaacaaggtgatgatctgggatgatcaccagagccgttgtattggggagtttaccttccgctctgatgtccgggccgtaaaattggggaaagataacattgtgattgtcctcgagacaaagatatatgtttataactttacagatctgaagatgctccatcagatagagaccctgccaaatcctaaaggactctgctgcctctctcatcattccaatacttcagtgctggcctgtcctgggctgagtcagggacatgttcgggtagagcattttgggctaaaggtgacaaagatgattacggcccatgattcacacatttcttgcatggccttaactatggatggtctcttactggcaacggcaagtatgaagggcactctaatcagaatatttaacacaatggatggcactcgcctgcaagaggtgcgcagaggtcttgataaagccgagatatatagcattgcactgtcaccaaatgtgcaatggttggcagtgtccagcgacaaaggaacggttcatatattcagtctaaaagtcagggttgcgggtgaagattcaagtaatgatcagcgtacccttgaagctccacggatggatcaccagaattcttctacctctatggatcctcttatacaaacaaacactggatccaatgwwcaagctcatcactgtctttcatgaaagggattctgccgaagtacttcagctcagagtggtcatttgctcagttccatttaccggaagtcacacgttacatcgtagctttcggcgctcaaaacactgtaatgatggttggcctggatggcagcttctacaggtgcatctttgaccaagtaaacggcggacagatgacgcagaaggaatactcgcggtttctcaagaccgactaccctcccctgaggacattgaccgcttaaaccgcgtgaccctgccgcaccgccatgacgacatgtacatacatagaaggtcgtgctctgtccattgtatataaccgtcctcctcctcgccggcaaagctctaggccggtcgccggaataaggagctccgggggtgtccggctgcaaccgcagcctgcctgcccattttgctgcagatgtccaaattgcattgtttattcgactttatgaacaagagcatccattgatatgtatgtatgtgtgtataatcaggaaggaatgcaaatatgaccttgtctgcaaccagagctgaaacagttgttg

SEQ ID NO: 66420 - protein, 339 aa, Triticum aestivum
  peptide (1)..(339): Ceres Seq. ID no. 15220653
  misc_feature (332)..(332): Xaa is any aa, unknown or other
MSSQVSTSRGLHPPEKIMTYESPHTWPLSVPTSKAEAGSSDDQEVRLLSVSWNQDCGCFAAGTSNGFRIFNCDPFKETFRRDLKSGGFGIVEMLFRCNILALVGGGSNMHYPPNKVMIWDDHQSRCIGEFTFRSDVRAVKLGKDNIVIVLETKIYVYNFTDLKMLHQIETLPNPKGLCCLSHHSNTSVLACPGLSQGHVRVEHFGLKVTKMITAHDSHISCMALTMDGLLLATASMKGTLIRIFNTMDGTRLQEVRRGLDKAEIYSIALSPNVQWLAVSSDKGTVHIFSLKVRVAGEDSSNDQRTLEAPRMDHQNSSTSMDPLIQTNTGSNXQAHHCLS

SEQ ID NO: 66421 - protein, 322 aa, Triticum aestivum
  peptide (1)..(322): Ceres Seq. ID no. 15220654
  misc_feature (315)..(315): Xaa is any aa, unknown or other
MTYESPHTWPLSVPTSKAEAGSSDDQEVRLLSVSWNQDCGCFAAGTSNGFRIFNCDPFKETFRRDLKSGGFGIVEMLFRCNILALVGGGSNMHYPPNKVMIWDDHQSRCIGEFTFRSDVRAVKLGKDNIVIVLETKIYVYNFTDLKMLHQIETLPNPKGLCCLSHHSNTSVLACPGLSQGHVRVEHFGLKVTKMITAHDSHISCMALTMDGLLLATASMKGTLIRIFNTMDGTRLQEVRRGLDKAEIYSIALSPNVQWLAVSSDKGTVHIFSLKVRVAGEDSSNDQRTLEAPRMDHQNSSTSMDPLIQTNTGSNXQAHHCLS

SEQ ID NO: 66422 - protein, 247 aa, Triticum aestivum
  peptide (1)..(247): Ceres Seq. ID no. 15220655
  misc_feature (240)..(240): Xaa is any aa, unknown or other
MLFRCNILALVGGGSNMHYPPNKVMIWDDHQSRCIGEFTFRSDVRAVKLGKDNIVIVLETKIYVYNFTDLKMLHQIETLPNPKGLCCLSHHSNTSVLACPGLSQGHVRVEHFGLKVTKMITAHDSHISCMALTMDGLLLATASMKGTLIRIFNTMDGTRLQEVRRGLDKAEIYSIALSPNVQWLAVSSDKGTVHIFSLKVRVAGEDSSNDQRTLEAPRMDHQNSSTSMDPLIQTNTGSNXQAHHCLS

SEQ ID NO: 66423 - DNA, 534 bp, Triticum aestivum
  misc_feature (1)..(534): Ceres Seq. ID no. 13658641
aaaaaaatccccaccccggtcaaccccacctcccacccccgatacccactcccacatcccacagcccacagccgccacggccctcgccgccggcgcgcgtcccacaaccaccatctcccatgggcgccaaggtccctaccacaggcgcgcgtgccaccgctgccacatcccacaggagccatggtccctaccgccggcgcgcgcgccaccgccaccacctcctgcaggcgccatggtccatgccgccggcacgcgtgccaccgccaccacctcccacagccgccgcggcccccgccgccggtgtgcgccctgccatctccacctcccagagcctccatggccctgtcgccggggagcgccccgccacaaccactgccgttggacgccgtcgccgtgccccccgcacgccagtggctccgagacctcgtcggacatgaccgtggcatccctgaactgccaagcgccgcccaacacccggcttcttcccctgaccactgtcggcctcctaccccgggcaaacccttctcttccttc

SEQ ID NO: 66424 - protein, 178 aa, Triticum aestivum
  peptide (1)..(178): Ceres Seq. ID no. 13658642
KKIPTPVNPTSHPRYPLPHPTAHSRHGPRRRRASHNHHLPWAPRSLPQARVPPLPHPTGAMVPTAGARATATTSCRRHGPCRRHACHRHHLPQPPRPPPPVCALPSPPPRASMALSPGSAPPQPLPLDAVAVPPARQWLRDLVGHDRGIPELPSAAQHPASSPDHCRPPTPGKPFSSF

SEQ ID NO: 66425 - protein, 177 aa, Triticum aestivum
  peptide (1)..(177): Ceres Seq. ID no. 13658643
KKSPPRSTPPPTPDTHSHIPQPTAATALAAGARPTTTISHGRQGPYHRRACHRCHIPQEPWSLPPARAPPPPPPAGAMVHAAGTRATATTSHSRRGPRRRCAPCHLHLPEPPWPCRRGAPRHNHCRWTPSPCPPHASGSETSSDMTVASLNCQAPPNTRLLPLTTVGLLPRANPSLP

SEQ ID NO: 66426 - protein, 144 aa, Triticum aestivum
  peptide (1)..(144): Ceres Seq. ID no. 13658644
KNPHPGQPHLPPPIPTPTSHSPQPPRPSPPARVPQPPSPMGAKVPTTGARATAATSHRSHGPYRRRARHRHHLLQAPWSMPPARVPPPPPPTAAAAPAAGVRPAISTSQSLHGPVAGERPATTTAVGRRRRAPRTPVAPRPRRT

SEQ ID NO: 66427 - protein, 118 aa, Triticum aestivum
  peptide (1)..(118): Ceres Seq. ID no. 13658645
MVPTAGARATATTSCRRHGPCRRHACHRHHLPQPPRPPPPVCALPSPPPRASMALSPGSAPPQPLPLDAVAVPPARQWLRDLVGHDRGIPELPSAAQHPASSPDHCRPPTPGKPFSSF

SEQ ID NO: 66428 - DNA, 1706 bp, Triticum aestivum
  misc_feature (1)..(1706): Ceres Seq. ID no. 13658584
ggtggttgctcctagtcgcagacttctttattaatctcaatctggatccgggcacggggagcgattgactgatcgacgagactcgagagcctggagagccgggggtttcgcttctcgttgcgtttggagtcttgccgggtctcggttttcgagcaggcaagaatttccttttaattttgggtgatctgttttcgtgtgctaagattttggatcatcgccccccccagtgttgttcctgctgatttaccgcctggattggattttttttggacgggttacctttaatggggcttctcccttctcgtcgtcgcgaatcagtggactagaacaagaaaccttcccgattggagcggattttctgtggtcgccgcgcttagtttcgaaaggcggcacctttatttgctaccacgctttgctgtggcccaaaagttacccattgtgtctgtttcaagaaatagattgggttttcttttcttttttctgaggtgtttgttttacttggcagatccagggaacaccggttttcctttgattttgccgaaatttttgatctgatcggagcgatcccggagcttcgcaaggagcaaggcatttttctgggggccatggccatggggctcggccgattcacacactggctctggccgggtaacgccgcgcgagttggcaaccacgagctccccggcatcgccttgacgggcgcctccttcccggagttcccctccgggttccgtgaggcggacgctatcgccttctccagtgccgccgccggccgccgcacgcggccgaggagggtcaagaaccagcggcgcagtcgcggggagcccagaatcgacagggagtacgacatggtcatcgtgccgtccgacggcggcgggtgcctttccgggtccgagtccgacgactccgactggtccatcggctggctggagccgcaggcgccggagatgcagacggacggtgaccaggagacctccttcgccgtcctcgtgccctgctaccgccacggccgcgccgagcagcccgcgatgccccagggacgcttccttggcgctggccctctcgccgatggcggcctctctgatattgctgagcttaaccttccaaagacaactaaaatttcttttccaaatggaaaggatgatctcatgaactttgaggccactctacgtcctgatgaaggatactatgtaggtgggacatttactttcaccttccaagtatctccttcctaccctcacgaggctccgaaggtcaagtgcaagactaaggtttaccatcctaatattgacctagaaggaaatgtctgcctgaacattctgcgtgaagactggaagcctgtcttgaacatcaacaccataatatatggtttaaaccttcttttctcacaacccaatgacgaggaccccttgaatcatgaagctgcggccgtcctccgagacaacccacagaagttccagagaaatgttcaaacggcgatgtcgggaggctatgttgataatacccatttcccaaggtgcaagtaaggtctgctatgtggagctctggttccgactcttgcccaattaccctgaatgccgttgcacagtctgaaggatgtggcatgtacccaggaaatgtatcgcatttgtgttagacgtgactgttattatgcttgtttggtggatgtaacggagtcatgcatgttgaagaaacatgctaagcmg

SEQ ID NO: 66429 - protein, 306 aa, Triticum aestivum
  peptide (1)..(306): Ceres Seq. ID no. 15219908
MAMGLGRFTHWLWPGNAARVGNHELPGIALTGASFPEFPSGFREADAIAFSSAAAGRRTRPRRVKNQRRSRGEPRIDREYDMVIVPSDGGGCLSGSESDDSDWSIGWLEPQAPEMQTDGDQETSFAVLVPCYRHGRAEQPAMPQGRFLGAGPLADGGLSDIAELNLPKTTKISFPNGKDDLMNFEATLRPDEGYYVGGTFTFTFQVSPSYPHEAPKVKCKTKVYHPNIDLEGNVCLNILREDWKPVLNINTIIYGLNLLFSQPNDEDPLNHEAAAVLRDNPQKFQRNVQTAMSGGYVDNTHFPRCK

SEQ ID NO: 66430 - protein, 304 aa, Triticum aestivum
  peptide (1)..(304): Ceres Seq. ID no. 15219909
MGLGRFTHWLWPGNAARVGNHELPGIALTGASFPEFPSGFREADAIAFSSAAAGRRTRPRRVKNQRRSRGEPRIDREYDMVIVPSDGGGCLSGSESDDSDWSIGWLEPQAPEMQTDGDQETSFAVLVPCYRHGRAEQPAMPQGRFLGAGPLADGGLSDIAELNLPKTTKISFPNGKDDLMNFEATLRPDEGYYVGGTFTFTFQVSPSYPHEAPKVKCKTKVYHPNIDLEGNVCLNILREDWKPVLNINTIIYGLNLLFSQPNDEDPLNHEAAAVLRDNPQKFQRNVQTAMSGGYVDNTHFPRCK

SEQ ID NO: 66431 - protein, 225 aa, Triticum aestivum
  peptide (1)..(225): Ceres Seq. ID no. 15219910
MVIVPSDGGGCLSGSESDDSDWSIGWLEPQAPEMQTDGDQETSFAVLVPCYRHGRAEQPAMPQGRFLGAGPLADGGLSDIAELNLPKTTKISFPNGKDDLMNFEATLRPDEGYYVGGTFTFTFQVSPSYPHEAPKVKCKTKVYHPNIDLEGNVCLNILREDWKPVLNINTIIYGLNLLFSQPNDEDPLNHEAAAVLRDNPQKFQRNVQTAMSGGYVDNTHFPRCK

SEQ ID NO: 66432 - DNA, 1066 bp, Triticum aestivum
  misc_feature (1)..(1066): Ceres Seq. ID no. 13657842
atcaagaagaggaagcgaggagccaagaaccacacaccctcctaaacgcctccgcctcctccccacgggcgcacccgagctccagccctagcatttccgctcccccctctctcccttgtttctccttctgcaggaaatggaggtggtggatttggtgtcgtccgactccgaggacgaggcgtgcgcgcactcgcctgatcggaagcgtcccgcctgggagcccgcggatccatcccgcggccccgggagtcttcccgagcagacaagcagaatggcctggccgccgcagcagccaagcagaatggcctggccgccgcagcagccaagtcaggcggtgaagaaggacaaggagaaggcaggcgagggggggagcgcgtgggcagcaggacccccttcgctcaggggaggatcgcatgcttctagtgccggtatcttgggagctaggcctgcggggtgggattcatggagtgcagcggcacacaaatctagagatgaaagaagtgaaacgcccgagtgttgttggggaccttggggtgatgagatttgcagatcagtctgtgtgcccaaggaagatggtgctgcgatgcctggacagagctgtatggccattcctgagctactgatggaagacagtagcgcatggctgtcgaggatcaaggggctccatttcccacttcctgatgagagccagttgaaggccaggcaaattcattcagatgagatgcttgctcttaagcttcaagagcagttcaaccaggaacagccaggctcgcaatcttcccagcaggttgatacgactctagcttggacactgcaagagcaagatgctgcgcgtgccagaatcgctgcgagagagggccaatctagttctaggcagagggaccgcttaatggcacacttgtattcgtatggctggcgctcgcaagttcaaggttatccttcatggccacctagtgacacatcagctccaataacaagcagacggtggttgccaagaaacagcagcccaggatcagagcaacaaaatatgatatctctcaattgaccaaagggtgttttggacaag

SEQ ID NO: 66433 - protein, 302 aa, Triticum aestivum
  peptide (1)..(302): Ceres Seq. ID no. 13657843
MEVVDLVSSDSEDEACAHSPDRKRPAWEPADPSRGPGSLPEQTSRMAWPPQQPSRMAWPPQQPSQAVKKDKEKAGEGGSAWAAGPPSLRGGSHASSAGILGARPAGWDSWSAAAHKSRDERSETPECCWGPWGDEICRSVCVPKEDGAAMPGQSCMAIPELLMEDSSAWLSRIKGLHFPLPDESQLKARQIHSDEMLALKLQEQFNQEQPGSQSSQQVDTTLAWTLQEQDAARARIAAREGQSSSRQRDRLMAHLYSYGWRSQVQGYPSWPPSDTSAPITSRRWLPRNSSPGSEQQNMISLN

SEQ ID NO: 66434 - protein, 257 aa, Triticum aestivum
  peptide (1)..(257): Ceres Seq. ID no. 13657844
MAWPPQQPSRMAWPPQQPSQAVKKDKEKAGEGGSAWAAGPPSLRGGSHASSAGILGARPAGWDSWSAAAHKSRDERSETPECCWGPWGDEICRSVCVPKEDGAAMPGQSCMAIPELLMEDSSAWLSRIKGLHFPLPDESQLKARQIHSDEMLALKLQEQFNQEQPGSQSSQQVDTTLAWTLQEQDAARARIAAREGQSSSRQRDRLMAHLYSYGWRSQVQGYPSWPPSDTSAPITSRRWLPRNSSPGSEQQNMISLN

SEQ ID NO: 66435 - protein, 247 aa, Triticum aestivum
  peptide (1)..(247): Ceres Seq. ID no. 13657845
MAWPPQQPSQAVKKDKEKAGEGGSAWAAGPPSLRGGSHASSAGILGARPAGWDSWSAAAHKSRDERSETPECCWGPWGDEICRSVCVPKEDGAAMPGQSCMAIPELLMEDSSAWLSRIKGLHFPLPDESQLKARQIHSDEMLALKLQEQFNQEQPGSQSSQQVDTTLAWTLQEQDAARARIAAREGQSSSRQRDRLMAHLYSYGWRSQVQGYPSWPPSDTSAPITSRRWLPRNSSPGSEQQNMISLN

SEQ ID NO: 66436 - DNA, 1846 bp, Triticum aestivum
  misc_feature (1)..(1846): Ceres Seq. ID no. 14307972
actcaatcattccgagagctgtgctccagaaaaagaaactgcagagggggcgagaagtgcaaaaaaaaaaggagctgcgaagctctgctggcgctcgccgtctccgtcttctccggtctccaccatggcctctttcgccgcccttccgctggccgctctcctggtgctggccgtctcgtgggcatgggagcacctcgtgtggaggccctacgccatagccaggaggcacagggcgcaagggatccatggccccccatacaggttcctcaagggctccaacgaggaggtgaggcggatgaaggcggagacggccgacgtggtgctcgacgtccgcgaccacaactacctccccagggtcgcgccgcacttcctcaagtggagggcacagtatggagagccatttctgttctggtttggtgccaagccccggatctgtgtctttgactacgagttggttaggcagatcctttcaagcaaatccggacactttccgaagaacgacgcgcacccgaacgtgttggaattgctcggcaagggcctggtgttggtgaacggtgtggattgggtgcgccatcgcagggtcatcaaccctgcttttgcaatggataagataaaggcgatgacggaaacgatggtgtcttgtgcccaacgcacgttcagtgtgtttgaagatcaggcatgcaagaacacaaatagagaaatcctagtggaattcgacaaagcagtccaagggttaacagcagatatcatatcccacacagccttcggaagtagctacaaattaggaatggaagccttccatgcccagaaagagctccagtcaatcgccatatccagtttacttaatgtgcagataccaggattcagctatctgcccacaaaaaggaataggaggaagtggatgcttgaaaagaagcttcgaagcacgctcatgcgtgtcataaactcgcggttagcgtcgaaggggagcggatatggaaatgacctacttggtttgatgtttgagggctgcactacgacagtgcaagggggcaagcaggagcagctaagcttgagcatggaggagatcctacacgagtgcaaaacattcttcttcgccggttacgaaacgacatcgcttctgctcacctggacagtgttcttgctcagtgtgtacccagagtggcaggagaggctacgggaggaggtcttgagggaggttggaaagggtaaccccaccggcgacaacctcggcaaactgaaagagatgatgatggtcctccatgaagccctgaggctctacggccctgctcttttcatgcagaggaagaccataactgacatggtggtcggagccataacaatccccaaggaccatgcagttgtcataggcgccccattcatgcaccgggataaaaaggtctggggtgaggatgcggatcagttcaacccgatgagattcgcgaacggggtcgccagagcggcgaaggttccacacgccctgctggcgttctcgatcgggccgagggcgtgcatcggccagaactttgcgatgctcgaagccaaatccgtgatggtgacggttctgcagaagttctcgttcgctctctccccgagctatgtccacgctcctgcggatttcctcactctgcagcctaagtttggcctccccgtcgttatgaagctgctggatatatgaaatggaaccggctggttctgaatgttgcagtacagaacttctgaattttctgcatgtggtgctcatagtgcacgcagtgtatatattcttttccaaattaaggttggaaaagtagtacgattacaagaaaatatattgcatgtggcttgaccacccgtctgtttgcac

SEQ ID NO: 66437 - protein, 558 aa, Triticum aestivum
  peptide (1)..(558): Ceres Seq. ID no. 14307973
LNHSESCAPEKETAEGARSAKKKGAAKLCWRSPSPSSPVSTMASFAALPLAALLVLAVSWAWEHLVWRPYAIARRHRAQGIHGPPYRFLKGSNEEVRRMKAETADVVLDVRDHNYLPRVAPHFLKWRAQYGEPFLFWFGAKPRICVFDYELVRQILSSKSGHFPKNDAHPNVLELLGKGLVLVNGVDWVRHRRVINPAFAMDKIKAMTETMVSCAQRTFSVFEDQACKNTNREILVEFDKAVQGLTADIISHTAFGSSYKLGMEAFHAQKELQSIAISSLLNVQIPGFSYLPTKRNRRKWMLEKKLRSTLMRVINSRLASKGSGYGNDLLGLMFEGCTTTVQGGKQEQLSLSMEEILHECKTFFFAGYETTSLLLTWTVFLLSVYPEWQERLREEVLREVGKGNPTGDNLGKLKEMMMVLHEALRLYGPALFMQRKTITDMVVGAITIPKDHAVVIGAPFMHRDKKVWGEDADQFNPMRFANGVARAAKVPHALLAFSIGPRACIGQNFAMLEAKSVMVTVLQKFSFALSPSYVHAPADFLTLQPKFGLPVVMKLLDI

SEQ ID NO: 66438 - protein, 517 aa, Triticum aestivum
  peptide (1)..(517): Ceres Seq. ID no. 14307974
MASFAALPLAALLVLAVSWAWEHLVWRPYAIARRHRAQGIHGPPYRFLKGSNEEVRRMKAETADVVLDVRDHNYLPRVAPHFLKWRAQYGEPFLFWFGAKPRICVFDYELVRQILSSKSGHFPKNDAHPNVLELLGKGLVLVNGVDWVRHRRVINPAFAMDKIKAMTETMVSCAQRTFSVFEDQACKNTNREILVEFDKAVQGLTADIISHTAFGSSYKLGMEAFHAQKELQSIAISSLLNVQIPGFSYLPTKRNRRKWMLEKKLRSTLMRVINSRLASKGSGYGNDLLGLMFEGCTTTVQGGKQEQLSLSMEEILHECKTFFFAGYETTSLLLTWTVFLLSVYPEWQERLREEVLREVGKGNPTGDNLGKLKEMMMVLHEALRLYGPALFMQRKTITDMVVGAITIPKDHAVVIGAPFMHRDKKVWGEDADQFNPMRFANGVARAAKVPHALLAFSIGPRACIGQNFAMLEAKSVMVTVLQKFSFALSPSYVHAPADFLTLQPKFGLPVVMKLLDI

SEQ ID NO: 66439 - protein, 460 aa, Triticum aestivum
  peptide (1)..(460): Ceres Seq. ID no. 14307975
MKAETADVVLDVRDHNYLPRVAPHFLKWRAQYGEPFLFWFGAKPRICVFDYELVRQILSSKSGHFPKNDAHPNVLELLGKGLVLVNGVDWVRHRRVINPAFAMDKIKAMTETMVSCAQRTFSVFEDQACKNTNREILVEFDKAVQGLTADIISHTAFGSSYKLGMEAFHAQKELQSIAISSLLNVQIPGFSYLPTKRNRRKWMLEKKLRSTLMRVINSRLASKGSGYGNDLLGLMFEGCTTTVQGGKQEQLSLSMEEILHECKTFFFAGYETTSLLLTWTVFLLSVYPEWQERLREEVLREVGKGNPTGDNLGKLKEMMMVLHEALRLYGPALFMQRKTITDMVVGAITIPKDHAVVIGAPFMHRDKKVWGEDADQFNPMRFANGVARAAKVPHALLAFSIGPRACIGQNFAMLEAKSVMVTVLQKFSFALSPSYVHAPADFLTLQPKFGLPVVMKLLDI

SEQ ID NO: 66440 - DNA, 1763 bp, Triticum aestivum
  misc_feature (1)..(1763): Ceres Seq. ID no. 14307904
accaccaccgtcctcatctcctcctcgagcccctcccccctcctccgcatctcgccaccaacctccccccgatccccaacccccatgatccgcaggaggcgcgggcacgccgccgcctagggtttccactccccgccccccccgatggagtcgctgccgcggaagcgcaagggcgcgcgctccctcgccggctccctccacgacgcctccgcggaccgcaagcggacctgccgggagcggaagccgcgccccgacaagaagaaaaagaagccctccaccgccggcgatgacgccgccaccgcctccggccggggcggcgtggtcatgacggcgccgccggccagcggccgggccgccccggacagccccggaagggggctcaagcgcaaggtcggctgcatcgagtccgccacccggataggccgcaagaagcgcctcgaggccgagtacgagctcggcgacgagatcggccagggcaagttcggctccgtccggatctgccgcgccaaggccggcggcgaggagttcgcctgcaaggcgctccccaagaacggcgaggagacggtccaccgcgaggtcgagatcatgcagcacctctccggccaccccggcgtcgtcacgctcaaggccgtcttcgaggacgccgacaagttctacctcgtcatggagctctgcagcggcggccgcttgctcgacgagatggccagggacggcaccttctccgagcagcgagccgcccttgtcatcaaggatctaatgtcggtcgtcaagtactgccatgaaatgggcgtcatccacagggacattaagccggagaatattttgctcaccaagactgggaagatgaaactagcagattttggattggcagcacgagttactaacggtcagaaattgtctggcgttgctgggagcccagcctatgtggcgcctgaggtgttgtcaggaagctattctgagaaagtagacatatggggtgctggggtgctcctccatgtactactgcttggttcacttccatttcaagggggctctctggaagctgtctttgaagctataaagacagttgagcttgatttcaacagcggtccatgggaatcaatgtcagttcttggacgggatcttataagtcgaatgttagatcgagatgtctcttctagaataactgctgatcaagttctttgtcatccatgggtgttgttctacacggaatgtaccctgaaggctgtaacacctaatgtcactaacaagattgtagcacccaaaattacatgggacagaattagatcacattgtgagtcgtcagcttcagattcgtctagccagaggtcggaggaccaggatgaatgtggcatagtcgacgcactgacagcggcaataacacatgttagaatatcggagccgaaaaggacccggctttgcagccccggcattcccatacagcaggagtgctcctcaaacataaagagcaacctgtgtacggcgttctgacatgaccccaatgtatagccccttgtgtgttggtctgatgtcagtgatggctcgccctgctggttgtctctgtgctgaggataataactcgggttttcctgtcagagcaagcaagcgttcgacatggtgatgctgtagattgcggtgatggctgatgaacccgacatggtagctgatgctgtaaattttgtaaatagaatgatccatgtagctaatttatatcttgagagagttgagaataatttcagtctatgatgaacatagtgcgcgcc

SEQ ID NO: 66441 - protein, 448 aa, Triticum aestivum
  peptide (1)..(448): Ceres Seq. ID no. 14307905
MESLPRKRKGARSLAGSLHDASADRKRTCRERKPRPDKKKKKPSTAGDDAATASGRGGVVMTAPPASGRAAPDSPGRGLKRKVGCIESATRIGRKKRLEAEYELGDEIGQGKFGSVRICRAKAGGEEFACKALPKNGEETVHREVEIMQHLSGHPGVVTLKAVFEDADKFYLVMELCSGGRLLDEMARDGTFSEQRAALVIKDLMSVVKYCHEMGVIHRDIKPENILLTKTGKMKLADFGLAARVTNGQKLSGVAGSPAYVAPEVLSGSYSEKVDIWGAGVLLHVLLLGSLPFQGGSLEAVFEAIKTVELDFNSGPWESMSVLGRDLISRMLDRDVSSRITADQVLCHPWVLFYTECTLKAVTPNVTNKIVAPKITWDRIRSHCESSASDSSSQRSEDQDECGIVDALTAAITHVRISEPKRTRLCSPGIPIQQECSSNIKSNLCTAF

SEQ ID NO: 66442 - protein, 388 aa, Triticum aestivum
  peptide (1)..(388): Ceres Seq. ID no. 14307906
MTAPPASGRAAPDSPGRGLKRKVGCIESATRIGRKKRLEAEYELGDEIGQGKFGSVRICRAKAGGEEFACKALPKNGEETVHREVEIMQHLSGHPGVVTLKAVFEDADKFYLVMELCSGGRLLDEMARDGTFSEQRAALVIKDLMSVVKYCHEMGVIHRDIKPENILLTKTGKMKLADFGLAARVTNGQKLSGVAGSPAYVAPEVLSGSYSEKVDIWGAGVLLHVLLLGSLPFQGGSLEAVFEAIKTVELDFNSGPWESMSVLGRDLISRMLDRDVSSRITADQVLCHPWVLFYTECTLKAVTPNVTNKIVAPKITWDRIRSHCESSASDSSSQRSEDQDECGIVDALTAAITHVRISEPKRTRLCSPGIPIQQECSSNIKSNLCTAF

SEQ ID NO: 66443 - protein, 301 aa, Triticum aestivum
  peptide (1)..(301): Ceres Seq. ID no. 14307907
MQHLSGHPGVVTLKAVFEDADKFYLVMELCSGGRLLDEMARDGTFSEQRAALVIKDLMSVVKYCHEMGVIHRDIKPENILLTKTGKMKLADFGLAARVTNGQKLSGVAGSPAYVAPEVLSGSYSEKVDIWGAGVLLHVLLLGSLPFQGGSLEAVFEAIKTVELDFNSGPWESMSVLGRDLISRMLDRDVSSRITADQVLCHPWVLFYTECTLKAVTPNVTNKIVAPKITWDRIRSHCESSASDSSSQRSEDQDECGIVDALTAAITHVRISEPKRTRLCSPGIPIQQECSSNIKSNLCTAF

SEQ ID NO: 66444 - DNA, 1089 bp, Triticum aestivum
  misc_feature (1)..(1089): Ceres Seq. ID no. 15179832
atggcattgtgtgaggaataaaccaacgaaaattgtcccaactctcctagtgtcatccacaactatcaatgctcaggttcaaaggtctaacaaactttgatcatgtttgtaggtatggtgagagcgaaggttatccttctcagagtggcatcacaaaagatgcacaggccgcacttgatcatctacttcagaggaaggacattgacacatccaggatagttatcttcgggagatctttaggaggtgctgttggagcagttcttgcaaaaaacaatcctgacaaggtgtctgctctaatattggaaaatacttttacatctatattggatatggctggtatcatgctgcccttcttaagatggttcataggcggtagttctgccaaaggcccaaaacttcttaactgcgttgttcgctctccatggagtacacttgatgttgttgcagaggtcaaacagcccattctctttctttctggattgcaagatgaactggttcccccttcacacatgaggatgctgtatgacaaagctgttgaacataacaggaattgtaggtttgttgattttctcaatggtatgcatatggatacctggatttctggaggggaccgctactggaggacaatcgaattgtttctggaccaatattccccagaagtacagagttctgatgccagctgcacaagtgaaattgctgatgatgataaagctgcataataattggaacatctagagcagcctgctgttttccaccagtttttctgatgttgatgcaattccggtctttgatggattgaagatcatttcaaacaattaattcaggtggttgttctgctccattccacctgaagaagccaaagctgtgaatatattttgaggttgttctccatcctgtgatgctgctgcatatgtgtatggaatgacacatatatatttctgagcctggctcggccttcaactcccgagtttctgtacaatgttgaattggcttcattcaagtatttgcaatttattggaactagtaccgaatgttagaaaatctggccttggtgtatgacggttcagtatagggtaatcttgttggctc

SEQ ID NO: 66445 - protein, 216 aa, Triticum aestivum
  peptide (1)..(216): Ceres Seq. ID no. 15179833
MLRFKGLTNFDHVCRYGESEGYPSQSGITKDAQAALDHLLQRKDIDTSRIVIFGRSLGGAVGAVLAKNNPDKVSALILENTFTSILDMAGIMLPFLRWFIGGSSAKGPKLLNCVVRSPWSTLDVVAEVKQPILFLSGLQDELVPPSHMRMLYDKAVEHNRNCRFVDFLNGMHMDTWISGGDRYWRTIELFLDQYSPEVQSSDASCTSEIADDDKAA

SEQ ID NO: 66446 - protein, 129 aa, Triticum aestivum
  peptide (1)..(129): Ceres Seq. ID no. 15179834
MAGIMLPFLRWFIGGSSAKGPKLLNCVVRSPWSTLDVVAEVKQPILFLSGLQDELVPPSHMRMLYDKAVEHNRNCRFVDFLNGMHMDTWISGGDRYWRTIELFLDQYSPEVQSSDASCTSEIADDDKAA

SEQ ID NO: 66447 - protein, 125 aa, Triticum aestivum
  peptide (1)..(125): Ceres Seq. ID no. 15179835
MLPFLRWFIGGSSAKGPKLLNCVVRSPWSTLDVVAEVKQPILFLSGLQDELVPPSHMRMLYDKAVEHNRNCRFVDFLNGMHMDTWISGGDRYWRTIELFLDQYSPEVQSSDASCTSEIADDDKAA

SEQ ID NO: 66448 - DNA, 1015 bp, Triticum aestivum
  misc_feature (1)..(1015): Ceres Seq. ID no. 12621037
gatcgtcaggcagcaacccccgcacatctgctccctcctccaccagctccccatcctcaacgagctcccaccacccgctgctacccagcatggccgccgccgccaccgccgtccgcttccacacggccgccgcgcgacgcgccgcccctcggcgaccggcgcgcttcgccgtgcgcgcagatgccgcgcaggcggcgacggcgctgacgcaggatgacctcaagaggcttgcggcggtgcgtgcggtggagcaggtgcagagtggtatggttctgggcctcgggacaggctccacggccgcctttgccgtcgccgagatcggtgcgcttcttgccaacgggaagctctccggcatcgtcggtgtgcccacttccaagcgcacctttgagcaggccatgtccctgggaatccctctttccacgctcgacgaccaccccgtgatcgacctcgccattgacggcgctgacgaggttgatccagatcttaaccttgtgaaagggcggggtggagcccttctccgggagaagatggtcgaagctgcatcaggaaagtttgttgttgtcgttgatgagacgaaactagttactggcctaggagggagcggtcttgccatgcctgtggaagttgtgcagttctgctggaagtacaatcaagtaagtctgcagggtctgttcaatgaagaaggttgcgaggcaaagctgagattgaatgaggatggcaagccctatgttactgacaactcgaaatacatcgtagatttatacttcaagacgccaatcaaggatgcgttgggcgcgggcaaggagattgcagctttggaaggagttgttgagcatgggttgttcttgaacatggcaagctcagtgatcattgctggatcagacggtgtcagtgtcaaaacaaagtgacttttttggatcggctgttgttgatgtgttgaacttacggtttttcactgaataatctatctgtgtaaaaggaggaaataatgctcttctataaatatatcttttcc

SEQ ID NO: 66449 - protein, 301 aa, Triticum aestivum
  peptide (1)..(301): Ceres Seq. ID no. 12621038
SSGSNPRTSAPSSTSSPSSTSSHHPLLPSMAAAATAVRFHTAAARRAAPRRPARFAVRADAAQAATALTQDDLKRLAAVRAVEQVQSGMVLGLGTGSTAAFAVAEIGALLANGKLSGIVGVPTSKRTFEQAMSLGIPLSTLDDHPVIDLAIDGADEVDPDLNLVKGRGGALLREKMVEAASGKFVVVVDETKLVTGLGGSGLAMPVEVVQFCWKYNQVSLQGLFNEEGCEAKLRLNEDGKPYVTDNSKYIVDLYFKTPIKDALGAGKEIAALEGVVEHGLFLNMASSVIIAGSDGVSVKTK

SEQ ID NO: 66450 - protein, 272 aa, Triticum aestivum
  peptide (1)..(272): Ceres Seq. ID no. 12621039
MAAAATAVRFHTAAARRAAPRRPARFAVRADAAQAATALTQDDLKRLAAVRAVEQVQSGMVLGLGTGSTAAFAVAEIGALLANGKLSGIVGVPTSKRTFEQAMSLGIPLSTLDDHPVIDLAIDGADEVDPDLNLVKGRGGALLREKMVEAASGKFVVVVDETKLVTGLGGSGLAMPVEVVQFCWKYNQVSLQGLFNEEGCEAKLRLNEDGKPYVTDNSKYIVDLYFKTPIKDALGAGKEIAALEGVVEHGLFLNMASSVIIAGSDGVSVKTK

SEQ ID NO: 66451 - protein, 213 aa, Triticum aestivum
  peptide (1)..(213): Ceres Seq. ID no. 12621040
MVLGLGTGSTAAFAVAEIGALLANGKLSGIVGVPTSKRTFEQAMSLGIPLSTLDDHPVIDLAIDGADEVDPDLNLVKGRGGALLREKMVEAASGKFVVVVDETKLVTGLGGSGLAMPVEVVQFCWKYNQVSLQGLFNEEGCEAKLRLNEDGKPYVTDNSKYIVDLYFKTPIKDALGAGKEIAALEGVVEHGLFLNMASSVIIAGSDGVSVKTK

SEQ ID NO: 66452 - DNA, 1313 bp, Triticum aestivum
  misc_feature (1)..(1313): Ceres Seq. ID no. 15226418
gtacaaaatggtttacctgtccaatttgggcttggaaacgaccctcttacccattacttggccaggatgtcaaggcatcagttgtatcaaatcatgtctgagttgaagaccctaactactcaaaataacgaccttgccaaaaaactgctgcaaggaattccacagcttccaaaggccctatttcaggcacagataatgctcgggctggtgacacctcagatgatgcagatggctaagagccaacagccctctagctcgttggcacaatcttctcacctcaatgaatcatttccgcagccagatgctgtgctaccaattgttcatagacctccaccaaaccctaatgccatgcaggaacaaactgcaccgctgcataactttcctcagtatcagcattcatctcagcctccagtcaaaatgtttccgcatggacatcagcctggggtgctggcacaccctccaatgctatctcagcccttcggcacctcttccagtgttcctactcaaccccttgtaaactcaggaggcttgacatcacaagttcagccttcatttttgacacagcaccctagaccaccagttatgccaactaatgtacagcaactacccttgaccaatcctcatctctcccaggttgctgctgaacctgagatactccccaatgagataagattgcctgatcgagctagtcatcaggcagagttagaccatccctcgaaattgagaaaattggaggatggaacatcaacgccaggaattgtaaacaatagtcctgctgtttattctgctccatcgcaggtagtggtccctagtggaccatcagggagctatagttctggtgctgttcacttccagcaaccagagaatgaagcgcctcagctcacacaggacgatgagtcagcccttctgcagcaagtcttacaactgacacctgagcagctgagttcattgccagtggagcagcagcagcaggtgatacagcttcagaagatgctatcagctggtaaatagcggcataacaccagctgagtaagcacggtgaaattgttaacctacatagttaaacattgaagaaggctcgtctagccacacacacacacacacggaacttctcaactttgttggtatctctgggccatcagttttgctcctgatgattgatttatttggcattctttgtaaagttgaggtaaaaatgtggtggcaaaagaagttgtgaagaaagatgataattgtccattagtcctgtaacattttagaaaagaataatcttatgaagagagggagttgtatttgtgttccggaattgttgc

SEQ ID NO: 66453 - protein, 336 aa, Triticum aestivum
  peptide (1)..(336): Ceres Seq. ID no. 15226419
VQNGLPVQFGLGNDPLTHYLARMSRHQLYQIMSELKTLTTQNNDLAKKLLQGIPQLPKALFQAQIMLGLVTPQMMQMAKSQQPSSSLAQSSHLNESFPQPDAVLPIVHRPPPNPNAMQEQTAPLHNFPQYQHSSQPPVKMFPHGHQPGVLAHPPMLSQPFGTSSSVPTQPLVNSGGLTSQVQPSFLTQHPRPPVMPTNVQQLPLTNPHLSQVAAEPEILPNEIRLPDRASHQAELDHPSKLRKLEDGTSTPGIVNNSPAVYSAPSQVVVPSGPSGSYSSGAVHFQQPENEAPQLTQDDESALLQQVLQLTPEQLSSLPVEQQQQVIQLQKMLSAGK

SEQ ID NO: 66454 - protein, 314 aa, Triticum aestivum
  peptide (1)..(314): Ceres Seq. ID no. 15226420
MSRHQLYQIMSELKTLTTQNNDLAKKLLQGIPQLPKALFQAQIMLGLVTPQMMQMAKSQQPSSSLAQSSHLNESFPQPDAVLPIVHRPPPNPNAMQEQTAPLHNFPQYQHSSQPPVKMFPHGHQPGVLAHPPMLSQPFGTSSSVPTQPLVNSGGLTSQVQPSFLTQHPRPPVMPTNVQQLPLTNPHLSQVAAEPEILPNEIRLPDRASHQAELDHPSKLRKLEDGTSTPGIVNNSPAVYSAPSQVVVPSGPSGSYSSGAVHFQQPENEAPQLTQDDESALLQQVLQLTPEQLSSLPVEQQQQVIQLQKMLSAGK

SEQ ID NO: 66455 - protein, 305 aa, Triticum aestivum
  peptide (1)..(305): Ceres Seq. ID no. 15226421
MSELKTLTTQNNDLAKKLLQGIPQLPKALFQAQIMLGLVTPQMMQMAKSQQPSSSLAQSSHLNESFPQPDAVLPIVHRPPPNPNAMQEQTAPLHNFPQYQHSSQPPVKMFPHGHQPGVLAHPPMLSQPFGTSSSVPTQPLVNSGGLTSQVQPSFLTQHPRPPVMPTNVQQLPLTNPHLSQVAAEPEILPNEIRLPDRASHQAELDHPSKLRKLEDGTSTPGIVNNSPAVYSAPSQVVVPSGPSGSYSSGAVHFQQPENEAPQLTQDDESALLQQVLQLTPEQLSSLPVEQQQQVIQLQKMLSAGK

SEQ ID NO: 66456 - DNA, 1720 bp, Triticum aestivum
  misc_feature (1)..(1720): Ceres Seq. ID no. 14302216
ctgaaaatttcacttgaccgccaagtcccaaagcacaagtggaacacgaaactttgatgtggcgggccgatgtgccccaagcaatgtcaaaggcgaaatggaaacggggggcgtataagttcgaaaaattctccatccccccttctctctctctctccctccgtcgttcgatccccgacgccatcgtgcgcatcgccggccaggacaaggcatacatacaggtacagcggcccctcgtagggacaagaagagacccacccagaggcagaggcccgcctcaaatgcgccgccggccgcgcgtcgccgcacgatgagccccgccgcgacggacgccggcggcgacctcttcgccgccaacctcaagggcgcgctcctcgccgtcgcctcctccaccttcgtcggggtcagcttcatcgtcaagaagaagggcctccgccgcgccggcgccgtcggctcccgggcaggtgtcggagggtatgggtacctctgggagccgctctggtgggtcgggatggtcaccatgcttgttggggagaccgccaatttcgtggcttacatgtttgcgccagccgtcctcgtcgctccgctgggagcactcagcatcattgtcagtgctgttctagcccatttcatgctgaatgagaagttgcagcgggtgggcgtcctgggctgtattctctgcattgttgggtcgacggtgatcatcctccacgctcctgaggagaggcccccggactcggtggagcagatttggcgcctggcaacgcaacctaccttcctttgctacgctgctctagcagtggctgtgtcattgcttcttatactatattgtgctccacggtatgggcagacgaacataatgatctatgttggtatttgctctgttgtcggatccctcacggtaatgagcatcaaggctgtgggcattgcgattaaacttaccattcagggcgaaaaccaggctgggtatttccagacgtggctgtttgtgacggtttcagctatatgcttagtcatccaattagtttacctgaacaaggcattggatactttcaatacggcgctggtttctcccatctattatgccatgttcacaaccctcactattttagcaagtgccataatgttcaaggattggtctgggcagagcgcaagcattattgcctccgagacttgtggatttctcacagttcttgccggtattattgtgctacattccaccaaagaacccgatcaaaatctgtccccagacctttatgcatctctcactgcacccctccctccaaagatatattggcacatccaaggaaacggcggcgacgtagggaagcaaaaagaggacgactcacttccctgcgatttcatcaccgtcgtgcgccaggactacttcgtctagaaaattctcaggacggcatatgcgtttcatatgtgccagccagcctcaagaccttcatgtggcgagggtggaccccagggcctgttaccgacggtacaaggccatcctggcctgaaaaaatgtgaaaattttgcagagacatcgtgttgtaccataccatgaccaaaccggttgcgtcggagctaggtgttgtacgattacctgtgtactgtagaaatcgcgccgtgtgaggaggatgttgttgtaggggggtttgtgagggatgttgtagatgttgttgcctgtctgatgtgaataccaaagcacacaacgctttctgttgcc

SEQ ID NO: 66457 - protein, 361 aa, Triticum aestivum
  peptide (1)..(361): Ceres Seq. ID no. 14302217
MSPAATDAGGDLFAANLKGALLAVASSTFVGVSFIVKKKGLRRAGAVGSRAGVGGYGYLWEPLWWVGMVTMLVGETANFVAYMFAPAVLVAPLGALSIIVSAVLAHFMLNEKLQRVGVLGCILCIVGSTVIILHAPEERPPDSVEQIWRLATQPTFLCYAALAVAVSLLLILYCAPRYGQTNIMIYVGICSVVGSLTVMSIKAVGIAIKLTIQGENQAGYFQTWLFVTVSAICLVIQLVYLNKALDTFNTALVSPIYYAMFTTLTILASAIMFKDWSGQSASIIASETCGFLTVLAGIIVLHSTKEPDQNLSPDLYASLTAPLPPKIYWHIQGNGGDVGKQKEDDSLPCDFITVVRQDYFV

SEQ ID NO: 66458 - protein, 294 aa, Triticum aestivum
  peptide (1)..(294): Ceres Seq. ID no. 14302218
MVTMLVGETANFVAYMFAPAVLVAPLGALSIIVSAVLAHFMLNEKLQRVGVLGCILCIVGSTVIILHAPEERPPDSVEQIWRLATQPTFLCYAALAVAVSLLLILYCAPRYGQTNIMIYVGICSVVGSLTVMSIKAVGIAIKLTIQGENQAGYFQTWLFVTVSAICLVIQLVYLNKALDTFNTALVSPIYYAMFTTLTILASAIMFKDWSGQSASIIASETCGFLTVLAGIIVLHSTKEPDQNLSPDLYASLTAPLPPKIYWHIQGNGGDVGKQKEDDSLPCDFITVVRQDYFV

SEQ ID NO: 66459 - protein, 291 aa, Triticum aestivum
  peptide (1)..(291): Ceres Seq. ID no. 14302219
MLVGETANFVAYMFAPAVLVAPLGALSIIVSAVLAHFMLNEKLQRVGVLGCILCIVGSTVIILHAPEERPPDSVEQIWRLATQPTFLCYAALAVAVSLLLILYCAPRYGQTNIMIYVGICSVVGSLTVMSIKAVGIAIKLTIQGENQAGYFQTWLFVTVSAICLVIQLVYLNKALDTFNTALVSPIYYAMFTTLTILASAIMFKDWSGQSASIIASETCGFLTVLAGIIVLHSTKEPDQNLSPDLYASLTAPLPPKIYWHIQGNGGDVGKQKEDDSLPCDFITVVRQDYFV

SEQ ID NO: 66460 - DNA, 1542 bp, Triticum aestivum
  misc_feature (1)..(1542): Ceres Seq. ID no. 14303097
cccggcctctccaacgagtctcaacttccttatccaacgatccgctggacgggactaactaggctgtcacatcccttccatctaccacaaccaacggcgtcggcgataatggccgccttgccgcagctgcttctgatcctcttccccgcggaggttgccgtcctgaccctgctgctggcctcggcggcgggagcgcgggctcacgcctcctcgtcctcgtcatcggcgacgtaccgctgcggctggtgcccgcgcaggtccaccgcgtccatcctccctcccggcgccggcgcactgaccggtgccgcctgcgggtatggtggccaggcggcggagatggccgtcgacggggggttccacattgcggccgtcagcgccagtttcttccgcggtggccgggcctgcggcgcctgctaccagctgatgtgcaggggacggagcgcgtgcgcggcgggcggcgtcaaggtcgtcgtcgtcgccgacgtggcagagacgaacatgaccggtggtggtgccggtgggcggtttctgctcagcaaggacgccttcgccgccttggcgacgccagaccgtaacgccgagctcgcggacgcagacgtcgacgtggacttcaggaggattccctgcgtgtacaagagcaagaacttggcggttaaagtggaggagacgagcagcagggaccggggttacctcgccctccgcttcctctaccagggcggccagaccgacatcgccgccgtcgaggtcgcgcaggcggtcaccggttccagcggcaccaacaacgacgcagcaccgttgcagacatcctggcagtacatgacccggcgcgaggcgtccccgtcgatgtggcgcacgtcgcgcgtgccggccggtctgctgcagctccggcttgtggtcaccgcgggctccggcggcaagtggctgcgcgccgacggggcggtgctccccgcgaattggcagcccggcgcggtctacgacaccggcctgcgcgtcaccgacgtcgccgcaagcacctgcggcggcgcctcctgttcctccacggacgagggcgacgacgccgagcagctccgatgacacgcttcccggcatgcatgatgcatccaccacggaccgatcgatggtccattggagccggcccgcacgtcaacggcgacgccgcgcatgcagatctgcaccggccagccgccggaatatcggtcgatgctgcatgtacactgtacagagacgtgtacatcgcaacgtacgacatgcatgcatgtgtgcacggccgacgacgagttccggttaggacaaaacctccatggtcccgctctaaacagaggatgttggcgcgtagcttcacgtgtggagggaagggactaatgcagagaagaacatgtagatggctctgttcaggtcttggaatcacatgacagcactactgttttggctgctcgtcctcttcctctttggaatagtaggagagtattattgtaggttgattgcatgggctgattaagattgatcagttgccgactaagactaagttaactgtattgcatt

SEQ ID NO: 66461 - protein, 357 aa, Triticum aestivum
  peptide (1)..(357): Ceres Seq. ID no. 14303098
PGLSNESQLPYPTIRWTGLTRLSHPFHLPQPTASAIMAALPQLLLILFPAEVAVLTLLLASAAGARAHASSSSSSATYRCGWCPRRSTASILPPGAGALTGAACGYGGQAAEMAVDGGFHIAAVSASFFRGGRACGACYQLMCRGRSACAAGGVKVVVVADVAETNMTGGGAGGRFLLSKDAFAALATPDRNAELADADVDVDFRRIPCVYKSKNLAVKVEETSSRDRGYLALRFLYQGGQTDIAAVEVAQAVTGSSGTNNDAAPLQTSWQYMTRREASPSMWRTSRVPAGLLQLRLVVTAGSGGKWLRADGAVLPANWQPGAVYDTGLRVTDVAASTCGGASCSSTDEGDDAEQLR

SEQ ID NO: 66462 - protein, 321 aa, Triticum aestivum
  peptide (1)..(321): Ceres Seq. ID no. 14303099
MAALPQLLLILFPAEVAVLTLLLASAAGARAHASSSSSSATYRCGWCPRRSTASILPPGAGALTGAACGYGGQAAEMAVDGGFHIAAVSASFFRGGRACGACYQLMCRGRSACAAGGVKVVVVADVAETNMTGGGAGGRFLLSKDAFAALATPDRNAELADADVDVDFRRIPCVYKSKNLAVKVEETSSRDRGYLALRFLYQGGQTDIAAVEVAQAVTGSSGTNNDAAPLQTSWQYMTRREASPSMWRTSRVPAGLLQLRLVVTAGSGGKWLRADGAVLPANWQPGAVYDTGLRVTDVAASTCGGASCSSTDEGDDAEQLR

SEQ ID NO: 66463 - protein, 245 aa, Triticum aestivum
  peptide (1)..(245): Ceres Seq. ID no. 14303100
MAVDGGFHIAAVSASFFRGGRACGACYQLMCRGRSACAAGGVKVVVVADVAETNMTGGGAGGRFLLSKDAFAALATPDRNAELADADVDVDFRRIPCVYKSKNLAVKVEETSSRDRGYLALRFLYQGGQTDIAAVEVAQAVTGSSGTNNDAAPLQTSWQYMTRREASPSMWRTSRVPAGLLQLRLVVTAGSGGKWLRADGAVLPANWQPGAVYDTGLRVTDVAASTCGGASCSSTDEGDDAEQLR

SEQ ID NO: 66464 - DNA, 582 bp, Triticum aestivum
  misc_feature (1)..(582): Ceres Seq. ID no. 13658948
aatccccatccgcccgtctctctcctacgctctccccgcccgcctcgccccgctcctcccccgcagcggcgagctactcccgagccagggagagacaggcggcggcggcagcttccccttcccctcctcctctcctccctcgccctcgccgagaaacaacgagagtttcctcttccgtcagcaatggagaacatgagatccgagaacaaccgtggcgcggccatggagggcgtcaagctcgcgtctgaggcggcggccaacaccaaccgcagggccctgagggacatcaagaacatcctcggcgcccctcaccagccccaggccgtcagcaagaggggcttgcaagaaaaacccgccgccggtgccaagagccaagctggcgccgtcggccaccggccggtgaccaggaaattcgccgccatcctgcagcaaacgcagcctgcaaacgccccgctggcaccaattggcagtgagaggcagaagaggaatgctgacaccgcgttcaatgctccttcagacatggagtgcagcaaggcttcagatgatgaccttgatgagatgatgaccaatgagctaaaggag

SEQ ID NO: 66465 - protein, 194 aa, Triticum aestivum
  peptide (1)..(194): Ceres Seq. ID no. 13658949
NPHPPVSLLRSPRPPRPAPPPQRRATPEPGRDRRRRQLPLPLLLSSLALAEKQREFPLPSAMENMRSENNRGAAMEGVKLASEAAANTNRRALRDIKNILGAPHQPQAVSKRGLQEKPAAGAKSQAGAVGHRPVTRKFAAILQQTQPANAPLAPIGSERQKRNADTAFNAPSDMECSKASDDDLDEMMTNELKE

SEQ ID NO: 66466 - protein, 133 aa, Triticum aestivum
  peptide (1)..(133): Ceres Seq. ID no. 13658950
MENMRSENNRGAAMEGVKLASEAAANTNRRALRDIKNILGAPHQPQAVSKRGLQEKPAAGAKSQAGAVGHRPVTRKFAAILQQTQPANAPLAPIGSERQKRNADTAFNAPSDMECSKASDDDLDEMMTNELKE

SEQ ID NO: 66467 - protein, 130 aa, Triticum aestivum
  peptide (1)..(130): Ceres Seq. ID no. 13658951
MRSENNRGAAMEGVKLASEAAANTNRRALRDIKNILGAPHQPQAVSKRGLQEKPAAGAKSQAGAVGHRPVTRKFAAILQQTQPANAPLAPIGSERQKRNADTAFNAPSDMECSKASDDDLDEMMTNELKE

SEQ ID NO: 66468 - DNA, 1765 bp, Triticum aestivum
  misc_feature (1)..(1765): Ceres Seq. ID no. 15176787
acttacccgaggcacgaccacaactatttccaccttttgccagtgccagtgccacctgcaaaacatattctgaaaacattgcagtccacccactttgcttaggttcgagatgaagcagaccgtggtgatgtaccccggcgccggcgtcggccacgttggccccgtgacggagctcgccaacgtcttcctcaagcacggctacgacgtcaccgtggtgctcgtcgagccgcctttcaagtcgacagactccgccgccaccgccatcgagcgcatcgccgcctccaaccctttcatctccttccatgtcctcccgcccctccctgcgccagactttgccgcctccggcaagcaccctttcctactcatgctccagctcttgcacgattataacgagcggtcggaagcgttcctccgtggcatcccccggaagagcttgcactctgttatcctcgacatgttctgcgtccacgccaccgacgtctgcgtgaagctcggcgtcccggtctacacgttcttcgtcgggggcgcctcgtgcctgtcggtcctaacccaggtcccggcagtgatcgccggcaggcagacgggcttgaaggaactcggggacatgcccctcgatttcctcggcgtcccgccgatgccagcgtctcatctcatcaaggagctgctggagcaccccgaggatgagatgtgcaaggccatgacagacgtctggaagcgcaacacggagaccatgggcgttatggtgaacacgtttgagtcattggagagccgggcggtgcagtctctcatggacctccccggcaggaagctgcgtccgatctactgcgtcgggccgttggtcagcaagggcgccaaggatgcctccgacaaagcagagaggaacgagtgccttgagtggctcgatgcgcagcccgaccgcagcgtcgtgttcctctgtttcgggagcatgggcacgctctcggcggagcagctcaaggagatggccgttgggttggagcggtctgggcagcggttcctatggtccgtgcgcaacccggccggaagcaacaacccgaagaaatacttggaggtgcgccccgagccggaccttgacgcgctgcttcctcaagggttcctggagcggaccaagggcaggggcctcgtcgtcaagtcatgggcgccgcaggcgaacgtgctccgccaccgcgcgacgggcgcgttcgtgacgcactgcggatggaactcggtgctggaggccgttgcggccggggtgccgatgctgtgcctgccgctggaggcggagcagaagatgaacaaggtgtgcgtgacggaggacatgggcgtcgccgtggagctggagggatacatggcaggttttgtcaaggcagaggaggtggaggccaaggtgaggctggtgattgagggcggggatgggaggcagctcagggcccgggcggctgctcgcagggaagaggccgaggcggcgctgggggaagggggctcgtcgcgggcgtcgtttgcccagtttctgttggacgtggacaatctcggaaagcagctcggcgagtgacgcactacttgcaaattgcgactgctctttgccttctacgtatatgttgctagtccaagttgccctcttgtttatattttacttgcattgcatgctcaatcacttaacttactagtaagtgtgtgtgtgtgtagcaccatcttaataaatcggctatgtaagtgccaggtaccgcagttacctccacatatatttatgatgttttctcttcctggc

SEQ ID NO: 66469 - protein, 479 aa, Triticum aestivum
  peptide (1)..(479): Ceres Seq. ID no. 15176788
MKQTVVMYPGAGVGHVGPVTELANVFLKHGYDVTVVLVEPPFKSTDSAATAIERIAASNPFISFHVLPPLPAPDFAASGKHPFLLMLQLLHDYNERSEAFLRGIPRKSLHSVILDMFCVHATDVCVKLGVPVYTFFVGGASCLSVLTQVPAVIAGRQTGLKELGDMPLDFLGVPPMPASHLIKELLEHPEDEMCKAMTDVWKRNTETMGVMVNTFESLESRAVQSLMDLPGRKLRPIYCVGPLVSKGAKDASDKAERNECLEWLDAQPDRSVVFLCFGSMGTLSAEQLKEMAVGLERSGQRFLWSVRNPAGSNNPKKYLEVRPEPDLDALLPQGFLERTKGRGLVVKSWAPQANVLRHRATGAFVTHCGWNSVLEAVAAGVPMLCLPLEAEQKMNKVCVTEDMGVAVELEGYMAGFVKAEEVEAKVRLVIEGGDGRQLRARAAARREEAEAALGEGGSSRASFAQFLLDVDNLGKQLGE

SEQ ID NO: 66470 - protein, 473 aa, Triticum aestivum
  peptide (1)..(473): Ceres Seq. ID no. 15176789
MYPGAGVGHVGPVTELANVFLKHGYDVTVVLVEPPFKSTDSAATAIERIAASNPFISFHVLPPLPAPDFAASGKHPFLLMLQLLHDYNERSEAFLRGIPRKSLHSVILDMFCVHATDVCVKLGVPVYTFFVGGASCLSVLTQVPAVIAGRQTGLKELGDMPLDFLGVPPMPASHLIKELLEHPEDEMCKAMTDVWKRNTETMGVMVNTFESLESRAVQSLMDLPGRKLRPIYCVGPLVSKGAKDASDKAERNECLEWLDAQPDRSVVFLCFGSMGTLSAEQLKEMAVGLERSGQRFLWSVRNPAGSNNPKKYLEVRPEPDLDALLPQGFLERTKGRGLVVKSWAPQANVLRHRATGAFVTHCGWNSVLEAVAAGVPMLCLPLEAEQKMNKVCVTEDMGVAVELEGYMAGFVKAEEVEAKVRLVIEGGDGRQLRARAAARREEAEAALGEGGSSRASFAQFLLDVDNLGKQLGE

SEQ ID NO: 66471 - protein, 394 aa, Triticum aestivum
  peptide (1)..(394): Ceres Seq. ID no. 15176790
MLQLLHDYNERSEAFLRGIPRKSLHSVILDMFCVHATDVCVKLGVPVYTFFVGGASCLSVLTQVPAVIAGRQTGLKELGDMPLDFLGVPPMPASHLIKELLEHPEDEMCKAMTDVWKRNTETMGVMVNTFESLESRAVQSLMDLPGRKLRPIYCVGPLVSKGAKDASDKAERNECLEWLDAQPDRSVVFLCFGSMGTLSAEQLKEMAVGLERSGQRFLWSVRNPAGSNNPKKYLEVRPEPDLDALLPQGFLERTKGRGLVVKSWAPQANVLRHRATGAFVTHCGWNSVLEAVAAGVPMLCLPLEAEQKMNKVCVTEDMGVAVELEGYMAGFVKAEEVEAKVRLVIEGGDGRQLRARAAARREEAEAALGEGGSSRASFAQFLLDVDNLGKQLGE

SEQ ID NO: 66472 - DNA, 1585 bp, Triticum aestivum
  misc_feature (1)..(1585): Ceres Seq. ID no. 12578422
agtgtgcttctgcctaagtagtgttgacacctacctccccaccctcccaagaagaaaagaggaatagcccagccagagagagcagagcagatccgttcccggcgagtcggcggcgacaccgctggagaagaagacgtccacgacagccggcgaccgcatcggcatcggcatcgccgtctccttccccaccctacccagtttgccatcaacagcgcatcatgcagaggcccagcaaactgcctgccgtctctctccccggacgccctacctttttcggaccccaaggttgggctgacctcccagatggcttgcttcactccatcgttgatcggctgggctccttccgagaccttcttggcttcgccacaacatgcccctcgtggcatgctgccttctcctcatacccgtcaaaatccacgttcctcacaaaacttccacctctcctcatccagccccatattcgggcacaaggtcctcttcttccttgtaccagtggttgtcgtgagctatacccatgtaaggttgttgatccagccaaccgaaacgccgcccttcgctgttggatccctcaagataccctggagaagatgacatttattggatcctcctatggtaagctcatctactactgcaacggatactgtcgcatcatcgatgtgttcaccggtgacgaggtctcaactccacgtctcccatcccgtgctggatgttcaaaacttcacttggctggcattctaacagccccacttgcatcacccaactcacatctccttgtcagtaccgagtccttcctgcttgatctgcctgttggaaacgactcttggtccgaactccagcttccttgtcagtttgtaatagaccattttgtggagttggatggtcagctcattgtctcgaatagctatgggagatcctacgctctgcagctggcccctcagcatggcctgcaggagataaaaaccaagcctgtgggaggaaggccggtggtaggaaggctggtggtttgtggtgatatgcttctcattctgagttttggcgagttccaccgcctcgacatgtcaactgagcccgcgacacgggtggccgtggagaagctgggcgagcgggcactctttgtaggggcggaagcgaagagctcggcactttcttgcatgagcccggagctatggggaggaaggagtgacatcgtgtactttgctcgtacagctcgaccttggtttctctataggctgtgtggcaggccagatcgcttgcaggatagaccaacacgaccaacacgcgctgaacccgcaggctttggaagcaccccagtgcagtcatcagttcggccgctctggctgtacccaagcatgttctactcggatggccaatgaatgaatgatccgtgcctgccagccaactacgtacagttgccgcagcaccagcttcatctgagatttccctttgagatccagggagtagagattggtttttgctgcatgggcagaatttggtatgtatgtagttagtttgttgaacttgataagttttaacttttgcggtgtcggcactagctttactagaataactcagttatccggttttt

SEQ ID NO: 66473 - protein, 384 aa, Triticum aestivum
  peptide (1)..(384): Ceres Seq. ID no. 12578423
MQRPSKLPAVSLPGRPTFFGPQGWADLPDGLLHSIVDRLGSFRDLLGFATTCPSWHAAFSSYPSKSTFLTKLPPLLIQPHIRAQGPLLPCTSGCRELYPCKVVDPANRNAALRCWIPQDTLEKMTFIGSSYGKLIYYCNGYCRIIDVFTGDEVSTPRLPSRAGCSKLHLAGILTAPLASPNSHLLVSTESFLLDLPVGNDSWSELQLPCQFVIDHFVELDGQLIVSNSYGRSYALQLAPQHGLQEIKTKPVGGRPVVGRLVVCGDMLLILSFGEFHRLDMSTEPATRVAVEKLGERALFVGAEAKSSALSCMSPELWGGRSDIVYFARTARPWFLYRLCGRPDRLQDRPTRPTRAEPAGFGSTPVQSSVRPLWLYPSMFYSDGQ

SEQ ID NO: 66474 - protein, 261 aa, Triticum aestivum
  peptide (1)..(261): Ceres Seq. ID no. 12578424
MTFIGSSYGKLIYYCNGYCRIIDVFTGDEVSTPRLPSRAGCSKLHLAGILTAPLASPNSHLLVSTESFLLDLPVGNDSWSELQLPCQFVIDHFVELDGQLIVSNSYGRSYALQLAPQHGLQEIKTKPVGGRPVVGRLVVCGDMLLILSFGEFHRLDMSTEPATRVAVEKLGERALFVGAEAKSSALSCMSPELWGGRSDIVYFARTARPWFLYRLCGRPDRLQDRPTRPTRAEPAGFGSTPVQSSVRPLWLYPSMFYSDGQ

SEQ ID NO: 66475 - DNA, 2130 bp, Triticum aestivum
  misc_feature (1)..(2130): Ceres Seq. ID no. 14303672
ccctcgctagcctcgggtgggtctatcctcttccctcgctgagaatggcgtctccggcctccacctccgcgccggtctccctctccctctccctcccgctccgcccttccccgtgccgccgcctccccgcgcccttctcccgcctccctccccgccgcttcaccctctcgccgacccgccccgccgccgcgctgctctccagccccagccccagccccagccacgcgcagcacgagcacaaggacgaggaagatgaagaagaggagtatggtgaagatgaggagctcgtggaggaggatgacttggtggaggtggggtacgtgagcggcgcgcacggggtgcgcggcgacgtcctcgtctcgccccgcaccgacttccccgagctccgcttcgccacgccggggaagaggtggctgagggctcgcgccgccgggaagatgcaggtcagggagttcgagctcgtcagggggaaagcccacacggggaagaagggctggatcgtgcgcttcgacggcgtcgactccttggacgaggccaggcagatagttggttcggctgttctcgtgaagaccgaggataggccggaactggaggaggatgagatctattcgctcgatcttgttggcatgactgttattgtcaaggatacaggcaagcttgtaggcactgttgcacaggtcttcaattttggaggtggcgatcttctccaggttatggttggctctgctgagaatgctgtgcagactgattcagaaaatcaggattcaactccatcccgtcaacacgtgtggattccatttgctgaagatattgtgcctgatattgatatggagactagagagatgtggattacaccaccaaagggtcttcttgaggtcaacacacgtcctgagaaatcaaagaaagaaaggcgtgcgatggattggaaggaaaagaagaaactacagcgtcgcataactgcagcaaagaaggtactacatgaaatggaacagggccatattctggaaggtttgctatcaggggacaagctcgaaaaggcttcacttgctgaacaaattgcgagcattgacttccaattgttcaaacatgcaatgcatagcgtcagcaagcaggttgacagcatgtcaaagaatgttcttgccaattcctcttcatcaagaaaaaacgtgatgaggatacctcgcgaaaccctcatgaatcatggtgagaaagagaagaatgtcttcagtagtgaatttagcaaaggctgtgagatccttcaaaagtcaaaagcagcaattgtacttgttacaaatggctcagactctgatattgtggatgctgagtttcagagattgcttaactcttttagtgagttaatgaaggtagaagaaaatcatatatctccccctttttttattgtttctcctgacgatcatgtggattcagttcggaactacttgatagagaacgactattttggttttgacactcagaaggtatgggtccttgaagagatgaaactaccagttgtcagtctgtcctctgagctagggagcaaaaaaattctgctgaagtccccatgggagatacttcaaaggccagctggatctggggcgattttcagctcactatcatcaaataaaattttggaatcgttcaatgcaatgggcatagagtacgtacagatatgcagcccctctgacgaactagtcctcgggcatcctctgctcttcggtgctgcaagttcgcgcagtgtggatgtcggtgtcaagctccgcaagaccagcgacaagacggaagatggtttcgatttgatcctttccatcgaccacttgaacaagatgtgccgagacgtcgccaaggccaggttctctgcccaccccgagcagcacgaacacgtcgagcttgtcgacggccagtgggtcaccgtccagccagaggggccgaactctcaccggttgagtaccaatgttacaagtgttttggattcttgctctcctgacaagctgtgcgtcatggagattgttgagtagcggctagtgaatctttttgctaatgtactgtaggactgtacatagccagccacaaccaagtactttttttttaaacggagcctcatccattaattaagaagagagttgtccggct

SEQ ID NO: 66476 - protein, 670 aa, Triticum aestivum
  peptide (1)..(670): Ceres Seq. ID no. 14303673
LASLGWVYPLPSLRMASPASTSAPVSLSLSLPLRPSPCRRLPAPFSRLPPRRFTLSPTRPAAALLSSPSPSPSHAQHEHKDEEDEEEEYGEDEELVEEDDLVEVGYVSGAHGVRGDVLVSPRTDFPELRFATPGKRWLRARAAGKMQVREFELVRGKAHTGKKGWIVRFDGVDSLDEARQIVGSAVLVKTEDRPELEEDEIYSLDLVGMTVIVKDTGKLVGTVAQVFNFGGGDLLQVMVGSAENAVQTDSENQDSTPSRQHVWIPFAEDIVPDIDMETREMWITPPKGLLEVNTRPEKSKKERRAMDWKEKKKLQRRITAAKKVLHEMEQGHILEGLLSGDKLEKASLAEQIASIDFQLFKHAMHSVSKQVDSMSKNVLANSSSSRKNVMRIPRETLMNHGEKEKNVFSSEFSKGCEILQKSKAAIVLVTNGSDSDIVDAEFQRLLNSFSELMKVEENHISPPFFIVSPDDHVDSVRNYLIENDYFGFDTQKVWVLEEMKLPVVSLSSELGSKKILLKSPWEILQRPAGSGAIFSSLSSNKILESFNAMGIEYVQICSPSDELVLGHPLLFGAASSRSVDVGVKLRKTSDKTEDGFDLILSIDHLNKMCRDVAKARFSAHPEQHEHVELVDGQWVTVQPEGPNSHRLSTNVTSVLDSCSPDKLCVMEIVE

SEQ ID NO: 66477 - protein, 656 aa, Triticum aestivum
  peptide (1)..(656): Ceres Seq. ID no. 14303674
MASPASTSAPVSLSLSLPLRPSPCRRLPAPFSRLPPRRFTLSPTRPAAALLSSPSPSPSHAQHEHKDEEDEEEEYGEDEELVEEDDLVEVGYVSGAHGVRGDVLVSPRTDFPELRFATPGKRWLRARAAGKMQVREFELVRGKAHTGKKGWIVRFDGVDSLDEARQIVGSAVLVKTEDRPELEEDEIYSLDLVGMTVIVKDTGKLVGTVAQVFNFGGGDLLQVMVGSAENAVQTDSENQDSTPSRQHVWIPFAEDIVPDIDMETREMWITPPKGLLEVNTRPEKSKKERRAMDWKEKKKLQRRITAAKKVLHEMEQGHILEGLLSGDKLEKASLAEQIASIDFQLFKHAMHSVSKQVDSMSKNVLANSSSSRKNVMRIPRETLMNHGEKEKNVFSSEFSKGCEILQKSKAAIVLVTNGSDSDIVDAEFQRLLNSFSELMKVEENHISPPFFIVSPDDHVDSVRNYLIENDYFGFDTQKVWVLEEMKLPVVSLSSELGSKKILLKSPWEILQRPAGSGAIFSSLSSNKILESFNAMGIEYVQICSPSDELVLGHPLLFGAASSRSVDVGVKLRKTSDKTEDGFDLILSIDHLNKMCRDVAKARFSAHPEQHEHVELVDGQWVTVQPEGPNSHRLSTNVTSVLDSCSPDKLCVMEIVE

SEQ ID NO: 66478 - protein, 525 aa, Triticum aestivum
  peptide (1)..(525): Ceres Seq. ID no. 14303675
MQVREFELVRGKAHTGKKGWIVRFDGVDSLDEARQIVGSAVLVKTEDRPELEEDEIYSLDLVGMTVIVKDTGKLVGTVAQVFNFGGGDLLQVMVGSAENAVQTDSENQDSTPSRQHVWIPFAEDIVPDIDMETREMWITPPKGLLEVNTRPEKSKKERRAMDWKEKKKLQRRITAAKKVLHEMEQGHILEGLLSGDKLEKASLAEQIASIDFQLFKHAMHSVSKQVDSMSKNVLANSSSSRKNVMRIPRETLMNHGEKEKNVFSSEFSKGCEILQKSKAAIVLVTNGSDSDIVDAEFQRLLNSFSELMKVEENHISPPFFIVSPDDHVDSVRNYLIENDYFGFDTQKVWVLEEMKLPVVSLSSELGSKKILLKSPWEILQRPAGSGAIFSSLSSNKILESFNAMGIEYVQICSPSDELVLGHPLLFGAASSRSVDVGVKLRKTSDKTEDGFDLILSIDHLNKMCRDVAKARFSAHPEQHEHVELVDGQWVTVQPEGPNSHRLSTNVTSVLDSCSPDKLCVMEIVE

SEQ ID NO: 66479 - DNA, 1812 bp, Triticum aestivum
  misc_feature (1)..(1812): Ceres Seq. ID no. 15224473
taattcactacgccgctatttattttactattaattgccccgactccgtctccgtccccgtccccgtcccccgtccccgccccctccgccgtcgccaccccaaattcccacgcaaaccctaagccagccagccagccagctagctcgacagcccagcccagcccaatggcggaggacgccggcgacagggaccagcagcagcagcagcagcccgccgcggccgcgggggccggagcagggcacgaggacgggggcggcagggacgagagctccgtcaagctcttcgtcggccaggtgcccaagctcatgaccgaggccgagctggccgccatgttccgcgacgtcgccgtcgtcgacgaggtcaccgtcatccgcgacaaggccaccaaggcgtcccgaggttgctgcttcctgatctgcccatcaagggaggaggctgacaaagcagtgaatgcatatcacaacaaacgcacgcttcctggggccccaagtccattgcaagtaaaatatgccgatggagagttggaaaggctggagcacaaacttttcattggaatgctacccaaaaatgtgacagatactgaaatgactgatttattttcacaatatggaaatatcaaggatttgcagattttgagaggttcacaacagacgagcaaagctggttgcgcctttctgaagtatgaaacaaaagagcaggctgtggcagctatcgaagctctaaatgggaagcacaaaatagagggttcaagtgtgcctttggttgtaaaatgggctgacacagaaaaggaaaggcaggctcgaaaagcacaaaaggctcaatttccgcagtctaatatgtcaaatgcaaatgccatgcaacaaagttcattatttggtgctttacagatgggatatgtgcctccgtataatggatttggctaccagccacaaggaacctatggacttatgcagtaccctttatctccgatgcaaaatcaagcaggcttcccgaatatggttcagcctgtcaatcaaggaagctcaatacggggcgttaattctgaattatcccctaattcacttcctaggtcattcaattcaatgcagttgggcagcccttatccagctgggcctggtatgcagtatcctgggtcatatgctggtggtggcatcaatagtcgtccttacatgaactctcataattcagtcaataaagttccgaatgcaaatgctacatctcccacatcttcaagcaccagcagcaacactggtcctcagctagagggtcctcctggagccaacttgtttatctatcacatcccgcaagaatttggcgaccaagatctagcaaatgcatttcagagttttggtagagtattgagtgccaaagtgtttgtagacaaaacgaccggtgctagtaaatgcttcggttttgtaagctacgattctcctgctcctgcgcaggcagccataagtatgatgaatgggttccaattaggtggcaaaaagctgaaagtacaactcaagagagacaacagcaagcacaataaactttattgacagcgcccagtcgataccttccaacacgatcaggaaaaaccggtacatatgtgtcgcacaattgatcgtttgtcccattgtttcttctggcctccaccatgtgtcgtcgtcggtgggggcttgtgtatcttggctcaattcaattcaacattcttgaaaactgctaaagtgtgtatttcgtcgcagcatagttgtagcatctgtaccatcagattcagacccattgtacatcagacattgattcattcaattgctcccttttttctaccg

SEQ ID NO: 66480 - protein, 458 aa, Triticum aestivum
  peptide (1)..(458): Ceres Seq. ID no. 15224474
MAEDAGDRDQQQQQQPAAAAGAGAGHEDGGGRDESSVKLFVGQVPKLMTEAELAAMFRDVAVVDEVTVIRDKATKASRGCCFLICPSREEADKAVNAYHNKRTLPGAPSPLQVKYADGELERLEHKLFIGMLPKNVTDTEMTDLFSQYGNIKDLQILRGSQQTSKAGCAFLKYETKEQAVAAIEALNGKHKIEGSSVPLVVKWADTEKERQARKAQKAQFPQSNMSNANAMQQSSLFGALQMGYVPPYNGFGYQPQGTYGLMQYPLSPMQNQAGFPNMVQPVNQGSSIRGVNSELSPNSLPRSFNSMQLGSPYPAGPGMQYPGSYAGGGINSRPYMNSHNSVNKVPNANATSPTSSSTSSNTGPQLEGPPGANLFIYHIPQEFGDQDLANAFQSFGRVLSAKVFVDKTTGASKCFGFVSYDSPAPAQAAISMMNGFQLGGKKLKVQLKRDNSKHNKLY

SEQ ID NO: 66481 - protein, 411 aa, Triticum aestivum
  peptide (1)..(411): Ceres Seq. ID no. 15224475
MTEAELAAMFRDVAVVDEVTVIRDKATKASRGCCFLICPSREEADKAVNAYHNKRTLPGAPSPLQVKYADGELERLEHKLFIGMLPKNVTDTEMTDLFSQYGNIKDLQILRGSQQTSKAGCAFLKYETKEQAVAAIEALNGKHKIEGSSVPLVVKWADTEKERQARKAQKAQFPQSNMSNANAMQQSSLFGALQMGYVPPYNGFGYQPQGTYGLMQYPLSPMQNQAGFPNMVQPVNQGSSIRGVNSELSPNSLPRSFNSMQLGSPYPAGPGMQYPGSYAGGGINSRPYMNSHNSVNKVPNANATSPTSSSTSSNTGPQLEGPPGANLFIYHIPQEFGDQDLANAFQSFGRVLSAKVFVDKTTGASKCFGFVSYDSPAPAQAAISMMNGFQLGGKKLKVQLKRDNSKHNKLY

SEQ ID NO: 66482 - protein, 403 aa, Triticum aestivum
  peptide (1)..(403): Ceres Seq. ID no. 15224476
MFRDVAVVDEVTVIRDKATKASRGCCFLICPSREEADKAVNAYHNKRTLPGAPSPLQVKYADGELERLEHKLFIGMLPKNVTDTEMTDLFSQYGNIKDLQILRGSQQTSKAGCAFLKYETKEQAVAAIEALNGKHKIEGSSVPLVVKWADTEKERQARKAQKAQFPQSNMSNANAMQQSSLFGALQMGYVPPYNGFGYQPQGTYGLMQYPLSPMQNQAGFPNMVQPVNQGSSIRGVNSELSPNSLPRSFNSMQLGSPYPAGPGMQYPGSYAGGGINSRPYMNSHNSVNKVPNANATSPTSSSTSSNTGPQLEGPPGANLFIYHIPQEFGDQDLANAFQSFGRVLSAKVFVDKTTGASKCFGFVSYDSPAPAQAAISMMNGFQLGGKKLKVQLKRDNSKHNKLY

SEQ ID NO: 66483 - DNA, 1945 bp, Triticum aestivum
  misc_feature (1)..(1945): Ceres Seq. ID no. 12784451
acaaggggaagtggatccccattccaaacccagcgcacctatccccattccgttccccgccgcggcacttggcgtcgtccgccccgcagctcagctccacacgcccgcccactccctccgccacaagcgatggcgaccatcaccacgcagctccgctccgcgctcctctccccggccgcctcgtcctcgtcctcctcctcaccgcgccgcggcggccggcgcgcgccctcctccgtccgctgcgatgcctctcccccggcggcgtccgcgtcggcctccctcgacccggacttcgacaagaaggccttccgccacaacctcacccgcagcgacaactacaaccgcaagggcttcggccacaagaaggagaccctcgagctcatgagccaggagtacaccagcgatgtgataaagacgctcaaggacaacgggaacgagtacacctgggggccggtgaccgtgaagctggcggaggcctacggcttctgctggggcgtcgagcgcgccgtgcagatcgcctacgaggcgcgcaagcagttccccgaggagcgcatctggatcaccaacgagatcatccacaaccccacggtcaacaagaaattggaggacatgggtgtcaaagatattcctgttaacgctggtattaaggattttgatgttattgaacaaggcgatgttgttgtcttgcctgcatttggagctgctgtggatgagatgtacacattaaatgagaagaacgtgcaaattgttgatacgacatgcccttgggtttcaaaggtgtggaacatggttgagaagcataagaagggcgactatacttctattattcacggaaaatatgcccatgaagagactgttgccactgcttcttttgcagggaagtacattattgtgaagaatatggtcgaggcaacatatgtatgtgattatatacttggtggccaacttgatgggtctagctcaactagagaggagttccttgagaaattcaaaaaggctgtttctccaggattcgatcctgatgttgacttggaaaaggtgggcattgcaaatcaaacaacaatgcttaaaggagaaactgaacaaattggaaaacttgttgagaagactatgatgcgtaagtatggagtcgagaatgccaatgaacactttgttgcattcaacactatttgtgatgccacacaggaaagacaggatgcgatgtatcacctagtgaaggaaaaggttgaccttattctggttattggagggtggaactccagtaatacctctcatttgcaagaaattggagaactcagtggaattccgtcctactggattgacagtgaacaaaggattggaccaggaaacaggattagctacaagctaaatcacggtgagcttattgaggcagaaaactggctaccagaagggcctatcacaattggagttacttctggtgcctcaaccccggacaaggttgttgaggatacgctacacaaggtgtttgacattaagcgtcaagaagttttgcaggttgcatagattttcagcaaaattggccaggggataataatagttgatggcctggcaaaggttagtagaacaattgtgcgacctatcgttgtacagtagctaagaatgtaatgctttaggcacatacttttacgaggatatctgtgctgggatacatatatatgttgtaatcacttgtaccacgaacagtagtacacttgtatcagctgctataacccctggccccttgaaaaatcgttttcataggctgattacatagatatcaaccactgggtttgttgctggatagggctcaaatgcaggactccctgtatgtagcaagtgcaagaaatgcagggtttcctttgtatattagggcgcaagtccaattcccattctgatatgttcatgtgtcatctgttgtaattgaatttaacttttctccgtattc

SEQ ID NO: 66484 - protein, 507 aa, Triticum aestivum
  peptide (1)..(507): Ceres Seq. ID no. 12784452
TRGSGSPFQTQRTYPHSVPRRGTWRRPPRSSAPHARPLPPPQAMATITTQLRSALLSPAASSSSSSSPRRGGRRAPSSVRCDASPPAASASASLDPDFDKKAFRHNLTRSDNYNRKGFGHKKETLELMSQEYTSDVIKTLKDNGNEYTWGPVTVKLAEAYGFCWGVERAVQIAYEARKQFPEERIWITNEIIHNPTVNKKLEDMGVKDIPVNAGIKDFDVIEQGDVVVLPAFGAAVDEMYTLNEKNVQIVDTTCPWVSKVWNMVEKHKKGDYTSIIHGKYAHEETVATASFAGKYIIVKNMVEATYVCDYILGGQLDGSSSTREEFLEKFKKAVSPGFDPDVDLEKVGIANQTTMLKGETEQIGKLVEKTMMRKYGVENANEHFVAFNTICDATQERQDAMYHLVKEKVDLILVIGGWNSSNTSHLQEIGELSGIPSYWIDSEQRIGPGNRISYKLNHGELIEAENWLPEGPITIGVTSGASTPDKVVEDTLHKVFDIKRQEVLQVA

SEQ ID NO: 66485 - protein, 464 aa, Triticum aestivum
  peptide (1)..(464): Ceres Seq. ID no. 12784453
MATITTQLRSALLSPAASSSSSSSPRRGGRRAPSSVRCDASPPAASASASLDPDFDKKAFRHNLTRSDNYNRKGFGHKKETLELMSQEYTSDVIKTLKDNGNEYTWGPVTVKLAEAYGFCWGVERAVQIAYEARKQFPEERIWITNEIIHNPTVNKKLEDMGVKDIPVNAGIKDFDVIEQGDVVVLPAFGAAVDEMYTLNEKNVQIVDTTCPWVSKVWNMVEKHKKGDYTSIIHGKYAHEETVATASFAGKYIIVKNMVEATYVCDYILGGQLDGSSSTREEFLEKFKKAVSPGFDPDVDLEKVGIANQTTMLKGETEQIGKLVEKTMMRKYGVENANEHFVAFNTICDATQERQDAMYHLVKEKVDLILVIGGWNSSNTSHLQEIGELSGIPSYWIDSEQRIGPGNRISYKLNHGELIEAENWLPEGPITIGVTSGASTPDKVVEDTLHKVFDIKRQEVLQVA

SEQ ID NO: 66486 - protein, 380 aa, Triticum aestivum
  peptide (1)..(380): Ceres Seq. ID no. 12784454
MSQEYTSDVIKTLKDNGNEYTWGPVTVKLAEAYGFCWGVERAVQIAYEARKQFPEERIWITNEIIHNPTVNKKLEDMGVKDIPVNAGIKDFDVIEQGDVVVLPAFGAAVDEMYTLNEKNVQIVDTTCPWVSKVWNMVEKHKKGDYTSIIHGKYAHEETVATASFAGKYIIVKNMVEATYVCDYILGGQLDGSSSTREEFLEKFKKAVSPGFDPDVDLEKVGIANQTTMLKGETEQIGKLVEKTMMRKYGVENANEHFVAFNTICDATQERQDAMYHLVKEKVDLILVIGGWNSSNTSHLQEIGELSGIPSYWIDSEQRIGPGNRISYKLNHGELIEAENWLPEGPITIGVTSGASTPDKVVEDTLHKVFDIKRQEVLQVA

SEQ ID NO: 66487 - DNA, 2300 bp, Triticum aestivum
  misc_feature (1)..(2300): Ceres Seq. ID no. 13598023
gcccgacctcccacctccgcagtacaaccccctcctcctcctcccgggcggccatggcggcatgtacgccagcgacggccgccgtgtccttctctcttccgtcgtacccgcgccgcctccggcgccgcccgtccctcctccgcgctgcgtccactgcggcgcccccgtcccccgacctctccatccagctctctccccgcccttccccgcgcacctcgcctcccgtagtaccatccctcgcccgcgaccgcgcagaggacctgcaggccgagtcccgcgccatgacccgagccgctgccgccaccgtctacacccccgagctactcgcctcccgctacggctcccaacctttccaggtggcgatgagagcggcggaggtgctctcgaagctgggggcattcgggctaaagctgctgctcgaccagcagaggggggagtcgtcctcgtcagcgaagaggcgtgccagggcggtcgagctgcgaactgtactgacaaggcttggcccgacgttcgtcaagattgggcagggtttgtccacgcggcctgacctctgcccgactgagtatctcgaggagctctccgagctgcaggattctctccccacatttccagatgaagaggcatttgcctgtatcgagagggagcttggctttcctcttgattcaatgtactcagcaatgtcaccttcaccgatagctgcagcaagtttaggtcaagtttacaaggcacggttgaaatactctgagcagttggtagctgtcaaggtgcaaagacctggcatcgaggatgccataggccgtgatttttacctactgaggggacttggttttctaataaataagtatgttgacattataactactgatgcagttgctctgatagatgaatttgcccgaagagttttccaagagcttaattatgtccaggaaggccaaaacgcacgaaggtttaaaaaattatatgctgacaagcaagacatattggtccctgatatattttgggattacacaagtgcaaaggtactgacaatggaatggattgagggtgtaaagcttaatcaacaagctgccattgaaggccaaggcttgaaggtcctggacttggtaaacattggtatacagtgtagcctaaggcagctactagagtatggttactttcatgctgacccgcatcctggtaatattttggcaacacctgaagggaagcttgcttttcttgattttggcatgatgagtgaaaccccagaggatgcaagggtagccatcatagggcatgtcgttcacatggtcaatcgggattatgaagcgatggctcgtgattattatgcacttgattttctgaaacctgaagtggatgtatccccaatcgtacctgccctcaagattttttttgatgatgctttggattcaacagtgagtgagctaaactttaaaaccatagttgatggcttaggcgctgttctttatcagtacccattcaatgtaccggcctactatgcgttgatactgcgatcactcactgtgctggaaggtctggcactctatgccgatcctaattttaaggtgcttgctgcctcatatccttactttgctaaaagattactcacagatcccaatccatatctcagagatgctctgattgagctgctattcaaggatgaaaaattcaggtggaataggcttgaaaatcttcttgttcaaggacgccaggatagagagtttgtagcgaaggatgctctacaaccggttttgaaacttctacttggtccagatggggagaatttaagagtgctagttgtgaaagaagcggttcgtgtcacagaagccatcaccttcggaacactgattgattcatacaacgcagctccagaatttttgaagccattaatatccaatggcaatccagctggaccatttaagataagtgatgttgagcgggaacaaatgttggagctacgagacactgttctcagaatatggggtcttctgagatcctctgatacctttgatccaagtcttttgcagccaattgtacaggtgctacaagagcgtgaagcccgtatgtttggttctcgtattgctggaggtgtctcgcagcgccttgcagcccgcttgctgcagcagctgctcaggatcccacctgcacctgttcctggatcttcttagaatctttgtagataggctcacactaaaccatgtaaattgacacgatactttctgcaccaaaaggaaaaaaaagaaaagcaactataataatcagtaggtaaaaaaaaaaaaaaaaaagcttatcgataccgtcga

SEQ ID NO: 66488 - protein, 720 aa, Triticum aestivum
  peptide (1)..(720): Ceres Seq. ID no. 15222246
PTSHLRSTTPSSSSRAAMAACTPATAAVSFSLPSYPRRLRRRPSLLRAASTAAPPSPDLSIQLSPRPSPRTSPPVVPSLARDRAEDLQAESRAMTRAAAATVYTPELLASRYGSQPFQVAMRAAEVLSKLGAFGLKLLLDQQRGESSSSAKRRARAVELRTVLTRLGPTFVKIGQGLSTRPDLCPTEYLEELSELQDSLPTFPDEEAFACIERELGFPLDSMYSAMSPSPIAAASLGQVYKARLKYSEQLVAVKVQRPGIEDAIGRDFYLLRGLGFLINKYVDIITTDAVALIDEFARRVFQELNYVQEGQNARRFKKLYADKQDILVPDIFWDYTSAKVLTMEWIEGVKLNQQAAIEGQGLKVLDLVNIGIQCSLRQLLEYGYFHADPHPGNILATPEGKLAFLDFGMMSETPEDARVAIIGHVVHMVNRDYEAMARDYYALDFLKPEVDVSPIVPALKIFFDDALDSTVSELNFKTIVDGLGAVLYQYPFNVPAYYALILRSLTVLEGLALYADPNFKVLAASYPYFAKRLLTDPNPYLRDALIELLFKDEKFRWNRLENLLVQGRQDREFVAKDALQPVLKLLLGPDGENLRVLVVKEAVRVTEAITFGTLIDSYNAAPEFLKPLISNGNPAGPFKISDVEREQMLELRDTVLRIWGLLRSSDTFDPSLLQPIVQVLQEREARMFGSRIAGGVSQRLAARLLQQLLRIPPAPVPGSS

SEQ ID NO: 66489 - protein, 703 aa, Triticum aestivum
  peptide (1)..(703): Ceres Seq. ID no. 15222247
MAACTPATAAVSFSLPSYPRRLRRRPSLLRAASTAAPPSPDLSIQLSPRPSPRTSPPVVPSLARDRAEDLQAESRAMTRAAAATVYTPELLASRYGSQPFQVAMRAAEVLSKLGAFGLKLLLDQQRGESSSSAKRRARAVELRTVLTRLGPTFVKIGQGLSTRPDLCPTEYLEELSELQDSLPTFPDEEAFACIERELGFPLDSMYSAMSPSPIAAASLGQVYKARLKYSEQLVAVKVQRPGIEDAIGRDFYLLRGLGFLINKYVDIITTDAVALIDEFARRVFQELNYVQEGQNARRFKKLYADKQDILVPDIFWDYTSAKVLTMEWIEGVKLNQQAAIEGQGLKVLDLVNIGIQCSLRQLLEYGYFHADPHPGNILATPEGKLAFLDFGMMSETPEDARVAIIGHVVHMVNRDYEAMARDYYALDFLKPEVDVSPIVPALKIFFDDALDSTVSELNFKTIVDGLGAVLYQYPFNVPAYYALILRSLTVLEGLALYADPNFKVLAASYPYFAKRLLTDPNPYLRDALIELLFKDEKFRWNRLENLLVQGRQDREFVAKDALQPVLKLLLGPDGENLRVLVVKEAVRVTEAITFGTLIDSYNAAPEFLKPLISNGNPAGPFKISDVEREQMLELRDTVLRIWGLLRSSDTFDPSLLQPIVQVLQEREARMFGSRIAGGVSQRLAARLLQQLLRIPPAPVPGSS

SEQ ID NO: 66490 - protein, 627 aa, Triticum aestivum
  peptide (1)..(627): Ceres Seq. ID no. 15222248
MTRAAAATVYTPELLASRYGSQPFQVAMRAAEVLSKLGAFGLKLLLDQQRGESSSSAKRRARAVELRTVLTRLGPTFVKIGQGLSTRPDLCPTEYLEELSELQDSLPTFPDEEAFACIERELGFPLDSMYSAMSPSPIAAASLGQVYKARLKYSEQLVAVKVQRPGIEDAIGRDFYLLRGLGFLINKYVDIITTDAVALIDEFARRVFQELNYVQEGQNARRFKKLYADKQDILVPDIFWDYTSAKVLTMEWIEGVKLNQQAAIEGQGLKVLDLVNIGIQCSLRQLLEYGYFHADPHPGNILATPEGKLAFLDFGMMSETPEDARVAIIGHVVHMVNRDYEAMARDYYALDFLKPEVDVSPIVPALKIFFDDALDSTVSELNFKTIVDGLGAVLYQYPFNVPAYYALILRSLTVLEGLALYADPNFKVLAASYPYFAKRLLTDPNPYLRDALIELLFKDEKFRWNRLENLLVQGRQDREFVAKDALQPVLKLLLGPDGENLRVLVVKEAVRVTEAITFGTLIDSYNAAPEFLKPLISNGNPAGPFKISDVEREQMLELRDTVLRIWGLLRSSDTFDPSLLQPIVQVLQEREARMFGSRIAGGVSQRLAARLLQQLLRIPPAPVPGSS

SEQ ID NO: 66491 - DNA, 1955 bp, Triticum aestivum
  misc_feature (1)..(1955): Ceres Seq. ID no. 15170099
atagccagatccatagggttcttctttttcttccccggcccaccgttcctctacagatcgaagtaggtcgcagctacctcgatcttctcacccatggcgtcctcgaacaagcactggccgagcatgttcaggtccaaccctgctgcctgcgacttccaccaccagcctgacatgagcaacacccacaccaggtcctccttgatctcctcagggcttgaccaggagatgacaaggagcccaggggagacgaaaccgcggtggaacccccggccggagcagatctggatcctggaggggatcttcaactccggcgtcgtcaaccctccccgcgacgagatccgccgcatccgcctccgcctgcaggagtacggccacgtcgccgacgccaacgtcttctactggttccagaaccgcaagtcccgcaccaagaacaagcttcgcgccgccgcggccgcagccgctgcccagggccaacagcctaccggcggtcgcgccgccgtgatgcgcgcgtccctagcggtgaggatgcctgcgccggctccggtgacgccgccgaggcgtttcctcgcgccgtccggcacgctccaggcgccgacgtcctcgtcatcgtcctcctccgaccgctcctccggatccagcaggtcggtgaccatgaaaacgacggccatggcgtctgcggcggcagcctccctgtcccagccgatgctgccgctgtcgaccgccgccatcgacctgttcgccccggctccaccactgacaccgtcgcctgggctgtccgcgtgccagctctactaccagctgcagaacaatcccatgtcgtcgatgccgacgccgacgccggtgcgcgagctggtaacctccatccctgagcagccgccgctccacctgcagtggccgccgcagagccagagccagtacctgccagccaccgagctcggcggcttcctcggctcgcatgcccacacgcatccgacggcggtctcccctggcgcgctcctcctgcctggcctctgcaccgactcggcgttagggcagcatgagatcgtggacgacatgagctcctccaagctgggtctcggcgtcggcggccagttcaacttcaacgtggcggcggatccaccctccgacgcggtgagcgccgtgattaaggacgacgagaaggcaaggctggggtttctgcaccactacggcctcggcgccaccgccggcgcggacgtcagtgcggccgtcctcccatgcactccgcctaccggcaacgccgccgcaagctctgcattcaccgatcagctgcaagggctcctggacgccgggctgctggccggaggaggcgcgccgacgccaatggcgacggtagtgaccgtggccgccgggcggccgggcgcccccgtgcaatgctacagcgtgccggcgatggtgcgcatggacgtgaaggcgctgttcggcccggcggccgtgatgctcgggcagaccggcgaggcaatccccgtcgacggggccggggtcaccgccgagcccctccagaacggcgcctgctactacgtcctgatgtgagactcgctgaagatcgatcgccgatgcctgtgtacgtcttgggtcaagggcgccgcgcgggagaatttgggcaaggcgaattatagttatctctacctagttgctacaaggaaaaaaagtccttatatatagctagctgctagtatattttgctttggtcagtatgtggatctactatagcttctaatcgagcgtcttgtgttactcttattttagtgaggatatcttctaacatggacaatagtgttggcttaatttcctgttgcaataagctgccccatgttgctagtactattcagtggtggtattaagatttaagcatcctcttatatttttaaaaaaatatttaaggttggctaacatgcatgtatgagatgagatgaactttgatgagaggcatgagg

SEQ ID NO: 66492 - protein, 485 aa, Triticum aestivum
  peptide (1)..(485): Ceres Seq. ID no. 15170100
MASSNKHWPSMFRSNPAACDFHHQPDMSNTHTRSSLISSGLDQEMTRSPGETKPRWNPRPEQIWILEGIFNSGVVNPPRDEIRRIRLRLQEYGHVADANVFYWFQNRKSRTKNKLRAAAAAAAAQGQQPTGGRAAVMRASLAVRMPAPAPVTPPRRFLAPSGTLQAPTSSSSSSSDRSSGSSRSVTMKTTAMASAAAASLSQPMLPLSTAAIDLFAPAPPLTPSPGLSACQLYYQLQNNPMSSMPTPTPVRELVTSIPEQPPLHLQWPPQSQSQYLPATELGGFLGSHAHTHPTAVSPGALLLPGLCTDSALGQHEIVDDMSSSKLGLGVGGQFNFNVAADPPSDAVSAVIKDDEKARLGFLHHYGLGATAGADVSAAVLPCTPPTGNAAASSAFTDQLQGLLDAGLLAGGGAPTPMATVVTVAAGRPGAPVQCYSVPAMVRMDVKALFGPAAVMLGQTGEAIPVDGAGVTAEPLQNGACYYVLM

SEQ ID NO: 66493 - protein, 475 aa, Triticum aestivum
  peptide (1)..(475): Ceres Seq. ID no. 15170101
MFRSNPAACDFHHQPDMSNTHTRSSLISSGLDQEMTRSPGETKPRWNPRPEQIWILEGIFNSGVVNPPRDEIRRIRLRLQEYGHVADANVFYWFQNRKSRTKNKLRAAAAAAAAQGQQPTGGRAAVMRASLAVRMPAPAPVTPPRRFLAPSGTLQAPTSSSSSSSDRSSGSSRSVTMKTTAMASAAAASLSQPMLPLSTAAIDLFAPAPPLTPSPGLSACQLYYQLQNNPMSSMPTPTPVRELVTSIPEQPPLHLQWPPQSQSQYLPATELGGFLGSHAHTHPTAVSPGALLLPGLCTDSALGQHEIVDDMSSSKLGLGVGGQFNFNVAADPPSDAVSAVIKDDEKARLGFLHHYGLGATAGADVSAAVLPCTPPTGNAAASSAFTDQLQGLLDAGLLAGGGAPTPMATVVTVAAGRPGAPVQCYSVPAMVRMDVKALFGPAAVMLGQTGEAIPVDGAGVTAEPLQNGACYYVLM

SEQ ID NO: 66494 - protein, 459 aa, Triticum aestivum
  peptide (1)..(459): Ceres Seq. ID no. 15170102
MSNTHTRSSLISSGLDQEMTRSPGETKPRWNPRPEQIWILEGIFNSGVVNPPRDEIRRIRLRLQEYGHVADANVFYWFQNRKSRTKNKLRAAAAAAAAQGQQPTGGRAAVMRASLAVRMPAPAPVTPPRRFLAPSGTLQAPTSSSSSSSDRSSGSSRSVTMKTTAMASAAAASLSQPMLPLSTAAIDLFAPAPPLTPSPGLSACQLYYQLQNNPMSSMPTPTPVRELVTSIPEQPPLHLQWPPQSQSQYLPATELGGFLGSHAHTHPTAVSPGALLLPGLCTDSALGQHEIVDDMSSSKLGLGVGGQFNFNVAADPPSDAVSAVIKDDEKARLGFLHHYGLGATAGADVSAAVLPCTPPTGNAAASSAFTDQLQGLLDAGLLAGGGAPTPMATVVTVAAGRPGAPVQCYSVPAMVRMDVKALFGPAAVMLGQTGEAIPVDGAGVTAEPLQNGACYYVLM

SEQ ID NO: 66495 - DNA, 1294 bp, Triticum aestivum
  misc_feature (1)..(1294): Ceres Seq. ID no. 15225240
cccgtctccgactgcgccgccgccccctcccccagcctcgcttcgctcccgcggggatggaaaaccgcgatggttcctcactgccagactttcttgagctccagcgcacccgtgttctctgcaaggccgatgcccccactcatacagaagggtttcaatactcgggtgcttttgctgctatgggagttgacactagtgtttcagttgagaagttctgcaagaactttaaaatcgagataaatcgacttacagatgaggatatggagtttgatatgattggcgttgatgcatcgatagctaatgctttccggagaatcctcattgcagaggttcctacaatggccattgagaaagtcttcatggttgacaatacctcagttatagcagatgaggtcctttcacaccgactaggccttattccacttgatgctgatccaaggctttttgattatatctctgatgatgtcccaaatgaaaggaacactattgtgtacaaactgcatgtttcatgtgaaaagggttcccaaaggcttacagttaagtctggtcaattggagtggttgccagaaggcagtcaattaactatggcatctcctgcgcaatctggggacaatcagaggacctacacatcctttggtcaaagccaacagaatacctctgaaaggcctctcggtgtgaagtataatgacataacaattgccaggcttgggccaggacaggctattgagcttgaggcacatgctgttaagggagtggggaaagttcatgcgaagtggtctccagttgctacagcctggtacaggatgctccccgaggttgttcttctcaaagaaattaaaaatggtgatgcagaggagctagtgaaaagatgcccagttaatgtttttgacattgaagacctgggaaagggggagaagagagcagttgttgcaaagccaagatcatgcaccctttgtagggaatgtgtcagactggctgacgatcaagtagagctacggcgtgttagagaccacttcatttttacaatcgagtccaccggagctcttccgccagaggtgctcttcacagaggccgtgaagatccttgaggagaagtgcgagcgagtgatatccgaactttcctgagcctgatataaagttttcagtactgttctgatgtagtttttctattgctatgttgtgtcgaggacgaaagcttagtgtactaatataggttactgtgaaacttctgtatccaatattctggagtcacattcagctaatttattactgagctggtatatgcagcagtcctg

SEQ ID NO: 66496 - protein, 373 aa, Triticum aestivum
  peptide (1)..(373): Ceres Seq. ID no. 15225241
RLRLRRRPLPQPRFAPAGMENRDGSSLPDFLELQRTRVLCKADAPTHTEGFQYSGAFAAMGVDTSVSVEKFCKNFKIEINRLTDEDMEFDMIGVDASIANAFRRILIAEVPTMAIEKVFMVDNTSVIADEVLSHRLGLIPLDADPRLFDYISDDVPNERNTIVYKLHVSCEKGSQRLTVKSGQLEWLPEGSQLTMASPAQSGDNQRTYTSFGQSQQNTSERPLGVKYNDITIARLGPGQAIELEAHAVKGVGKVHAKWSPVATAWYRMLPEVVLLKEIKNGDAEELVKRCPVNVFDIEDLGKGEKRAVVAKPRSCTLCRECVRLADDQVELRRVRDHFIFTIESTGALPPEVLFTEAVKILEEKCERVISELS

SEQ ID NO: 66497 - protein, 355 aa, Triticum aestivum
  peptide (1)..(355): Ceres Seq. ID no. 15225242
MENRDGSSLPDFLELQRTRVLCKADAPTHTEGFQYSGAFAAMGVDTSVSVEKFCKNFKIEINRLTDEDMEFDMIGVDASIANAFRRILIAEVPTMAIEKVFMVDNTSVIADEVLSHRLGLIPLDADPRLFDYISDDVPNERNTIVYKLHVSCEKGSQRLTVKSGQLEWLPEGSQLTMASPAQSGDNQRTYTSFGQSQQNTSERPLGVKYNDITIARLGPGQAIELEAHAVKGVGKVHAKWSPVATAWYRMLPEVVLLKEIKNGDAEELVKRCPVNVFDIEDLGKGEKRAVVAKPRSCTLCRECVRLADDQVELRRVRDHFIFTIESTGALPPEVLFTEAVKILEEKCERVISELS

SEQ ID NO: 66498 - protein, 314 aa, Triticum aestivum
  peptide (1)..(314): Ceres Seq. ID no. 15225243
MGVDTSVSVEKFCKNFKIEINRLTDEDMEFDMIGVDASIANAFRRILIAEVPTMAIEKVFMVDNTSVIADEVLSHRLGLIPLDADPRLFDYISDDVPNERNTIVYKLHVSCEKGSQRLTVKSGQLEWLPEGSQLTMASPAQSGDNQRTYTSFGQSQQNTSERPLGVKYNDITIARLGPGQAIELEAHAVKGVGKVHAKWSPVATAWYRMLPEVVLLKEIKNGDAEELVKRCPVNVFDIEDLGKGEKRAVVAKPRSCTLCRECVRLADDQVELRRVRDHFIFTIESTGALPPEVLFTEAVKILEEKCERVISELS

SEQ ID NO: 66499 - DNA, 1423 bp, Triticum aestivum
  misc_feature (1)..(1423): Ceres Seq. ID no. 13658993
agtacgagtcctactaaaactcttgtcatgtcctgggcaataaataggccgatcaaccaccgcccaccgcaccagaagcaaacaccgccggcctgccatggcgcgactgccggacaagattccggcgagccaattcaacgccgccctatccttcatacaacatatcaaagccggcctcgcgtccagccagaccatccacgcagagctcctccacctcctcgcgtgcttgggcaggggcgagaccgccgacacccacgccgtcctggccagggcggacgccatcctccggggccatcccgacctcctccagcgcttcgacgcctttctcggccgtcccagccaccaccaagctgccaaacccgtccgtgaagaccctgtcgccgccgcgccgccgccgaagcggcccaagagggagcaccgccgcacggtcgccgagtgcgccgggcccatgcggttcttggagcgggtgaagatggcggacgccggactctacgacatgctcctggtgcttctgttcaacgtggagatggaggggacgctgaacgcgcatcaaatctacgcgaaggccctcgaggttttcggctccgccgacagccctctcctccgcggcttcacggagttcctgccgctgccgacggccgggcgtgactttctgacgcggcgccgcgcaaaggaggagccggagcacggaccgaagcgcaaggccgtccccgccggcaagccgagcccgagcgcggcaaagaaaccccgcgccgaccacgaccggaagacgaagagcggcagtgtctccgcgtttagggacgcgtgggagttcgagaccacctactcgaagctggcggtcacgctaagacgcaccgagaaatccctggaagagctcgagccaaggaaggagtcgccggaagaagtcgagccggaggcggcgccgggacaccatgggcggccgcgcacgctggagcaactctaccctggccgcgagtgccaggaggtcctccaggagatgtatggcggcatgtgggggcagatgcgggtggcgctcgaggacggcgcgcgcaccgaggtggcgctgcggacgatattgcgcaggctgacgaagctggagcaggtggccgtgaagatggcgatggggcggcgcgatcccgcccgcgtcgaggcccgagtgaagctgcttgtcttagagcggcgggatggcgcccacgccgatggcgggatgaacaagcttaatgtagagttgtagcctgaccgtgtggtggttcttcgaaaggagcggcggcacgtacattgtcgcggtgacccggccgtgcgtgccaccggccggcatgtcgtgaagttgaagaccaagattatcgttgctttgagacgttaatttactttagctttttttcagtttggtcagtccatttcttggccgtcgatttttgctccg

SEQ ID NO: 66500 - protein, 378 aa, Triticum aestivum
  peptide (1)..(378): Ceres Seq. ID no. 13658994
MARLPDKIPASQFNAALSFIQHIKAGLASSQTIHAELLHLLACLGRGETADTHAVLARADAILRGHPDLLQRFDAFLGRPSHHQAAKPVREDPVAAAPPPKRPKREHRRTVAECAGPMRFLERVKMADAGLYDMLLVLLFNVEMEGTLNAHQIYAKALEVFGSADSPLLRGFTEFLPLPTAGRDFLTRRRAKEEPEHGPKRKAVPAGKPSPSAAKKPRADHDRKTKSGSVSAFRDAWEFETTYSKLAVTLRRTEKSLEELEPRKESPEEVEPEAAPGHHGRPRTLEQLYPGRECQEVLQEMYGGMWGQMRVALEDGARTEVALRTILRRLTKLEQVAVKMAMGRRDPARVEARVKLLVLERRDGAHADGGMNKLNVEL

SEQ ID NO: 66501 - protein, 261 aa, Triticum aestivum
  peptide (1)..(261): Ceres Seq. ID no. 13658995
MRFLERVKMADAGLYDMLLVLLFNVEMEGTLNAHQIYAKALEVFGSADSPLLRGFTEFLPLPTAGRDFLTRRRAKEEPEHGPKRKAVPAGKPSPSAAKKPRADHDRKTKSGSVSAFRDAWEFETTYSKLAVTLRRTEKSLEELEPRKESPEEVEPEAAPGHHGRPRTLEQLYPGRECQEVLQEMYGGMWGQMRVALEDGARTEVALRTILRRLTKLEQVAVKMAMGRRDPARVEARVKLLVLERRDGAHADGGMNKLNVEL

SEQ ID NO: 66502 - protein, 253 aa, Triticum aestivum
  peptide (1)..(253): Ceres Seq. ID no. 13658996
MADAGLYDMLLVLLFNVEMEGTLNAHQIYAKALEVFGSADSPLLRGFTEFLPLPTAGRDFLTRRRAKEEPEHGPKRKAVPAGKPSPSAAKKPRADHDRKTKSGSVSAFRDAWEFETTYSKLAVTLRRTEKSLEELEPRKESPEEVEPEAAPGHHGRPRTLEQLYPGRECQEVLQEMYGGMWGQMRVALEDGARTEVALRTILRRLTKLEQVAVKMAMGRRDPARVEARVKLLVLERRDGAHADGGMNKLNVEL

SEQ ID NO: 66503 - DNA, 1725 bp, Triticum aestivum
  misc_feature (1)..(1725): Ceres Seq. ID no. 14307944
atcactatcgtgtaacttcgtacgttgccgactactttcaatggcggcctttgcaaagatcgccatggagtgcctgcacgatcccctcatctggctacttcttgcgtcggtggccttggtcatcctgcaaagacggcggctgaaactgaacccgccgccgctccctccaggccccaagccgctaccgatcatcggcaacctgatgatggcggaccagctgacccaccgtggcctggcggcgctggccaagcagtacggcgggttgctgcacctccgcctgggctcgctccgcgtcttcgcggtgtccaccccggagtacgcgcgcgaggtgctccaggcgcaggacagcgacttctggtaccgcccagcctccatcgccgtccgctacctcacctacggctgctccgacatggcgttcgcgcgcgacgggccctactggcgccagatgcgcaagctgtgcgtcaccaagctcttcagccgccggcgcgccgagacctggctggccgtgcgcgacgggtacggggagctcgcccgggccgtcggcaggtccagcggcgaggccgtgaacctcggcgagctcatcttcaagcacaccgttagcatcatcttccgggccgccttcggcgtgcgcgacgtccaaggactggacgagttcatccccatgttcaaggagttctccaagctcttagaggcgttccacgtcggtgacttcttcccttggctaagctggatgggccggcggggcttcgaccggcgccttcgcaccgtgcgcggcgctctaggaacgtttgtggacaagatcattgacgagcacgtgaggaggggcaagaaccccgacgacgccgacgctgacatggtagacggcctactcgcgctcctcgctgatgccaaccaagccagcggggaggacgacctccgcttcacccgcgacaacgttagggccatgatgatggacatgttgtttggcgggccggacacggtggggttcaccattgagtgggcgatggcagagatgatgcattgccctgacatccttctgcggctgcagcaggagctcgtcgacattgtggggcttgatcggactgttgacgaatcggaccttggcaagctccccttcctcaagtgtgtcatcaaggagacgctccgaatgcacccaccgatcccgattcacctccacgggaacaccaaagattgcgtcctcggtggctactccgtgcccaggggctcccgtgtctttatcaacgcgtgggcgatcaaccgcgacggcgaggcgtggaaggaccctaacgcgttccggccatcgaggttcatgccagatggggaagccaccgggctggatctcaagggcggctgctacgagctattgtcgttcggttcgggggggcgctcgtgcccagcacaggggcttggccagcacgccgtggagtttgccatcgcgcagcttgtgcatgggttcaactggaagctacccggtgacatgaaaccaacggagctcgacatgagcgacatgaacggtgtcactgtgtcccgcgccacacgactctatgcagttcccacaccccggctcaattgtcctttgtaatattaattagaacatcgagctctttgttgtgacgtattgtaggtggaactacttgccataagattgcgtgtcaggctttagatacaaacacgtggtacacaactacacaccatggaatatggagtgtgcaaccgccttcctcc

SEQ ID NO: 66504 - protein, 526 aa, Triticum aestivum
  peptide (1)..(526): Ceres Seq. ID no. 14307945
SLSCNFVRCRLLSMAAFAKIAMECLHDPLIWLLLASVALVILQRRRLKLNPPPLPPGPKPLPIIGNLMMADQLTHRGLAALAKQYGGLLHLRLGSLRVFAVSTPEYAREVLQAQDSDFWYRPASIAVRYLTYGCSDMAFARDGPYWRQMRKLCVTKLFSRRRAETWLAVRDGYGELARAVGRSSGEAVNLGELIFKHTVSIIFRAAFGVRDVQGLDEFIPMFKEFSKLLEAFHVGDFFPWLSWMGRRGFDRRLRTVRGALGTFVDKIIDEHVRRGKNPDDADADMVDGLLALLADANQASGEDDLRFTRDNVRAMMMDMLFGGPDTVGFTIEWAMAEMMHCPDILLRLQQELVDIVGLDRTVDESDLGKLPFLKCVIKETLRMHPPIPIHLHGNTKDCVLGGYSVPRGSRVFINAWAINRDGEAWKDPNAFRPSRFMPDGEATGLDLKGGCYELLSFGSGGRSCPAQGLGQHAVEFAIAQLVHGFNWKLPGDMKPTELDMSDMNGVTVSRATRLYAVPTPRLNCPL

SEQ ID NO: 66505 - protein, 513 aa, Triticum aestivum
  peptide (1)..(513): Ceres Seq. ID no. 14307946
MAAFAKIAMECLHDPLIWLLLASVALVILQRRRLKLNPPPLPPGPKPLPIIGNLMMADQLTHRGLAALAKQYGGLLHLRLGSLRVFAVSTPEYAREVLQAQDSDFWYRPASIAVRYLTYGCSDMAFARDGPYWRQMRKLCVTKLFSRRRAETWLAVRDGYGELARAVGRSSGEAVNLGELIFKHTVSIIFRAAFGVRDVQGLDEFIPMFKEFSKLLEAFHVGDFFPWLSWMGRRGFDRRLRTVRGALGTFVDKIIDEHVRRGKNPDDADADMVDGLLALLADANQASGEDDLRFTRDNVRAMMMDMLFGGPDTVGFTIEWAMAEMMHCPDILLRLQQELVDIVGLDRTVDESDLGKLPFLKCVIKETLRMHPPIPIHLHGNTKDCVLGGYSVPRGSRVFINAWAINRDGEAWKDPNAFRPSRFMPDGEATGLDLKGGCYELLSFGSGGRSCPAQGLGQHAVEFAIAQLVHGFNWKLPGDMKPTELDMSDMNGVTVSRATRLYAVPTPRLNCPL

SEQ ID NO: 66506 - protein, 505 aa, Triticum aestivum
  peptide (1)..(505): Ceres Seq. ID no. 14307947
MECLHDPLIWLLLASVALVILQRRRLKLNPPPLPPGPKPLPIIGNLMMADQLTHRGLAALAKQYGGLLHLRLGSLRVFAVSTPEYAREVLQAQDSDFWYRPASIAVRYLTYGCSDMAFARDGPYWRQMRKLCVTKLFSRRRAETWLAVRDGYGELARAVGRSSGEAVNLGELIFKHTVSIIFRAAFGVRDVQGLDEFIPMFKEFSKLLEAFHVGDFFPWLSWMGRRGFDRRLRTVRGALGTFVDKIIDEHVRRGKNPDDADADMVDGLLALLADANQASGEDDLRFTRDNVRAMMMDMLFGGPDTVGFTIEWAMAEMMHCPDILLRLQQELVDIVGLDRTVDESDLGKLPFLKCVIKETLRMHPPIPIHLHGNTKDCVLGGYSVPRGSRVFINAWAINRDGEAWKDPNAFRPSRFMPDGEATGLDLKGGCYELLSFGSGGRSCPAQGLGQHAVEFAIAQLVHGFNWKLPGDMKPTELDMSDMNGVTVSRATRLYAVPTPRLNCPL

SEQ ID NO: 66507 - DNA, 1620 bp, Triticum aestivum
  misc_feature (1)..(1620): Ceres Seq. ID no. 14302212
agaacatcctagtcgaaaactcatctcaccagaccgcaccaccccgcctccctcctcgtgccctccgccgccgccgcagcctctgcctcggcctcgaggcctccgcccgccacctccgcgcggccagggctcgagaggcgaccccggtctgcccgcccccgcttccggaacaccccgcccccgccgcaatgcagagcgcggcggccatcgggctcctccggccatgcgccgcgcggcccatcctcaagagccctagccccggggccgcccgcctcccggcctcccgcacggccctccgcctctccgccgccgcgccccgcgcgggcctcgtggcggcggcggggctcggccgcatcgggctcgtgccggcgtcgcctgagcaggagaagaggagcgactgcctcgtggccgccgcggccgcggggaaggcgtcggcgggcgaggaggccgtggaggaaagcggagcagcgctcgccaagacgctccagctcggcgtcttcttcgggctctggtacctcttcaacatctacttcaacatctacaacaagcaggtcctcaaggtttttccttatcccataaacatcacaacagttcagtttgctgttggaactacgatttccttgtttatgtgggccacgggtatccttaaaagaccaaagatttccggtgcacagcttcttgctatcctccctttggctattgtccataccatgggcaatcttttcaccaacatgagccttgggaaggttgcagtgtcatttacacatacaatcaaggccatggagcctttcttctcagttctactttctgcaatgttccttggcgagctgcctactccttgggttgttttgtctcttcttcctattgttggtggtgtggcattggcatctatttctgaagcttcttttaactgggctggatttttgagtgcaatggcttcaaatgtgaccttccagtcaaggaatgtcctcagcaagaagcttatgctgaagaaagaggcatctctggacaacatcaatctcttctcgattattacagtcatgtcattcttccttctagctcctgtaaccttgttgaccgaaggtgttaaggtcactcctacttatctgcagtctgctggtctgaacttacaacaagtgtacacaaggtctttgattgccgcattctgtttccatgcataccaacaggtgtcatacatgatcctcgcaagggtgtcaccagttacccattcggtaggtaactgcgtcaagcgtgtggtggtcattgttacatctgttctgttcttcaagactcctgtgtctccaatcaactctatcggaaccgcgatcgctcttgcgggagttttcctgtactcacaactgaagagacttcagcccaagcccaaggctgcttgattgcattctgttcgtcaggatcaatagagcgttgccactcttggaatcggtgctttagtttagccggacatattgggaagccttgttgagtaactagtaccgtgcaggatcatttgtaattcagtaatgagcattttgaccaggaaagttttgaaatctctttcaccgttctctacttggacgttctagttgccactttaataaaacctccgcagtttgattgtgc

SEQ ID NO: 66508 - protein, 463 aa, Triticum aestivum
  peptide (1)..(463): Ceres Seq. ID no. 14302213
NILVENSSHQTAPPRLPPRALRRRRSLCLGLEASARHLRAARAREATPVCPPPLPEHPAPAAMQSAAAIGLLRPCAARPILKSPSPGAARLPASRTALRLSAAAPRAGLVAAAGLGRIGLVPASPEQEKRSDCLVAAAAAGKASAGEEAVEESGAALAKTLQLGVFFGLWYLFNIYFNIYNKQVLKVFPYPINITTVQFAVGTTISLFMWATGILKRPKISGAQLLAILPLAIVHTMGNLFTNMSLGKVAVSFTHTIKAMEPFFSVLLSAMFLGELPTPWVVLSLLPIVGGVALASISEASFNWAGFLSAMASNVTFQSRNVLSKKLMLKKEASLDNINLFSIITVMSFFLLAPVTLLTEGVKVTPTYLQSAGLNLQQVYTRSLIAAFCFHAYQQVSYMILARVSPVTHSVGNCVKRVVVIVTSVLFFKTPVSPINSIGTAIALAGVFLYSQLKRLQPKPKAA

SEQ ID NO: 66509 - protein, 401 aa, Triticum aestivum
  peptide (1)..(401): Ceres Seq. ID no. 14302214
MQSAAAIGLLRPCAARPILKSPSPGAARLPASRTALRLSAAAPRAGLVAAAGLGRIGLVPASPEQEKRSDCLVAAAAAGKASAGEEAVEESGAALAKTLQLGVFFGLWYLFNIYFNIYNKQVLKVFPYPINITTVQFAVGTTISLFMWATGILKRPKISGAQLLAILPLAIVHTMGNLFTNMSLGKVAVSFTHTIKAMEPFFSVLLSAMFLGELPTPWVVLSLLPIVGGVALASISEASFNWAGFLSAMASNVTFQSRNVLSKKLMLKKEASLDNINLFSIITVMSFFLLAPVTLLTEGVKVTPTYLQSAGLNLQQVYTRSLIAAFCFHAYQQVSYMILARVSPVTHSVGNCVKRVVVIVTSVLFFKTPVSPINSIGTAIALAGVFLYSQLKRLQPKPKAA

SEQ ID NO: 66510 - protein, 255 aa, Triticum aestivum
  peptide (1)..(255): Ceres Seq. ID no. 14302215
MWATGILKRPKISGAQLLAILPLAIVHTMGNLFTNMSLGKVAVSFTHTIKAMEPFFSVLLSAMFLGELPTPWVVLSLLPIVGGVALASISEASFNWAGFLSAMASNVTFQSRNVLSKKLMLKKEASLDNINLFSIITVMSFFLLAPVTLLTEGVKVTPTYLQSAGLNLQQVYTRSLIAAFCFHAYQQVSYMILARVSPVTHSVGNCVKRVVVIVTSVLFFKTPVSPINSIGTAIALAGVFLYSQLKRLQPKPKAA

SEQ ID NO: 66511 - DNA, 2475 bp, Triticum aestivum
  misc_feature (1)..(2475): Ceres Seq. ID no. 13658778
atctccttgagcggtttggcactctgactcgatcttgtctcttggactagcttgccgccggcggcacaagattcgccttttcttcttcttcttgttccgcgctctgctgtccatcgcgcaaggggaataatggcgacgaagccttcgcaggacgcgccgctcccgctccacaccgtgcaaacggaccagcccctcgccaccgtcaaccggctcctcgccgccgtccacctggcgctcggcgcggcagccatcgcccaccgcggcgcccacgtgatgctggcggccgacctggtcctcctcttcctgtgggcgctgtcgcaggcgcccatgtggcgccccgtgtcccgcaccgccttcccgtcccggctctcgcgcgccgccctcccggccgtggacgtgatggtggtgacggccgacccggagaaggagcccgcggcgaaggtgatgaacacggtggtctccgccatggcgctcgactacccgggcgggcggctgagcgtgtacctctccgacgacgccgggtcaccgcggacgctgctcgccgccaggaaggcctacgccttcgccagggcctgggtgcccttctgcaggaagtacggcgtgcggtgcccgtgccccgacaggttcttcgccggcgatgacaagctcgacctcggtagtcaccaccaccacgagctcgccgacgacaggctaagaatcaagaatatgtacgagacgttcaatgagggtgtccgggaggtgatgagcgacgcagatctttctcagagktgcacaaaagcagatcacgatgctcacgtcgagatcatcaccggcgatgagcaagacagcagcaacagcaactccggcgacggcgaggaggatgaggacgccatgcccttgctggtctacgtgtctcgcgagaagcggaggtcgtcgactcaccacttcaaagccggcgcactcaacgtccttctccgtgtgtcgagcctgttgagcaactcgccgtacgtgatggtgctggactgcgacatgtactgcaacagccggagctccatcctcgaggccatgtgcttccacctcgacggccgccgccgcgccgatctcgccttcgtgcagttccctcagatgttccacaacctcagcagcagcgacatctacgccaacgagctcagatccatcttctggacgcggtggaaaggcttggatggcctccggggcccgatcctctccggcaccggcttctgcgccaggagagacgccatctacggcgcccggccggccagctcgcaagatcagttctccggtgtggaggtcggcgagcttaagagaaggtttggcgtctcgaatggtcacatagcgtcgctgcgccgatccgggaccgggagcaccattgttgcacgtgatgctctcccacaggaggatgcagagttggtggcgtcctgcgcttacgagacgggcaccgaatggggcgagcaggtcggcttcttgtaccagtcggtggtggaggactacttcacgggctaccggcagctctactgccgagggtggacgtccgtctactgcttcccggcggcggcgtcgaggccgccgttcctcggcagcgtgcccaccaacctcaacgacgcgctggtgcagaacaagcggtggatgtccggcatgctcgccgtcggcctgtccaggcactgccccctcgcctccgccgccatctgcgtgcctcagagcatgggcttcgcctactacgccttcatggccctgtacgccttccccgtgctctgctacgccaccgtgccgcagctctgcttcctccgcggcggcacgtcgttcccaggggcggcttcgacgctctggttcgccgccgtgttcgcgtcgtcgtcgctgcagcacctggtggaggtgtcggtggccaagcgtgggctggcgttgaggacgtggtggaacgagcagaggttctgggcgctcaacgccgtcacgggccagctcttcgcctgcctcggcgtcgccctcaacctggtcggcgccggcggccgggcggtggacttcgacctcaccagcaaggcgtccgacgacaggctctaccgggatggcgtgttcgacttcgccggatgcaccacgctgctcctgccggccaccacgctctgcctgctcaacgccgcggcgctcgtcggcggggtctggaagatggtcggcaggggcggcagcgtgtccggcgagctgttcctcctctgctacgtcgcggcgctgagctatccgctgctgcaagggatgttcctcaggcgggatcccgcaagagttcctgcgccgatcacggcgatgtccgtcgccatggttgccgctctgctgtccttgtttggttaaggcggccactttcattccagagagtttgagtgacacctaagataccttgatactcctaccagtttggtttgattcatccaagcttccaaataccgtgcatatatgagcagaaaagacaagaataaaacggcattttttttt

SEQ ID NO: 66512 - protein, 734 aa, Triticum aestivum
  peptide (1)..(734): Ceres Seq. ID no. 15219919
  misc_feature (213)..(213): Xaa is any aa, unknown or other
MATKPSQDAPLPLHTVQTDQPLATVNRLLAAVHLALGAAAIAHRGAHVMLAADLVLLFLWALSQAPMWRPVSRTAFPSRLSRAALPAVDVMVVTADPEKEPAAKVMNTVVSAMALDYPGGRLSVYLSDDAGSPRTLLAARKAYAFARAWVPFCRKYGVRCPCPDRFFAGDDKLDLGSHHHHELADDRLRIKNMYETFNEGVREVMSDADLSQXCTKADHDAHVEIITGDEQDSSNSNSGDGEEDEDAMPLLVYVSREKRRSSTHHFKAGALNVLLRVSSLLSNSPYVMVLDCDMYCNSRSSILEAMCFHLDGRRRADLAFVQFPQMFHNLSSSDIYANELRSIFWTRWKGLDGLRGPILSGTGFCARRDAIYGARPASSQDQFSGVEVGELKRRFGVSNGHIASLRRSGTGSTIVARDALPQEDAELVASCAYETGTEWGEQVGFLYQSVVEDYFTGYRQLYCRGWTSVYCFPAAASRPPFLGSVPTNLNDALVQNKRWMSGMLAVGLSRHCPLASAAICVPQSMGFAYYAFMALYAFPVLCYATVPQLCFLRGGTSFPGAASTLWFAAVFASSSLQHLVEVSVAKRGLALRTWWNEQRFWALNAVTGQLFACLGVALNLVGAGGRAVDFDLTSKASDDRLYRDGVFDFAGCTTLLLPATTLCLLNAAALVGGVWKMVGRGGSVSGELFLLCYVAALSYPLLQGMFLRRDPARVPAPITAMSVAMVAALLSLFG

SEQ ID NO: 66513 - protein, 686 aa, Triticum aestivum
  peptide (1)..(686): Ceres Seq. ID no. 15219920
  misc_feature (165)..(165): Xaa is any aa, unknown or other
MLAADLVLLFLWALSQAPMWRPVSRTAFPSRLSRAALPAVDVMVVTADPEKEPAAKVMNTVVSAMALDYPGGRLSVYLSDDAGSPRTLLAARKAYAFARAWVPFCRKYGVRCPCPDRFFAGDDKLDLGSHHHHELADDRLRIKNMYETFNEGVREVMSDADLSQXCTKADHDAHVEIITGDEQDSSNSNSGDGEEDEDAMPLLVYVSREKRRSSTHHFKAGALNVLLRVSSLLSNSPYVMVLDCDMYCNSRSSILEAMCFHLDGRRRADLAFVQFPQMFHNLSSSDIYANELRSIFWTRWKGLDGLRGPILSGTGFCARRDAIYGARPASSQDQFSGVEVGELKRRFGVSNGHIASLRRSGTGSTIVARDALPQEDAELVASCAYETGTEWGEQVGFLYQSVVEDYFTGYRQLYCRGWTSVYCFPAAASRPPFLGSVPTNLNDALVQNKRWMSGMLAVGLSRHCPLASAAICVPQSMGFAYYAFMALYAFPVLCYATVPQLCFLRGGTSFPGAASTLWFAAVFASSSLQHLVEVSVAKRGLALRTWWNEQRFWALNAVTGQLFACLGVALNLVGAGGRAVDFDLTSKASDDRLYRDGVFDFAGCTTLLLPATTLCLLNAAALVGGVWKMVGRGGSVSGELFLLCYVAALSYPLLQGMFLRRDPARVPAPITAMSVAMVAALLSLFG

SEQ ID NO: 66514 - protein, 668 aa, Triticum aestivum
  peptide (1)..(668): Ceres Seq. ID no. 15219921
  misc_feature (147)..(147): Xaa is any aa, unknown or other
MWRPVSRTAFPSRLSRAALPAVDVMVVTADPEKEPAAKVMNTVVSAMALDYPGGRLSVYLSDDAGSPRTLLAARKAYAFARAWVPFCRKYGVRCPCPDRFFAGDDKLDLGSHHHHELADDRLRIKNMYETFNEGVREVMSDADLSQXCTKADHDAHVEIITGDEQDSSNSNSGDGEEDEDAMPLLVYVSREKRRSSTHHFKAGALNVLLRVSSLLSNSPYVMVLDCDMYCNSRSSILEAMCFHLDGRRRADLAFVQFPQMFHNLSSSDIYANELRSIFWTRWKGLDGLRGPILSGTGFCARRDAIYGARPASSQDQFSGVEVGELKRRFGVSNGHIASLRRSGTGSTIVARDALPQEDAELVASCAYETGTEWGEQVGFLYQSVVEDYFTGYRQLYCRGWTSVYCFPAAASRPPFLGSVPTNLNDALVQNKRWMSGMLAVGLSRHCPLASAAICVPQSMGFAYYAFMALYAFPVLCYATVPQLCFLRGGTSFPGAASTLWFAAVFASSSLQHLVEVSVAKRGLALRTWWNEQRFWALNAVTGQLFACLGVALNLVGAGGRAVDFDLTSKASDDRLYRDGVFDFAGCTTLLLPATTLCLLNAAALVGGVWKMVGRGGSVSGELFLLCYVAALSYPLLQGMFLRRDPARVPAPITAMSVAMVAALLSLFG

SEQ ID NO: 66515 - DNA, 1384 bp, Triticum aestivum
  misc_feature (1)..(1384): Ceres Seq. ID no. 13658295
agaacatcctawtcgammmacacccgaccaactctcgctcactcgccggagggaaacagagcaaagatgaccacggcggcggcggcgacgacgatgcgtctgtcttccccgttcaaggccccgcctctccgtcctccctgccaccgcgtcgtcccgtcgaggcggggccccgggcgggccgggctggccgtctcggcggccgccggcgggtcgccccccaccgtgctcgtcaccggcgccggaggacgaacaggccaaattgtgtacaagaagctgaaggagaaggcagaccagtttgtggccagagggctggtcaggacgccggacagcaaatctaagatcgatgggggcgacgacgtgttcatcggagacattagggatcctgggagcattgcgccggcgatcgacggcattgacgcgctcatcatcctcaccagtggggtcccgaagatgaagccagggtttgatcctagcaaagggggtcggcccgagttttacttcgaggaagggtctgatcctgagcaggtggattggataggccaaaagaaccaaatcgacgctgccaagagcattggtgtaaagcagatagttttggttggatccatgggtggaacagatctcaaccatccattaaacaagcttgggaatgggaatatactggtgtggaaacggaaggcagaacagtacctagcggactctggtgtaccatatacaattataagggctggaggactacaagacaaagatggtggtgtgcgtgagttgattgttggaaaggatgacgagatcttgaagacggaaacaaaaactattgccagggcagatgttgcagaagtttgcatacaggccttgctatttgaggaagcaaagttcaaggcatttgatctggcttcaaaacctgaaggtgaaggaacaccgacgacagattttaagtctgtttttgcacaaattgctactcgcttctaagaagacaagatcattctggccaatgaaatggggacagttttttaattaggcgatatggaatttgtaccgggtcaggaggctcctcatctgatcaagtagcaaaagtagggaagcatgcaccttgttattgagcagaagaagcagcagatcgttgtgctttgagagaagagttctgaggatttgggctatgaaagaagagtagtgagactggtgttgatgtaaactatttttttttcttcttgttgctttgttcccaacgtcggacatggtaattgtgacagagaatgagtctagattaccgcagttattgcggcgattagttctaggctagacgtataaaaaattgtttattaggaacgcttgcctgggtttcaacattaatacggttcctaattgaattgataaaaaaatctgaggt

SEQ ID NO: 66516 - protein, 321 aa, Triticum aestivum
  peptide (1)..(321): Ceres Seq. ID no. 15219896
  misc_feature (4)..(4): Xaa is any aa, unknown or other
  misc_feature (6)..(6): Xaa is any aa, unknown or other
  misc_feature (7)..(7): Xaa is any aa, unknown or other
RTSXSXXTRPTLAHSPEGNRAKMTTAAAATTMRLSSPFKAPPLRPPCHRVVPSRRGPGRAGLAVSAAAGGSPPTVLVTGAGGRTGQIVYKKLKEKADQFVARGLVRTPDSKSKIDGGDDVFIGDIRDPGSIAPAIDGIDALIILTSGVPKMKPGFDPSKGGRPEFYFEEGSDPEQVDWIGQKNQIDAAKSIGVKQIVLVGSMGGTDLNHPLNKLGNGNILVWKRKAEQYLADSGVPYTIIRAGGLQDKDGGVRELIVGKDDEILKTETKTIARADVAEVCIQALLFEEAKFKAFDLASKPEGEGTPTTDFKSVFAQIATRF

SEQ ID NO: 66517 - protein, 299 aa, Triticum aestivum
  peptide (1)..(299): Ceres Seq. ID no. 15219897
MTTAAAATTMRLSSPFKAPPLRPPCHRVVPSRRGPGRAGLAVSAAAGGSPPTVLVTGAGGRTGQIVYKKLKEKADQFVARGLVRTPDSKSKIDGGDDVFIGDIRDPGSIAPAIDGIDALIILTSGVPKMKPGFDPSKGGRPEFYFEEGSDPEQVDWIGQKNQIDAAKSIGVKQIVLVGSMGGTDLNHPLNKLGNGNILVWKRKAEQYLADSGVPYTIIRAGGLQDKDGGVRELIVGKDDEILKTETKTIARADVAEVCIQALLFEEAKFKAFDLASKPEGEGTPTTDFKSVFAQIATRF

SEQ ID NO: 66518 - protein, 290 aa, Triticum aestivum
  peptide (1)..(290): Ceres Seq. ID no. 15219898
MRLSSPFKAPPLRPPCHRVVPSRRGPGRAGLAVSAAAGGSPPTVLVTGAGGRTGQIVYKKLKEKADQFVARGLVRTPDSKSKIDGGDDVFIGDIRDPGSIAPAIDGIDALIILTSGVPKMKPGFDPSKGGRPEFYFEEGSDPEQVDWIGQKNQIDAAKSIGVKQIVLVGSMGGTDLNHPLNKLGNGNILVWKRKAEQYLADSGVPYTIIRAGGLQDKDGGVRELIVGKDDEILKTETKTIARADVAEVCIQALLFEEAKFKAFDLASKPEGEGTPTTDFKSVFAQIATRF

SEQ ID NO: 66519 - DNA, 2001 bp, Triticum aestivum
  misc_feature (1)..(2001): Ceres Seq. ID no. 14301550
accgacaggattcgccgccgcgccaccccggagctcccgcccaggctcgccgcctcatcgtccgtcatccgccttgtggccgcgggagcacagacctcgccaaaacatccatccggggtcccggctgccggccaggtcgatcgcctcccctctcctccgaaatcgttccccaccaaaacatctctcgtcgccgccacgctccacgtccaggcaggatgcgctgcctccgccgcgcgggcgcggccgcccacctgctccgctccgcgacgaccggccccgccaagcacgctcgcacggccctcgagcagatgcctccgccgcctgccgccttcccatgtcgcgcgcgcgcccaccacctgctcggaggaatgcgcggccagtggctctgcacggcgacggggtccaccggcgcccccgacctcgccgtggaccagcacttcaccgtggtgcctggcctaggccccgatgtctccgaggtggcggggctcaccggcgcccacgatcttgccgtggaccaggacttcacagtggtgcctggcccaggcctcgatgtctccaaggaggcggagagggtctgccgcgtgctgtccaccgtgccggagccgagggttgcatcagccctcgacgcgctcggggcctctgtgtcgcctcagctcgtggcggaggtgctcaagaacctgagcaacgctggcatcctcgccctcgccttcttccggtgggcggagaggcagcaaggcttcgtgtacacggcggagagcttccacaacctcatcgaagcgctcggcaagatcaagcagttcaggctggtctggagcctggtggaggccatgcggtgccgcggcttgctttccaaggacacgttcaggctcatcgtcaggaggtacgccagggcaaggaaggtcaaggaagctgtcgagacgtttgagaagatggccggcttcgggctcaaagcagacttatcagattacaattggttgatcgacgtgctgagcaaatccaagcaagtcaagaaggcgcaagccatcttcaaggagatgaagaggaacggaaagtttgttcccgatttgaagacctacactgtcctcatggaaggctggggccatgagaaggacttgctgatgcttaagtcggtgtaccaagaaatgctcgatgcaggcctgaagcctgatgtcgtggcatacgggatgctcattagttccttttgcaagtctggcaaatgtgatgaggccatcaaggtgttctgtgagatggaagccaatggttgcatgccaagccctcatgtgtattgcatgcttatcaatgggcttggctcagaggagaggctggatgaggctttgaagtattttgagctttctaaggccagtgggtttcccatggaggtacctacatgtaatgcagttgttggggcttactgcagagcctcaaaattccagcatgccttcaagatggtcgatgagatgagaaagagtggaatcggtccaaattcccggacttatgatattattcttcaccatcttataaagtctcagaagatagaagaggcttataatgtgttccagggaatgggcaaggatggctgtgaacctcagctcaacacatatacaatgatggttagtatgttctgcagtaatgaaagggttgatgtggccttgaaggtgtggaaccaaatgaaggagaagggtgttctgccatgtatgcacatgttttctgcattgatcaacgggttatgctttgagaacaggctggaagaagcttgcgtatatttccaggagatgttggacaaagggatcaggccacctggtcagcttttcagtaatttaaaggaagctcttattgagggaggaagaattagtctggcacaggagatggctttgaagttggatggattacggaaaacacctatgcgtcgttgaggaatcatgcaaataatctgttgcagcagcatatggcttttggctgttagaagctcagtcaaaattgtggtaacaaagaaaacttcag

SEQ ID NO: 66520 - protein, 636 aa, Triticum aestivum
  peptide (1)..(636): Ceres Seq. ID no. 14301551
RQDSPPRHPGAPAQARRLIVRHPPCGRGSTDLAKTSIRGPGCRPGRSPPLSSEIVPHQNISRRRHAPRPGRMRCLRRAGAAAHLLRSATTGPAKHARTALEQMPPPPAAFPCRARAHHLLGGMRGQWLCTATGSTGAPDLAVDQHFTVVPGLGPDVSEVAGLTGAHDLAVDQDFTVVPGPGLDVSKEAERVCRVLSTVPEPRVASALDALGASVSPQLVAEVLKNLSNAGILALAFFRWAERQQGFVYTAESFHNLIEALGKIKQFRLVWSLVEAMRCRGLLSKDTFRLIVRRYARARKVKEAVETFEKMAGFGLKADLSDYNWLIDVLSKSKQVKKAQAIFKEMKRNGKFVPDLKTYTVLMEGWGHEKDLLMLKSVYQEMLDAGLKPDVVAYGMLISSFCKSGKCDEAIKVFCEMEANGCMPSPHVYCMLINGLGSEERLDEALKYFELSKASGFPMEVPTCNAVVGAYCRASKFQHAFKMVDEMRKSGIGPNSRTYDIILHHLIKSQKIEEAYNVFQGMGKDGCEPQLNTYTMMVSMFCSNERVDVALKVWNQMKEKGVLPCMHMFSALINGLCFENRLEEACVYFQEMLDKGIRPPGQLFSNLKEALIEGGRISLAQEMALKLDGLRKTPMRR

SEQ ID NO: 66521 - protein, 565 aa, Triticum aestivum
  peptide (1)..(565): Ceres Seq. ID no. 14301552
MRCLRRAGAAAHLLRSATTGPAKHARTALEQMPPPPAAFPCRARAHHLLGGMRGQWLCTATGSTGAPDLAVDQHFTVVPGLGPDVSEVAGLTGAHDLAVDQDFTVVPGPGLDVSKEAERVCRVLSTVPEPRVASALDALGASVSPQLVAEVLKNLSNAGILALAFFRWAERQQGFVYTAESFHNLIEALGKIKQFRLVWSLVEAMRCRGLLSKDTFRLIVRRYARARKVKEAVETFEKMAGFGLKADLSDYNWLIDVLSKSKQVKKAQAIFKEMKRNGKFVPDLKTYTVLMEGWGHEKDLLMLKSVYQEMLDAGLKPDVVAYGMLISSFCKSGKCDEAIKVFCEMEANGCMPSPHVYCMLINGLGSEERLDEALKYFELSKASGFPMEVPTCNAVVGAYCRASKFQHAFKMVDEMRKSGIGPNSRTYDIILHHLIKSQKIEEAYNVFQGMGKDGCEPQLNTYTMMVSMFCSNERVDVALKVWNQMKEKGVLPCMHMFSALINGLCFENRLEEACVYFQEMLDKGIRPPGQLFSNLKEALIEGGRISLAQEMALKLDGLRKTPMRR

SEQ ID NO: 66522 - protein, 534 aa, Triticum aestivum
  peptide (1)..(534): Ceres Seq. ID no. 14301553
MPPPPAAFPCRARAHHLLGGMRGQWLCTATGSTGAPDLAVDQHFTVVPGLGPDVSEVAGLTGAHDLAVDQDFTVVPGPGLDVSKEAERVCRVLSTVPEPRVASALDALGASVSPQLVAEVLKNLSNAGILALAFFRWAERQQGFVYTAESFHNLIEALGKIKQFRLVWSLVEAMRCRGLLSKDTFRLIVRRYARARKVKEAVETFEKMAGFGLKADLSDYNWLIDVLSKSKQVKKAQAIFKEMKRNGKFVPDLKTYTVLMEGWGHEKDLLMLKSVYQEMLDAGLKPDVVAYGMLISSFCKSGKCDEAIKVFCEMEANGCMPSPHVYCMLINGLGSEERLDEALKYFELSKASGFPMEVPTCNAVVGAYCRASKFQHAFKMVDEMRKSGIGPNSRTYDIILHHLIKSQKIEEAYNVFQGMGKDGCEPQLNTYTMMVSMFCSNERVDVALKVWNQMKEKGVLPCMHMFSALINGLCFENRLEEACVYFQEMLDKGIRPPGQLFSNLKEALIEGGRISLAQEMALKLDGLRKTPMRR

SEQ ID NO: 66523 - DNA, 1780 bp, Triticum aestivum
  misc_feature (1)..(1780): Ceres Seq. ID no. 13664362
gctaatcctaattctagtccaaagttcccgtcgctgcgttcaggcagccgccggcgaccagtgaatgcttccgcatcccgtcgcgcaaaaggtagctgagacgagtgtccagccgccagcgagcctaccctacccgagctcacccacatcggcagccgccaccgccgccgccgcgttgctgcgcgcagaggaggagcgccatgatttgattctctgaatctttccccacgccgggcgatacttcctatgcgccaccgccgcccgcggatcacacagcagcggcagtagcgcgagggaggcagtcagaggccgaaagatttggatcgatggagatccgcgcccgcgcgcccggcaagatcatcctcgccggcgagcacgccgtcgtccacggctcctccgccgtcgccgccgccatcgacctctacacgcagtcctccctccacctgcccccgccaggggatggcggcgccggcggggaggtggaggtcgacctgacggactcgggcctcgccttctcctggccatgctcgcgcctcctcgaggcgctgggggagacctgccgcaaggcggagctgcaggccccgaggccctgctccccggaggagctggcctccattkycaggctcgtggagctgcacgagatacccgaggccaagatctggctctccgcaggcctctccgcgttcctctacctctacacttccatcctggggtgtaggcctgggaaggtcgtggtgagctcgggtctgccgatgggcgcggggcttggttcgtcggccgcgttctccgtgtcgttgtcgggcgcgctgctgacggcggcaggagtggtttgcgctgagggcgccgtcgacggaacagagtggcggttgttggggaaggatcatcttgagctggttaacacgtgggcgttccagggggaaaagattattcatggcaagccttctggcattgacaacgctgtcagcacttttgggagcatgatcaaattcaagaagggagaattgacaaacctcaaatctggcaatccagtcaaaatgctcattactgatacaagggttggtaggaacaccaaggctctggttgctggtgtgtctgaaagagcatctaggcatcccgatgctatggcttccgtcttccatgcagtgaacaccattagtgaagagctttccagcattgttgagttagctgccactgatgagatagccatgacctcaaaggaagaaaagctagcagaactcatggagatgaaccaaggtttgctccagtgcatgggagtcagccattcctctatagaaaccgtgctgcgctcgacattgaagtataacttggtctcgaagctcaccggagctggtggtggaggctgtgttttgacgttgataccaactctattgtccaagttagttttggagaaggtcaccacggagctagaatcgcatggtttccgctgcttcaaagtcgaggtcggtggacaaggtcttcagattcaccaaggataagataatgctcgctcctctttcaatggagatgttgtacactatttttaggtttgcttgaccttctgagacgaaagtattctttctattctgtgcctagcagaccacttactgtatcaatcaataagcgagtttgtcagtcgcatgattgttgttgtatcagatcaataaaccctgttccatagtcgggcgtggttggaaggaatatttgaggtgccatgttgcatctgatctgatgtatcattgttatcaaagttgagttcattgggttgggtcatttttcttgt

SEQ ID NO: 66524 - protein, 389 aa, Triticum aestivum
  peptide (1)..(389): Ceres Seq. ID no. 15220316
  misc_feature (98)..(98): Xaa is any aa, unknown or other
MEIRARAPGKIILAGEHAVVHGSSAVAAAIDLYTQSSLHLPPPGDGGAGGEVEVDLTDSGLAFSWPCSRLLEALGETCRKAELQAPRPCSPEELASIXRLVELHEIPEAKIWLSAGLSAFLYLYTSILGCRPGKVVVSSGLPMGAGLGSSAAFSVSLSGALLTAAGVVCAEGAVDGTEWRLLGKDHLELVNTWAFQGEKIIHGKPSGIDNAVSTFGSMIKFKKGELTNLKSGNPVKMLITDTRVGRNTKALVAGVSERASRHPDAMASVFHAVNTISEELSSIVELAATDEIAMTSKEEKLAELMEMNQGLLQCMGVSHSSIETVLRSTLKYNLVSKLTGAGGGGCVLTLIPTLLSKLVLEKVTTELESHGFRCFKVEVGGQGLQIHQG

SEQ ID NO: 66525 - protein, 247 aa, Triticum aestivum
  peptide (1)..(247): Ceres Seq. ID no. 15220317
MGAGLGSSAAFSVSLSGALLTAAGVVCAEGAVDGTEWRLLGKDHLELVNTWAFQGEKIIHGKPSGIDNAVSTFGSMIKFKKGELTNLKSGNPVKMLITDTRVGRNTKALVAGVSERASRHPDAMASVFHAVNTISEELSSIVELAATDEIAMTSKEEKLAELMEMNQGLLQCMGVSHSSIETVLRSTLKYNLVSKLTGAGGGGCVLTLIPTLLSKLVLEKVTTELESHGFRCFKVEVGGQGLQIHQG

SEQ ID NO: 66526 - DNA, 770 bp, Triticum aestivum
  misc_feature (1)..(770): Ceres Seq. ID no. 13659044
atgttgtccctcctgcctcttcgcttgccgtcccccgtagccagcacgctcccaggcgccgcctacctcctccccggcctcgccaggattcccatcctccgaaccccaccgcgagccagcatgagcgcggccgcctccacgccggacgcagtcccgtctcccgccgccgccgccgccgctgtcggcgaggaagcgaggaaggaggccgaggacgtggtggtgcagtacgtggtgctgcggcgcgacctggcggacgcgtggccgctggggagcgtggtggcgcaggggtgccacgccgccgtggccgccgtctgggcgcaccgcgaccacccggacaccgccgcctactgcgcgcccggcaacctcgacagcatgcacaaggtaacattggaggtgaaaggggagacacagctgaagaacttggctgagaaactggaagcagctggtgtacggcacaagctgtggatagagcagcccgagaacatcccgacttgcatagccacagcaccctgcccaaagtcgcaggtagcttcgttctttaggaagctaaaactttgcaaatgactgaagagtaatacctatccaggttgctggtcttggttgttatgggatgacattagtagctttgctgcattgaggtcacacattttagtcccatgttattggtgatacctgtttcagtctttcatcaactgattgttcctgtttaagaaatggatgtgctcgtattggcatgacaaataatagtgaatcgatgagttttgtgttgg

SEQ ID NO: 66527 - protein, 187 aa, Triticum aestivum
  peptide (1)..(187): Ceres Seq. ID no. 13659045
MLSLLPLRLPSPVASTLPGAAYLLPGLARIPILRTPPRASMSAAASTPDAVPSPAAAAAAVGEEARKEAEDVVVQYVVLRRDLADAWPLGSVVAQGCHAAVAAVWAHRDHPDTAAYCAPGNLDSMHKVTLEVKGETQLKNLAEKLEAAGVRHKLWIEQPENIPTCIATAPCPKSQVASFFRKLKLCK

SEQ ID NO: 66528 - protein, 147 aa, Triticum aestivum
  peptide (1)..(147): Ceres Seq. ID no. 13659046
MSAAASTPDAVPSPAAAAAAVGEEARKEAEDVVVQYVVLRRDLADAWPLGSVVAQGCHAAVAAVWAHRDHPDTAAYCAPGNLDSMHKVTLEVKGETQLKNLAEKLEAAGVRHKLWIEQPENIPTCIATAPCPKSQVASFFRKLKLCK

SEQ ID NO: 66529 - protein, 141 aa, Triticum aestivum
  peptide (1)..(141): Ceres Seq. ID no. 13659047
VVPPASSLAVPRSQHAPRRRLPPPRPRQDSHPPNPTASQHERGRLHAGRSPVSRRRRRRCRRGSEEGGRGRGGAVRGAAARPGGRVAAGERGGAGVPRRRGRRLGAPRPPGHRRLLRARQPRQHAQGNIGGERGDTAEELG

SEQ ID NO: 66530 - DNA, 882 bp, Triticum aestivum
  misc_feature (1)..(882): Ceres Seq. ID no. 13664236
ctcaccaccccccacagcatctcgcgatcccaaagtccaaccagcctccgccgcctctcctcgcctcgcctgcgagatcagcgccgccttctcccccgtctgtttcgtcggaggagtatcagcaagatgtcaactgccactgctccaggagtgtcctttgctaaatccgggtctgggtcccgggctgttgctccggcgatcaggagcgcttccttcatcggttacgccaagcaaacaccaaacttgtctggcctaaggatgtcaaacaagttcagggtgtctgccgcggccgtgcacaaggtgaagctcataagcccagacggtgaagagcacgagtttgaggcccctgaagacacctacattctcgaggcagctgaaaatgctggagtggagctgccattctcctgccgcgccggatcgtgctccacatgcgcgggcaagatgactaccggggaggttgatcagtcggagggctccttcctcgatgagaaccagatgggtgagggataccttctgacctgtatttcataccgcaaggcggattgcgtcattcaaacccaccaagaggaggaactctactagttgtctcacatgtgcttgtgtggcacaattgttgaagttccatggcggattcgttgttcagttgccttctgttattatctagagagatggctaggtgggtgtatcttcctggtgatcagtccggtcttttgatgagatcgttctatatgagttgtgacaataattgatgtaaaatggtttgtcaatccaaactgcatctgtttagattgcagcaattcgaactaccatacactgttggaggtcttgaaaacatgttgtacttatgggtcacttccttgaggaattatatttggccgctcc

SEQ ID NO: 66531 - protein, 193 aa, Triticum aestivum
  peptide (1)..(193): Ceres Seq. ID no. 15220302
LTTPHSISRSQSPTSLRRLSSPRLRDQRRLLPRLFRRRSISKMSTATAPGVSFAKSGSGSRAVAPAIRSASFIGYAKQTPNLSGLRMSNKFRVSAAAVHKVKLISPDGEEHEFEAPEDTYILEAAENAGVELPFSCRAGSCSTCAGKMTTGEVDQSEGSFLDENQMGEGYLLTCISYRKADCVIQTHQEEELY

SEQ ID NO: 66532 - protein, 151 aa, Triticum aestivum
  peptide (1)..(151): Ceres Seq. ID no. 15220303
MSTATAPGVSFAKSGSGSRAVAPAIRSASFIGYAKQTPNLSGLRMSNKFRVSAAAVHKVKLISPDGEEHEFEAPEDTYILEAAENAGVELPFSCRAGSCSTCAGKMTTGEVDQSEGSFLDENQMGEGYLLTCISYRKADCVIQTHQEEELY

SEQ ID NO: 66533 - protein, 107 aa, Triticum aestivum
  peptide (1)..(107): Ceres Seq. ID no. 15220304
MSNKFRVSAAAVHKVKLISPDGEEHEFEAPEDTYILEAAENAGVELPFSCRAGSCSTCAGKMTTGEVDQSEGSFLDENQMGEGYLLTCISYRKADCVIQTHQEEELY

SEQ ID NO: 66534 - DNA, 1469 bp, Triticum aestivum
  misc_feature (1)..(1469): Ceres Seq. ID no. 13591377
actccacacacacacaccggacacaagcccacccagcgccctaccacccaaccagcacccgccgcccgcccgcccgccatgtcgtccgccgcgccggcgccggcgccggaggagcagcggccgcgcccggtgcgcttcggcatcatgggctgcgcgtccatcgcgcgcaagctcgcgcgggcgatgctgctggccgcgcccgcggccgccgtggccgccgtcggcagccgctccgaggccaaggcgcgcctcttcgccgccgacaacggcctccccgcgggcgcgcgcctgcacggctcctacgaggcgctcctcgacgacccggccgtcgacgccgtctacctgccgctccccaccagcctccacgtgcagtgggtcaccgccgccgccgcgcggggcaagcacgtgctcctcgagaagcccaccgcgctctgcgccgccgacctcgacgccatcctcgccgcctgcgacgccagcggcgtccagttcatggactccaccatgtggatgcaccacccccgcaccgccaagatgcgcgacctcctccccgccgacgtcggcgacgtcagagttataaacagtctgttcagcttccgagcaaacgaagatttcctccagaatgacatcagggtgaagccagacctcgacgcgctgggcgtactcggcgatgccgggtggtactgcatccgcgcgatcctgtgggccgtcaactacgagctcccgaagaacgtgatcgcgctccccgaccctgtcaagaaccaagccggcgtgctcatcgcctgcggcgcgacgctctactgggccgacggaaagacggccaccttccactgctcgttcctcgccaacctcaccatggacctgaccgtcgtcggcaccgacggcacgctccacgtcaccgacttcatcatcccgtacgaggagaagtccggcccgttcagcgtggcgtccaggtcgaacttcgccgagctccacaccgggtgggttccgcagcccagcaggcacgtcgtcacgactgacctgccgcaggaggccctgatggtccaggagttctgcaggctggtgcagggcatcagagacgccggcgccaagcctgagggcaagtggccggccatcaccaggaagacgcaggttgtgatggacgcggtgaaggcttccattgacaagggatttgagtctgtcgatgttgtgagctaagaaaatgcaacacgtagctggtcattctggtgatatgtcttccaagccatggtgcatacctggccattccggtgatcttcaaggccatggcgtatggattgtgcgtttgctcaaatcgtacttgtgcgcaagcgcaaaactacttatatatattggaataataactcgaattattattgccataccaaggacaacattgcagttatcaagttcaatgatatattgctacggatttattgtgtggtattttggcaatatggatgcttgcgaggtcc

SEQ ID NO: 66535 - protein, 397 aa, Triticum aestivum
  peptide (1)..(397): Ceres Seq. ID no. 13591378
TPHTHTGHKPTQRPTTQPAPAARPPAMSSAAPAPAPEEQRPRPVRFGIMGCASIARKLARAMLLAAPAAAVAAVGSRSEAKARLFAADNGLPAGARLHGSYEALLDDPAVDAVYLPLPTSLHVQWVTAAAARGKHVLLEKPTALCAADLDAILAACDASGVQFMDSTMWMHHPRTAKMRDLLPADVGDVRVINSLFSFRANEDFLQNDIRVKPDLDALGVLGDAGWYCIRAILWAVNYELPKNVIALPDPVKNQAGVLIACGATLYWADGKTATFHCSFLANLTMDLTVVGTDGTLHVTDFIIPYEEKSGPFSVASRSNFAELHTGWVPQPSRHVVTTDLPQEALMVQEFCRLVQGIRDAGAKPEGKWPAITRKTQVVMDAVKASIDKGFESVDVVS

SEQ ID NO: 66536 - protein, 371 aa, Triticum aestivum
  peptide (1)..(371): Ceres Seq. ID no. 13591379
MSSAAPAPAPEEQRPRPVRFGIMGCASIARKLARAMLLAAPAAAVAAVGSRSEAKARLFAADNGLPAGARLHGSYEALLDDPAVDAVYLPLPTSLHVQWVTAAAARGKHVLLEKPTALCAADLDAILAACDASGVQFMDSTMWMHHPRTAKMRDLLPADVGDVRVINSLFSFRANEDFLQNDIRVKPDLDALGVLGDAGWYCIRAILWAVNYELPKNVIALPDPVKNQAGVLIACGATLYWADGKTATFHCSFLANLTMDLTVVGTDGTLHVTDFIIPYEEKSGPFSVASRSNFAELHTGWVPQPSRHVVTTDLPQEALMVQEFCRLVQGIRDAGAKPEGKWPAITRKTQVVMDAVKASIDKGFESVDVVS

SEQ ID NO: 66537 - protein, 349 aa, Triticum aestivum
  peptide (1)..(349): Ceres Seq. ID no. 13591380
MGCASIARKLARAMLLAAPAAAVAAVGSRSEAKARLFAADNGLPAGARLHGSYEALLDDPAVDAVYLPLPTSLHVQWVTAAAARGKHVLLEKPTALCAADLDAILAACDASGVQFMDSTMWMHHPRTAKMRDLLPADVGDVRVINSLFSFRANEDFLQNDIRVKPDLDALGVLGDAGWYCIRAILWAVNYELPKNVIALPDPVKNQAGVLIACGATLYWADGKTATFHCSFLANLTMDLTVVGTDGTLHVTDFIIPYEEKSGPFSVASRSNFAELHTGWVPQPSRHVVTTDLPQEALMVQEFCRLVQGIRDAGAKPEGKWPAITRKTQVVMDAVKASIDKGFESVDVVS

SEQ ID NO: 66538 - DNA, 1079 bp, Triticum aestivum
  misc_feature (1)..(1079): Ceres Seq. ID no. 12626444
gtagactccaggaaagggaattcctcaaccatactgccttttcatggatcattccagctgaggattaaggagagaaattaaccgcatcccggggccgcgcgcgagtgtgatgcgcgcagcttgccggcggcgatggatttgccgtggctggacctccccttcaccttcctcacgctgctcctggccacccgcctggcgtacgactactacggcgtcgtcgccgccaccttcgccggcagcttcgcgctccagatcttcctcttctactgcttcgcgcgctggtaccgccacaccatgggcgcccgcgccgagctgctcccctcgtcgacgacgtcgcagcagcgcgacgaggggtccccgcccgtcctgaccccgctgctggaggcgtcgagcggagccggcgccgccgcggccgcgggggccctgctggccaaccggtgcctggccttcgtgttcatggtgttcgtcccgctcatcatcgtcgtcttcgagcggagccaggcggacgtcgtcgcctacgcgctctgcctcgccaacatactcgtcatggtcgtctggctctcgccggaggcgcccggctccatgtcggccaccaagtccttcctggggctcagcgacgacgaggacgaggagagcggcggcgccgaggacaagtgctgcgtctgcctcgccggcatgcgggaggagcaggccctccgggacctgccgcggtgcgggcaccggttccatgagaagtgcatcggcaagtggctcaagaccgggcacccgacatgccccgtgtgccgggcgctggtcttgccgccgccggccgtgcacgcggacccgttcgacgactctgttagccccgtctagctctgtttctcccctgcatccagtctaacaatcattcccatagaaaatcagacccctattcagcatcagacgctggaaatggtgaattgctgggtaatttgctactctctcttcttgataatgcgtagttgtctgaacaaatgttcgactgtagcctgtaaataaggactgtacatttttcctttttactctgaaggttgagatgacggagtcttgcatgtttttgc

SEQ ID NO: 66539 - protein, 239 aa, Triticum aestivum
  peptide (1)..(239): Ceres Seq. ID no. 12626445
MDLPWLDLPFTFLTLLLATRLAYDYYGVVAATFAGSFALQIFLFYCFARWYRHTMGARAELLPSSTTSQQRDEGSPPVLTPLLEASSGAGAAAAAGALLANRCLAFVFMVFVPLIIVVFERSQADVVAYALCLANILVMVVWLSPEAPGSMSATKSFLGLSDDEDEESGGAEDKCCVCLAGMREEQALRDLPRCGHRFHEKCIGKWLKTGHPTCPVCRALVLPPPAVHADPFDDSVSPV

SEQ ID NO: 66540 - protein, 185 aa, Triticum aestivum
  peptide (1)..(185): Ceres Seq. ID no. 12626446
MGARAELLPSSTTSQQRDEGSPPVLTPLLEASSGAGAAAAAGALLANRCLAFVFMVFVPLIIVVFERSQADVVAYALCLANILVMVVWLSPEAPGSMSATKSFLGLSDDEDEESGGAEDKCCVCLAGMREEQALRDLPRCGHRFHEKCIGKWLKTGHPTCPVCRALVLPPPAVHADPFDDSVSPV

SEQ ID NO: 66541 - protein, 131 aa, Triticum aestivum
  peptide (1)..(131): Ceres Seq. ID no. 12626447
MVFVPLIIVVFERSQADVVAYALCLANILVMVVWLSPEAPGSMSATKSFLGLSDDEDEESGGAEDKCCVCLAGMREEQALRDLPRCGHRFHEKCIGKWLKTGHPTCPVCRALVLPPPAVHADPFDDSVSPV

SEQ ID NO: 66542 - DNA, 1634 bp, Triticum aestivum
  misc_feature (1)..(1634): Ceres Seq. ID no. 13658888
ctcgccgccccgactcgacccgacgcgactcccctcccaagcccaaatccccaaatcgcccctaaaaccctagccgccgccgccatggccgcctcccccaccgcctccgcctccggctccacggccgcggcggcggcggccgcctccgaggccaacgacgggcccacgctctccgtggtcaccaagcgcctccgcgcgctgcgcaagaagcagaaccgcatcgcgcagatggaggaggccgtcgccgccggcaagacgctcaaccaggagcagaaggaggtgatgcgctccaagcccaccctcgccgccgtcatcgacgagctcgagcgcctccgcacgccgctcgccgtcgccgtcgccgaggaggtctccgtcgcccccgcccccgccccggccccggagccctccggctccgattcctccgtccaggacctcctcgcgctcgtctacttcggcgccctcttcgacgtcaagccgcagagcgacttcatcgccacgatggtcgcgcgcgagcatgagcggagcagctgcatcacctatgactgcgtcggggacgacaccgtggacctgctcgtggagggcgacctcgacgtcgtgtccgctgtggccgcccttgccgccgctcgccctgcttccgcggtgggcgtctcccaccgcgacgcgctccaggcctgtgcccaccatgcccgcttatggctcgcccgcgctgacgagcccatccaccctggctcctctgttacttatgctgcggtgagggctaagctggacaggatcatggcatcagactactacacagcagctgcagttggaggagggagctatggagctgaaggtgtgcaggcacaggagagtatgactgcctcaccagaggcatcagcagtggaggagaacctagctgctgaaggtcacaaggaggagaaggaagactcccatgctacggaaatttacaatgatcatcagtctgactcagcagacgtgcaaaatgtggatcgtgaagcccccgtgaaccctcccgaggaatatccctctgttcaggcagagcaggagaagtttgacatggaagagcaagatgagagggatgctgagccaaaagagcagcagttccagcaccctaggcggtctcatcagaaccagcggggaggtggtcgtggcaggaggggggcctaccccaatggccgtggcgggcgtggaggcggccgcggcatgggcggcggataccagaatgggcgtggataccagggtgggggtggcggataccagggaggcggtggcgagtaccagaatggccggggtggtggtggcggttactacaacaacaacaacgaagaagggtactaccagccgaggaacttcaacaccaggggcaggggtggtcggtctggcggcggcaactctcactacagcaaccagggaggaggcggcgcgcagggaggtggccacgcgtacgccgagagggttgaggcaaatgcttagttgttgaattattttgcttgggtggaggtcacgagagggagagagtctgggagccattttgttattatagaactaacttagcctgttattacgtcgcaatccgtcccccatctgtgagttggttttgttggtccaatccaatgactgcatatggttggtcg

SEQ ID NO: 66543 - protein, 490 aa, Triticum aestivum
  peptide (1)..(490): Ceres Seq. ID no. 15219930
LAAPTRPDATPLPSPNPQIAPKTLAAAAMAASPTASASGSTAAAAAAASEANDGPTLSVVTKRLRALRKKQNRIAQMEEAVAAGKTLNQEQKEVMRSKPTLAAVIDELERLRTPLAVAVAEEVSVAPAPAPAPEPSGSDSSVQDLLALVYFGALFDVKPQSDFIATMVAREHERSSCITYDCVGDDTVDLLVEGDLDVVSAVAALAAARPASAVGVSHRDALQACAHHARLWLARADEPIHPGSSVTYAAVRAKLDRIMASDYYTAAAVGGGSYGAEGVQAQESMTASPEASAVEENLAAEGHKEEKEDSHATEIYNDHQSDSADVQNVDREAPVNPPEEYPSVQAEQEKFDMEEQDERDAEPKEQQFQHPRRSHQNQRGGGRGRRGAYPNGRGGRGGGRGMGGGYQNGRGYQGGGGGYQGGGGEYQNGRGGGGGYYNNNNEEGYYQPRNFNTRGRGGRSGGGNSHYSNQGGGGAQGGGHAYAERVEANA

SEQ ID NO: 66544 - protein, 462 aa, Triticum aestivum
  peptide (1)..(462): Ceres Seq. ID no. 15219931
MAASPTASASGSTAAAAAAASEANDGPTLSVVTKRLRALRKKQNRIAQMEEAVAAGKTLNQEQKEVMRSKPTLAAVIDELERLRTPLAVAVAEEVSVAPAPAPAPEPSGSDSSVQDLLALVYFGALFDVKPQSDFIATMVAREHERSSCITYDCVGDDTVDLLVEGDLDVVSAVAALAAARPASAVGVSHRDALQACAHHARLWLARADEPIHPGSSVTYAAVRAKLDRIMASDYYTAAAVGGGSYGAEGVQAQESMTASPEASAVEENLAAEGHKEEKEDSHATEIYNDHQSDSADVQNVDREAPVNPPEEYPSVQAEQEKFDMEEQDERDAEPKEQQFQHPRRSHQNQRGGGRGRRGAYPNGRGGRGGGRGMGGGYQNGRGYQGGGGGYQGGGGEYQNGRGGGGGYYNNNNEEGYYQPRNFNTRGRGGRSGGGNSHYSNQGGGGAQGGGHAYAERVEANA

SEQ ID NO: 66545 - protein, 414 aa, Triticum aestivum
  peptide (1)..(414): Ceres Seq. ID no. 15219932
MEEAVAAGKTLNQEQKEVMRSKPTLAAVIDELERLRTPLAVAVAEEVSVAPAPAPAPEPSGSDSSVQDLLALVYFGALFDVKPQSDFIATMVAREHERSSCITYDCVGDDTVDLLVEGDLDVVSAVAALAAARPASAVGVSHRDALQACAHHARLWLARADEPIHPGSSVTYAAVRAKLDRIMASDYYTAAAVGGGSYGAEGVQAQESMTASPEASAVEENLAAEGHKEEKEDSHATEIYNDHQSDSADVQNVDREAPVNPPEEYPSVQAEQEKFDMEEQDERDAEPKEQQFQHPRRSHQNQRGGGRGRRGAYPNGRGGRGGGRGMGGGYQNGRGYQGGGGGYQGGGGEYQNGRGGGGGYYNNNNEEGYYQPRNFNTRGRGGRSGGGNSHYSNQGGGGAQGGGHAYAERVEANA

SEQ ID NO: 66546 - DNA, 2137 bp, Triticum aestivum
  misc_feature (1)..(2137): Ceres Seq. ID no. 14302871
agactagtaactgtccaatcaaatcaaaccgaggagggacggtgcagtccctcgttaattttactggaccatctctctgactctcctctccacctcgcccgcttctcttctttacctagccttctcgggtaagctggctaggaccagtggcagcagcagtagtgggagcaggagctgcttggcttgccgttgctgcctttcacgtccacctgcgcgggcgtgaggcgtggaatccaaacaatggcgctgggatccgcggatctataggcgaggccaggcgcgggatgggatctgggaccagcaaggccgcttcgccggcgccggcgccggccggcggcgaggccaaggcgcggaatgggaagccgagggggaggagcctgatgcgcctgcccagctactcctgcttccggggcttcacgcccgagtctgacccttcttcttcgctgccggcgccgccgccgctaggggtcgagtcaagcaagggaggggagacgccttcactcgctcacattggcatatcagataatgatgctccatcagctcctaaactgaatccaagtgaaggcagaacgacgccttcatcagataccgacagagatcaaggtgatgatgtattgcagaatgtcactgctaccaggactgcagtcgacgacgaccaatcgccaaatccttctgaccggccgcatccatgctttggtgtcaactttgggttgagtagagccgtcagcttgggatcatcagtggcatgctccattatgtcaaccggcctctcctcttcagctaatcctagtattggaaatgtggaccatccttccgatgcaagcatccctcaacaaggtggtgcatcaacttctgggatttattcaagtctggatatgctaagggatagcgtcacaacacaagctagagccgctcatcaggctaggagaaatttgctggaatctgaagatgctaacttgaggcattcgcacagaaggatgggaccccaggaaccttctgaaggcagtgtccggtttagccggacacttagtgttggaagacttcgtgacagggtcctcaggaggactccattctcagatagtttattcacctcttcactttatgatagaccagtgtggacagcaggaaatgccagtgcgaggcaagattcatctgtgatgcaacggactaattcagacagaggttccgaaccgcaatcagaaccttcaactaacagcacgtacaattctggctctgcaactctaagagaggccagtaatcgggatcttcttgagcggagatcagcttttcttgaaaggaggaggaggatacgatctcaggtccgagctctccaaaggttgggcagcaggtttgaaaatttatcaggtcatgagagatcatgcattctatctggtcaacatagaacaggaaattgcaactgcagggcaagcagtcgaccaggtaatcctgatgaagaatccggcacaagggctagcatatcaagaattgttatgctagcagaagcactctttgaggtcttggatgaaatccaccaacagtctgctgctttatcctcaaggacatcattaccttcaattggatccgttcctgctccaaaggagatcgtcgagagtcttcctgtcaaggtgtacagaaagccgttgaaacaccaaactgatgaggctgcacaatgctacatttgccttgtcgaatatgaagaaggagactgtgttcgcatacttccatgcaatcacgaatttcatctaacatgtgtagataagtggctgaaagagattcacagggtttgtccactctgtcgtggcgatgtctgccgatcggattcgtcgagcatagggaaattcagctgattccttttatctcttaaggatccagcttcttgcgagaaaaaaatggagcttccgacacggttatttgatccagccggatagagcccgcagaatgttgcgggtgtgatttgatcttcatttctagtctggtctgaacaactcaggatgctcctgtgtgttatagcagatttgcatggcggtcatcccattataaacgatgagcttccatgcgaatttgagatttgttgtacggtggtgtgaagcctgttgatatattggttatatatatggcttgcgttttcgtgatgttg

SEQ ID NO: 66547 - protein, 363 aa, Triticum aestivum
  peptide (1)..(363): Ceres Seq. ID no. 14302872
MSTGLSSSANPSIGNVDHPSDASIPQQGGASTSGIYSSLDMLRDSVTTQARAAHQARRNLLESEDANLRHSHRRMGPQEPSEGSVRFSRTLSVGRLRDRVLRRTPFSDSLFTSSLYDRPVWTAGNASARQDSSVMQRTNSDRGSEPQSEPSTNSTYNSGSATLREASNRDLLERRSAFLERRRRIRSQVRALQRLGSRFENLSGHERSCILSGQHRTGNCNCRASSRPGNPDEESGTRASISRIVMLAEALFEVLDEIHQQSAALSSRTSLPSIGSVPAPKEIVESLPVKVYRKPLKHQTDEAAQCYICLVEYEEGDCVRILPCNHEFHLTCVDKWLKEIHRVCPLCRGDVCRSDSSSIGKFS

SEQ ID NO: 66548 - protein, 520 aa, Triticum aestivum
  peptide (1)..(520): Ceres Seq. ID no. 14302873
MGSGTSKAASPAPAPAGGEAKARNGKPRGRSLMRLPSYSCFRGFTPESDPSSSLPAPPPLGVESSKGGETPSLAHIGISDNDAPSAPKLNPSEGRTTPSSDTDRDQGDDVLQNVTATRTAVDDDQSPNPSDRPHPCFGVNFGLSRAVSLGSSVACSIMSTGLSSSANPSIGNVDHPSDASIPQQGGASTSGIYSSLDMLRDSVTTQARAAHQARRNLLESEDANLRHSHRRMGPQEPSEGSVRFSRTLSVGRLRDRVLRRTPFSDSLFTSSLYDRPVWTAGNASARQDSSVMQRTNSDRGSEPQSEPSTNSTYNSGSATLREASNRDLLERRSAFLERRRRIRSQVRALQRLGSRFENLSGHERSCILSGQHRTGNCNCRASSRPGNPDEESGTRASISRIVMLAEALFEVLDEIHQQSAALSSRTSLPSIGSVPAPKEIVESLPVKVYRKPLKHQTDEAAQCYICLVEYEEGDCVRILPCNHEFHLTCVDKWLKEIHRVCPLCRGDVCRSDSSSIGKFS

SEQ ID NO: 66549 - protein, 488 aa, Triticum aestivum
  peptide (1)..(488): Ceres Seq. ID no. 14302874
MRLPSYSCFRGFTPESDPSSSLPAPPPLGVESSKGGETPSLAHIGISDNDAPSAPKLNPSEGRTTPSSDTDRDQGDDVLQNVTATRTAVDDDQSPNPSDRPHPCFGVNFGLSRAVSLGSSVACSIMSTGLSSSANPSIGNVDHPSDASIPQQGGASTSGIYSSLDMLRDSVTTQARAAHQARRNLLESEDANLRHSHRRMGPQEPSEGSVRFSRTLSVGRLRDRVLRRTPFSDSLFTSSLYDRPVWTAGNASARQDSSVMQRTNSDRGSEPQSEPSTNSTYNSGSATLREASNRDLLERRSAFLERRRRIRSQVRALQRLGSRFENLSGHERSCILSGQHRTGNCNCRASSRPGNPDEESGTRASISRIVMLAEALFEVLDEIHQQSAALSSRTSLPSIGSVPAPKEIVESLPVKVYRKPLKHQTDEAAQCYICLVEYEEGDCVRILPCNHEFHLTCVDKWLKEIHRVCPLCRGDVCRSDSSSIGKFS

SEQ ID NO: 66550 - DNA, 2231 bp, Triticum aestivum
  misc_feature (1)..(2231): Ceres Seq. ID no. 14303173
acctcgctcactccccaagctcactctcacacccacttcaaacccctccaccccaaaccccagccacccacccaccatggccgcccaccccaccgggaccaagaagcggagcggcagcggccatggggccgccgcggccctcgtcgtcgccgccctcctcgtcctctgctccaccgcgtccatggcgctcaccccggacggcgaggcgctgctggagctcaagctggcattcaacgccacggcggggcagcggctgggcagctggcgggccgccgaccccaacccctgcggctgggagggcgtctcctgctccttcccggacctcagggtccatgccataaatctgccctacatgcagctcgggggcatcatctcgcccagcatcggcaggctcaccaagctgcagagactagctctgcaccagaacagcctgcacggccccatccccgccgagatcaggaactgcaccgagctcagagccatttacctgagagccaactacctgcaaggcggcatccctccggggatcggcgacctcactcacctcaccatcctggacctgtccagcaatctgctgcggggtgcaataccggcgacgatcgggagcctaactcatttgcggttcctgaacctctccaccaacttcttctcgggagagatcccgaatgtcggcgtcctcggaaccttcaagagcagctcgtatgtcggaaatctggagctttgtgggctgcccatacagaaaggttgccgcggaaccctcgggttccctgcggtgctgccgcactctgaccccctctcctcctctggtgtttctccaatcaccaacaataataaaacctcacactttctgaatggcgttgtgatcggttcaatgtcaaccatggccatcgcgctggtcgcggtgctaggcttcctctgggtatgcttgctgtccaggaagaagaatggtgtgaactatgagaaaatggacaagcaaactgtcccggatggtgcaaagcttgtgacataccagtggaaccttccgtattcgtcgggcgagatcattagaaggctggagctgcttgatgaagaggatgtggttggttgcggcgggtttggtacggtgtacaagatggtgatggatgatggcacggcgtttgccgtcaagagggttgacctcaatcgagagaggcgagacaagacttttgagaaggagctcgagatcctgggcagcattaggcatatcaaccttgtcaatctgcaaggatactgccggctctccacggccaaactactcatatatgatttcatggagctgggcagcttggatagctacctccatggagatgcacaggaggatcagccattgaactggaatgcgcgtatgaagatcgccctgggctctgcccgcggtttggcatatctgcaccatgattgctcgccggggatcgtccaccgggacatcaaagccagcaacatccttctggacagatgcttggagccgcgcgtgtctgatttcggcctcgcgaggctgctggtggacaatgagacccatgtaaccactgtcgtggcgggtaccttcgggtacctagcaccagagtacctgcaaaatgggcattcgaccgagaaatcagacgtgtatagctttggggtgcttttgctggaactggtgaccggaaagaggcctacggattcttgcttcctcaacaagggtctcaacatcgtcggctggctgaacacgctgagcggggagcatcgcctggaggagatcctggactcgcggtcgggcgacgcggaggtggaggcggtggaggggatcctggacatcgcggccatgtgcacggacgcggacccggggcagcggccgtccatgggcgcggtgctcaagatgctggaggaggagatcctgtcgccctgcctcagcgagctctactacgagcagcacctggagctctgagagccttgagtgtaggtgagtgagtggacagtgccagttgtgcaggtactgctgctcatgatcgaccgatgatggcctggatctggattgaagaagctcaagttttgtagatacgcttgatgatgaaccaccaccgtgtgtgtaggatggactgtgttggcatctctagactagcgagtggttcttgggtcagaaccaggaccaatgcagcaatcggctgtgctttttgtacatagggttggagacctttgagccttttctttcatcccctttttccgacgtggttgcttcttcg

SEQ ID NO: 66551 - protein, 644 aa, Triticum aestivum
  peptide (1)..(644): Ceres Seq. ID no. 14303174
PRSLPKLTLTPTSNPSTPNPSHPPTMAAHPTGTKKRSGSGHGAAAALVVAALLVLCSTASMALTPDGEALLELKLAFNATAGQRLGSWRAADPNPCGWEGVSCSFPDLRVHAINLPYMQLGGIISPSIGRLTKLQRLALHQNSLHGPIPAEIRNCTELRAIYLRANYLQGGIPPGIGDLTHLTILDLSSNLLRGAIPATIGSLTHLRFLNLSTNFFSGEIPNVGVLGTFKSSSYVGNLELCGLPIQKGCRGTLGFPAVLPHSDPLSSSGVSPITNNNKTSHFLNGVVIGSMSTMAIALVAVLGFLWVCLLSRKKNGVNYEKMDKQTVPDGAKLVTYQWNLPYSSGEIIRRLELLDEEDVVGCGGFGTVYKMVMDDGTAFAVKRVDLNRERRDKTFEKELEILGSIRHINLVNLQGYCRLSTAKLLIYDFMELGSLDSYLHGDAQEDQPLNWNARMKIALGSARGLAYLHHDCSPGIVHRDIKASNILLDRCLEPRVSDFGLARLLVDNETHVTTVVAGTFGYLAPEYLQNGHSTEKSDVYSFGVLLLELVTGKRPTDSCFLNKGLNIVGWLNTLSGEHRLEEILDSRSGDAEVEAVEGILDIAAMCTDADPGQRPSMGAVLKMLEEEILSPCLSELYYEQHLEL

SEQ ID NO: 66552 - protein, 619 aa, Triticum aestivum
  peptide (1)..(619): Ceres Seq. ID no. 14303175
MAAHPTGTKKRSGSGHGAAAALVVAALLVLCSTASMALTPDGEALLELKLAFNATAGQRLGSWRAADPNPCGWEGVSCSFPDLRVHAINLPYMQLGGIISPSIGRLTKLQRLALHQNSLHGPIPAEIRNCTELRAIYLRANYLQGGIPPGIGDLTHLTILDLSSNLLRGAIPATIGSLTHLRFLNLSTNFFSGEIPNVGVLGTFKSSSYVGNLELCGLPIQKGCRGTLGFPAVLPHSDPLSSSGVSPITNNNKTSHFLNGVVIGSMSTMAIALVAVLGFLWVCLLSRKKNGVNYEKMDKQTVPDGAKLVTYQWNLPYSSGEIIRRLELLDEEDVVGCGGFGTVYKMVMDDGTAFAVKRVDLNRERRDKTFEKELEILGSIRHINLVNLQGYCRLSTAKLLIYDFMELGSLDSYLHGDAQEDQPLNWNARMKIALGSARGLAYLHHDCSPGIVHRDIKASNILLDRCLEPRVSDFGLARLLVDNETHVTTVVAGTFGYLAPEYLQNGHSTEKSDVYSFGVLLLELVTGKRPTDSCFLNKGLNIVGWLNTLSGEHRLEEILDSRSGDAEVEAVEGILDIAAMCTDADPGQRPSMGAVLKMLEEEILSPCLSELYYEQHLEL

SEQ ID NO: 66553 - protein, 584 aa, Triticum aestivum
  peptide (1)..(584): Ceres Seq. ID no. 14303176
MALTPDGEALLELKLAFNATAGQRLGSWRAADPNPCGWEGVSCSFPDLRVHAINLPYMQLGGIISPSIGRLTKLQRLALHQNSLHGPIPAEIRNCTELRAIYLRANYLQGGIPPGIGDLTHLTILDLSSNLLRGAIPATIGSLTHLRFLNLSTNFFSGEIPNVGVLGTFKSSSYVGNLELCGLPIQKGCRGTLGFPAVLPHSDPLSSSGVSPITNNNKTSHFLNGVVIGSMSTMAIALVAVLGFLWVCLLSRKKNGVNYEKMDKQTVPDGAKLVTYQWNLPYSSGEIIRRLELLDEEDVVGCGGFGTVYKMVMDDGTAFAVKRVDLNRERRDKTFEKELEILGSIRHINLVNLQGYCRLSTAKLLIYDFMELGSLDSYLHGDAQEDQPLNWNARMKIALGSARGLAYLHHDCSPGIVHRDIKASNILLDRCLEPRVSDFGLARLLVDNETHVTTVVAGTFGYLAPEYLQNGHSTEKSDVYSFGVLLLELVTGKRPTDSCFLNKGLNIVGWLNTLSGEHRLEEILDSRSGDAEVEAVEGILDIAAMCTDADPGQRPSMGAVLKMLEEEILSPCLSELYYEQHLEL

SEQ ID NO: 66554 - DNA, 1310 bp, Triticum aestivum
  misc_feature (1)..(1310): Ceres Seq. ID no. 13658577
ctagaacatcctaatcgaaaaccacatcttctattttcaaatattcatctttaaggaactaatcagtcagaaatttgggcaatagttatttctccccattgtcaaccttgtcaattgaaagtactatatgagaaatctacacgcctggtaccatacctcggtgagtaactgagtactccagcttcatatgttagtggttctgatttcaggtgttttgtattacagggcatcaagtgtttatagcatacttctactattactccgtgactcaaacaattataaaataaggatgcatgcggctgttgctttagcagtgccagtcacaaggcttgattatggtagctcctttccagatgttgtcagaggcctcacacatgttcttgagtcattaagttcgaacagttcatcatcgccttcaaatttcaaacaccgggacaaccttgagaaacagcttacgtttactgctctgcatttgcttggttttgtttcaccgaaggatgaccaaagcctgaaagattttcttatcaagaaggcatcctttctggaagactggctgaagggtttatgctcagcattcaatagtgccgaggaccagcctctggcaagcgagaccataaatgacgaggatggtttcagcccaaatgtgtcacagaaagttatgttatcttctgctgtagtgtccttgctcaatgtatatacaagtggaaaccagcaagttattactcagagatttgagcaattggctagaagcacagcgtgagcgtcaaaaatcaatggtggtctccacacccatcaacgagcagcaagatattggtcatccaccttagagaagccaactcgcctatcaattggttcttgaggcttccaataaagcgaggcaacctgacctgtacgtcaatacattccatgaagtcgacgaagctgctgagttgggtgatttcagatcaagggcagctcctggcagctagccaagtagtcggtcaatgcagaattgccttgacatgttgtattctagtgtaaaaatagttgttgaatttcttccaggtttggccatgttgtacatcgtgtttacttatgatcactagtgtgcatacacggagcagacatgtatactgaaggattattcggctagatcagtactacagattaatagctagatcagtactacagactgtagttccatataaactgcaacattatggatttggcttgggttgaatgctttgttagaccacaagcatgatgattttggatctgtgagcgcaacagaaaatgaatgccggccatttcagctgggggtaccaaccgtt

SEQ ID NO: 66555 - protein, 190 aa, Triticum aestivum
  peptide (1)..(190): Ceres Seq. ID no. 13658578
MLVVLISGVLYYRASSVYSILLLLLRDSNNYKIRMHAAVALAVPVTRLDYGSSFPDVVRGLTHVLESLSSNSSSSPSNFKHRDNLEKQLTFTALHLLGFVSPKDDQSLKDFLIKKASFLEDWLKGLCSAFNSAEDQPLASETINDEDGFSPNVSQKVMLSSAVVSLLNVYTSGNQQVITQRFEQLARSTA

SEQ ID NO: 66556 - protein, 156 aa, Triticum aestivum
  peptide (1)..(156): Ceres Seq. ID no. 13658579
MHAAVALAVPVTRLDYGSSFPDVVRGLTHVLESLSSNSSSSPSNFKHRDNLEKQLTFTALHLLGFVSPKDDQSLKDFLIKKASFLEDWLKGLCSAFNSAEDQPLASETINDEDGFSPNVSQKVMLSSAVVSLLNVYTSGNQQVITQRFEQLARSTA

SEQ ID NO: 66557 - DNA, 1732 bp, Triticum aestivum
  misc_feature (1)..(1732): Ceres Seq. ID no. 13658498
ctagaacmyccctmmtcgwtaaaacatgagcccatccaaagccgtgaccagtagccataacctgctccattaacacccacacccgcagagaaataagacaccaccggctcgggctctggtaatcaggcaggctcaatcagtgggaataagttgatgatctgtcgtctctaagccgcccgccacgacgcgccatcctccaccacctccctcttaaaagcccccgcttccttgcttcttcaagcccaattccccgcccgctccctccgtccaccgccacccaagagagagaggctctctagattctagccccgcagcaacattagccccatggtgtccttcctgctgggcgccgccgtggccaccgtctgcgtcctcttcttcatgtccgccagccccggccgcagcctcgtcgacgtcgccgcatggagccacaacaacggcaccgccgcccagcaccaccaccacctgcgctccgtcgccgacgacgccgacgccgcccgcaacctctccgtcgtcgtcgccgctccggcacccgcccccgtccaggcgtcgccgtacggggacctggaggaggtgctggcgcgggcggcgacggcggaccggacggtgatcatgacgcagatcaacgcggcgtggaccaagccgggctcgctgctggacctcttcttcgagagcttccgcaccggggagggcggcgtggcgcgcctgctcgaccacctcgtcatcgtcaccatggacccggcggcgtacgcggggtgccagctcgtgcacccgcactgctactttctcaggacgaccggcgtcgactaccgcggcgagaagttcttcatgagcaaggactacctcgagatgatgtggggccgcaacaagttccagcagaccatcctccagctcggatacaacttcctcttcacggacgtggacgtgatgtggttccgtgacccgttcaagcacatctccatgggggcggacatcgccatctccagcgacgtcttcatgggggacccctacagcctcggcaacttccccaacggcggcttcctcttcgtgcgctcctgcaacaagaccatcgagttctaccgccactggcaggccggccgctaccgcttcttcggcaagcacgagcaggacgtgttcaacctcatcaagcacgacatgacggaccgcctcggcgtcgccatccagttcctcgacaccacctacatcagcggcttctgtcagctcagcagggacctcaacaagatctgcaccctgcacgccaactgctgcgtcgggctcggggccaagctgcatgatttgaggaatgtgctggacgtgtggaggaactacacggcggcgccggtgcccgacaagagggccggcaagttccagtggaaggtgcccgggatatgcatccactgatccaactcatggatgagttggttgcccattctttctgttcttcttgcttcgccttctccttctcgtggaaagagagggaggggattgagagggtcagcatcgatcgattgattcattttgtgaaatcatttcagctagatgattattactccctcttatattagtttacggagggagtagtaagttattatactatatatgtacacaaacatacacagagtagcagtactccagtatgcgtgcagcacatgcatgcatgtatgctggtcctggccgaccctccctggcctgtaattaaagatgaatgagtaaagcagtagcctgtttatgc

SEQ ID NO: 66558 - protein, 357 aa, Triticum aestivum
  peptide (1)..(357): Ceres Seq. ID no. 15220638
MVSFLLGAAVATVCVLFFMSASPGRSLVDVAAWSHNNGTAAQHHHHLRSVADDADAARNLSVVVAAPAPAPVQASPYGDLEEVLARAATADRTVIMTQINAAWTKPGSLLDLFFESFRTGEGGVARLLDHLVIVTMDPAAYAGCQLVHPHCYFLRTTGVDYRGEKFFMSKDYLEMMWGRNKFQQTILQLGYNFLFTDVDVMWFRDPFKHISMGADIAISSDVFMGDPYSLGNFPNGGFLFVRSCNKTIEFYRHWQAGRYRFFGKHEQDVFNLIKHDMTDRLGVAIQFLDTTYISGFCQLSRDLNKICTLHANCCVGLGAKLHDLRNVLDVWRNYTAAPVPDKRAGKFQWKVPGICIH

SEQ ID NO: 66559 - protein, 339 aa, Triticum aestivum
  peptide (1)..(339): Ceres Seq. ID no. 15220639
MSASPGRSLVDVAAWSHNNGTAAQHHHHLRSVADDADAARNLSVVVAAPAPAPVQASPYGDLEEVLARAATADRTVIMTQINAAWTKPGSLLDLFFESFRTGEGGVARLLDHLVIVTMDPAAYAGCQLVHPHCYFLRTTGVDYRGEKFFMSKDYLEMMWGRNKFQQTILQLGYNFLFTDVDVMWFRDPFKHISMGADIAISSDVFMGDPYSLGNFPNGGFLFVRSCNKTIEFYRHWQAGRYRFFGKHEQDVFNLIKHDMTDRLGVAIQFLDTTYISGFCQLSRDLNKICTLHANCCVGLGAKLHDLRNVLDVWRNYTAAPVPDKRAGKFQWKVPGICIH

SEQ ID NO: 66560 - protein, 262 aa, Triticum aestivum
  peptide (1)..(262): Ceres Seq. ID no. 15220640
MTQINAAWTKPGSLLDLFFESFRTGEGGVARLLDHLVIVTMDPAAYAGCQLVHPHCYFLRTTGVDYRGEKFFMSKDYLEMMWGRNKFQQTILQLGYNFLFTDVDVMWFRDPFKHISMGADIAISSDVFMGDPYSLGNFPNGGFLFVRSCNKTIEFYRHWQAGRYRFFGKHEQDVFNLIKHDMTDRLGVAIQFLDTTYISGFCQLSRDLNKICTLHANCCVGLGAKLHDLRNVLDVWRNYTAAPVPDKRAGKFQWKVPGICIH

SEQ ID NO: 66561 - DNA, 1531 bp, Triticum aestivum
  misc_feature (1)..(1531): Ceres Seq. ID no. 13663419
gcaactgtaccgactgcaacacagtttcttcagtaagcatgagaactatgacccatcgtctccccccagctgtggctgcggtggccgtggtcttggtggcgctgacgtgcctccaccggccagctgccgcgagcggccatgccgcggaccgcatagcccggctgcctgggcagccggcggtggacttcgacatgtactccggctacatcaccgtggacgagggcgccggacggtcgctgttctatctgctgcaagaggcgccggaggacgcccagccggcgccgctcgtgctgtggctcaacggcggccccggctgctcctccgtcgcctacggcgcgtcggaggagctcggcgcgttccgcgtcaagccccgcggcgccggcctcgtcctcaacgagtaccgctggaacaaagtggccaacgtgctgttcttggactcgccggccggcgtcgggttctcctacaccaacacctcttccgacatctacacctccggcgacaacagaacggcgcacgactcgtacgccttcctggcgaaatggttcgagaggttcccgcactacaagtaccgcgacttctacatcgccggcgagagctacgccgggcactacgtcccggagctgtcccagctggtccaccggagcaaaaaccccgtcatcaacctcaagggcttcatggtcgggaacggcctcatcgacgactaccacgactacgtgggcaccttcgagttctggtggaaccacgggatcgtctccgacgacacctaccgccgcctcaaggaggcctgcctccacgactccttcatccacccctcgccggcgtgcgacgccgccacggacgtcgccacggcggagcagggcaacatcgacatgtacagcctctacacgcccgtctgcaacatcacgtcgtcctcgtcgttggcggcgagccggccccggcccagggggcgctacccatggctgaccgggtcctacgacccgtgcacggaacggtactcgacggcgtactacaaccggcgggacgtgcagatggctctccacgccaacgtcaccggcgccatgaactacacgtgggcgacctgcagcgacaccattaatacccactggcatgatgctccgaggtccatgcttcccatttacagggagcttattgcagcgggcctcaggatttgggtgttcagcggtgacacggacgcggtagtccccttgacagcaacaagatactccatcggcggtctgggtcttccaactactaccagttggtacccttggtatgacgaccaggaggtcggcggttggagccaggtgtacaagggccttacactggtgtccgtcagaggtgccggccatgaggttcccctgcatcgcccgcggcaagcgctcgtactgtttcggtacttcctgcagggcgagcccatgccaggccagaccaagaatgcgacggtggcttagcaacaaagggatggaagtcaaatagtaatttcgatgtgagaaaacaagagtgatcatcaataaagcaatagatgcttctt

SEQ ID NO: 66562 - protein, 482 aa, Triticum aestivum
  peptide (1)..(482): Ceres Seq. ID no. 13663420
NCTDCNTVSSVSMRTMTHRLPPAVAAVAVVLVALTCLHRPAAASGHAADRIARLPGQPAVDFDMYSGYITVDEGAGRSLFYLLQEAPEDAQPAPLVLWLNGGPGCSSVAYGASEELGAFRVKPRGAGLVLNEYRWNKVANVLFLDSPAGVGFSYTNTSSDIYTSGDNRTAHDSYAFLAKWFERFPHYKYRDFYIAGESYAGHYVPELSQLVHRSKNPVINLKGFMVGNGLIDDYHDYVGTFEFWWNHGIVSDDTYRRLKEACLHDSFIHPSPACDAATDVATAEQGNIDMYSLYTPVCNITSSSSLAASRPRPRGRYPWLTGSYDPCTERYSTAYYNRRDVQMALHANVTGAMNYTWATCSDTINTHWHDAPRSMLPIYRELIAAGLRIWVFSGDTDAVVPLTATRYSIGGLGLPTTTSWYPWYDDQEVGGWSQVYKGLTLVSVRGAGHEVPLHRPRQALVLFRYFLQGEPMPGQTKNATVA

SEQ ID NO: 66563 - protein, 470 aa, Triticum aestivum
  peptide (1)..(470): Ceres Seq. ID no. 13663421
MRTMTHRLPPAVAAVAVVLVALTCLHRPAAASGHAADRIARLPGQPAVDFDMYSGYITVDEGAGRSLFYLLQEAPEDAQPAPLVLWLNGGPGCSSVAYGASEELGAFRVKPRGAGLVLNEYRWNKVANVLFLDSPAGVGFSYTNTSSDIYTSGDNRTAHDSYAFLAKWFERFPHYKYRDFYIAGESYAGHYVPELSQLVHRSKNPVINLKGFMVGNGLIDDYHDYVGTFEFWWNHGIVSDDTYRRLKEACLHDSFIHPSPACDAATDVATAEQGNIDMYSLYTPVCNITSSSSLAASRPRPRGRYPWLTGSYDPCTERYSTAYYNRRDVQMALHANVTGAMNYTWATCSDTINTHWHDAPRSMLPIYRELIAAGLRIWVFSGDTDAVVPLTATRYSIGGLGLPTTTSWYPWYDDQEVGGWSQVYKGLTLVSVRGAGHEVPLHRPRQALVLFRYFLQGEPMPGQTKNATVA

SEQ ID NO: 66564 - protein, 467 aa, Triticum aestivum
  peptide (1)..(467): Ceres Seq. ID no. 13663422
MTHRLPPAVAAVAVVLVALTCLHRPAAASGHAADRIARLPGQPAVDFDMYSGYITVDEGAGRSLFYLLQEAPEDAQPAPLVLWLNGGPGCSSVAYGASEELGAFRVKPRGAGLVLNEYRWNKVANVLFLDSPAGVGFSYTNTSSDIYTSGDNRTAHDSYAFLAKWFERFPHYKYRDFYIAGESYAGHYVPELSQLVHRSKNPVINLKGFMVGNGLIDDYHDYVGTFEFWWNHGIVSDDTYRRLKEACLHDSFIHPSPACDAATDVATAEQGNIDMYSLYTPVCNITSSSSLAASRPRPRGRYPWLTGSYDPCTERYSTAYYNRRDVQMALHANVTGAMNYTWATCSDTINTHWHDAPRSMLPIYRELIAAGLRIWVFSGDTDAVVPLTATRYSIGGLGLPTTTSWYPWYDDQEVGGWSQVYKGLTLVSVRGAGHEVPLHRPRQALVLFRYFLQGEPMPGQTKNATVA
